United States Patent Application Publication US 2013/0332133 A1 - sequence listing, part 3

SEQ ID NO: 65798 - protein, 9 aa, Artificial sequence
  Protein classification predicting sequence
TYPLIGNYG

SEQ ID NO: 65799 - protein, 14 aa, Artificial sequence
  Protein classification predicting sequence
TYPLIGNYGINRDD

SEQ ID NO: 65800 - protein, 15 aa, Artificial sequence
  Protein classification predicting sequence
DFGMKHGILRELNKR

SEQ ID NO: 65801 - protein, 20 aa, Artificial sequence
  Protein classification predicting sequence
HPDGVMLSNGPGDPKDVPEA

SEQ ID NO: 65802 - protein, 15 aa, Artificial sequence
  Protein classification predicting sequence
MLSNGPGDPKDVPEA

SEQ ID NO: 65803 - protein, 7 aa, Artificial sequence
  Protein classification predicting sequence
MLSNGPG

SEQ ID NO: 65804 - protein, 12 aa, Artificial sequence
  Protein classification predicting sequence
PAFTVQYHPEAS

SEQ ID NO: 65805 - protein, 24 aa, Artificial sequence
  Protein classification predicting sequence
ATGKVAITSQNHGYAVEEESVENT

SEQ ID NO: 65806 - protein, 9 aa, Artificial sequence
  Protein classification predicting sequence
LSNGPGNPE

SEQ ID NO: 65807 - protein, 5 aa, Artificial sequence
  Protein classification predicting sequence
TAQNH

SEQ ID NO: 65808 - protein, 9 aa, Artificial sequence
  Protein classification predicting sequence
CDVIVVPYN

SEQ ID NO: 65809 - protein, 11 aa, Artificial sequence
  Protein classification predicting sequence
EGLKHKTLPAF

SEQ ID NO: 65810 - protein, 6 aa, Artificial sequence
  Protein classification predicting sequence
IDTRKL

SEQ ID NO: 65811 - protein, 8 aa, Artificial sequence
  Protein classification predicting sequence
FGICFGNQ

SEQ ID NO: 65812 - protein, 7 aa, Artificial sequence
  Protein classification predicting sequence
NQPVKDL

SEQ ID NO: 65813 - protein, 6 aa, Artificial sequence
  Protein classification predicting sequence
KRNILR

SEQ ID NO: 65814 - protein, 8 aa, Artificial sequence
  Protein classification predicting sequence
TSAEDILA

SEQ ID NO: 65815 - protein, 6 aa, Artificial sequence
  Protein classification predicting sequence
PVFSVQ

SEQ ID NO: 65816 - protein, 8 aa, Artificial sequence
  Protein classification predicting sequence
THVSLFDG

SEQ ID NO: 65817 - protein, 8 aa, Artificial sequence
  Protein classification predicting sequence
FHGRAIGA

SEQ ID NO: 65818 - protein, 6 aa, Artificial sequence
  Protein classification predicting sequence
LTVVPA

SEQ ID NO: 65819 - protein, 6 aa, Artificial sequence
  Protein classification predicting sequence
NHPVKD

SEQ ID NO: 65820 - protein, 11 aa, Artificial sequence
  Protein classification predicting sequence
PGPHDASYLFD

SEQ ID NO: 65821 - protein, 6 aa, Artificial sequence
  Protein classification predicting sequence
LFDHFI

SEQ ID NO: 65822 - protein, 7 aa, Artificial sequence
  Protein classification predicting sequence
GEIVFNT

SEQ ID NO: 65823 - protein, 8 aa, Artificial sequence
  Protein classification predicting sequence
LSNGPGDP

SEQ ID NO: 65824 - protein, 7 aa, Artificial sequence
  Protein classification predicting sequence
GAKTVKM

SEQ ID NO: 65825 - protein, 11 aa, Artificial sequence
  Protein classification predicting sequence
GHHGANHPVKD

SEQ ID NO: 65826 - protein, 14 aa, Artificial sequence
  Protein classification predicting sequence
TTGKVEIVSMNHGF

SEQ ID NO: 65827 - protein, 7 aa, Artificial sequence
  Protein classification predicting sequence
GEVVFNT

SEQ ID NO: 65828 - protein, 8 aa, Artificial sequence
  Protein classification predicting sequence
GVDTRSIT

SEQ ID NO: 65829 - protein, 7 aa, Artificial sequence
  Protein classification predicting sequence
FSVQFHP

SEQ ID NO: 65830 - protein, 23 aa, Artificial sequence
  Protein classification predicting sequence
TDPSYHRQIVVATAPQIGNTGWN

SEQ ID NO: 65831 - protein, 7 aa, Artificial sequence
  Protein classification predicting sequence
GLVIRDL

SEQ ID NO: 65832 - protein, 10 aa, Artificial sequence
  Protein classification predicting sequence
GIKTNTPRNF

SEQ ID NO: 65833 - protein, 8 aa, Artificial sequence
  Protein classification predicting sequence
SVQYHPEA

SEQ ID NO: 65834 - protein, 13 aa, Artificial sequence
  Protein classification predicting sequence
FGICFGNQILGRA

SEQ ID NO: 65835 - protein, 6 aa, Artificial sequence
  Protein classification predicting sequence
SYNGQI

SEQ ID NO: 65836 - protein, 6 aa, Artificial sequence
  Protein classification predicting sequence
QGSWTL

SEQ ID NO: 65837 - protein, 8 aa, Artificial sequence
  Protein classification predicting sequence
HVVAYDFG

SEQ ID NO: 65838 - protein, 5 aa, Artificial sequence
  Protein classification predicting sequence
NHGFA

SEQ ID NO: 65839 - protein, 39 aa, Artificial sequence
  Protein classification predicting sequence
AVGEVVFNTSMTGYQEILTDPSYSRQIVTLTYPHIGNVG

SEQ ID NO: 65840 - protein, 7 aa, Artificial sequence
  Protein classification predicting sequence
PHIGNVG

SEQ ID NO: 65841 - protein, 14 aa, Artificial sequence
  Protein classification predicting sequence
VMITAQNHGFAVDE

SEQ ID NO: 65842 - protein, 6 aa, Artificial sequence
  Protein classification predicting sequence
PDGVML

SEQ ID NO: 65843 - protein, 6 aa, Artificial sequence
  Protein classification predicting sequence
NGPGDP

SEQ ID NO: 65844 - protein, 6 aa, Artificial sequence
  Protein classification predicting sequence
PAILVL

SEQ ID NO: 65845 - protein, 8 aa, Artificial sequence
  Protein classification predicting sequence
AIADIDTR

SEQ ID NO: 65846 - protein, 10 aa, Artificial sequence
  Protein classification predicting sequence
AFSFQGHPEA

SEQ ID NO: 65847 - protein, 8 aa, Artificial sequence
  Protein classification predicting sequence
DGSVFHGT

SEQ ID NO: 65848 - protein, 12 aa, Artificial sequence
  Protein classification predicting sequence
QIVTLTYPHIGN

SEQ ID NO: 65849 - protein, 11 aa, Artificial sequence
  Protein classification predicting sequence
FPGLKGMDLAK

SEQ ID NO: 65850 - protein, 11 aa, Artificial sequence
  Protein classification predicting sequence
HHGANHPVQDL

SEQ ID NO: 65851 - protein, 6 aa, Artificial sequence
  Protein classification predicting sequence
SLFDGT

SEQ ID NO: 65852 - protein, 14 aa, Artificial sequence
  Protein classification predicting sequence
SLFDGTLQGIERTD

SEQ ID NO: 65853 - protein, 14 aa, Artificial sequence
  Protein classification predicting sequence
AFSFQGHPEASPGP

SEQ ID NO: 65854 - protein, 9 aa, Artificial sequence
  Protein classification predicting sequence
DFGAKRNIL

SEQ ID NO: 65855 - protein, 11 aa, Artificial sequence
  Protein classification predicting sequence
VFNTGMTGYQE

SEQ ID NO: 65856 - protein, 28 aa, Artificial sequence
  Protein classification predicting sequence
VFNTGMTGYQESITDQSYNGQILTFTYP

SEQ ID NO: 65857 - protein, 10 aa, Artificial sequence
  Protein classification predicting sequence
VGNYGVNRDD

SEQ ID NO: 65858 - protein, 6 aa, Artificial sequence
  Protein classification predicting sequence
HGTMKA

SEQ ID NO: 65859 - protein, 12 aa, Artificial sequence
  Protein classification predicting sequence
VDFGLKHSILRE

SEQ ID NO: 65860 - protein, 6 aa, Artificial sequence
  Protein classification predicting sequence
VVPYNT

SEQ ID NO: 65861 - protein, 8 aa, Artificial sequence
  Protein classification predicting sequence
DVPEAIEM

SEQ ID NO: 65862 - protein, 10 aa, Artificial sequence
  Protein classification predicting sequence
QGKIPIFGIC

SEQ ID NO: 65863 - protein, 12 aa, Artificial sequence
  Protein classification predicting sequence
FGHRGFNHAVRE

SEQ ID NO: 65864 - protein, 16 aa, Artificial sequence
  Protein classification predicting sequence
ATGRIDFTSQNHGYAV

SEQ ID NO: 65865 - protein, 6 aa, Artificial sequence
  Protein classification predicting sequence
VFNTGM

SEQ ID NO: 65866 - protein, 13 aa, Artificial sequence
  Protein classification predicting sequence
GYQESITDQSYNG

SEQ ID NO: 65867 - protein, 6 aa, Artificial sequence
  Protein classification predicting sequence
PYNTTA

SEQ ID NO: 65868 - protein, 10 aa, Artificial sequence
  Protein classification predicting sequence
NGPGDPKDVP

SEQ ID NO: 65869 - protein, 22 aa, Artificial sequence
  Protein classification predicting sequence
PLFGICLGHQLFALANGADTFK

SEQ ID NO: 65870 - protein, 8 aa, Artificial sequence
  Protein classification predicting sequence
FGHRGFNH

SEQ ID NO: 65871 - protein, 9 aa, Artificial sequence
  Protein classification predicting sequence
TSQNHGYAV

SEQ ID NO: 65872 - protein, 8 aa, Artificial sequence
  Protein classification predicting sequence
ITHEEIND

SEQ ID NO: 65873 - protein, 8 aa, Artificial sequence
  Protein classification predicting sequence
AFSVQYHP

SEQ ID NO: 65874 - protein, 6 aa, Artificial sequence
  Protein classification predicting sequence
PGPHDA

SEQ ID NO: 65875 - protein, 6 aa, Artificial sequence
  Protein classification predicting sequence
VFNTSM

SEQ ID NO: 65876 - protein, 11 aa, Artificial sequence
  Protein classification predicting sequence
GYQEILTDPSY

SEQ ID NO: 65877 - protein, 6 aa, Artificial sequence
  Protein classification predicting sequence
IGNYGI

SEQ ID NO: 65878 - protein, 8 aa, Artificial sequence
  Protein classification predicting sequence
ILRELNKR

SEQ ID NO: 65879 - protein, 15 aa, Artificial sequence
  Protein classification predicting sequence
PLFGICLGHQLFALA

SEQ ID NO: 65880 - protein, 13 aa, Artificial sequence
  Protein classification predicting sequence
VQYHPEANPGPSD

SEQ ID NO: 65881 - protein, 7 aa, Artificial sequence
  Protein classification predicting sequence
AEEILAM

SEQ ID NO: 65882 - protein, 7 aa, Artificial sequence
  Protein classification predicting sequence
LILEDGT

SEQ ID NO: 65883 - protein, 6 aa, Artificial sequence
  Protein classification predicting sequence
QFHPEA

SEQ ID NO: 65884 - protein, 5 aa, Artificial sequence
  Protein classification predicting sequence
GNYGI

SEQ ID NO: 65885 - protein, 9 aa, Artificial sequence
  Protein classification predicting sequence
PGIAGVDTR

SEQ ID NO: 65886 - protein, 13 aa, Artificial sequence
  Protein classification predicting sequence
DTFKLKFGHRGAN

SEQ ID NO: 65887 - protein, 6 aa, Artificial sequence
  Protein classification predicting sequence
PAFSVQ

SEQ ID NO: 65888 - protein, 6 aa, Artificial sequence
  Protein classification predicting sequence
TGMTGY

SEQ ID NO: 65889 - protein, 6 aa, Artificial sequence
  Protein classification predicting sequence
DTRALT

SEQ ID NO: 65890 - protein, 9 aa, Artificial sequence
  Protein classification predicting sequence
QQSMLGADL

SEQ ID NO: 65891 - protein, 7 aa, Artificial sequence
  Protein classification predicting sequence
PLIGNYG

SEQ ID NO: 65892 - protein, 16 aa, Artificial sequence
  Protein classification predicting sequence
TYPLIGNYGINRDDFE

SEQ ID NO: 65893 - protein, 6 aa, Artificial sequence
  Protein classification predicting sequence
PDGIML

SEQ ID NO: 65894 - protein, 8 aa, Artificial sequence
  Protein classification predicting sequence
KMKFGHRG

SEQ ID NO: 65895 - protein, 15 aa, Artificial sequence
  Protein classification predicting sequence
LVLADGSVFHGTSIG

SEQ ID NO: 65896 - protein, 16 aa, Artificial sequence
  Protein classification predicting sequence
LVLEDGTQFHGRAIGA

SEQ ID NO: 65897 - protein, 10 aa, Artificial sequence
  Protein classification predicting sequence
GMDLAKEVTT

SEQ ID NO: 65898 - protein, 14 aa, Artificial sequence
  Protein classification predicting sequence
NPDGIFLSNGPGDP

SEQ ID NO: 65899 - protein, 38 aa, Artificial sequence
  Protein classification predicting sequence
NLRVTHKSLFDGTLQGIHRTDKPAFSFQGHPEASPGPH

SEQ ID NO: 65900 - protein, 9 aa, Artificial sequence
  Protein classification predicting sequence
HPEASPGPH

SEQ ID NO: 65901 - protein, 9 aa, Artificial sequence
  Protein classification predicting sequence
LFDHFIELI

SEQ ID NO: 65902 - protein, 15 aa, Artificial sequence
  Protein classification predicting sequence
QIVTLTYPHIGNTGT

SEQ ID NO: 65903 - protein, 9 aa, Artificial sequence
  Protein classification predicting sequence
GLVIRDLPL

SEQ ID NO: 65904 - protein, 15 aa, Artificial sequence
  Protein classification predicting sequence
SLSDYLKSQNIVGIA

SEQ ID NO: 65905 - protein, 10 aa, Artificial sequence
  Protein classification predicting sequence
RGCRLTVVPA

SEQ ID NO: 65906 - protein, 14 aa, Artificial sequence
  Protein classification predicting sequence
NPDGVFLSNGPGDP

SEQ ID NO: 65907 - protein, 6 aa, Artificial sequence
  Protein classification predicting sequence
SPGPHD

SEQ ID NO: 65908 - protein, 5 aa, Artificial sequence
  Protein classification predicting sequence
QNGCI

SEQ ID NO: 65909 - protein, 10 aa, Artificial sequence
  Protein classification predicting sequence
ELPYHVVAYD

SEQ ID NO: 65910 - protein, 9 aa, Artificial sequence
  Protein classification predicting sequence
VAIAGIDTR

SEQ ID NO: 65911 - protein, 7 aa, Artificial sequence
  Protein classification predicting sequence
TVVPAQT

SEQ ID NO: 65912 - protein, 13 aa, Artificial sequence
  Protein classification predicting sequence
FGICLGHQLLALA

SEQ ID NO: 65913 - protein, 10 aa, Artificial sequence
  Protein classification predicting sequence
TLQGIELTDK

SEQ ID NO: 65914 - protein, 15 aa, Artificial sequence
  Protein classification predicting sequence
PAILALADGSIFRGE

SEQ ID NO: 65915 - protein, 9 aa, Artificial sequence
  Protein classification predicting sequence
QIVTLTYPH

SEQ ID NO: 65916 - protein, 9 aa, Artificial sequence
  Protein classification predicting sequence
NGPGDPEPC

SEQ ID NO: 65917 - protein, 16 aa, Artificial sequence
  Protein classification predicting sequence
FGICLGHQLLALASGA

SEQ ID NO: 65918 - protein, 6 aa, Artificial sequence
  Protein classification predicting sequence
NHGYAV

SEQ ID NO: 65919 - protein, 6 aa, Artificial sequence
  Protein classification predicting sequence
WVFDKF

SEQ ID NO: 65920 - protein, 6 aa, Artificial sequence
  Protein classification predicting sequence
TGYQEI

SEQ ID NO: 65921 - protein, 12 aa, Artificial sequence
  Protein classification predicting sequence
TGYQEILTDPSY

SEQ ID NO: 65922 - protein, 11 aa, Artificial sequence
  Protein classification predicting sequence
NILRMLAERGC

SEQ ID NO: 65923 - protein, 9 aa, Artificial sequence
  Protein classification predicting sequence
GHHGANHPV

SEQ ID NO: 65924 - protein, 6 aa, Artificial sequence
  Protein classification predicting sequence
ITSQNH

SEQ ID NO: 65925 - protein, 11 aa, Artificial sequence
  Protein classification predicting sequence
FQGHPEASPGP

SEQ ID NO: 65926 - protein, 7 aa, Artificial sequence
  Protein classification predicting sequence
NHGFAVD

SEQ ID NO: 65927 - protein, 25 aa, Artificial sequence
  Protein classification predicting sequence
PVFSVQHHPEASPGPQDSHYLFRRF

SEQ ID NO: 65928 - protein, 8 aa, Artificial sequence
  Protein classification predicting sequence
NAVIAHDP

SEQ ID NO: 65929 - protein, 7 aa, Artificial sequence
  Protein classification predicting sequence
GAQNGCI

SEQ ID NO: 65930 - protein, 8 aa, Artificial sequence
  Protein classification predicting sequence
KMKFGHHG

SEQ ID NO: 65931 - protein, 69 aa, Artificial sequence
  Protein classification predicting sequence
ADEESSQVHAQGLVIRDLPLIASNFRNTEDLSSYLKRHNIVAIADIDTRKLTRLLREKGAQNGCIIAGD

SEQ ID NO: 65932 - protein, 6 aa, Artificial sequence
  Protein classification predicting sequence
PCDYAI

SEQ ID NO: 65933 - protein, 37 aa, Artificial sequence
  Protein classification predicting sequence
VLKMNPDGIFLSNGPGDPAPCDYAITAIQKFLETDIP

SEQ ID NO: 65934 - protein, 8 aa, Artificial sequence
  Protein classification predicting sequence
VGEVVFNT

SEQ ID NO: 65935 - protein, 21 aa, Artificial sequence
  Protein classification predicting sequence
VGIADIDTRKLTRILREKGAQ

SEQ ID NO: 65936 - protein, 16 aa, Artificial sequence
  Protein classification predicting sequence
IDTRKLTRILREKGAQ

SEQ ID NO: 65937 - protein, 7 aa, Artificial sequence
  Protein classification predicting sequence
LREKGAQ

SEQ ID NO: 65938 - protein, 6 aa, Artificial sequence
  Protein classification predicting sequence
GCIMAG

SEQ ID NO: 65939 - protein, 9 aa, Artificial sequence
  Protein classification predicting sequence
VVAYDYGVK

SEQ ID NO: 65940 - protein, 11 aa, Artificial sequence
  Protein classification predicting sequence
NILRMLVDRGC

SEQ ID NO: 65941 - protein, 10 aa, Artificial sequence
  Protein classification predicting sequence
RGCDVTVVPA

SEQ ID NO: 65942 - protein, 6 aa, Artificial sequence
  Protein classification predicting sequence
DEATLP

SEQ ID NO: 65943 - protein, 18 aa, Artificial sequence
  Protein classification predicting sequence
TDKPAFSFQGHPEASPGP

SEQ ID NO: 65944 - protein, 9 aa, Artificial sequence
  Protein classification predicting sequence
YEGYRLGSD

SEQ ID NO: 65945 - protein, 46 aa, Artificial sequence
  Protein classification predicting sequence
GEIVFNTAMTGYQETISDPSYTGQIITFTYPLIGNYGINRDDFESL

SEQ ID NO: 65946 - protein, 6 aa, Artificial sequence
  Protein classification predicting sequence
HPSNFR

SEQ ID NO: 65947 - protein, 12 aa, Artificial sequence
  Protein classification predicting sequence
GVDTRSITRKIR

SEQ ID NO: 65948 - protein, 11 aa, Artificial sequence
  Protein classification predicting sequence
VSTKTPYVSTG

SEQ ID NO: 65949 - protein, 13 aa, Artificial sequence
  Protein classification predicting sequence
DFGKKQNIVRELN

SEQ ID NO: 65950 - protein, 7 aa, Artificial sequence
  Protein classification predicting sequence
ALDMIRG

SEQ ID NO: 65951 - protein, 24 aa, Artificial sequence
  Protein classification predicting sequence
GILGKIPFFGICLGHQLFALSQGA

SEQ ID NO: 65952 - protein, 7 aa, Artificial sequence
  Protein classification predicting sequence
GANHPVK

SEQ ID NO: 65953 - protein, 10 aa, Artificial sequence
  Protein classification predicting sequence
ALNDGTVEGL

SEQ ID NO: 65954 - protein, 11 aa, Artificial sequence
  Protein classification predicting sequence
PGPSDSNYLFD

SEQ ID NO: 65955 - protein, 6 aa, Artificial sequence
  Protein classification predicting sequence
YLFDEF

SEQ ID NO: 65956 - protein, 8 aa, Artificial sequence
  Protein classification predicting sequence
TGMTGYQE

SEQ ID NO: 65957 - protein, 19 aa, Artificial sequence
  Protein classification predicting sequence
TGMTGYQESITDQSYNGQI

SEQ ID NO: 65958 - protein, 18 aa, Artificial sequence
  Protein classification predicting sequence
GKNIVLVDFGLKHSILRE

SEQ ID NO: 65959 - protein, 14 aa, Artificial sequence
  Protein classification predicting sequence
KMTFGHRGFNHAVR

SEQ ID NO: 65960 - protein, 6 aa, Artificial sequence
  Protein classification predicting sequence
NPDGVF

SEQ ID NO: 65961 - protein, 14 aa, Artificial sequence
  Protein classification predicting sequence
KRLLILEDGTIFEG

SEQ ID NO: 65962 - protein, 9 aa, Artificial sequence
  Protein classification predicting sequence
GNYGINRDD

SEQ ID NO: 65963 - protein, 9 aa, Artificial sequence
  Protein classification predicting sequence
NWRKQMTLD

SEQ ID NO: 65964 - protein, 17 aa, Artificial sequence
  Protein classification predicting sequence
IPGISGIDTRALTKIIR

SEQ ID NO: 65965 - protein, 14 aa, Artificial sequence
  Protein classification predicting sequence
IEQVSTKTAYPAPG

SEQ ID NO: 65966 - protein, 11 aa, Artificial sequence
  Protein classification predicting sequence
DVPEALEMIRG

SEQ ID NO: 65967 - protein, 11 aa, Artificial sequence
  Protein classification predicting sequence
DFTSQNHGYAV

SEQ ID NO: 65968 - protein, 12 aa, Artificial sequence
  Protein classification predicting sequence
ILVLEDGTVFEG

SEQ ID NO: 65969 - protein, 6 aa, Artificial sequence
  Protein classification predicting sequence
TFTYPL

SEQ ID NO: 65970 - protein, 7 aa, Artificial sequence
  Protein classification predicting sequence
TTAEEIL

SEQ ID NO: 65971 - protein, 6 aa, Artificial sequence
  Protein classification predicting sequence
GIDTRA

SEQ ID NO: 65972 - protein, 6 aa, Artificial sequence
  Protein classification predicting sequence
DGTVEG

SEQ ID NO: 65973 - protein, 6 aa, Artificial sequence
  Protein classification predicting sequence
VDTRSI

SEQ ID NO: 65974 - protein, 6 aa, Artificial sequence
  Protein classification predicting sequence
NGPGNP

SEQ ID NO: 65975 - protein, 10 aa, Artificial sequence
  Protein classification predicting sequence
DTRALTRHLR

SEQ ID NO: 65976 - protein, 16 aa, Artificial sequence
  Protein classification predicting sequence
GHRGANHPVKELATGR

SEQ ID NO: 65977 - protein, 9 aa, Artificial sequence
  Protein classification predicting sequence
GNTGTTPED

SEQ ID NO: 65978 - protein, 6 aa, Artificial sequence
  Protein classification predicting sequence
KMKFGH

SEQ ID NO: 65979 - protein, 14 aa, Artificial sequence
  Protein classification predicting sequence
ITSQNHGYAVEEES

SEQ ID NO: 65980 - protein, 6 aa, Artificial sequence
  Protein classification predicting sequence
NDGTVE

SEQ ID NO: 65981 - protein, 11 aa, Artificial sequence
  Protein classification predicting sequence
LREKGAQNGCI

SEQ ID NO: 65982 - protein, 20 aa, Artificial sequence
  Protein classification predicting sequence
ALLVLEDGTVFRGVSIGADG

SEQ ID NO: 65983 - protein, 18 aa, Artificial sequence
  Protein classification predicting sequence
HAQGLVIRDLPLIASNFR

SEQ ID NO: 65984 - protein, 16 aa, Artificial sequence
  Protein classification predicting sequence
QQIVTLTYPHIGNTGT

SEQ ID NO: 65985 - protein, 9 aa, Artificial sequence
  Protein classification predicting sequence
FLSNGPGDP

SEQ ID NO: 65986 - protein, 7 aa, Artificial sequence
  Protein classification predicting sequence
TYPHIGN

SEQ ID NO: 65987 - protein, 8 aa, Artificial sequence
  Protein classification predicting sequence
FSFQGHPE

SEQ ID NO: 65988 - protein, 9 aa, Artificial sequence
  Protein classification predicting sequence
IDTRKLTRL

SEQ ID NO: 65989 - protein, 7 aa, Artificial sequence
  Protein classification predicting sequence
GAKTLKM

SEQ ID NO: 65990 - protein, 14 aa, Artificial sequence
  Protein classification predicting sequence
VMITSQNHGFAVDE

SEQ ID NO: 65991 - protein, 9 aa, Artificial sequence
  Protein classification predicting sequence
LREKGAQNG

SEQ ID NO: 65992 - protein, 9 aa, Artificial sequence
  Protein classification predicting sequence
DAALALEKA

SEQ ID NO: 65993 - protein, 15 aa, Artificial sequence
  Protein classification predicting sequence
FPGLKGMDLAKEVTT

SEQ ID NO: 65994 - protein, 6 aa, Artificial sequence
  Protein classification predicting sequence
HVVAYD

SEQ ID NO: 65995 - protein, 6 aa, Artificial sequence
  Protein classification predicting sequence
TAMTGY

SEQ ID NO: 65996 - protein, 6 aa, Artificial sequence
  Protein classification predicting sequence
KMHQGH

SEQ ID NO: 65997 - protein, 6 aa, Artificial sequence
  Protein classification predicting sequence
NHGFAV

SEQ ID NO: 65998 - protein, 6 aa, Artificial sequence
  Protein classification predicting sequence
VTVVPY

SEQ ID NO: 65999 - protein, 6 aa, Artificial sequence
  Protein classification predicting sequence
GANHPV

SEQ ID NO: 66000 - protein, 9 aa, Artificial sequence
  Protein classification predicting sequence
PLLIATYNP

SEQ ID NO: 66001 - protein, 25 aa, Artificial sequence
  Protein classification predicting sequence
TVFQPGLLAEAHRGVLYVDEINLLD

SEQ ID NO: 66002 - protein, 7 aa, Artificial sequence
  Protein classification predicting sequence
HLLDRIA

SEQ ID NO: 66003 - protein, 15 aa, Artificial sequence
  Protein classification predicting sequence
IFSEDRGRYIKPMLP

SEQ ID NO: 66004 - protein, 8 aa, Artificial sequence
  Protein classification predicting sequence
AVDATLRA

SEQ ID NO: 66005 - protein, 9 aa, Artificial sequence
  Protein classification predicting sequence
RKAGALVIF

SEQ ID NO: 66006 - protein, 7 aa, Artificial sequence
  Protein classification predicting sequence
AEVLLPP

SEQ ID NO: 66007 - protein, 8 aa, Artificial sequence
  Protein classification predicting sequence
IVAITDGR

SEQ ID NO: 66008 - protein, 7 aa, Artificial sequence
  Protein classification predicting sequence
LLVIDTE

SEQ ID NO: 66009 - protein, 7 aa, Artificial sequence
  Protein classification predicting sequence
TAIVGQE

SEQ ID NO: 66010 - protein, 7 aa, Artificial sequence
  Protein classification predicting sequence
AHRGVLY

SEQ ID NO: 66011 - protein, 9 aa, Artificial sequence
  Protein classification predicting sequence
LPCGGGSPL

SEQ ID NO: 66012 - protein, 7 aa, Artificial sequence
  Protein classification predicting sequence
KFVSTGF

SEQ ID NO: 66013 - protein, 24 aa, Artificial sequence
  Protein classification predicting sequence
LNVIDPKIGGVMIMGDRGTGKSTT

SEQ ID NO: 66014 - protein, 17 aa, Artificial sequence
  Protein classification predicting sequence
CLRHRLRKDPLESIDSG

SEQ ID NO: 66015 - protein, 10 aa, Artificial sequence
  Protein classification predicting sequence
AIVGQDEMKL

SEQ ID NO: 66016 - protein, 7 aa, Artificial sequence
  Protein classification predicting sequence
DPFNSDP

SEQ ID NO: 66017 - protein, 12 aa, Artificial sequence
  Protein classification predicting sequence
CSELDVDGLRGD

SEQ ID NO: 66018 - protein, 10 aa, Artificial sequence
  Protein classification predicting sequence
LYVDEINLLD

SEQ ID NO: 66019 - protein, 9 aa, Artificial sequence
  Protein classification predicting sequence
NLLDDHLVD

SEQ ID NO: 66020 - protein, 20 aa, Artificial sequence
  Protein classification predicting sequence
ANRGILYVDEVNLLDDHLVD

SEQ ID NO: 66021 - protein, 15 aa, Artificial sequence
  Protein classification predicting sequence
IMGDRGTGKSTTIRA

SEQ ID NO: 66022 - protein, 23 aa, Artificial sequence
  Protein classification predicting sequence
LVGSGNPEEGELRPQLLDRFGMH

SEQ ID NO: 66023 - protein, 24 aa, Artificial sequence
  Protein classification predicting sequence
LVGSGNPEEGELRPQLLDRFGMHA

SEQ ID NO: 66024 - protein, 8 aa, Artificial sequence
  Protein classification predicting sequence
LLDSAASG

SEQ ID NO: 66025 - protein, 7 aa, Artificial sequence
  Protein classification predicting sequence
EINTLPG

SEQ ID NO: 66026 - protein, 6 aa, Artificial sequence
  Protein classification predicting sequence
LYGGRS

SEQ ID NO: 66027 - protein, 9 aa, Artificial sequence
  Protein classification predicting sequence
MDKDVAKRL

SEQ ID NO: 66028 - protein, 6 aa, Artificial sequence
  Protein classification predicting sequence
GSSVGI

SEQ ID NO: 66029 - protein, 6 aa, Artificial sequence
  Protein classification predicting sequence
GGRSAE

SEQ ID NO: 66030 - protein, 6 aa, Artificial sequence
  Protein classification predicting sequence
FPVLHG

SEQ ID NO: 66031 - protein, 6 aa, Artificial sequence
  Protein classification predicting sequence
FVKPAN

SEQ ID NO: 66032 - protein, 8 aa, Artificial sequence
  Protein classification predicting sequence
FYAYDTKY

SEQ ID NO: 66033 - protein, 7 aa, Artificial sequence
  Protein classification predicting sequence
NTLPGFT

SEQ ID NO: 66034 - protein, 7 aa, Artificial sequence
  Protein classification predicting sequence
VYARVDM

SEQ ID NO: 66035 - protein, 7 aa, Artificial sequence
  Protein classification predicting sequence
NTLPGMT

SEQ ID NO: 66036 - protein, 6 aa, Artificial sequence
  Protein classification predicting sequence
FIALHG

SEQ ID NO: 66037 - protein, 7 aa, Artificial sequence
  Protein classification predicting sequence
GSGVLAS

SEQ ID NO: 66038 - protein, 7 aa, Artificial sequence
  Protein classification predicting sequence
SLFPKSA

SEQ ID NO: 66039 - protein, 7 aa, Artificial sequence
  Protein classification predicting sequence
YDYQAKY

SEQ ID NO: 66040 - protein, 22 aa, Artificial sequence
  Protein classification predicting sequence
DVLASAACMDKDVTKRLLRDAG

SEQ ID NO: 66041 - protein, 6 aa, Artificial sequence
  Protein classification predicting sequence
FEFDHK

SEQ ID NO: 66042 - protein, 11 aa, Artificial sequence
  Protein classification predicting sequence
RFDVVLLGIDK

SEQ ID NO: 66043 - protein, 14 aa, Artificial sequence
  Protein classification predicting sequence
NADDPAHIALRPSA

SEQ ID NO: 66044 - protein, 9 aa, Artificial sequence
  Protein classification predicting sequence
SLAQVPGKH

SEQ ID NO: 66045 - protein, 19 aa, Artificial sequence
  Protein classification predicting sequence
KRLLRDAGLNIAPFITLTR

SEQ ID NO: 66046 - protein, 9 aa, Artificial sequence
  Protein classification predicting sequence
LAFEFDHKV

SEQ ID NO: 66047 - protein, 8 aa, Artificial sequence
  Protein classification predicting sequence
NDKIRAIA

SEQ ID NO: 66048 - protein, 19 aa, Artificial sequence
  Protein classification predicting sequence
QAYQTLGCAGMARVDVFLT

SEQ ID NO: 66049 - protein, 10 aa, Artificial sequence
  Protein classification predicting sequence
RLIELALERH

SEQ ID NO: 66050 - protein, 30 aa, Artificial sequence
  Protein classification predicting sequence
VEQGIKGREIECAVLGNDNPQASTCGEIVL

SEQ ID NO: 66051 - protein, 35 aa, Artificial sequence
  Protein classification predicting sequence
NEVVINEINTLPGFTNISMYPKLWQASGLGYTDLI

SEQ ID NO: 66052 - protein, 9 aa, Artificial sequence
  Protein classification predicting sequence
GIDKQGQWH

SEQ ID NO: 66053 - protein, 8 aa, Artificial sequence
  Protein classification predicting sequence
ANLPFVGS

SEQ ID NO: 66054 - protein, 7 aa, Artificial sequence
  Protein classification predicting sequence
GSSVGVS

SEQ ID NO: 66055 - protein, 12 aa, Artificial sequence
  Protein classification predicting sequence
TRLIELALERHA

SEQ ID NO: 66056 - protein, 7 aa, Artificial sequence
  Protein classification predicting sequence
GGKSAEH

SEQ ID NO: 66057 - protein, 14 aa, Artificial sequence
  Protein classification predicting sequence
NIPYVGNGVLASSA

SEQ ID NO: 66058 - protein, 13 aa, Artificial sequence
  Protein classification predicting sequence
FVKPANLGSSVGI

SEQ ID NO: 66059 - protein, 8 aa, Artificial sequence
  Protein classification predicting sequence
FYDYKSKY

SEQ ID NO: 66060 - protein, 22 aa, Artificial sequence
  Protein classification predicting sequence
YLLEANTSPGMTSHSLVPMAAR

SEQ ID NO: 66061 - protein, 9 aa, Artificial sequence
  Protein classification predicting sequence
HSLVPMAAR

SEQ ID NO: 66062 - protein, 9 aa, Artificial sequence
  Protein classification predicting sequence
GEDGTIQGL

SEQ ID NO: 66063 - protein, 9 aa, Artificial sequence
  Protein classification predicting sequence
LHGRGGEDG

SEQ ID NO: 66064 - protein, 8 aa, Artificial sequence
  Protein classification predicting sequence
HPMKPPYV

SEQ ID NO: 66065 - protein, 10 aa, Artificial sequence
  Protein classification predicting sequence
EGSSFGVVIV

SEQ ID NO: 66066 - protein, 11 aa, Artificial sequence
  Protein classification predicting sequence
GCRGVSRSDFR

SEQ ID NO: 66067 - protein, 26 aa, Artificial sequence
  Protein classification predicting sequence
MGFQKVFIALHGRGGEDGTLQGMLEL

SEQ ID NO: 66068 - protein, 13 aa, Artificial sequence
  Protein classification predicting sequence
IVKPSREGSSVGM

SEQ ID NO: 66069 - protein, 29 aa, Artificial sequence
  Protein classification predicting sequence
GTFYDYEAKYLSDETQYFCPAGLEASQEA

SEQ ID NO: 66070 - protein, 18 aa, Artificial sequence
  Protein classification predicting sequence
VSLNSGAAVLAGLREGGI

SEQ ID NO: 66071 - protein, 8 aa, Artificial sequence
  Protein classification predicting sequence
AVLLGGTS

SEQ ID NO: 66072 - protein, 7 aa, Artificial sequence
  Protein classification predicting sequence
SALSMDK

SEQ ID NO: 66073 - protein, 8 aa, Artificial sequence
  Protein classification predicting sequence
GLPVIVKP

SEQ ID NO: 66074 - protein, 10 aa, Artificial sequence
  Protein classification predicting sequence
PGMTSHSLVP

SEQ ID NO: 66075 - protein, 8 aa, Artificial sequence
  Protein classification predicting sequence
FYDYDAKY

SEQ ID NO: 66076 - protein, 8 aa, Artificial sequence
  Protein classification predicting sequence
VFIALHGR

SEQ ID NO: 66077 - protein, 10 aa, Artificial sequence
  Protein classification predicting sequence
VVKPVREGSS

SEQ ID NO: 66078 - protein, 7 aa, Artificial sequence
  Protein classification predicting sequence
EVNTLPG

SEQ ID NO: 66079 - protein, 8 aa, Artificial sequence
  Protein classification predicting sequence
SAEREVSL

SEQ ID NO: 66080 - protein, 14 aa, Artificial sequence
  Protein classification predicting sequence
VFPLLHGPNGEDGT

SEQ ID NO: 66081 - protein, 8 aa, Artificial sequence
  Protein classification predicting sequence
GEDGTIQG

SEQ ID NO: 66082 - protein, 15 aa, Artificial sequence
  Protein classification predicting sequence
FVKPANLGSSVGISK

SEQ ID NO: 66083 - protein, 8 aa, Artificial sequence
  Protein classification predicting sequence
FYDYKAKY

SEQ ID NO: 66084 - protein, 6 aa, Artificial sequence
  Protein classification predicting sequence
LAKERH

SEQ ID NO: 66085 - protein, 6 aa, Artificial sequence
  Protein classification predicting sequence
DYDAKY

SEQ ID NO: 66086 - protein, 6 aa, Artificial sequence
  Protein classification predicting sequence
PVLHGP

SEQ ID NO: 66087 - protein, 10 aa, Artificial sequence
  Protein classification predicting sequence
NEINTMPGFT

SEQ ID NO: 66088 - protein, 6 aa, Artificial sequence
  Protein classification predicting sequence
GMARVD

SEQ ID NO: 66089 - protein, 8 aa, Artificial sequence
  Protein classification predicting sequence
IQGILEYL

SEQ ID NO: 66090 - protein, 7 aa, Artificial sequence
  Protein classification predicting sequence
EINTIPG

SEQ ID NO: 66091 - protein, 7 aa, Artificial sequence
  Protein classification predicting sequence
GEDGTIQ

SEQ ID NO: 66092 - protein, 7 aa, Artificial sequence
  Protein classification predicting sequence
YFCPSGL

SEQ ID NO: 66093 - protein, 8 aa, Artificial sequence
  Protein classification predicting sequence
PGMTDHSL

SEQ ID NO: 66094 - protein, 8 aa, Artificial sequence
  Protein classification predicting sequence
KEYNLAGC

SEQ ID NO: 66095 - protein, 9 aa, Artificial sequence
  Protein classification predicting sequence
PGSLANYLF

SEQ ID NO: 66096 - protein, 7 aa, Artificial sequence
  Protein classification predicting sequence
PPYVVKP

SEQ ID NO: 66097 - protein, 8 aa, Artificial sequence
  Protein classification predicting sequence
FYDYEAKY

SEQ ID NO: 66098 - protein, 7 aa, Artificial sequence
  Protein classification predicting sequence
NTIPGFT

SEQ ID NO: 66099 - protein, 6 aa, Artificial sequence
  Protein classification predicting sequence
SCVSAG

SEQ ID NO: 66100 - protein, 7 aa, Artificial sequence
  Protein classification predicting sequence
QSAKNIV

SEQ ID NO: 66101 - protein, 9 aa, Artificial sequence
  Protein classification predicting sequence
LHGPMGEDG

SEQ ID NO: 66102 - protein, 13 aa, Artificial sequence
  Protein classification predicting sequence
LFLNEVNTMPGFT

SEQ ID NO: 66103 - protein, 7 aa, Artificial sequence
  Protein classification predicting sequence
MDKIMTK

SEQ ID NO: 66104 - protein, 8 aa, Artificial sequence
  Protein classification predicting sequence
GSSVGISK

SEQ ID NO: 66105 - protein, 11 aa, Artificial sequence
  Protein classification predicting sequence
LNELNTMPGFT

SEQ ID NO: 66106 - protein, 7 aa, Artificial sequence
  Protein classification predicting sequence
NTMPGFT

SEQ ID NO: 66107 - protein, 7 aa, Artificial sequence
  Protein classification predicting sequence
YDYDSKY

SEQ ID NO: 66108 - protein, 6 aa, Artificial sequence
  Protein classification predicting sequence
GLVRAD

SEQ ID NO: 66109 - protein, 7 aa, Artificial sequence
  Protein classification predicting sequence
PGMTSHS

SEQ ID NO: 66110 - protein, 26 aa, Artificial sequence
  Protein classification predicting sequence
LLYGGRSAEREVSVLSAESVMRAVNY

SEQ ID NO: 66111 - protein, 7 aa, Artificial sequence
  Protein classification predicting sequence
FIKTQEF

SEQ ID NO: 66112 - protein, 8 aa, Artificial sequence
  Protein classification predicting sequence
KPANQGSS

SEQ ID NO: 66113 - protein, 7 aa, Artificial sequence
  Protein classification predicting sequence
GSSVGIS

SEQ ID NO: 66114 - protein, 10 aa, Artificial sequence
  Protein classification predicting sequence
EQGVVAREIE

SEQ ID NO: 66115 - protein, 10 aa, Artificial sequence
  Protein classification predicting sequence
SAGSILRNLD

SEQ ID NO: 66116 - protein, 15 aa, Artificial sequence
  Protein classification predicting sequence
QGALELLGIPYTGSG

SEQ ID NO: 66117 - protein, 10 aa, Artificial sequence
  Protein classification predicting sequence
PGMTGHSLVP

SEQ ID NO: 66118 - protein, 6 aa, Artificial sequence
  Protein classification predicting sequence
PYTGSG

SEQ ID NO: 66119 - protein, 27 aa, Artificial sequence
  Protein classification predicting sequence
VGIVFGGKSAEHEVSLQSAKNIVDAID

SEQ ID NO: 66120 - protein, 8 aa, Artificial sequence
  Protein classification predicting sequence
LLGIDKQG

SEQ ID NO: 66121 - protein, 22 aa, Artificial sequence
  Protein classification predicting sequence
DVIFPIVHGTLGEDGSLQGMLR

SEQ ID NO: 66122 - protein, 7 aa, Artificial sequence
  Protein classification predicting sequence
VINEINT

SEQ ID NO: 66123 - protein, 6 aa, Artificial sequence
  Protein classification predicting sequence
LPSIRI

SEQ ID NO: 66124 - protein, 6 aa, Artificial sequence
  Protein classification predicting sequence
TQYFCP

SEQ ID NO: 66125 - protein, 7 aa, Artificial sequence
  Protein classification predicting sequence
RIDVMLD

SEQ ID NO: 66126 - protein, 8 aa, Artificial sequence
  Protein classification predicting sequence
GEDGTLQG

SEQ ID NO: 66127 - protein, 19 aa, Artificial sequence
  Protein classification predicting sequence
LPYTGSGVMASALSMDKLR

SEQ ID NO: 66128 - protein, 7 aa, Artificial sequence
  Protein classification predicting sequence
PGMTPTS

SEQ ID NO: 66129 - protein, 7 aa, Artificial sequence
  Protein classification predicting sequence
VGIVFGG

SEQ ID NO: 66130 - protein, 6 aa, Artificial sequence
  Protein classification predicting sequence
ARVDFF

SEQ ID NO: 66131 - protein, 6 aa, Artificial sequence
  Protein classification predicting sequence
PLIVKP

SEQ ID NO: 66132 - protein, 24 aa, Artificial sequence
  Protein classification predicting sequence
LLEMNTSPGMTGHSLVPMAARAVG

SEQ ID NO: 66133 - protein, 9 aa, Artificial sequence
  Protein classification predicting sequence
FYDYDSKYV

SEQ ID NO: 66134 - protein, 9 aa, Artificial sequence
  Protein classification predicting sequence
PGETGDIQS

SEQ ID NO: 66135 - protein, 12 aa, Artificial sequence
  Protein classification predicting sequence
LRHLSRIDFFLT

SEQ ID NO: 66136 - protein, 8 aa, Artificial sequence
  Protein classification predicting sequence
PYVGNGVL

SEQ ID NO: 66137 - protein, 13 aa, Artificial sequence
  Protein classification predicting sequence
YPVFVKPANLGSS

SEQ ID NO: 66138 - protein, 10 aa, Artificial sequence
  Protein classification predicting sequence
FVKPANLGSS

SEQ ID NO: 66139 - protein, 10 aa, Artificial sequence
  Protein classification predicting sequence
IVFGGKSAEH

SEQ ID NO: 66140 - protein, 7 aa, Artificial sequence
  Protein classification predicting sequence
SAEHDVS

SEQ ID NO: 66141 - protein, 15 aa, Artificial sequence
  Protein classification predicting sequence
VSILTAQNVLNAIDK

SEQ ID NO: 66142 - protein, 10 aa, Artificial sequence
  Protein classification predicting sequence
VDIIYITNDG

SEQ ID NO: 66143 - protein, 10 aa, Artificial sequence
  Protein classification predicting sequence
IPYVGNGVLA

SEQ ID NO: 66144 - protein, 18 aa, Artificial sequence
  Protein classification predicting sequence
YPVFVKPANLGSSVGISK

SEQ ID NO: 66145 - protein, 14 aa, Artificial sequence
  Protein classification predicting sequence
EAFQFDRKLVIEQG

SEQ ID NO: 66146 - protein, 17 aa, Artificial sequence
  Protein classification predicting sequence
DNQIYINETNAMPGFTA

SEQ ID NO: 66147 - protein, 26 aa, Artificial sequence
  Protein classification predicting sequence
YDAVFPLLHGPNGEDGTIQGLFEVLD

SEQ ID NO: 66148 - protein, 34 aa, Artificial sequence
  Protein classification predicting sequence
SSMDKLVMKQLFEHRGLPQLPYISFLRSEYEKYE

SEQ ID NO: 66149 - protein, 23 aa, Artificial sequence
  Protein classification predicting sequence
TWPGEVVKDVAFYDYKSKYKDGK

SEQ ID NO: 66150 - protein, 26 aa, Artificial sequence
  Protein classification predicting sequence
TLRNMALEAFKATDCSGLVRADFFVT

SEQ ID NO: 66151 - protein, 23 aa, Artificial sequence
  Protein classification predicting sequence
LLYGGRSAEREVSVLSAESVMRA

SEQ ID NO: 66152 - protein, 26 aa, Artificial sequence
  Protein classification predicting sequence
VFPVLHGPMGEDGSIQGFLEVLRMPY

SEQ ID NO: 66153 - protein, 9 aa, Artificial sequence
  Protein classification predicting sequence
GSSVGISKA

SEQ ID NO: 66154 - protein, 8 aa, Artificial sequence
  Protein classification predicting sequence
PGEVVKDV

SEQ ID NO: 66155 - protein, 10 aa, Artificial sequence
  Protein classification predicting sequence
RVAVVFGGRS

SEQ ID NO: 66156 - protein, 8 aa, Artificial sequence
  Protein classification predicting sequence
GLVRADFF

SEQ ID NO: 66157 - protein, 11 aa, Artificial sequence
  Protein classification predicting sequence
QKIKPSDIYEE

SEQ ID NO: 66158 - protein, 7 aa, Artificial sequence
  Protein classification predicting sequence
AMDKITT

SEQ ID NO: 66159 - protein, 11 aa, Artificial sequence
  Protein classification predicting sequence
YDSRVLIEQGV

SEQ ID NO: 66160 - protein, 9 aa, Artificial sequence
  Protein classification predicting sequence
VKDVAFYDY

SEQ ID NO: 66161 - protein, 10 aa, Artificial sequence
  Protein classification predicting sequence
DNKITMAIPA

SEQ ID NO: 66162 - protein, 7 aa, Artificial sequence
  Protein classification predicting sequence
LWENMGL

SEQ ID NO: 66163 - protein, 21 aa, Artificial sequence
  Protein classification predicting sequence
IYEEGAVVFPVLHGPMGEDGS

SEQ ID NO: 66164 - protein, 13 aa, Artificial sequence
  Protein classification predicting sequence
AMDKITTKRVLES

SEQ ID NO: 66165 - protein, 11 aa, Artificial sequence
  Protein classification predicting sequence
EQGVNAREIEV

SEQ ID NO: 66166 - protein, 11 aa, Artificial sequence
  Protein classification predicting sequence
AREIEVGLLGN

SEQ ID NO: 66167 - protein, 6 aa, Artificial sequence
  Protein classification predicting sequence
TLPGEV

SEQ ID NO: 66168 - protein, 20 aa, Artificial sequence
  Protein classification predicting sequence
LNELNTMPGFTQWSMYPLLW

SEQ ID NO: 66169 - protein, 6 aa, Artificial sequence
  Protein classification predicting sequence
FPIVHG

SEQ ID NO: 66170 - protein, 7 aa, Artificial sequence
  Protein classification predicting sequence
PYVGSGV

SEQ ID NO: 66171 - protein, 10 aa, Artificial sequence
  Protein classification predicting sequence
PGFTAFSMYP

SEQ ID NO: 66172 - protein, 7 aa, Artificial sequence
  Protein classification predicting sequence
VFPLLHG

SEQ ID NO: 66173 - protein, 6 aa, Artificial sequence
  Protein classification predicting sequence
PLFVKP

SEQ ID NO: 66174 - protein, 16 aa, Artificial sequence
  Protein classification predicting sequence
VPCIHGFPGETGDIQS

SEQ ID NO: 66175 - protein, 5 aa, Artificial sequence
  Protein classification predicting sequence
YPKLW

SEQ ID NO: 66176 - protein, 7 aa, Artificial sequence
  Protein classification predicting sequence
MDKLRTK

SEQ ID NO: 66177 - protein, 18 aa, Artificial sequence
  Protein classification predicting sequence
VLIEKWLSGPEFTVAILG

SEQ ID NO: 66178 - protein, 6 aa, Artificial sequence
  Protein classification predicting sequence
SFSQLV

SEQ ID NO: 66179 - protein, 18 aa, Artificial sequence
  Protein classification predicting sequence
YIIYTSGSTGNPKGVQIS

SEQ ID NO: 66180 - protein, 18 aa, Artificial sequence
  Protein classification predicting sequence
FLNQAPFSFDLSVMDLYP

SEQ ID NO: 66181 - protein, 7 aa, Artificial sequence
  Protein classification predicting sequence
WTSTPSF

SEQ ID NO: 66182 - protein, 14 aa, Artificial sequence
  Protein classification predicting sequence
QGRLDFQIKLHGYR

SEQ ID NO: 66183 - protein, 10 aa, Artificial sequence
  Protein classification predicting sequence
GYRMELEEIE

SEQ ID NO: 66184 - protein, 7 aa, Artificial sequence
  Protein classification predicting sequence
NGKIDRK

SEQ ID NO: 66185 - protein, 6 aa, Artificial sequence
  Protein classification predicting sequence
MDYMMP

SEQ ID NO: 66186 - protein, 11 aa, Artificial sequence
  Protein classification predicting sequence
PKGVQISHDNL

SEQ ID NO: 66187 - protein, 11 aa, Artificial sequence
  Protein classification predicting sequence
QPPYSFDLSVM

SEQ ID NO: 66188 - protein, 9 aa, Artificial sequence
  Protein classification predicting sequence
PTLALGGTL

SEQ ID NO: 66189 - protein, 7 aa, Artificial sequence
  Protein classification predicting sequence
WVSTPSF

SEQ ID NO: 66190 - protein, 7 aa, Artificial sequence
  Protein classification predicting sequence
NTYGPTE

SEQ ID NO: 66191 - protein, 6 aa, Artificial sequence
  Protein classification predicting sequence
GQPAYH

SEQ ID NO: 66192 - protein, 7 aa, Artificial sequence
  Protein classification predicting sequence
GYRIELE

SEQ ID NO: 66193 - protein, 8 aa, Artificial sequence
  Protein classification predicting sequence
KSGHAYIP

SEQ ID NO: 66194 - protein, 13 aa, Artificial sequence
  Protein classification predicting sequence
PKGVQISHDNLLS

SEQ ID NO: 66195 - protein, 8 aa, Artificial sequence
  Protein classification predicting sequence
GYRIELED

SEQ ID NO: 66196 - protein, 9 aa, Artificial sequence
  Protein classification predicting sequence
LPEGEKGEI

SEQ ID NO: 66197 - protein, 6 aa, Artificial sequence
  Protein classification predicting sequence
YMIPRK

SEQ ID NO: 66198 - protein, 7 aa, Artificial sequence
  Protein classification predicting sequence
ESSKLAH

SEQ ID NO: 66199 - protein, 16 aa, Artificial sequence
  Protein classification predicting sequence
GHMSPYMIVGMIGAIK

SEQ ID NO: 66200 - protein, 23 aa, Artificial sequence
  Protein classification predicting sequence
VYTIFTSGSTGEPKGVQIEYASL

SEQ ID NO: 66201 - protein, 20 aa, Artificial sequence
  Protein classification predicting sequence
WLNQAPFSFDLSVMAIYPCL

SEQ ID NO: 66202 - protein, 10 aa, Artificial sequence
  Protein classification predicting sequence
FFFCGEILPH

SEQ ID NO: 66203 - protein, 10 aa, Artificial sequence
  Protein classification predicting sequence
RTYHTGDKAK

SEQ ID NO: 66204 - protein, 30 aa, Artificial sequence
  Protein classification predicting sequence
WFIQGRIDFQIKLNGYRMELEEIETQLRQS

SEQ ID NO: 66205 - protein, 7 aa, Artificial sequence
  Protein classification predicting sequence
VVPVYKN

SEQ ID NO: 66206 - protein, 8 aa, Artificial sequence
  Protein classification predicting sequence
KVIHLIGA

SEQ ID NO: 66207 - protein, 27 aa, Artificial sequence
  Protein classification predicting sequence
LKSRLPEYMIPRKFEWMEQLPLTSNGK

SEQ ID NO: 66208 - protein, 17 aa, Artificial sequence
  Protein classification predicting sequence
YTIFTSGSTGEPKGVQI

SEQ ID NO: 66209 - protein, 23 aa, Artificial sequence
  Protein classification predicting sequence
QQWLNQAPFSFDLSVMAIYPCLA

SEQ ID NO: 66210 - protein, 8 aa, Artificial sequence
  Protein classification predicting sequence
GTLNLVDK

SEQ ID NO: 66211 - protein, 9 aa, Artificial sequence
  Protein classification predicting sequence
MINKPKLLN

SEQ ID NO: 66212 - protein, 12 aa, Artificial sequence
  Protein classification predicting sequence
WVSTPSFMEMCL

SEQ ID NO: 66213 - protein, 9 aa, Artificial sequence
  Protein classification predicting sequence
TQADFPVYD

SEQ ID NO: 66214 - protein, 8 aa, Artificial sequence
  Protein classification predicting sequence
KSPVLVFG

SEQ ID NO: 66215 - protein, 19 aa, Artificial sequence
  Protein classification predicting sequence
PKGVQISHDNLLSFTNWMI

SEQ ID NO: 66216 - protein, 23 aa, Artificial sequence
  Protein classification predicting sequence
PQMLAQPPYSFDLSVMYWAPTLA

SEQ ID NO: 66217 - protein, 9 aa, Artificial sequence
  Protein classification predicting sequence
GGTLFALPK

SEQ ID NO: 66218 - protein, 11 aa, Artificial sequence
  Protein classification predicting sequence
WTSTPSFADMA

SEQ ID NO: 66219 - protein, 11 aa, Artificial sequence
  Protein classification predicting sequence
GYRIELEDVSQ

SEQ ID NO: 66220 - protein, 7 aa, Artificial sequence
  Protein classification predicting sequence
YMMPSKF

SEQ ID NO: 66221 - protein, 13 aa, Artificial sequence
  Protein classification predicting sequence
FVALTKSGHAYIP

SEQ ID NO: 66222 - protein, 11 aa, Artificial sequence
  Protein classification predicting sequence
YYIIFTSGTTG

SEQ ID NO: 66223 - protein, 10 aa, Artificial sequence
  Protein classification predicting sequence
ADFKQLFTTI

SEQ ID NO: 66224 - protein, 14 aa, Artificial sequence
  Protein classification predicting sequence
NAYGPTEATVALSA

SEQ ID NO: 66225 - protein, 10 aa, Artificial sequence
  Protein classification predicting sequence
SAVAVPRYNK

SEQ ID NO: 66226 - protein, 9 aa, Artificial sequence
  Protein classification predicting sequence
HKVQNLLAY

SEQ ID NO: 66227 - protein, 29 aa, Artificial sequence
  Protein classification predicting sequence
PQMLAQPPYSFDLSVMYWAPTLALGGTLF

SEQ ID NO: 66228 - protein, 15 aa, Artificial sequence
  Protein classification predicting sequence
IWTSTPSFADMAMLS

SEQ ID NO: 66229 - protein, 12 aa, Artificial sequence
  Protein classification predicting sequence
THFYFDGEELTV

SEQ ID NO: 66230 - protein, 9 aa, Artificial sequence
  Protein classification predicting sequence
KRLPIGYTK

SEQ ID NO: 66231 - protein, 8 aa, Artificial sequence
  Protein classification predicting sequence
GPAVSKGY

SEQ ID NO: 66232 - protein, 11 aa, Artificial sequence
  Protein classification predicting sequence
NNPEKTAEAFF

SEQ ID NO: 66233 - protein, 27 aa, Artificial sequence
  Protein classification predicting sequence
MMSYMMPSKFLYRDSLPLTPNGKIDIK

SEQ ID NO: 66234 - protein, 12 aa, Artificial sequence
  Protein classification predicting sequence
LPLTPNGKIDIK

SEQ ID NO: 66235 - protein, 7 aa, Artificial sequence
  Protein classification predicting sequence
FTCEYKY

SEQ ID NO: 66236 - protein, 7 aa, Artificial sequence
  Protein classification predicting sequence
CLFVFDC

SEQ ID NO: 66237 - protein, 8 aa, Artificial sequence
  Protein classification predicting sequence
LEGLVLKD

SEQ ID NO: 66238 - protein, 6 aa, Artificial sequence
  Protein classification predicting sequence
SIRFPR

SEQ ID NO: 66239 - protein, 11 aa, Artificial sequence
  Protein classification predicting sequence
LEKISSRLQLT

SEQ ID NO: 66240 - protein, 7 aa, Artificial sequence
  Protein classification predicting sequence
RGWLWIK

SEQ ID NO: 66241 - protein, 9 aa, Artificial sequence
  Protein classification predicting sequence
DKSPEDATT

SEQ ID NO: 66242 - protein, 9 aa, Artificial sequence
  Protein classification predicting sequence
ELGVGEKLL

SEQ ID NO: 66243 - protein, 5 aa, Artificial sequence
  Protein classification predicting sequence
YKYDG

SEQ ID NO: 66244 - protein, 7 aa, Artificial sequence
  Protein classification predicting sequence
IQPFQVL

SEQ ID NO: 66245 - protein, 9 aa, Artificial sequence
  Protein classification predicting sequence
NWLKLKKDY

SEQ ID NO: 66246 - protein, 9 aa, Artificial sequence
  Protein classification predicting sequence
WDERELGVG

SEQ ID NO: 66247 - protein, 8 aa, Artificial sequence
  Protein classification predicting sequence
RDAIARAF

SEQ ID NO: 66248 - protein, 6 aa, Artificial sequence
  Protein classification predicting sequence
KYDGER

SEQ ID NO: 66249 - protein, 7 aa, Artificial sequence
  Protein classification predicting sequence
RRWLKIK

SEQ ID NO: 66250 - protein, 7 aa, Artificial sequence
  Protein classification predicting sequence
TVTKCSG

SEQ ID NO: 66251 - protein, 8 aa, Artificial sequence
  Protein classification predicting sequence
DGARVQVH

SEQ ID NO: 66252 - protein, 10 aa, Artificial sequence
  Protein classification predicting sequence
GAEWGEGRRA

SEQ ID NO: 66253 - protein, 6 aa, Artificial sequence
  Protein classification predicting sequence
GHEGVM

SEQ ID NO: 66254 - protein, 7 aa, Artificial sequence
  Protein classification predicting sequence
IQKSPKY

SEQ ID NO: 66255 - protein, 7 aa, Artificial sequence
  Protein classification predicting sequence
FFSQPLT

SEQ ID NO: 66256 - protein, 7 aa, Artificial sequence
  Protein classification predicting sequence
RRLENIT

SEQ ID NO: 66257 - protein, 7 aa, Artificial sequence
  Protein classification predicting sequence
KRDYQSE

SEQ ID NO: 66258 - protein, 6 aa, Artificial sequence
  Protein classification predicting sequence
ALRFPR

SEQ ID NO: 66259 - protein, 8 aa, Artificial sequence
  Protein classification predicting sequence
PIKPMLAQ

SEQ ID NO: 66260 - protein, 7 aa, Artificial sequence
  Protein classification predicting sequence
IFSRRLE

SEQ ID NO: 66261 - protein, 8 aa, Artificial sequence
  Protein classification predicting sequence
KVGSGFTD

SEQ ID NO: 66262 - protein, 7 aa, Artificial sequence
  Protein classification predicting sequence
SPLHTCC

SEQ ID NO: 66263 - protein, 7 aa, Artificial sequence
  Protein classification predicting sequence
PIRPMLA

SEQ ID NO: 66264 - protein, 9 aa, Artificial sequence
  Protein classification predicting sequence
YKYDGERAQ

SEQ ID NO: 66265 - protein, 12 aa, Artificial sequence
  Protein classification predicting sequence
SVKDSCEGLMVK

SEQ ID NO: 66266 - protein, 7 aa, Artificial sequence
  Protein classification predicting sequence
GAYYGKG

SEQ ID NO: 66267 - protein, 9 aa, Artificial sequence
  Protein classification predicting sequence
ICKLGTGFS

SEQ ID NO: 66268 - protein, 8 aa, Artificial sequence
  Protein classification predicting sequence
QGKLWPDF

SEQ ID NO: 66269 - protein, 7 aa, Artificial sequence
  Protein classification predicting sequence
LMHRKRK

SEQ ID NO: 66270 - protein, 10 aa, Artificial sequence
  Protein classification predicting sequence
EAIKEYPVNV

SEQ ID NO: 66271 - protein, 8 aa, Artificial sequence
  Protein classification predicting sequence
DYQSEMAD

SEQ ID NO: 66272 - protein, 11 aa, Artificial sequence
  Protein classification predicting sequence
GRLRVGIGDAT

SEQ ID NO: 66273 - protein, 8 aa, Artificial sequence
  Protein classification predicting sequence
SSLLMAAY

SEQ ID NO: 66274 - protein, 7 aa, Artificial sequence
  Protein classification predicting sequence
RFPRFIR

SEQ ID NO: 66275 - protein, 7 aa, Artificial sequence
  Protein classification predicting sequence
SIRFPRF

SEQ ID NO: 66276 - protein, 49 aa, Artificial sequence
  Protein classification predicting sequence
IYHASGYKEKSKLIRDFITDRDDKYLIIKLLLPGLDDRIYNMNDKQIIK

SEQ ID NO: 66277 - protein, 9 aa, Artificial sequence
  Protein classification predicting sequence
YSIIFKQSQ

SEQ ID NO: 66278 - protein, 15 aa, Artificial sequence
  Protein classification predicting sequence
DMLQDLGYGYIGDTI

SEQ ID NO: 66279 - protein, 12 aa, Artificial sequence
  Protein classification predicting sequence
TFFKENTEIRPR

SEQ ID NO: 66280 - protein, 9 aa, Artificial sequence
  Protein classification predicting sequence
SKQNLDSIS

SEQ ID NO: 66281 - protein, 60 aa, Artificial sequence
  Protein classification predicting sequence
SVMTPINPMLAESCDSVNKAFKKFPSGMFAEVKYDGERVQVHKNNNEFAFFSRNMKPVLS

SEQ ID NO: 66282 - protein, 33 aa, Artificial sequence
  Protein classification predicting sequence
KVDYLKEYIPKAFKKATSIVLDSEIVLVDEHNV

SEQ ID NO: 66283 - protein, 40 aa, Artificial sequence
  Protein classification predicting sequence
LPFGSLGIHKKKEYKNSNMCLFVFDCLYFDGFDMTDIPLY

SEQ ID NO: 66284 - protein, 8 aa, Artificial sequence
  Protein classification predicting sequence
SCEGLMVK

SEQ ID NO: 66285 - protein, 7 aa, Artificial sequence
  Protein classification predicting sequence
VLGAYYG

SEQ ID NO: 66286 - protein, 7 aa, Artificial sequence
  Protein classification predicting sequence
GATRGDG

SEQ ID NO: 66287 - protein, 7 aa, Artificial sequence
  Protein classification predicting sequence
IREKDIR

SEQ ID NO: 66288 - protein, 7 aa, Artificial sequence
  Protein classification predicting sequence
RTGEERP

SEQ ID NO: 66289 - protein, 8 aa, Artificial sequence
  Protein classification predicting sequence
LERMGEKS

SEQ ID NO: 66290 - protein, 6 aa, Artificial sequence
  Protein classification predicting sequence
DSPTQR

SEQ ID NO: 66291 - protein, 6 aa, Artificial sequence
  Protein classification predicting sequence
ELKIDG

SEQ ID NO: 66292 - protein, 8 aa, Artificial sequence
  Protein classification predicting sequence
IDGIVIKV

SEQ ID NO: 66293 - protein, 6 aa, Artificial sequence
  Protein classification predicting sequence
PRWAIA

SEQ ID NO: 66294 - protein, 7 aa, Artificial sequence
  Protein classification predicting sequence
RSGDVIP

SEQ ID NO: 66295 - protein, 9 aa, Artificial sequence
  Protein classification predicting sequence
IDGVVVKVD

SEQ ID NO: 66296 - protein, 7 aa, Artificial sequence
  Protein classification predicting sequence
RWAIAYK

SEQ ID NO: 66297 - protein, 10 aa, Artificial sequence
  Protein classification predicting sequence
NPGSKLEKAR

SEQ ID NO: 66298 - protein, 6 aa, Artificial sequence
  Protein classification predicting sequence
ATRGDG

SEQ ID NO: 66299 - protein, 13 aa, Artificial sequence
  Protein classification predicting sequence
ATRGDGTTGEDIT

SEQ ID NO: 66300 - protein, 17 aa, Artificial sequence
  Protein classification predicting sequence
FANPRNAAAGSLRQLDP

SEQ ID NO: 66301 - protein, 8 aa, Artificial sequence
  Protein classification predicting sequence
IGDTVVIR

SEQ ID NO: 66302 - protein, 7 aa, Artificial sequence
  Protein classification predicting sequence
SRKAMDI

SEQ ID NO: 66303 - protein, 7 aa, Artificial sequence
  Protein classification predicting sequence
GSLRQLD

SEQ ID NO: 66304 - protein, 6 aa, Artificial sequence
  Protein classification predicting sequence
FANPRN

SEQ ID NO: 66305 - protein, 7 aa, Artificial sequence
  Protein classification predicting sequence
TPDSPTQ

SEQ ID NO: 66306 - protein, 6 aa, Artificial sequence
  Protein classification predicting sequence
AYKFPA

SEQ ID NO: 66307 - protein, 9 aa, Artificial sequence
  Protein classification predicting sequence
RKAGDVIPE

SEQ ID NO: 66308 - protein, 6 aa, Artificial sequence
  Protein classification predicting sequence
SLDNAF

SEQ ID NO: 66309 - protein, 24 aa, Artificial sequence
  Protein classification predicting sequence
RGLERLLYALGLPGVGEVLARNLA

SEQ ID NO: 66310 - protein, 15 aa, Artificial sequence
  Protein classification predicting sequence
TGELSRPREEVKALL

SEQ ID NO: 66311 - protein, 9 aa, Artificial sequence
  Protein classification predicting sequence
YHNYRYYVL

SEQ ID NO: 66312 - protein, 7 aa, Artificial sequence
  Protein classification predicting sequence
MDRLLEA

SEQ ID NO: 66313 - protein, 23 aa, Artificial sequence
  Protein classification predicting sequence
KEGKVHRCPNPLCPAKRFEAIRH

SEQ ID NO: 66314 - protein, 8 aa, Artificial sequence
  Protein classification predicting sequence
LYGKYKAK

SEQ ID NO: 66315 - protein, 7 aa, Artificial sequence
  Protein classification predicting sequence
VASEIMA

SEQ ID NO: 66316 - protein, 9 aa, Artificial sequence
  Protein classification predicting sequence
GPFANIAHG

SEQ ID NO: 66317 - protein, 8 aa, Artificial sequence
  Protein classification predicting sequence
RALKMHGG

SEQ ID NO: 66318 - protein, 7 aa, Artificial sequence
  Protein classification predicting sequence
KTQYSFS

SEQ ID NO: 66319 - protein, 14 aa, Artificial sequence
  Protein classification predicting sequence
LVTAINPTPAGEGK

SEQ ID NO: 66320 - protein, 9 aa, Artificial sequence
  Protein classification predicting sequence
DINLHFTGD

SEQ ID NO: 66321 - protein, 11 aa, Artificial sequence
  Protein classification predicting sequence
GALTLILKDAI

SEQ ID NO: 66322 - protein, 10 aa, Artificial sequence
  Protein classification predicting sequence
MPGLPKVPAA

SEQ ID NO: 66323 - protein, 7 aa, Artificial sequence
  Protein classification predicting sequence
KPNLVQT

SEQ ID NO: 66324 - protein, 11 aa, Artificial sequence
  Protein classification predicting sequence
GFGADLGAEKF

SEQ ID NO: 66325 - protein, 9 aa, Artificial sequence
  Protein classification predicting sequence
VATVRALKM

SEQ ID NO: 66326 - protein, 9 aa, Artificial sequence
  Protein classification predicting sequence
GKLILVTAI

SEQ ID NO: 66327 - protein, 12 aa, Artificial sequence
  Protein classification predicting sequence
PMEDINLHFTGD

SEQ ID NO: 66328 - protein, 8 aa, Artificial sequence
  Protein classification predicting sequence
DNHLQQGN

SEQ ID NO: 66329 - protein, 55 aa, Artificial sequence
  Protein classification predicting sequence
REPSLGPVMGIKGGAAGGGYAQVLPMEDINLHFTGDMHAITTANNALSALIDNHL

SEQ ID NO: 66330 - protein, 22 aa, Artificial sequence
  Protein classification predicting sequence
PREDGFDITVASEIMAILCLAT

SEQ ID NO: 66331 - protein, 15 aa, Artificial sequence
  Protein classification predicting sequence
AIKPNLVQTIYGTPA

SEQ ID NO: 66332 - protein, 28 aa, Artificial sequence
  Protein classification predicting sequence
HGGPFANIAHGCNSVLATSTALRLADYT

SEQ ID NO: 66333 - protein, 7 aa, Artificial sequence
  Protein classification predicting sequence
RHVENMR

SEQ ID NO: 66334 - protein, 10 aa, Artificial sequence
  Protein classification predicting sequence
VPVVVAINEF

SEQ ID NO: 66335 - protein, 13 aa, Artificial sequence
  Protein classification predicting sequence
VPVELASVWANGA

SEQ ID NO: 66336 - protein, 11 aa, Artificial sequence
  Protein classification predicting sequence
IAEYIWIGGSG

SEQ ID NO: 66337 - protein, 9 aa, Artificial sequence
  Protein classification predicting sequence
GNNILVICD

SEQ ID NO: 66338 - protein, 6 aa, Artificial sequence
  Protein classification predicting sequence
CDTYTP

SEQ ID NO: 66339 - protein, 13 aa, Artificial sequence
  Protein classification predicting sequence
YTPAGEPIPTNKR

SEQ ID NO: 66340 - protein, 6 aa, Artificial sequence
  Protein classification predicting sequence
GGSGMD

SEQ ID NO: 66341 - protein, 7 aa, Artificial sequence
  Protein classification predicting sequence
RSKARTL

SEQ ID NO: 66342 - protein, 8 aa, Artificial sequence
  Protein classification predicting sequence
DGSSTGQA

SEQ ID NO: 66343 - protein, 19 aa, Artificial sequence
  Protein classification predicting sequence
GEDSEVILYPQAIFKDPFR

SEQ ID NO: 66344 - protein, 7 aa, Artificial sequence
  Protein classification predicting sequence
PIPTNKR

SEQ ID NO: 66345 - protein, 8 aa, Artificial sequence
  Protein classification predicting sequence
GIEQEYTL

SEQ ID NO: 66346 - protein, 7 aa, Artificial sequence
  Protein classification predicting sequence
QKDVNWP

SEQ ID NO: 66347 - protein, 8 aa, Artificial sequence
  Protein classification predicting sequence
QWEFQVGP

SEQ ID NO: 66348 - protein, 6 aa, Artificial sequence
  Protein classification predicting sequence
MRNDGG

SEQ ID NO: 66349 - protein, 7 aa, Artificial sequence
  Protein classification predicting sequence
EVIKKAI

SEQ ID NO: 66350 - protein, 7 aa, Artificial sequence
  Protein classification predicting sequence
VDLRFTD

SEQ ID NO: 66351 - protein, 8 aa, Artificial sequence
  Protein classification predicting sequence
QDMRSEML

SEQ ID NO: 66352 - protein, 9 aa, Artificial sequence
  Protein classification predicting sequence
IKHAKAINA

SEQ ID NO: 66353 - protein, 7 aa, Artificial sequence
  Protein classification predicting sequence
PKAKRVE

SEQ ID NO: 66354 - protein, 7 aa, Artificial sequence
  Protein classification predicting sequence
EVRFPDP

SEQ ID NO: 66355 - protein, 8 aa, Artificial sequence
  Protein classification predicting sequence
FLKAGGVF

SEQ ID NO: 66356 - protein, 9 aa, Artificial sequence
  Protein classification predicting sequence
IFKDPFRGG

SEQ ID NO: 66357 - protein, 6 aa, Artificial sequence
  Protein classification predicting sequence
GWPKGG

SEQ ID NO: 66358 - protein, 5 aa, Artificial sequence
  Protein classification predicting sequence
PSQWE

SEQ ID NO: 66359 - protein, 8 aa, Artificial sequence
  Protein classification predicting sequence
QWEYQVGP

SEQ ID NO: 66360 - protein, 8 aa, Artificial sequence
  Protein classification predicting sequence
QVGPCEGI

SEQ ID NO: 66361 - protein, 6 aa, Artificial sequence
  Protein classification predicting sequence
SIRVGR

SEQ ID NO: 66362 - protein, 8 aa, Artificial sequence
  Protein classification predicting sequence
EDRRPASN

SEQ ID NO: 66363 - protein, 8 aa, Artificial sequence
  Protein classification predicting sequence
DLINLDLS

SEQ ID NO: 66364 - protein, 5 aa, Artificial sequence
  Protein classification predicting sequence
LPKWN

SEQ ID NO: 66365 - protein, 6 aa, Artificial sequence
  Protein classification predicting sequence
ILVMCD

SEQ ID NO: 66366 - protein, 18 aa, Artificial sequence
  Protein classification predicting sequence
GDWNGAGAHTNYSTKSMR

SEQ ID NO: 66367 - protein, 14 aa, Artificial sequence
  Protein classification predicting sequence
GKGYFEDRRPASNM

SEQ ID NO: 66368 - protein, 7 aa, Artificial sequence
  Protein classification predicting sequence
WIDGTGE

SEQ ID NO: 66369 - protein, 17 aa, Artificial sequence
  Protein classification predicting sequence
GTNAEVMPAQWEFQIGP

SEQ ID NO: 66370 - protein, 5 aa, Artificial sequence
  Protein classification predicting sequence
QWEFQ

SEQ ID NO: 66371 - protein, 8 aa, Artificial sequence
  Protein classification predicting sequence
GYLEDRRP

SEQ ID NO: 66372 - protein, 7 aa, Artificial sequence
  Protein classification predicting sequence
NCDPYAV

SEQ ID NO: 66373 - protein, 8 aa, Artificial sequence
  Protein classification predicting sequence
FDGSSIRG

SEQ ID NO: 66374 - protein, 8 aa, Artificial sequence
  Protein classification predicting sequence
FFIHDPIT

SEQ ID NO: 66375 - protein, 6 aa, Artificial sequence
  Protein classification predicting sequence
TFMPKP

SEQ ID NO: 66376 - protein, 9 aa, Artificial sequence
  Protein classification predicting sequence
RLVPGYEAP

SEQ ID NO: 66377 - protein, 8 aa, Artificial sequence
  Protein classification predicting sequence
LMAGLDGI

SEQ ID NO: 66378 - protein, 11 aa, Artificial sequence
  Protein classification predicting sequence
RSKARTLPGPV

SEQ ID NO: 66379 - protein, 7 aa, Artificial sequence
  Protein classification predicting sequence
NILVICD

SEQ ID NO: 66380 - protein, 17 aa, Artificial sequence
  Protein classification predicting sequence
AEVPWYGIEQEYTLLQK

SEQ ID NO: 66381 - protein, 6 aa, Artificial sequence
  Protein classification predicting sequence
MREDGG

SEQ ID NO: 66382 - protein, 10 aa, Artificial sequence
  Protein classification predicting sequence
IIAEYIWIGG

SEQ ID NO: 66383 - protein, 17 aa, Artificial sequence
  Protein classification predicting sequence
WGVANRGASIRVGRDTE

SEQ ID NO: 66384 - protein, 15 aa, Artificial sequence
  Protein classification predicting sequence
GDWNGAGAHTNYSTK

SEQ ID NO: 66385 - protein, 18 aa, Artificial sequence
  Protein classification predicting sequence
HKEHIAAYGEGNERRLTG

SEQ ID NO: 66386 - protein, 10 aa, Artificial sequence
  Protein classification predicting sequence
GKGYFEDRRP

SEQ ID NO: 66387 - protein, 13 aa, Artificial sequence
  Protein classification predicting sequence
SNMDPYVVTSMIA

SEQ ID NO: 66388 - protein, 7 aa, Artificial sequence
  Protein classification predicting sequence
GQAEINY

SEQ ID NO: 66389 - protein, 9 aa, Artificial sequence
  Protein classification predicting sequence
TFMPKPLFG

SEQ ID NO: 66390 - protein, 16 aa, Artificial sequence
  Protein classification predicting sequence
HAPSLLAFTNPTVNSY

SEQ ID NO: 66391 - protein, 8 aa, Artificial sequence
  Protein classification predicting sequence
TNPTVNSY

SEQ ID NO: 66392 - protein, 13 aa, Artificial sequence
  Protein classification predicting sequence
RIPITGSNPKAKR

SEQ ID NO: 66393 - protein, 6 aa, Artificial sequence
  Protein classification predicting sequence
NLNLSD

SEQ ID NO: 66394 - protein, 9 aa, Artificial sequence
  Protein classification predicting sequence
WVARYILER

SEQ ID NO: 66395 - protein, 20 aa, Artificial sequence
  Protein classification predicting sequence
GKGYFEDRRPASNMDPYVVT

SEQ ID NO: 66396 - protein, 6 aa, Artificial sequence
  Protein classification predicting sequence
MIAETT

SEQ ID NO: 66397 - protein, 9 aa, Artificial sequence
  Protein classification predicting sequence
KARTLPGPV

SEQ ID NO: 66398 - protein, 11 aa, Artificial sequence
  Protein classification predicting sequence
PAGEPIPTNKR

SEQ ID NO: 66399 - protein, 14 aa, Artificial sequence
  Protein classification predicting sequence
WYGIEQEYTLLQKD

SEQ ID NO: 66400 - protein, 9 aa, Artificial sequence
  Protein classification predicting sequence
PGPQGPYYC

SEQ ID NO: 66401 - protein, 7 aa, Artificial sequence
  Protein classification predicting sequence
AHYKACL

SEQ ID NO: 66402 - protein, 34 aa, Artificial sequence
  Protein classification predicting sequence
AGINISGINGEVMPGQWEFQVGPSVGISAGDEIW

SEQ ID NO: 66403 - protein, 9 aa, Artificial sequence
  Protein classification predicting sequence
IKKAIEKLG

SEQ ID NO: 66404 - protein, 19 aa, Artificial sequence
  Protein classification predicting sequence
PSELPKWNYDGSSTGQAPG

SEQ ID NO: 66405 - protein, 24 aa, Artificial sequence
  Protein classification predicting sequence
YAGINISGINGEVMPGQWEFQVGP

SEQ ID NO: 66406 - protein, 12 aa, Artificial sequence
  Protein classification predicting sequence
WVARYILERITE

SEQ ID NO: 66407 - protein, 6 aa, Artificial sequence
  Protein classification predicting sequence
SIGGWK

SEQ ID NO: 66408 - protein, 11 aa, Artificial sequence
  Protein classification predicting sequence
INESDMVLMPD

SEQ ID NO: 66409 - protein, 8 aa, Artificial sequence
  Protein classification predicting sequence
AKKAEAYL

SEQ ID NO: 66410 - protein, 24 aa, Artificial sequence
  Protein classification predicting sequence
VPGYEAPVLLAYSARNRSASCRIP

SEQ ID NO: 66411 - protein, 8 aa, Artificial sequence
  Protein classification predicting sequence
NPYLAFAA

SEQ ID NO: 66412 - protein, 22 aa, Artificial sequence
  Protein classification predicting sequence
GKTATFMPKPIFGDNGSGMHVH

SEQ ID NO: 66413 - protein, 9 aa, Artificial sequence
  Protein classification predicting sequence
WGVANRGAS

SEQ ID NO: 66414 - protein, 6 aa, Artificial sequence
  Protein classification predicting sequence
KGGYFP

SEQ ID NO: 66415 - protein, 7 aa, Artificial sequence
  Protein classification predicting sequence
LMAGLDG

SEQ ID NO: 66416 - protein, 12 aa, Artificial sequence
  Protein classification predicting sequence
KLPKWNYDGSST

SEQ ID NO: 66417 - protein, 10 aa, Artificial sequence
  Protein classification predicting sequence
NGEVMPGQWE

SEQ ID NO: 66418 - protein, 9 aa, Artificial sequence
  Protein classification predicting sequence
RYILERITE

SEQ ID NO: 66419 - protein, 14 aa, Artificial sequence
  Protein classification predicting sequence
RYILERITEIAGVV

SEQ ID NO: 66420 - protein, 18 aa, Artificial sequence
  Protein classification predicting sequence
WGVANRGASIRVGRDTEK

SEQ ID NO: 66421 - protein, 10 aa, Artificial sequence
  Protein classification predicting sequence
SIRVGRDTEK

SEQ ID NO: 66422 - protein, 37 aa, Artificial sequence
  Protein classification predicting sequence
KPVEDPSELPKWNYDGSSTGQAPGEDSEVILYPQAIF

SEQ ID NO: 66423 - protein, 12 aa, Artificial sequence
  Protein classification predicting sequence
DSEVILYPQAIF

SEQ ID NO: 66424 - protein, 11 aa, Artificial sequence
  Protein classification predicting sequence
HTNYSTKSMRE

SEQ ID NO: 66425 - protein, 19 aa, Artificial sequence
  Protein classification predicting sequence
FSWGVANRGCSIRVGRDTE

SEQ ID NO: 66426 - protein, 8 aa, Artificial sequence
  Protein classification predicting sequence
PAPQGPYY

SEQ ID NO: 66427 - protein, 6 aa, Artificial sequence
  Protein classification predicting sequence
WMARYL

SEQ ID NO: 66428 - protein, 6 aa, Artificial sequence
  Protein classification predicting sequence
HIAVYG

SEQ ID NO: 66429 - protein, 5 aa, Artificial sequence
  Protein classification predicting sequence
EQEYT

SEQ ID NO: 66430 - protein, 6 aa, Artificial sequence
  Protein classification predicting sequence
NAEVMP

SEQ ID NO: 66431 - protein, 8 aa, Artificial sequence
  Protein classification predicting sequence
EVMPGQWE

SEQ ID NO: 66432 - protein, 8 aa, Artificial sequence
  Protein classification predicting sequence
RLTGKHET

SEQ ID NO: 66433 - protein, 9 aa, Artificial sequence
  Protein classification predicting sequence
GYLEDRRPA

SEQ ID NO: 66434 - protein, 19 aa, Artificial sequence
  Protein classification predicting sequence
LERITEQAGVVLTLDPKPI

SEQ ID NO: 66435 - protein, 6 aa, Artificial sequence
  Protein classification predicting sequence
GVADRG

SEQ ID NO: 66436 - protein, 7 aa, Artificial sequence
  Protein classification predicting sequence
WNYDGSS

SEQ ID NO: 66437 - protein, 6 aa, Artificial sequence
  Protein classification predicting sequence
EGSNSD

SEQ ID NO: 66438 - protein, 8 aa, Artificial sequence
  Protein classification predicting sequence
FGIEQEYT

SEQ ID NO: 66439 - protein, 8 aa, Artificial sequence
  Protein classification predicting sequence
RDIVDAHY

SEQ ID NO: 66440 - protein, 8 aa, Artificial sequence
  Protein classification predicting sequence
HIRAYDPK

SEQ ID NO: 66441 - protein, 8 aa, Artificial sequence
  Protein classification predicting sequence
DNARRLTG

SEQ ID NO: 66442 - protein, 6 aa, Artificial sequence
  Protein classification predicting sequence
SIRIPR

SEQ ID NO: 66443 - protein, 7 aa, Artificial sequence
  Protein classification predicting sequence
GTNAEVM

SEQ ID NO: 66444 - protein, 5 aa, Artificial sequence
  Protein classification predicting sequence
NMDPY

SEQ ID NO: 66445 - protein, 8 aa, Artificial sequence
  Protein classification predicting sequence
QVGPSVGI

SEQ ID NO: 66446 - protein, 38 aa, Artificial sequence
  Protein classification predicting sequence
FSWGVANRGCSIRVGRDTEAKGKGYLEDRRPASNMDPY

SEQ ID NO: 66447 - protein, 8 aa, Artificial sequence
  Protein classification predicting sequence
KIIAEYIW

SEQ ID NO: 66448 - protein, 6 aa, Artificial sequence
  Protein classification predicting sequence
DSEVIL

SEQ ID NO: 66449 - protein, 6 aa, Artificial sequence
  Protein classification predicting sequence
FRDPFR

SEQ ID NO: 66450 - protein, 10 aa, Artificial sequence
  Protein classification predicting sequence
YPGPQGPYYC

SEQ ID NO: 66451 - protein, 6 aa, Artificial sequence
  Protein classification predicting sequence
GRDIVD

SEQ ID NO: 66452 - protein, 12 aa, Artificial sequence
  Protein classification predicting sequence
AYGEGNERRLTG

SEQ ID NO: 66453 - protein, 9 aa, Artificial sequence
  Protein classification predicting sequence
FSWGVANRG

SEQ ID NO: 66454 - protein, 11 aa, Artificial sequence
  Protein classification predicting sequence
GDWNGAGCHTN

SEQ ID NO: 66455 - protein, 17 aa, Artificial sequence
  Protein classification predicting sequence
GKGYLEDRRPASNMDPY

SEQ ID NO: 66456 - protein, 7 aa, Artificial sequence
  Protein classification predicting sequence
DAHYKAC

SEQ ID NO: 66457 - protein, 9 aa, Artificial sequence
  Protein classification predicting sequence
GDWNGAGAH

SEQ ID NO: 66458 - protein, 8 aa, Artificial sequence
  Protein classification predicting sequence
RVGRDTEK

SEQ ID NO: 66459 - protein, 6 aa, Artificial sequence
  Protein classification predicting sequence
GYPAPQ

SEQ ID NO: 66460 - protein, 7 aa, Artificial sequence
  Protein classification predicting sequence
WMARYLL

SEQ ID NO: 66461 - protein, 6 aa, Artificial sequence
  Protein classification predicting sequence
NGSGMH

SEQ ID NO: 66462 - protein, 6 aa, Artificial sequence
  Protein classification predicting sequence
IAEYIW

SEQ ID NO: 66463 - protein, 10 aa, Artificial sequence
  Protein classification predicting sequence
EQEYTLLQKD

SEQ ID NO: 66464 - protein, 6 aa, Artificial sequence
  Protein classification predicting sequence
WPLGWP

SEQ ID NO: 66465 - protein, 5 aa, Artificial sequence
  Protein classification predicting sequence
HYKAC

SEQ ID NO: 66466 - protein, 6 aa, Artificial sequence
  Protein classification predicting sequence
DPYVVT

SEQ ID NO: 66467 - protein, 6 aa, Artificial sequence
  Protein classification predicting sequence
PKGGFP

SEQ ID NO: 66468 - protein, 7 aa, Artificial sequence
  Protein classification predicting sequence
FGRDIVD

SEQ ID NO: 66469 - protein, 6 aa, Artificial sequence
  Protein classification predicting sequence
HYKACL

SEQ ID NO: 66470 - protein, 7 aa, Artificial sequence
  Protein classification predicting sequence
VGISAGD

SEQ ID NO: 66471 - protein, 9 aa, Artificial sequence
  Protein classification predicting sequence
GNNILVMCD

SEQ ID NO: 66472 - protein, 7 aa, Artificial sequence
  Protein classification predicting sequence
KSFGRDI

SEQ ID NO: 66473 - protein, 23 aa, Artificial sequence
  Protein classification predicting sequence
GNNILVICDVYTPAGEPLPTNKR

SEQ ID NO: 66474 - protein, 16 aa, Artificial sequence
  Protein classification predicting sequence
ARYILERITEIAGVVV

SEQ ID NO: 66475 - protein, 7 aa, Artificial sequence
  Protein classification predicting sequence
LRHKEHI

SEQ ID NO: 66476 - protein, 17 aa, Artificial sequence
  Protein classification predicting sequence
GKGYFEDRRPASNMDPY

SEQ ID NO: 66477 - protein, 7 aa, Artificial sequence
  Protein classification predicting sequence
HETADIN

SEQ ID NO: 66478 - protein, 6 aa, Artificial sequence
  Protein classification predicting sequence
TTILWK

SEQ ID NO: 66479 - protein, 9 aa, Artificial sequence
  Protein classification predicting sequence
DSEVILYPQ

SEQ ID NO: 66480 - protein, 11 aa, Artificial sequence
  Protein classification predicting sequence
DPFRRGNNILV

SEQ ID NO: 66481 - protein, 6 aa, Artificial sequence
  Protein classification predicting sequence
EPEFFL

SEQ ID NO: 66482 - protein, 6 aa, Artificial sequence
  Protein classification predicting sequence
AAKIFS

SEQ ID NO: 66483 - protein, 7 aa, Artificial sequence
  Protein classification predicting sequence
AGINISG

SEQ ID NO: 66484 - protein, 6 aa, Artificial sequence
  Protein classification predicting sequence
LDPKPI

SEQ ID NO: 66485 - protein, 16 aa, Artificial sequence
  Protein classification predicting sequence
EHIAAYGEGNERRLTG

SEQ ID NO: 66486 - protein, 26 aa, Artificial sequence
  Protein classification predicting sequence
EHIAAYGEGNERRLTGRHETADINTF

SEQ ID NO: 66487 - protein, 13 aa, Artificial sequence
  Protein classification predicting sequence
QVGPSVGIEAGDH

SEQ ID NO: 66488 - protein, 9 aa, Artificial sequence
  Protein classification predicting sequence
GEPLPTNKR

SEQ ID NO: 66489 - protein, 12 aa, Artificial sequence
  Protein classification predicting sequence
GIEQEYTLLQKD

SEQ ID NO: 66490 - protein, 9 aa, Artificial sequence
  Protein classification predicting sequence
AILNLSLRH

SEQ ID NO: 66491 - protein, 16 aa, Artificial sequence
  Protein classification predicting sequence
YMSLPQGEKVQAMYIW

SEQ ID NO: 66492 - protein, 15 aa, Artificial sequence
  Protein classification predicting sequence
DGTGEGLRCKTRTLD

SEQ ID NO: 66493 - protein, 6 aa, Artificial sequence
  Protein classification predicting sequence
EQEYTL

SEQ ID NO: 66494 - protein, 6 aa, Artificial sequence
  Protein classification predicting sequence
ACLYAG

SEQ ID NO: 66495 - protein, 8 aa, Artificial sequence
  Protein classification predicting sequence
FSAGVANR

SEQ ID NO: 66496 - protein, 8 aa, Artificial sequence
  Protein classification predicting sequence
GYFEDRRP

SEQ ID NO: 66497 - protein, 9 aa, Artificial sequence
  Protein classification predicting sequence
RTCLLNETG

SEQ ID NO: 66498 - protein, 7 aa, Artificial sequence
  Protein classification predicting sequence
SDVYLRP

SEQ ID NO: 66499 - protein, 12 aa, Artificial sequence
  Protein classification predicting sequence
EDRRPASNIDPY

SEQ ID NO: 66500 - protein, 7 aa, Artificial sequence
  Protein classification predicting sequence
IAETTIL

SEQ ID NO: 66501 - protein, 6 aa, Artificial sequence
  Protein classification predicting sequence
INESDM

SEQ ID NO: 66502 - protein, 6 aa, Artificial sequence
  Protein classification predicting sequence
LYYIGG

SEQ ID NO: 66503 - protein, 13 aa, Artificial sequence
  Protein classification predicting sequence
PDATSNPYLAFAA

SEQ ID NO: 66504 - protein, 5 aa, Artificial sequence
  Protein classification predicting sequence
EFFLF

SEQ ID NO: 66505 - protein, 8 aa, Artificial sequence
  Protein classification predicting sequence
WNFDGSST

SEQ ID NO: 66506 - protein, 6 aa, Artificial sequence
  Protein classification predicting sequence
RHKEHI

SEQ ID NO: 66507 - protein, 13 aa, Artificial sequence
  Protein classification predicting sequence
GHRPGVKGGYFPV

SEQ ID NO: 66508 - protein, 7 aa, Artificial sequence
  Protein classification predicting sequence
KGGYFPV

SEQ ID NO: 66509 - protein, 6 aa, Artificial sequence
  Protein classification predicting sequence
HQSIWK

SEQ ID NO: 66510 - protein, 6 aa, Artificial sequence
  Protein classification predicting sequence
NPYLAF

SEQ ID NO: 66511 - protein, 8 aa, Artificial sequence
  Protein classification predicting sequence
QGYDRDPR

SEQ ID NO: 66512 - protein, 7 aa, Artificial sequence
  Protein classification predicting sequence
GPEPEFF

SEQ ID NO: 66513 - protein, 6 aa, Artificial sequence
  Protein classification predicting sequence
EFFIFD

SEQ ID NO: 66514 - protein, 9 aa, Artificial sequence
  Protein classification predicting sequence
GYAGLSDTA

SEQ ID NO: 66515 - protein, 7 aa, Artificial sequence
  Protein classification predicting sequence
IGGIIKH

SEQ ID NO: 66516 - protein, 20 aa, Artificial sequence
  Protein classification predicting sequence
EAPVMLAYSARNRSASIRIP

SEQ ID NO: 66517 - protein, 10 aa, Artificial sequence
  Protein classification predicting sequence
NLKRVLKEME

SEQ ID NO: 66518 - protein, 15 aa, Artificial sequence
  Protein classification predicting sequence
DLGENCRRDIVLELE

SEQ ID NO: 66519 - protein, 12 aa, Artificial sequence
  Protein classification predicting sequence
EVRSVDPAANPY

SEQ ID NO: 66520 - protein, 7 aa, Artificial sequence
  Protein classification predicting sequence
WERDQYM

SEQ ID NO: 66521 - protein, 15 aa, Artificial sequence
  Protein classification predicting sequence
RLQFTDILGTIKNVE

SEQ ID NO: 66522 - protein, 7 aa, Artificial sequence
  Protein classification predicting sequence
VIFPWTA

SEQ ID NO: 66523 - protein, 9 aa, Artificial sequence
  Protein classification predicting sequence
LKEMEDLGF

SEQ ID NO: 66524 - protein, 27 aa, Artificial sequence
  Protein classification predicting sequence
DFNLGPEPEFFLFKLDEKGEPTLELND

SEQ ID NO: 66525 - protein, 11 aa, Artificial sequence
  Protein classification predicting sequence
QSEGSNSDMYL

SEQ ID NO: 66526 - protein, 59 aa, Artificial sequence
  Protein classification predicting sequence
MGDHLWVARFILHRVCEDFGVIATFDPKPIPGNWNGAGCHTNFSTKAMREENGLKYIEE

SEQ ID NO: 66527 - protein, 7 aa, Artificial sequence
  Protein classification predicting sequence
ASIRIPR

SEQ ID NO: 66528 - protein, 11 aa, Artificial sequence
  Protein classification predicting sequence
LPEWNFDGSST

SEQ ID NO: 66529 - protein, 13 aa, Artificial sequence
  Protein classification predicting sequence
LPEWNFDGSSTFQ

SEQ ID NO: 66530 - protein, 6 aa, Artificial sequence
  Protein classification predicting sequence
GYFEDR

SEQ ID NO: 66531 - protein, 7 aa, Artificial sequence
  Protein classification predicting sequence
PSANCDP

SEQ ID NO: 66532 - protein, 10 aa, Artificial sequence
  Protein classification predicting sequence
GFVRIEESDM

SEQ ID NO: 66533 - protein, 6 aa, Artificial sequence
  Protein classification predicting sequence
EIDFKY

SEQ ID NO: 66534 - protein, 7 aa, Artificial sequence
  Protein classification predicting sequence
TFKLVVK

SEQ ID NO: 66535 - protein, 5 aa, Artificial sequence
  Protein classification predicting sequence
FMPKP

SEQ ID NO: 66536 - protein, 8 aa, Artificial sequence
  Protein classification predicting sequence
FMPKPIFG

SEQ ID NO: 66537 - protein, 13 aa, Artificial sequence
  Protein classification predicting sequence
NSYKRLVPGYEAP

SEQ ID NO: 66538 - protein, 6 aa, Artificial sequence
  Protein classification predicting sequence
RCPDPS

SEQ ID NO: 66539 - protein, 6 aa, Artificial sequence
  Protein classification predicting sequence
YGEGNE

SEQ ID NO: 66540 - protein, 10 aa, Artificial sequence
  Protein classification predicting sequence
GVANRGASIR

SEQ ID NO: 66541 - protein, 7 aa, Artificial sequence
  Protein classification predicting sequence
SNSDMYL

SEQ ID NO: 66542 - protein, 11 aa, Artificial sequence
  Protein classification predicting sequence
GTDGHPFGWPS

SEQ ID NO: 66543 - protein, 7 aa, Artificial sequence
  Protein classification predicting sequence
GFPGPQG

SEQ ID NO: 66544 - protein, 13 aa, Artificial sequence
  Protein classification predicting sequence
AQWEFQIGPCEGI

SEQ ID NO: 66545 - protein, 9 aa, Artificial sequence
  Protein classification predicting sequence
DFGVIATFD

SEQ ID NO: 66546 - protein, 11 aa, Artificial sequence
  Protein classification predicting sequence
PQGPYYCGVGA

SEQ ID NO: 66547 - protein, 6 aa, Artificial sequence
  Protein classification predicting sequence
MGDHLW

SEQ ID NO: 66548 - protein, 9 aa, Artificial sequence
  Protein classification predicting sequence
GDWNGAGCH

SEQ ID NO: 66549 - protein, 5 aa, Artificial sequence
  Protein classification predicting sequence
NYSTK

SEQ ID NO: 66550 - protein, 11 aa, Artificial sequence
  Protein classification predicting sequence
GYLEDRRPASN

SEQ ID NO: 66551 - protein, 7 aa, Artificial sequence
  Protein classification predicting sequence
WPKGGFP

SEQ ID NO: 66552 - protein, 6 aa, Artificial sequence
  Protein classification predicting sequence
STKSMR

SEQ ID NO: 66553 - protein, 8 aa, Artificial sequence
  Protein classification predicting sequence
GVANRGAS

SEQ ID NO: 66554 - protein, 7 aa, Artificial sequence
  Protein classification predicting sequence
ALYYIGG

SEQ ID NO: 66555 - protein, 10 aa, Artificial sequence
  Protein classification predicting sequence
WFGLEQEYTL

SEQ ID NO: 66556 - protein, 7 aa, Artificial sequence
  Protein classification predicting sequence
GDWNGAG

SEQ ID NO: 66557 - protein, 8 aa, Artificial sequence
  Protein classification predicting sequence
RLTGRHET

SEQ ID NO: 66558 - protein, 11 aa, Artificial sequence
  Protein classification predicting sequence
GYFEDRRPASN

SEQ ID NO: 66559 - protein, 8 aa, Artificial sequence
  Protein classification predicting sequence
GDKYAGLS

SEQ ID NO: 66560 - protein, 7 aa, Artificial sequence
  Protein classification predicting sequence
GTPNKFN

SEQ ID NO: 66561 - protein, 6 aa, Artificial sequence
  Protein classification predicting sequence
YYCGVG

SEQ ID NO: 66562 - protein, 8 aa, Artificial sequence
  Protein classification predicting sequence
RDIVEAHY

SEQ ID NO: 66563 - protein, 8 aa, Artificial sequence
  Protein classification predicting sequence
DIRSEMCL

SEQ ID NO: 66564 - protein, 9 aa, Artificial sequence
  Protein classification predicting sequence
ANPYLAFAA

SEQ ID NO: 66565 - protein, 6 aa, Artificial sequence
  Protein classification predicting sequence
NKIHPG

SEQ ID NO: 66566 - protein, 13 aa, Artificial sequence
  Protein classification predicting sequence
MGFEIEASHHEVA

SEQ ID NO: 66567 - protein, 8 aa, Artificial sequence
  Protein classification predicting sequence
DGTPNRTN

SEQ ID NO: 66568 - protein, 6 aa, Artificial sequence
  Protein classification predicting sequence
PRSIAK

SEQ ID NO: 66569 - protein, 13 aa, Artificial sequence
  Protein classification predicting sequence
TSASSHLNKGIKQ

SEQ ID NO: 66570 - protein, 7 aa, Artificial sequence
  Protein classification predicting sequence
EVPVSQL

SEQ ID NO: 66571 - protein, 6 aa, Artificial sequence
  Protein classification predicting sequence
NSYKRL

SEQ ID NO: 66572 - protein, 8 aa, Artificial sequence
  Protein classification predicting sequence
EAPVYISW

SEQ ID NO: 66573 - protein, 8 aa, Artificial sequence
  Protein classification predicting sequence
DPTANPYL

SEQ ID NO: 66574 - protein, 7 aa, Artificial sequence
  Protein classification predicting sequence
FTDILGT

SEQ ID NO: 66575 - protein, 6 aa, Artificial sequence
  Protein classification predicting sequence
ACDNIQ

SEQ ID NO: 66576 - protein, 12 aa, Artificial sequence
  Protein classification predicting sequence
FKLVVKTIARKH

SEQ ID NO: 66577 - protein, 7 aa, Artificial sequence
  Protein classification predicting sequence
SRGLSTR

SEQ ID NO: 66578 - protein, 7 aa, Artificial sequence
  Protein classification predicting sequence
HTNYSTK

SEQ ID NO: 66579 - protein, 10 aa, Artificial sequence
  Protein classification predicting sequence
PQAIFKDPFR

SEQ ID NO: 66580 - protein, 6 aa, Artificial sequence
  Protein classification predicting sequence
WPIGWP

SEQ ID NO: 66581 - protein, 7 aa, Artificial sequence
  Protein classification predicting sequence
GKEQHVT

SEQ ID NO: 66582 - protein, 16 aa, Artificial sequence
  Protein classification predicting sequence
GKTATFMPKPLVGDNG

SEQ ID NO: 66583 - protein, 7 aa, Artificial sequence
  Protein classification predicting sequence
GLSETAL

SEQ ID NO: 66584 - protein, 7 aa, Artificial sequence
  Protein classification predicting sequence
PFEGDPR

SEQ ID NO: 66585 - protein, 10 aa, Artificial sequence
  Protein classification predicting sequence
FDGSSIEGFV

SEQ ID NO: 66586 - protein, 10 aa, Artificial sequence
  Protein classification predicting sequence
GHRPAVKGGY

SEQ ID NO: 66587 - protein, 10 aa, Artificial sequence
  Protein classification predicting sequence
GKTATFMPKP

SEQ ID NO: 66588 - protein, 6 aa, Artificial sequence
  Protein classification predicting sequence
HTNFST

SEQ ID NO: 66589 - protein, 7 aa, Artificial sequence
  Protein classification predicting sequence
NWPLGWP

SEQ ID NO: 66590 - protein, 7 aa, Artificial sequence
  Protein classification predicting sequence
MIADTTI

SEQ ID NO: 66591 - protein, 6 aa, Artificial sequence
  Protein classification predicting sequence
QAMYIW

SEQ ID NO: 66592 - protein, 7 aa, Artificial sequence
  Protein classification predicting sequence
NKLVLCE

SEQ ID NO: 66593 - protein, 7 aa, Artificial sequence
  Protein classification predicting sequence
NERRLTG

SEQ ID NO: 66594 - protein, 6 aa, Artificial sequence
  Protein classification predicting sequence
GWKAIN

SEQ ID NO: 66595 - protein, 6 aa, Artificial sequence
  Protein classification predicting sequence
DPFRRG

SEQ ID NO: 66596 - protein, 12 aa, Artificial sequence
  Protein classification predicting sequence
AGVVLSFDPKPI

SEQ ID NO: 66597 - protein, 8 aa, Artificial sequence
  Protein classification predicting sequence
TIPAHQVN

SEQ ID NO: 66598 - protein, 33 aa, Artificial sequence
  Protein classification predicting sequence
FFEEGKMFDGSSIGGWKGINESDMVLMPDASTA

SEQ ID NO: 66599 - protein, 7 aa, Artificial sequence
  Protein classification predicting sequence
TLIIRCD

SEQ ID NO: 66600 - protein, 22 aa, Artificial sequence
  Protein classification predicting sequence
GIADTVLFGPEPEFFLFDDIRF

SEQ ID NO: 66601 - protein, 7 aa, Artificial sequence
  Protein classification predicting sequence
GNKGHRP

SEQ ID NO: 66602 - protein, 33 aa, Artificial sequence
  Protein classification predicting sequence
MGLVVEAHHHEVATAGQNEVATRFNTMTKKADE

SEQ ID NO: 66603 - protein, 8 aa, Artificial sequence
  Protein classification predicting sequence
GDNGSGMH

SEQ ID NO: 66604 - protein, 10 aa, Artificial sequence
  Protein classification predicting sequence
TNSYKRLVPG

SEQ ID NO: 66605 - protein, 9 aa, Artificial sequence
  Protein classification predicting sequence
NSYKRLVPG

SEQ ID NO: 66606 - protein, 6 aa, Artificial sequence
  Protein classification predicting sequence
GPEPEF

SEQ ID NO: 66607 - protein, 18 aa, Artificial sequence
  Protein classification predicting sequence
PEVLHHEVGKAQHEIDFR

SEQ ID NO: 66608 - protein, 14 aa, Artificial sequence
  Protein classification predicting sequence
GARIEYRCPDPSAN

SEQ ID NO: 66609 - protein, 23 aa, Artificial sequence
  Protein classification predicting sequence
PEVLHHEVGKAQHEIDFRYDEAL

SEQ ID NO: 66610 - protein, 9 aa, Artificial sequence
  Protein classification predicting sequence
TADNIVSFK

SEQ ID NO: 66611 - protein, 21 aa, Artificial sequence
  Protein classification predicting sequence
MYIWVDGTGEGLRCKTRTLDC

SEQ ID NO: 66612 - protein, 9 aa, Artificial sequence
  Protein classification predicting sequence
CKRIMDMVS

SEQ ID NO: 66613 - protein, 6 aa, Artificial sequence
  Protein classification predicting sequence
YSRDPR

SEQ ID NO: 66614 - protein, 20 aa, Artificial sequence
  Protein classification predicting sequence
SISGSHVAIDDIEGAWNSST

SEQ ID NO: 66615 - protein, 65 aa, Artificial sequence
  Protein classification predicting sequence
GDKYAGLSEQALYYIGGVIKHAKAINALANPTTNSYKRLVPGYEAPVMLAYSARNRSASIRIPVV

SEQ ID NO: 66616 - protein, 70 aa, Artificial sequence
  Protein classification predicting sequence
SPKARRIEVRFPDPAANPYLCFAALLMAGLDGIKNKIHPGEAMDKNLYDLPPEEAKEIPQVAGSLEEALN

SEQ ID NO: 66617 - protein, 9 aa, Artificial sequence
  Protein classification predicting sequence
WFGIEQEYT

SEQ ID NO: 66618 - protein, 6 aa, Artificial sequence
  Protein classification predicting sequence
SFHPKP

SEQ ID NO: 66619 - protein, 9 aa, Artificial sequence
  Protein classification predicting sequence
RLTGRHETG

SEQ ID NO: 66620 - protein, 9 aa, Artificial sequence
  Protein classification predicting sequence
IDPYLVTGI

SEQ ID NO: 66621 - protein, 8 aa, Artificial sequence
  Protein classification predicting sequence
RCKTRTLD

SEQ ID NO: 66622 - protein, 8 aa, Artificial sequence
  Protein classification predicting sequence
KYNRKPAE

SEQ ID NO: 66623 - protein, 12 aa, Artificial sequence
  Protein classification predicting sequence
RFILHRVCEDFG

SEQ ID NO: 66624 - protein, 7 aa, Artificial sequence
  Protein classification predicting sequence
SFDPKPI

SEQ ID NO: 66625 - protein, 6 aa, Artificial sequence
  Protein classification predicting sequence
FDPKPI

SEQ ID NO: 66626 - protein, 8 aa, Artificial sequence
  Protein classification predicting sequence
FDPKPIPG

SEQ ID NO: 66627 - protein, 7 aa, Artificial sequence
  Protein classification predicting sequence
HETSNIN

SEQ ID NO: 66628 - protein, 8 aa, Artificial sequence
  Protein classification predicting sequence
GLDGIKNK

SEQ ID NO: 66629 - protein, 93 aa, Artificial sequence
  Protein classification predicting sequence
FTKDDIRKFAEEENVRYLRLQFTDILGTIKNVEVPVSQLEKVLDNEMMFDGSSIEGFVRIEESDMYLHPDLDTWVIFPWTAGQGKVARLICDV

SEQ ID NO: 66630 - protein, 19 aa, Artificial sequence
  Protein classification predicting sequence
KTDGTPFEGDPRANLKRVL

SEQ ID NO: 66631 - protein, 22 aa, Artificial sequence
  Protein classification predicting sequence
TAYQFTAGVLKNARGFTAVCNP

SEQ ID NO: 66632 - protein, 14 aa, Artificial sequence
  Protein classification predicting sequence
VNSYKRLVPGYEAP

SEQ ID NO: 66633 - protein, 27 aa, Artificial sequence
  Protein classification predicting sequence
VNSYKRLVPGYEAPCYIAWSGKNRSPL

SEQ ID NO: 66634 - protein, 39 aa, Artificial sequence
  Protein classification predicting sequence
VPEPVNQNIYEMNREEREAVGIQDLPSTLYTALKAMREN

SEQ ID NO: 66635 - protein, 30 aa, Artificial sequence
  Protein classification predicting sequence
ALGNHIYNQFINSKSIEWDYYRTQVSEWER

SEQ ID NO: 66636 - protein, 7 aa, Artificial sequence
  Protein classification predicting sequence
FGPEAEF

SEQ ID NO: 66637 - protein, 6 aa, Artificial sequence
  Protein classification predicting sequence
EFFVFD

SEQ ID NO: 66638 - protein, 9 aa, Artificial sequence
  Protein classification predicting sequence
HHEVATAGQ

SEQ ID NO: 66639 - protein, 6 aa, Artificial sequence
  Protein classification predicting sequence
PTTNSY

SEQ ID NO: 66640 - protein, 5 aa, Artificial sequence
  Protein classification predicting sequence
GMHTH

SEQ ID NO: 66641 - protein, 7 aa, Artificial sequence
  Protein classification predicting sequence
RDPRSIA

SEQ ID NO: 66642 - protein, 10 aa, Artificial sequence
  Protein classification predicting sequence
RLVPGFEAPV

SEQ ID NO: 66643 - protein, 15 aa, Artificial sequence
  Protein classification predicting sequence
NPKAKRLEFRCPDAT

SEQ ID NO: 66644 - protein, 10 aa, Artificial sequence
  Protein classification predicting sequence
NPYLAFAAML

SEQ ID NO: 66645 - protein, 7 aa, Artificial sequence
  Protein classification predicting sequence
DNGSGMH

SEQ ID NO: 66646 - protein, 20 aa, Artificial sequence
  Protein classification predicting sequence
MFDGSSIEGFVRIEESDMYL

SEQ ID NO: 66647 - protein, 8 aa, Artificial sequence
  Protein classification predicting sequence
KYVVHNVA

SEQ ID NO: 66648 - protein, 8 aa, Artificial sequence
  Protein classification predicting sequence
TATFMPKP

SEQ ID NO: 66649 - protein, 9 aa, Artificial sequence
  Protein classification predicting sequence
NRSASIRIP

SEQ ID NO: 66650 - protein, 10 aa, Artificial sequence
  Protein classification predicting sequence
DGSSTGQAPG

SEQ ID NO: 66651 - protein, 13 aa, Artificial sequence
  Protein classification predicting sequence
DGSSTGQAPGEDS

SEQ ID NO: 66652 - protein, 9 aa, Artificial sequence
  Protein classification predicting sequence
PNKFNHRHE

SEQ ID NO: 66653 - protein, 9 aa, Artificial sequence
  Protein classification predicting sequence
FSYGVADRG

SEQ ID NO: 66654 - protein, 18 aa, Artificial sequence
  Protein classification predicting sequence
EVKFVDLRFTDTKGKEQH

SEQ ID NO: 66655 - protein, 8 aa, Artificial sequence
  Protein classification predicting sequence
GKMFDGSS

SEQ ID NO: 66656 - protein, 8 aa, Artificial sequence
  Protein classification predicting sequence
IRCDILEP

SEQ ID NO: 66657 - protein, 9 aa, Artificial sequence
  Protein classification predicting sequence
GPEPEFFLF

SEQ ID NO: 66658 - protein, 6 aa, Artificial sequence
  Protein classification predicting sequence
MCLVME

SEQ ID NO: 66659 - protein, 11 aa, Artificial sequence
  Protein classification predicting sequence
MGLVVEAHHHE

SEQ ID NO: 66660 - protein, 7 aa, Artificial sequence
  Protein classification predicting sequence
ATAGQNE

SEQ ID NO: 66661 - protein, 17 aa, Artificial sequence
  Protein classification predicting sequence
KADEIQIYKYVVHNVAH

SEQ ID NO: 66662 - protein, 11 aa, Artificial sequence
  Protein classification predicting sequence
DPAANPYLCFA

SEQ ID NO: 66663 - protein, 6 aa, Artificial sequence
  Protein classification predicting sequence
MFRDPF

SEQ ID NO: 66664 - protein, 6 aa, Artificial sequence
  Protein classification predicting sequence
LVMCEV

SEQ ID NO: 66665 - protein, 10 aa, Artificial sequence
  Protein classification predicting sequence
AETNLRHTCK

SEQ ID NO: 66666 - protein, 7 aa, Artificial sequence
  Protein classification predicting sequence
ACLYAGI

SEQ ID NO: 66667 - protein, 14 aa, Artificial sequence
  Protein classification predicting sequence
ARFILHRVCEDFGV

SEQ ID NO: 66668 - protein, 9 aa, Artificial sequence
  Protein classification predicting sequence
WNGAGCHTN

SEQ ID NO: 66669 - protein, 10 aa, Artificial sequence
  Protein classification predicting sequence
HTNYSTESMR

SEQ ID NO: 66670 - protein, 9 aa, Artificial sequence
  Protein classification predicting sequence
GYFEDRRPA

SEQ ID NO: 66671 - protein, 6 aa, Artificial sequence
  Protein classification predicting sequence
GVANRG

SEQ ID NO: 66672 - protein, 6 aa, Artificial sequence
  Protein classification predicting sequence
WIDGTG

SEQ ID NO: 66673 - protein, 11 aa, Artificial sequence
  Protein classification predicting sequence
RYSWLLMYLFG

SEQ ID NO: 66674 - protein, 12 aa, Artificial sequence
  Protein classification predicting sequence
QLNTNVLQIENE

SEQ ID NO: 66675 - protein, 8 aa, Artificial sequence
  Protein classification predicting sequence
NVLQIENE

SEQ ID NO: 66676 - protein, 13 aa, Artificial sequence
  Protein classification predicting sequence
RGVQYVEVRCLDI

SEQ ID NO: 66677 - protein, 10 aa, Artificial sequence
  Protein classification predicting sequence
LTHKWITTDF

SEQ ID NO: 66678 - protein, 7 aa, Artificial sequence
  Protein classification predicting sequence
HYNFSLP

SEQ ID NO: 66679 - protein, 8 aa, Artificial sequence
  Protein classification predicting sequence
LDLFLIWC

SEQ ID NO: 66680 - protein, 6 aa, Artificial sequence
  Protein classification predicting sequence
WITTDF

SEQ ID NO: 66681 - protein, 8 aa, Artificial sequence
  Protein classification predicting sequence
QLNTNILQ

SEQ ID NO: 66682 - protein, 7 aa, Artificial sequence
  Protein classification predicting sequence
LLEFITP

SEQ ID NO: 66683 - protein, 10 aa, Artificial sequence
  Protein classification predicting sequence
EERGLEPLKN

SEQ ID NO: 66684 - protein, 7 aa, Artificial sequence
  Protein classification predicting sequence
VDVDTRC

SEQ ID NO: 66685 - protein, 7 aa, Artificial sequence
  Protein classification predicting sequence
SRYDSID

SEQ ID NO: 66686 - protein, 6 aa, Artificial sequence
  Protein classification predicting sequence
WPLSMP

SEQ ID NO: 66687 - protein, 7 aa, Artificial sequence
  Protein classification predicting sequence
YLFGASP

SEQ ID NO: 66688 - protein, 7 aa, Artificial sequence
  Protein classification predicting sequence
LWRPEYG

SEQ ID NO: 66689 - protein, 8 aa, Artificial sequence
  Protein classification predicting sequence
YMIEGTPG

SEQ ID NO: 66690 - protein, 8 aa, Artificial sequence
  Protein classification predicting sequence
DAMGFGMG

SEQ ID NO: 66691 - protein, 6 aa, Artificial sequence
  Protein classification predicting sequence
MGFGMG

SEQ ID NO: 66692 - protein, 11 aa, Artificial sequence
  Protein classification predicting sequence
MGFGMGCCCLQ

SEQ ID NO: 66693 - protein, 12 aa, Artificial sequence
  Protein classification predicting sequence
KSRYDSIDSYLS

SEQ ID NO: 66694 - protein, 17 aa, Artificial sequence
  Protein classification predicting sequence
GIDHLLAQHVAHLFIRD

SEQ ID NO: 66695 - protein, 23 aa, Artificial sequence
  Protein classification predicting sequence
DHFENIQSTNWQTMRFKPPPPNS

SEQ ID NO: 66696 - protein, 15 aa, Artificial sequence
  Protein classification predicting sequence
HMLTFMRDLHRYTAR

SEQ ID NO: 66697 - protein, 7 aa, Artificial sequence
  Protein classification predicting sequence
EYVAGLK

SEQ ID NO: 66698 - protein, 10 aa, Artificial sequence
  Protein classification predicting sequence
AIKTPSEEYA

SEQ ID NO: 66699 - protein, 19 aa, Artificial sequence
  Protein classification predicting sequence
VGKDLFRDLKRVAQTLDSI

SEQ ID NO: 66700 - protein, 15 aa, Artificial sequence
  Protein classification predicting sequence
YQKVCDELVACFDNP

SEQ ID NO: 66701 - protein, 13 aa, Artificial sequence
  Protein classification predicting sequence
LTFSARILRSMID

SEQ ID NO: 66702 - protein, 9 aa, Artificial sequence
  Protein classification predicting sequence
GIGGTGKAF

SEQ ID NO: 66703 - protein, 15 aa, Artificial sequence
  Protein classification predicting sequence
EAYRNLLREEPLEIL

SEQ ID NO: 66704 - protein, 9 aa, Artificial sequence
  Protein classification predicting sequence
EAADTEPFA

SEQ ID NO: 66705 - protein, 31 aa, Artificial sequence
  Protein classification predicting sequence
IRNYYRFGWVIPYLFGASPAICSSFLQGKPT

SEQ ID NO: 66706 - protein, 28 aa, Artificial sequence
  Protein classification predicting sequence
NWNRVILEGRKPGLTLGIGCETAQFPLP

SEQ ID NO: 66707 - protein, 8 aa, Artificial sequence
  Protein classification predicting sequence
LATTGHPE

SEQ ID NO: 66708 - protein, 18 aa, Artificial sequence
  Protein classification predicting sequence
WITTDFAEALLEFITPVD

SEQ ID NO: 66709 - protein, 30 aa, Artificial sequence
  Protein classification predicting sequence
YLPYATSLRLSDLGYTNKSQSNLGITFNDL

SEQ ID NO: 66710 - protein, 25 aa, Artificial sequence
  Protein classification predicting sequence
PSDALLRGGIEYIEVRSLDINPFSP

SEQ ID NO: 66711 - protein, 6 aa, Artificial sequence
  Protein classification predicting sequence
RFLDLF

SEQ ID NO: 66712 - protein, 11 aa, Artificial sequence
  Protein classification predicting sequence
WCALADAPEMS

SEQ ID NO: 66713 - protein, 12 aa, Artificial sequence
  Protein classification predicting sequence
MQTISGVHYNFS

SEQ ID NO: 66714 - protein, 6 aa, Artificial sequence
  Protein classification predicting sequence
LQIENE

SEQ ID NO: 66715 - protein, 9 aa, Artificial sequence
  Protein classification predicting sequence
RSHIWTDTD

SEQ ID NO: 66716 - protein, 11 aa, Artificial sequence
  Protein classification predicting sequence
GLKTPFRDGLL

SEQ ID NO: 66717 - protein, 7 aa, Artificial sequence
  Protein classification predicting sequence
MRFKPPP

SEQ ID NO: 66718 - protein, 6 aa, Artificial sequence
  Protein classification predicting sequence
WMREFI

SEQ ID NO: 66719 - protein, 8 aa, Artificial sequence
  Protein classification predicting sequence
MWPLSMPC

SEQ ID NO: 66720 - protein, 29 aa, Artificial sequence
  Protein classification predicting sequence
KTLYREGLKNRYGALMQTISGVHYNFSLP

SEQ ID NO: 66721 - protein, 31 aa, Artificial sequence
  Protein classification predicting sequence
GYFRLIRNYYRFGWVIPYLFGASPAICSSFL

SEQ ID NO: 66722 - protein, 9 aa, Artificial sequence
  Protein classification predicting sequence
LGYTNKSQS

SEQ ID NO: 66723 - protein, 20 aa, Artificial sequence
  Protein classification predicting sequence
NVLQIENELYAPIRPKRVTR

SEQ ID NO: 66724 - protein, 9 aa, Artificial sequence
  Protein classification predicting sequence
KTLYREGLK

SEQ ID NO: 66725 - protein, 8 aa, Artificial sequence
  Protein classification predicting sequence
YLFGASPA

SEQ ID NO: 66726 - protein, 20 aa, Artificial sequence
  Protein classification predicting sequence
NSNVLQIENELYAPIRPKRV

SEQ ID NO: 66727 - protein, 8 aa, Artificial sequence
  Protein classification predicting sequence
GEKPSEAL

SEQ ID NO: 66728 - protein, 8 aa, Artificial sequence
  Protein classification predicting sequence
QVRFLDLF

SEQ ID NO: 66729 - protein, 12 aa, Artificial sequence
  Protein classification predicting sequence
QVRFLDLFLTWA

SEQ ID NO: 66730 - protein, 12 aa, Artificial sequence
  Protein classification predicting sequence
CLHGIERECLRV

SEQ ID NO: 66731 - protein, 8 aa, Artificial sequence
  Protein classification predicting sequence
LTPSAQVL

SEQ ID NO: 66732 - protein, 10 aa, Artificial sequence
  Protein classification predicting sequence
HPEALGSALT

SEQ ID NO: 66733 - protein, 11 aa, Artificial sequence
  Protein classification predicting sequence
VYRKGLALRYG

SEQ ID NO: 66734 - protein, 16 aa, Artificial sequence
  Protein classification predicting sequence
TMQCIAGIHYNFSLPE

SEQ ID NO: 66735 - protein, 8 aa, Artificial sequence
  Protein classification predicting sequence
LPYATSLR

SEQ ID NO: 66736 - protein, 18 aa, Artificial sequence
  Protein classification predicting sequence
RGVQYVEVRCLDINPFLP

SEQ ID NO: 66737 - protein, 10 aa, Artificial sequence
  Protein classification predicting sequence
VVKEGRRPGL

SEQ ID NO: 66738 - protein, 5 aa, Artificial sequence
  Protein classification predicting sequence
STNWQ

SEQ ID NO: 66739 - protein, 7 aa, Artificial sequence
  Protein classification predicting sequence
YGTSNTG

SEQ ID NO: 66740 - protein, 7 aa, Artificial sequence
  Protein classification predicting sequence
GEYRQLN

SEQ ID NO: 66741 - protein, 6 aa, Artificial sequence
  Protein classification predicting sequence
EYIEVR

SEQ ID NO: 66742 - protein, 11 aa, Artificial sequence
  Protein classification predicting sequence
LDVNPFSPIGI

SEQ ID NO: 66743 - protein, 38 aa, Artificial sequence
  Protein classification predicting sequence
KMKTLYREGLKRRYGSLMQIISGVHFNFSFPESFWDAL

SEQ ID NO: 66744 - protein, 9 aa, Artificial sequence
  Protein classification predicting sequence
IRNYYRFGW

SEQ ID NO: 66745 - protein, 13 aa, Artificial sequence
  Protein classification predicting sequence
IRNYYRFGWLIPY

SEQ ID NO: 66746 - protein, 7 aa, Artificial sequence
  Protein classification predicting sequence
CSSFLQG

SEQ ID NO: 66747 - protein, 9 aa, Artificial sequence
  Protein classification predicting sequence
YLPYATSLR

SEQ ID NO: 66748 - protein, 19 aa, Artificial sequence
  Protein classification predicting sequence
ATSLRLSDLGYTNSAQSVL

SEQ ID NO: 66749 - protein, 6 aa, Artificial sequence
  Protein classification predicting sequence
ERETLR

SEQ ID NO: 66750 - protein, 7 aa, Artificial sequence
  Protein classification predicting sequence
GSALTHK

SEQ ID NO: 66751 - protein, 9 aa, Artificial sequence
  Protein classification predicting sequence
ESLLEFITP

SEQ ID NO: 66752 - protein, 13 aa, Artificial sequence
  Protein classification predicting sequence
ATSLRLSDLGYTN

SEQ ID NO: 66753 - protein, 16 aa, Artificial sequence
  Protein classification predicting sequence
LQIENELYAPIRPKRV

SEQ ID NO: 66754 - protein, 8 aa, Artificial sequence
  Protein classification predicting sequence
MQIISGVH

SEQ ID NO: 66755 - protein, 11 aa, Artificial sequence
  Protein classification predicting sequence
GIEYIEIRSLD

SEQ ID NO: 66756 - protein, 5 aa, Artificial sequence
  Protein classification predicting sequence
FLIWC

SEQ ID NO: 66757 - protein, 7 aa, Artificial sequence
  Protein classification predicting sequence
NWNRVIL

SEQ ID NO: 66758 - protein, 8 aa, Artificial sequence
  Protein classification predicting sequence
CLQVTFQA

SEQ ID NO: 66759 - protein, 20 aa, Artificial sequence
  Protein classification predicting sequence
HRYTARKLGDERMWPLSMPC

SEQ ID NO: 66760 - protein, 19 aa, Artificial sequence
  Protein classification predicting sequence
WCVLADAPEMSSDELLCTR

SEQ ID NO: 66761 - protein, 7 aa, Artificial sequence
  Protein classification predicting sequence
VCDELVA

SEQ ID NO: 66762 - protein, 7 aa, Artificial sequence
  Protein classification predicting sequence
DIILKPL

SEQ ID NO: 66763 - protein, 9 aa, Artificial sequence
  Protein classification predicting sequence
VGIDVIGDY

SEQ ID NO: 66764 - protein, 5 aa, Artificial sequence
  Protein classification predicting sequence
PPFDM

SEQ ID NO: 66765 - protein, 10 aa, Artificial sequence
  Protein classification predicting sequence
KPQREGGGNN

SEQ ID NO: 66766 - protein, 8 aa, Artificial sequence
  Protein classification predicting sequence
KPLDGMGG

SEQ ID NO: 66767 - protein, 12 aa, Artificial sequence
  Protein classification predicting sequence
LDVILMRKDPPF

SEQ ID NO: 66768 - protein, 8 aa, Artificial sequence
  Protein classification predicting sequence
SLRDCNEK

SEQ ID NO: 66769 - protein, 12 aa, Artificial sequence
  Protein classification predicting sequence
LTEINVTSPTCI

SEQ ID NO: 66770 - protein, 10 aa, Artificial sequence
  Protein classification predicting sequence
INIKKDSSFA

SEQ ID NO: 66771 - protein, 7 aa, Artificial sequence
  Protein classification predicting sequence
YMEMNDL

SEQ ID NO: 66772 - protein, 8 aa, Artificial sequence
  Protein classification predicting sequence
LDVILMRK

SEQ ID NO: 66773 - protein, 8 aa, Artificial sequence
  Protein classification predicting sequence
IYATYILE

SEQ ID NO: 66774 - protein, 6 aa, Artificial sequence
  Protein classification predicting sequence
CLARIP

SEQ ID NO: 66775 - protein, 6 aa, Artificial sequence
  Protein classification predicting sequence
TSPTCI

SEQ ID NO: 66776 - protein, 6 aa, Artificial sequence
  Protein classification predicting sequence
SIFRVK

SEQ ID NO: 66777 - protein, 9 aa, Artificial sequence
  Protein classification predicting sequence
MAQRYIPEI

SEQ ID NO: 66778 - protein, 9 aa, Artificial sequence
  Protein classification predicting sequence
TEVNVTSPT

SEQ ID NO: 66779 - protein, 7 aa, Artificial sequence
  Protein classification predicting sequence
GDKRIIL

SEQ ID NO: 66780 - protein, 12 aa, Artificial sequence
  Protein classification predicting sequence
GDKRIILIDGEP

SEQ ID NO: 66781 - protein, 27 aa, Artificial sequence
  Protein classification predicting sequence
GEQDLPLADLDVILMRKDPPFDTEFIY

SEQ ID NO: 66782 - protein, 8 aa, Artificial sequence
  Protein classification predicting sequence
TYILERAE

SEQ ID NO: 66783 - protein, 6 aa, Artificial sequence
  Protein classification predicting sequence
MRKDPP

SEQ ID NO: 66784 - protein, 7 aa, Artificial sequence
  Protein classification predicting sequence
MRKDPPV

SEQ ID NO: 66785 - protein, 7 aa, Artificial sequence
  Protein classification predicting sequence
QNWEARL

SEQ ID NO: 66786 - protein, 8 aa, Artificial sequence
  Protein classification predicting sequence
AAKCPDIA

SEQ ID NO: 66787 - protein, 13 aa, Artificial sequence
  Protein classification predicting sequence
RTIMAQRYIPEIV

SEQ ID NO: 66788 - protein, 9 aa, Artificial sequence
  Protein classification predicting sequence
EKLAITEFP

SEQ ID NO: 66789 - protein, 7 aa, Artificial sequence
  Protein classification predicting sequence
VIIETLT

SEQ ID NO: 66790 - protein, 11 aa, Artificial sequence
  Protein classification predicting sequence
LMRKDPPFDTE

SEQ ID NO: 66791 - protein, 13 aa, Artificial sequence
  Protein classification predicting sequence
KPLDGMGGASIFR

SEQ ID NO: 66792 - protein, 11 aa, Artificial sequence
  Protein classification predicting sequence
LTEINVTSPTC

SEQ ID NO: 66793 - protein, 7 aa, Artificial sequence
  Protein classification predicting sequence
SITGMLM

SEQ ID NO: 66794 - protein, 6 aa, Artificial sequence
  Protein classification predicting sequence
GDKRIL

SEQ ID NO: 66795 - protein, 13 aa, Artificial sequence
  Protein classification predicting sequence
GETRGNLAAGGRG

SEQ ID NO: 66796 - protein, 22 aa, Artificial sequence
  Protein classification predicting sequence
GETRGNLAAGGRGVAQPLSERD

SEQ ID NO: 66797 - protein, 10 aa, Artificial sequence
  Protein classification predicting sequence
LTEINVTSPT

SEQ ID NO: 66798 - protein, 15 aa, Artificial sequence
  Protein classification predicting sequence
LTEINVTSPTCIREI

SEQ ID NO: 66799 - protein, 11 aa, Artificial sequence
  Protein classification predicting sequence
YLPAIKDGDKR

SEQ ID NO: 66800 - protein, 8 aa, Artificial sequence
  Protein classification predicting sequence
LGIVMDPI

SEQ ID NO: 66801 - protein, 6 aa, Artificial sequence
  Protein classification predicting sequence
LMDAIE

SEQ ID NO: 66802 - protein, 8 aa, Artificial sequence
  Protein classification predicting sequence
MRKDPPFD

SEQ ID NO: 66803 - protein, 14 aa, Artificial sequence
  Protein classification predicting sequence
RGLLLVGLDVIGDY

SEQ ID NO: 66804 - protein, 9 aa, Artificial sequence
  Protein classification predicting sequence
VGLDVIGDY

SEQ ID NO: 66805 - protein, 6 aa, Artificial sequence
  Protein classification predicting sequence
YGEEMV

SEQ ID NO: 66806 - protein, 6 aa, Artificial sequence
  Protein classification predicting sequence
INIKKD

SEQ ID NO: 66807 - protein, 22 aa, Artificial sequence
  Protein classification predicting sequence
DLTPETLVTRNKAQLKAFWEKH

SEQ ID NO: 66808 - protein, 9 aa, Artificial sequence
  Protein classification predicting sequence
GVIAETLTE

SEQ ID NO: 66809 - protein, 7 aa, Artificial sequence
  Protein classification predicting sequence
YMEMADL

SEQ ID NO: 66810 - protein, 9 aa, Artificial sequence
  Protein classification predicting sequence
NEKLFTAWF

SEQ ID NO: 66811 - protein, 7 aa, Artificial sequence
  Protein classification predicting sequence
LVVDGEP

SEQ ID NO: 66812 - protein, 7 aa, Artificial sequence
  Protein classification predicting sequence
SDWKIAR

SEQ ID NO: 66813 - protein, 8 aa, Artificial sequence
  Protein classification predicting sequence
GLIFVGLD

SEQ ID NO: 66814 - protein, 7 aa, Artificial sequence
  Protein classification predicting sequence
NVTSPTG

SEQ ID NO: 66815 - protein, 7 aa, Artificial sequence
  Protein classification predicting sequence
EFRGNMA

SEQ ID NO: 66816 - protein, 10 aa, Artificial sequence
  Protein classification predicting sequence
GDKRILLVDG

SEQ ID NO: 66817 - protein, 24 aa, Artificial sequence
  Protein classification predicting sequence
VNKPQSLRDCNEKLFTAWFPELTP

SEQ ID NO: 66818 - protein, 10 aa, Artificial sequence
  Protein classification predicting sequence
ILKPLDGMGG

SEQ ID NO: 66819 - protein, 23 aa, Artificial sequence
  Protein classification predicting sequence
ILKPLDGMGGASIFRVKEGDPNL

SEQ ID NO: 66820 - protein, 14 aa, Artificial sequence
  Protein classification predicting sequence
SVIIETLTNHGQNY

SEQ ID NO: 66821 - protein, 45 aa, Artificial sequence
  Protein classification predicting sequence
MAQTFVPDISNGDKRILVVDGEPMPYCLARIPAKGETRGNLAAGG

SEQ ID NO: 66822 - protein, 8 aa, Artificial sequence
  Protein classification predicting sequence
PYCLARIP

SEQ ID NO: 66823 - protein, 11 aa, Artificial sequence
  Protein classification predicting sequence
GETRGNLAAGG

SEQ ID NO: 66824 - protein, 8 aa, Artificial sequence
  Protein classification predicting sequence
PTLKEKGL

SEQ ID NO: 66825 - protein, 11 aa, Artificial sequence
  Protein classification predicting sequence
MIKLGIVMDPI

SEQ ID NO: 66826 - protein, 7 aa, Artificial sequence
  Protein classification predicting sequence
MDPISSI

SEQ ID NO: 66827 - protein, 6 aa, Artificial sequence
  Protein classification predicting sequence
DIILKP

SEQ ID NO: 66828 - protein, 9 aa, Artificial sequence
  Protein classification predicting sequence
NDPNVSVII

SEQ ID NO: 66829 - protein, 6 aa, Artificial sequence
  Protein classification predicting sequence
TSPTGI

SEQ ID NO: 66830 - protein, 15 aa, Artificial sequence
  Protein classification predicting sequence
GDPNLNVILETLTDG

SEQ ID NO: 66831 - protein, 7 aa, Artificial sequence
  Protein classification predicting sequence
YCLARIP

SEQ ID NO: 66832 - protein, 7 aa, Artificial sequence
  Protein classification predicting sequence
NRSDYMF

SEQ ID NO: 66833 - protein, 14 aa, Artificial sequence
  Protein classification predicting sequence
ASFGGLASRTPAVH

SEQ ID NO: 66834 - protein, 15 aa, Artificial sequence
  Protein classification predicting sequence
DGGVAAGVAVLDNPY

SEQ ID NO: 66835 - protein, 7 aa, Artificial sequence
  Protein classification predicting sequence
ELHYMEM

SEQ ID NO: 66836 - protein, 11 aa, Artificial sequence
  Protein classification predicting sequence
ELHYMEMGDLY

SEQ ID NO: 66837 - protein, 11 aa, Artificial sequence
  Protein classification predicting sequence
IYATYILERAE

SEQ ID NO: 66838 - protein, 6 aa, Artificial sequence
  Protein classification predicting sequence
YCEIVP

SEQ ID NO: 66839 - protein, 6 aa, Artificial sequence
  Protein classification predicting sequence
KRKIIG

SEQ ID NO: 66840 - protein, 12 aa, Artificial sequence
  Protein classification predicting sequence
EPLRLLFKDEVR

SEQ ID NO: 66841 - protein, 7 aa, Artificial sequence
  Protein classification predicting sequence
LFKDEVR

SEQ ID NO: 66842 - protein, 12 aa, Artificial sequence
  Protein classification predicting sequence
LLPVQSVGVMGD

SEQ ID NO: 66843 - protein, 7 aa, Artificial sequence
  Protein classification predicting sequence
GQYNHLI

SEQ ID NO: 66844 - protein, 7 aa, Artificial sequence
  Protein classification predicting sequence
SHMDEVK

SEQ ID NO: 66845 - protein, 6 aa, Artificial sequence
  Protein classification predicting sequence
HTEYGN

SEQ ID NO: 66846 - protein, 7 aa, Artificial sequence
  Protein classification predicting sequence
DILKNFA

SEQ ID NO: 66847 - protein, 9 aa, Artificial sequence
  Protein classification predicting sequence
NGGQYVHRI

SEQ ID NO: 66848 - protein, 6 aa, Artificial sequence
  Protein classification predicting sequence
QFHPEV

SEQ ID NO: 66849 - protein, 8 aa, Artificial sequence
  Protein classification predicting sequence
GIILSGGP

SEQ ID NO: 66850 - protein, 7 aa, Artificial sequence
  Protein classification predicting sequence
DPEEKRK

SEQ ID NO: 66851 - protein, 7 aa, Artificial sequence
  Protein classification predicting sequence
QGTIYPD

SEQ ID NO: 66852 - protein, 7 aa, Artificial sequence
  Protein classification predicting sequence
LYKDEVR

SEQ ID NO: 66853 - protein, 10 aa, Artificial sequence
  Protein classification predicting sequence
PFPGPGLAVR

SEQ ID NO: 66854 - protein, 12 aa, Artificial sequence
  Protein classification predicting sequence
AIIALSGGVDSS

SEQ ID NO: 66855 - protein, 9 aa, Artificial sequence
  Protein classification predicting sequence
ALSGGVDSS

SEQ ID NO: 66856 - protein, 7 aa, Artificial sequence
  Protein classification predicting sequence
RAIGDRL

SEQ ID NO: 66857 - protein, 6 aa, Artificial sequence
  Protein classification predicting sequence
FIRVFE

SEQ ID NO: 66858 - protein, 7 aa, Artificial sequence
  Protein classification predicting sequence
RITSEIP

SEQ ID NO: 66859 - protein, 6 aa, Artificial sequence
  Protein classification predicting sequence
HKAIGD

SEQ ID NO: 66860 - protein, 7 aa, Artificial sequence
  Protein classification predicting sequence
IKSHHNV

SEQ ID NO: 66861 - protein, 7 aa, Artificial sequence
  Protein classification predicting sequence
QGTIAPD

SEQ ID NO: 66862 - protein, 10 aa, Artificial sequence
  Protein classification predicting sequence
IGRLFIEVFE

SEQ ID NO: 66863 - protein, 6 aa, Artificial sequence
  Protein classification predicting sequence
FIEVFE

SEQ ID NO: 66864 - protein, 13 aa, Artificial sequence
  Protein classification predicting sequence
GVTDPEEKRKIIG

SEQ ID NO: 66865 - protein, 21 aa, Artificial sequence
  Protein classification predicting sequence
GVTDPEEKRKIIGRVFIEVFE

SEQ ID NO: 66866 - protein, 7 aa, Artificial sequence
  Protein classification predicting sequence
KPPSTIE

SEQ ID NO: 66867 - protein, 7 aa, Artificial sequence
  Protein classification predicting sequence
IRETVGD

SEQ ID NO: 66868 - protein, 6 aa, Artificial sequence
  Protein classification predicting sequence
HRAIGD

SEQ ID NO: 66869 - protein, 6 aa, Artificial sequence
  Protein classification predicting sequence
SIDGMT

SEQ ID NO: 66870 - protein, 13 aa, Artificial sequence
  Protein classification predicting sequence
KAIIALSGGVDSS

SEQ ID NO: 66871 - protein, 11 aa, Artificial sequence
  Protein classification predicting sequence
QGTIAPDWIES

SEQ ID NO: 66872 - protein, 11 aa, Artificial sequence
  Protein classification predicting sequence
PFPGPGLAVRV

SEQ ID NO: 66873 - protein, 26 aa, Artificial sequence
  Protein classification predicting sequence
PWQAFAVLLGVKTVGVQGDIRAYKET

SEQ ID NO: 66874 - protein, 7 aa, Artificial sequence
  Protein classification predicting sequence
KPPATIE

SEQ ID NO: 66875 - protein, 6 aa, Artificial sequence
  Protein classification predicting sequence
MTADFA

SEQ ID NO: 66876 - protein, 8 aa, Artificial sequence
  Protein classification predicting sequence
VDASKRFL

SEQ ID NO: 66877 - protein, 15 aa, Artificial sequence
  Protein classification predicting sequence
IKSHHNVGGLPKEMK

SEQ ID NO: 66878 - protein, 7 aa, Artificial sequence
  Protein classification predicting sequence
FAVLLPV

SEQ ID NO: 66879 - protein, 7 aa, Artificial sequence
  Protein classification predicting sequence
VLVVDFG

SEQ ID NO: 66880 - protein, 6 aa, Artificial sequence
  Protein classification predicting sequence
HPEVRH

SEQ ID NO: 66881 - protein, 6 aa, Artificial sequence
  Protein classification predicting sequence
DPEEKR

SEQ ID NO: 66882 - protein, 8 aa, Artificial sequence
  Protein classification predicting sequence
PGPGLAVR

SEQ ID NO: 66883 - protein, 5 aa, Artificial sequence
  Protein classification predicting sequence
DFGSQ

SEQ ID NO: 66884 - protein, 7 aa, Artificial sequence
  Protein classification predicting sequence
FHPEVVH

SEQ ID NO: 66885 - protein, 13 aa, Artificial sequence
  Protein classification predicting sequence
LIHEAIGDQLTCV

SEQ ID NO: 66886 - protein, 9 aa, Artificial sequence
  Protein classification predicting sequence
AIGDQLTCV

SEQ ID NO: 66887 - protein, 7 aa, Artificial sequence
  Protein classification predicting sequence
YPDVIES

SEQ ID NO: 66888 - protein, 8 aa, Artificial sequence
  Protein classification predicting sequence
GRELGLPE

SEQ ID NO: 66889 - protein, 16 aa, Artificial sequence
  Protein classification predicting sequence
ADAIYLDEIRKAGLYD

SEQ ID NO: 66890 - protein, 19 aa, Artificial sequence
  Protein classification predicting sequence
IWQAFAVLLPVQTVGVMGD

SEQ ID NO: 66891 - protein, 11 aa, Artificial sequence
  Protein classification predicting sequence
VGVMGDYRTYD

SEQ ID NO: 66892 - protein, 19 aa, Artificial sequence
  Protein classification predicting sequence
FVCALRAVTSVDGMTADFY

SEQ ID NO: 66893 - protein, 9 aa, Artificial sequence
  Protein classification predicting sequence
FIDQGFMRK

SEQ ID NO: 66894 - protein, 7 aa, Artificial sequence
  Protein classification predicting sequence
GLPEEIV

SEQ ID NO: 66895 - protein, 9 aa, Artificial sequence
  Protein classification predicting sequence
LRDADLIVR

SEQ ID NO: 66896 - protein, 9 aa, Artificial sequence
  Protein classification predicting sequence
SEDGMTADW

SEQ ID NO: 66897 - protein, 15 aa, Artificial sequence
  Protein classification predicting sequence
SEDGMTADWARVPYD

SEQ ID NO: 66898 - protein, 7 aa, Artificial sequence
  Protein classification predicting sequence
DGMTADW

SEQ ID NO: 66899 - protein, 10 aa, Artificial sequence
  Protein classification predicting sequence
ARRVRELGVY

SEQ ID NO: 66900 - protein, 6 aa, Artificial sequence
  Protein classification predicting sequence
DHGLLR

SEQ ID NO: 66901 - protein, 11 aa, Artificial sequence
  Protein classification predicting sequence
LPVKSVGVMGD

SEQ ID NO: 66902 - protein, 7 aa, Artificial sequence
  Protein classification predicting sequence
VVALRAV

SEQ ID NO: 66903 - protein, 6 aa, Artificial sequence
  Protein classification predicting sequence
RIINEV

SEQ ID NO: 66904 - protein, 9 aa, Artificial sequence
  Protein classification predicting sequence
VWMSHGDLV

SEQ ID NO: 66905 - protein, 6 aa, Artificial sequence
  Protein classification predicting sequence
MENFIE

SEQ ID NO: 66906 - protein, 9 aa, Artificial sequence
  Protein classification predicting sequence
RFMNKLKGV

SEQ ID NO: 66907 - protein, 8 aa, Artificial sequence
  Protein classification predicting sequence
VLDFGSQY

SEQ ID NO: 66908 - protein, 11 aa, Artificial sequence
  Protein classification predicting sequence
QVVWMSHGDLV

SEQ ID NO: 66909 - protein, 8 aa, Artificial sequence
  Protein classification predicting sequence
KNFVFGVC

SEQ ID NO: 66910 - protein, 8 aa, Artificial sequence
  Protein classification predicting sequence
MENFIEIE

SEQ ID NO: 66911 - protein, 52 aa, Artificial sequence
  Protein classification predicting sequence
VLCALSGGVDSSVVAVLIHKAIGDQLTCIFVDHGLLRKGEAEGVMKTFSEGF

SEQ ID NO: 66912 - protein, 7 aa, Artificial sequence
  Protein classification predicting sequence
YVFDDEA

SEQ ID NO: 66913 - protein, 9 aa, Artificial sequence
  Protein classification predicting sequence
LAQGTLYTD

SEQ ID NO: 66914 - protein, 20 aa, Artificial sequence
  Protein classification predicting sequence
TAQTIKSHHNVGGLPEDMQF

SEQ ID NO: 66915 - protein, 18 aa, Artificial sequence
  Protein classification predicting sequence
VWRQPFPGPGLGIRVLGE

SEQ ID NO: 66916 - protein, 7 aa, Artificial sequence
  Protein classification predicting sequence
TSIDGMT

SEQ ID NO: 66917 - protein, 7 aa, Artificial sequence
  Protein classification predicting sequence
TQLIARR

SEQ ID NO: 66918 - protein, 7 aa, Artificial sequence
  Protein classification predicting sequence
GLLRKNE

SEQ ID NO: 66919 - protein, 12 aa, Artificial sequence
  Protein classification predicting sequence
IKSHHNVGGLPE

SEQ ID NO: 66920 - protein, 8 aa, Artificial sequence
  Protein classification predicting sequence
MKLGLVEP

SEQ ID NO: 66921 - protein, 10 aa, Artificial sequence
  Protein classification predicting sequence
PFPGPGLAIR

SEQ ID NO: 66922 - protein, 6 aa, Artificial sequence
  Protein classification predicting sequence
VGVQGD

SEQ ID NO: 66923 - protein, 6 aa, Artificial sequence
  Protein classification predicting sequence
NRVVYD

SEQ ID NO: 66924 - protein, 10 aa, Artificial sequence
  Protein classification predicting sequence
QLIARRVREA

SEQ ID NO: 66925 - protein, 6 aa, Artificial sequence
  Protein classification predicting sequence
GVYSEL

SEQ ID NO: 66926 - protein, 7 aa, Artificial sequence
  Protein classification predicting sequence
IILSGGP

SEQ ID NO: 66927 - protein, 8 aa, Artificial sequence
  Protein classification predicting sequence
FVDHGLLR

SEQ ID NO: 66928 - protein, 17 aa, Artificial sequence
  Protein classification predicting sequence
FLVQGTLYPDVVESGGG

SEQ ID NO: 66929 - protein, 9 aa, Artificial sequence
  Protein classification predicting sequence
RQPFPGPGL

SEQ ID NO: 66930 - protein, 12 aa, Artificial sequence
  Protein classification predicting sequence
IWQCPVVLLADV

SEQ ID NO: 66931 - protein, 6 aa, Artificial sequence
  Protein classification predicting sequence
GDERTY

SEQ ID NO: 66932 - protein, 6 aa, Artificial sequence
  Protein classification predicting sequence
RIVNEV

SEQ ID NO: 66933 - protein, 7 aa, Artificial sequence
  Protein classification predicting sequence
VWMSHGD

SEQ ID NO: 66934 - protein, 12 aa, Artificial sequence
  Protein classification predicting sequence
EPLRELFKDEVR

SEQ ID NO: 66935 - protein, 6 aa, Artificial sequence
  Protein classification predicting sequence
QLIARR

SEQ ID NO: 66936 - protein, 12 aa, Artificial sequence
  Protein classification predicting sequence
RIINEVRGINRV

SEQ ID NO: 66937 - protein, 8 aa, Artificial sequence
  Protein classification predicting sequence
YDISSKPP

SEQ ID NO: 66938 - protein, 13 aa, Artificial sequence
  Protein classification predicting sequence
DEVILGLSGGVDS

SEQ ID NO: 66939 - protein, 5 aa, Artificial sequence
  Protein classification predicting sequence
GVYCE

SEQ ID NO: 66940 - protein, 6 aa, Artificial sequence
  Protein classification predicting sequence
SPRAPQ

SEQ ID NO: 66941 - protein, 8 aa, Artificial sequence
  Protein classification predicting sequence
RLNEAEQV

SEQ ID NO: 66942 - protein, 10 aa, Artificial sequence
  Protein classification predicting sequence
VGVMGDGRTY

SEQ ID NO: 66943 - protein, 12 aa, Artificial sequence
  Protein classification predicting sequence
VGVMGDGRTYDY

SEQ ID NO: 66944 - protein, 8 aa, Artificial sequence
  Protein classification predicting sequence
QGTLYPDV

SEQ ID NO: 66945 - protein, 11 aa, Artificial sequence
  Protein classification predicting sequence
QGTLYPDVIES

SEQ ID NO: 66946 - protein, 13 aa, Artificial sequence
  Protein classification predicting sequence
QGTLYPDVIESVS

SEQ ID NO: 66947 - protein, 35 aa, Artificial sequence
  Protein classification predicting sequence
QGTLYPDVIESVSFTGGPSVTIKSHHNVGGLPERM

SEQ ID NO: 66948 - protein, 7 aa, Artificial sequence
  Protein classification predicting sequence
LDFGSQY

SEQ ID NO: 66949 - protein, 7 aa, Artificial sequence
  Protein classification predicting sequence
QTVWMSH

SEQ ID NO: 66950 - protein, 14 aa, Artificial sequence
  Protein classification predicting sequence
GSQVTQLIARRVRE

SEQ ID NO: 66951 - protein, 17 aa, Artificial sequence
  Protein classification predicting sequence
VIKSHHNVGGLPDYMKL

SEQ ID NO: 66952 - protein, 11 aa, Artificial sequence
  Protein classification predicting sequence
LGLSGGVDSSV

SEQ ID NO: 66953 - protein, 14 aa, Artificial sequence
  Protein classification predicting sequence
LFKDEVRAVGRELG

SEQ ID NO: 66954 - protein, 8 aa, Artificial sequence
  Protein classification predicting sequence
LGVALGLP

SEQ ID NO: 66955 - protein, 24 aa, Artificial sequence
  Protein classification predicting sequence
LTSQAFAVFLPVKSVGVMGDGRTY

SEQ ID NO: 66956 - protein, 8 aa, Artificial sequence
  Protein classification predicting sequence
PVLGICYG

SEQ ID NO: 66957 - protein, 7 aa, Artificial sequence
  Protein classification predicting sequence
VGDKKVL

SEQ ID NO: 66958 - protein, 11 aa, Artificial sequence
  Protein classification predicting sequence
CALSGGVDSSV

SEQ ID NO: 66959 - protein, 17 aa, Artificial sequence
  Protein classification predicting sequence
TIKSHHNVGGLPEDMQF

SEQ ID NO: 66960 - protein, 7 aa, Artificial sequence
  Protein classification predicting sequence
FELIEPL

SEQ ID NO: 66961 - protein, 5 aa, Artificial sequence
  Protein classification predicting sequence
IWQYF

SEQ ID NO: 66962 - protein, 7 aa, Artificial sequence
  Protein classification predicting sequence
VNRIVYD

SEQ ID NO: 66963 - protein, 7 aa, Artificial sequence
  Protein classification predicting sequence
GGPNSVY

SEQ ID NO: 66964 - protein, 17 aa, Artificial sequence
  Protein classification predicting sequence
KRKIIGEEFIRVFEEEA

SEQ ID NO: 66965 - protein, 6 aa, Artificial sequence
  Protein classification predicting sequence
FLVQGT

SEQ ID NO: 66966 - protein, 14 aa, Artificial sequence
  Protein classification predicting sequence
IKSHHNVGGLPEDM

SEQ ID NO: 66967 - protein, 6 aa, Artificial sequence
  Protein classification predicting sequence
VGDKKV

SEQ ID NO: 66968 - protein, 9 aa, Artificial sequence
  Protein classification predicting sequence
VYDITSKPP

SEQ ID NO: 66969 - protein, 21 aa, Artificial sequence
  Protein classification predicting sequence
PEAKRKAIGAEFIRSFERAVA

SEQ ID NO: 66970 - protein, 13 aa, Artificial sequence
  Protein classification predicting sequence
RQPFPGPGLGIRI

SEQ ID NO: 66971 - protein, 10 aa, Artificial sequence
  Protein classification predicting sequence
ADLIARTELT

SEQ ID NO: 66972 - protein, 6 aa, Artificial sequence
  Protein classification predicting sequence
PEAKRK

SEQ ID NO: 66973 - protein, 15 aa, Artificial sequence
  Protein classification predicting sequence
GAQYAQLIARRVREA

SEQ ID NO: 66974 - protein, 10 aa, Artificial sequence
  Protein classification predicting sequence
ILILDFGSQY

SEQ ID NO: 66975 - protein, 9 aa, Artificial sequence
  Protein classification predicting sequence
QLIARRVRE

SEQ ID NO: 66976 - protein, 8 aa, Artificial sequence
  Protein classification predicting sequence
CYGMQTMA

SEQ ID NO: 66977 - protein, 9 aa, Artificial sequence
  Protein classification predicting sequence
LDVWMSHGD

SEQ ID NO: 66978 - protein, 8 aa, Artificial sequence
  Protein classification predicting sequence
HKAIGDQL

SEQ ID NO: 66979 - protein, 7 aa, Artificial sequence
  Protein classification predicting sequence
GLLRLNE

SEQ ID NO: 66980 - protein, 7 aa, Artificial sequence
  Protein classification predicting sequence
VDAKDRF

SEQ ID NO: 66981 - protein, 7 aa, Artificial sequence
  Protein classification predicting sequence
GLELGLP

SEQ ID NO: 66982 - protein, 9 aa, Artificial sequence
  Protein classification predicting sequence
ADAIFIEEL

SEQ ID NO: 66983 - protein, 9 aa, Artificial sequence
  Protein classification predicting sequence
LSGGPSSVY

SEQ ID NO: 66984 - protein, 10 aa, Artificial sequence
  Protein classification predicting sequence
DPEQKRKIIG

SEQ ID NO: 66985 - protein, 12 aa, Artificial sequence
  Protein classification predicting sequence
RHPFPGPGLAIR

SEQ ID NO: 66986 - protein, 24 aa, Artificial sequence
  Protein classification predicting sequence
DYGSQVTQLIARRVREAGVYSEIH

SEQ ID NO: 66987 - protein, 7 aa, Artificial sequence
  Protein classification predicting sequence
EVFDEEA

SEQ ID NO: 66988 - protein, 6 aa, Artificial sequence
  Protein classification predicting sequence
FAVLLP

SEQ ID NO: 66989 - protein, 6 aa, Artificial sequence
  Protein classification predicting sequence
SGGPES

SEQ ID NO: 66990 - protein, 6 aa, Artificial sequence
  Protein classification predicting sequence
GDGRTY

SEQ ID NO: 66991 - protein, 11 aa, Artificial sequence
  Protein classification predicting sequence
IKSHHNVGGLP

SEQ ID NO: 66992 - protein, 10 aa, Artificial sequence
  Protein classification predicting sequence
FLAQGTLYTD

SEQ ID NO: 66993 - protein, 21 aa, Artificial sequence
  Protein classification predicting sequence
VWRQPFPGPGLGIRVLGEITE

SEQ ID NO: 66994 - protein, 8 aa, Artificial sequence
  Protein classification predicting sequence
ARIPWDVL

SEQ ID NO: 66995 - protein, 10 aa, Artificial sequence
  Protein classification predicting sequence
KISVRIVNEV

SEQ ID NO: 66996 - protein, 6 aa, Artificial sequence
  Protein classification predicting sequence
HPEVTH

SEQ ID NO: 66997 - protein, 14 aa, Artificial sequence
  Protein classification predicting sequence
YPDVIESVSVKGPS

SEQ ID NO: 66998 - protein, 10 aa, Artificial sequence
  Protein classification predicting sequence
PFPGPGLGIR

SEQ ID NO: 66999 - protein, 11 aa, Artificial sequence
  Protein classification predicting sequence
ADLYNKVSQAF

SEQ ID NO: 67000 - protein, 10 aa, Artificial sequence
  Protein classification predicting sequence
TQLIARRVRE

SEQ ID NO: 67001 - protein, 6 aa, Artificial sequence
  Protein classification predicting sequence
VYCELH

SEQ ID NO: 67002 - protein, 12 aa, Artificial sequence
  Protein classification predicting sequence
AIGDQLTCVFVD

SEQ ID NO: 67003 - protein, 23 aa, Artificial sequence
  Protein classification predicting sequence
RHPFPGPGLGVRILGEVKKEYAD

SEQ ID NO: 67004 - protein, 7 aa, Artificial sequence
  Protein classification predicting sequence
LRRADAI

SEQ ID NO: 67005 - protein, 22 aa, Artificial sequence
  Protein classification predicting sequence
SQAFAVFLPVKSVGVMGDGRTY

SEQ ID NO: 67006 - protein, 13 aa, Artificial sequence
  Protein classification predicting sequence
LTCMFIDQGFMRK

SEQ ID NO: 67007 - protein, 6 aa, Artificial sequence
  Protein classification predicting sequence
IGAEFI

SEQ ID NO: 67008 - protein, 9 aa, Artificial sequence
  Protein classification predicting sequence
LAQGTLYPD

SEQ ID NO: 67009 - protein, 9 aa, Artificial sequence
  Protein classification predicting sequence
QYTQLIARR

SEQ ID NO: 67010 - protein, 13 aa, Artificial sequence
  Protein classification predicting sequence
CYGMQTMAMQLGG

SEQ ID NO: 67011 - protein, 18 aa, Artificial sequence
  Protein classification predicting sequence
KWLAQGTIYPDVIESAAS

SEQ ID NO: 67012 - protein, 12 aa, Artificial sequence
  Protein classification predicting sequence
IKSHHNVGGLPD

SEQ ID NO: 67013 - protein, 16 aa, Artificial sequence
  Protein classification predicting sequence
RHPFPGPGLGVRVLGE

SEQ ID NO: 67014 - protein, 7 aa, Artificial sequence
  Protein classification predicting sequence
SVGVMGD

SEQ ID NO: 67015 - protein, 6 aa, Artificial sequence
  Protein classification predicting sequence
WAHLPY

SEQ ID NO: 67016 - protein, 10 aa, Artificial sequence
  Protein classification predicting sequence
SGGVDSSVVA

SEQ ID NO: 67017 - protein, 13 aa, Artificial sequence
  Protein classification predicting sequence
LLRRADAIFIEEL

SEQ ID NO: 67018 - protein, 14 aa, Artificial sequence
  Protein classification predicting sequence
SVGVMGDGRKYDWV

SEQ ID NO: 67019 - protein, 6 aa, Artificial sequence
  Protein classification predicting sequence
NEVNGI

SEQ ID NO: 67020 - protein, 6 aa, Artificial sequence
  Protein classification predicting sequence
IFIEEL

SEQ ID NO: 67021 - protein, 8 aa, Artificial sequence
  Protein classification predicting sequence
SGGPNSVY

SEQ ID NO: 67022 - protein, 7 aa, Artificial sequence
  Protein classification predicting sequence
AIGDQLT

SEQ ID NO: 67023 - protein, 6 aa, Artificial sequence
  Protein classification predicting sequence
EGDQVM

SEQ ID NO: 67024 - protein, 15 aa, Artificial sequence
  Protein classification predicting sequence
VWRQPFPGPGLGIRV

SEQ ID NO: 67025 - protein, 11 aa, Artificial sequence
  Protein classification predicting sequence
ILREEIKNAGL

SEQ ID NO: 67026 - protein, 8 aa, Artificial sequence
  Protein classification predicting sequence
RSVGVMGD

SEQ ID NO: 67027 - protein, 9 aa, Artificial sequence
  Protein classification predicting sequence
QLIARRIRE

SEQ ID NO: 67028 - protein, 9 aa, Artificial sequence
  Protein classification predicting sequence
IDPEIFELG

SEQ ID NO: 67029 - protein, 15 aa, Artificial sequence
  Protein classification predicting sequence
PDEIVWRQPFPGPGL

SEQ ID NO: 67030 - protein, 21 aa, Artificial sequence
  Protein classification predicting sequence
AIRAITSIDGMTADFAQLPWD

SEQ ID NO: 67031 - protein, 11 aa, Artificial sequence
  Protein classification predicting sequence
RIVNEVDHVNR

SEQ ID NO: 67032 - protein, 8 aa, Artificial sequence
  Protein classification predicting sequence
RKIIGNEF

SEQ ID NO: 67033 - protein, 6 aa, Artificial sequence
  Protein classification predicting sequence
GVSDPE

SEQ ID NO: 67034 - protein, 16 aa, Artificial sequence
  Protein classification predicting sequence
FLAQGTLYTDVIESGT

SEQ ID NO: 67035 - protein, 6 aa, Artificial sequence
  Protein classification predicting sequence
IWQYFT

SEQ ID NO: 67036 - protein, 9 aa, Artificial sequence
  Protein classification predicting sequence
IWQYFTVLP

SEQ ID NO: 67037 - protein, 8 aa, Artificial sequence
  Protein classification predicting sequence
GSQYNQLI

SEQ ID NO: 67038 - protein, 7 aa, Artificial sequence
  Protein classification predicting sequence
VNAKDRF

SEQ ID NO: 67039 - protein, 6 aa, Artificial sequence
  Protein classification predicting sequence
ESGTDT

SEQ ID NO: 67040 - protein, 17 aa, Artificial sequence
  Protein classification predicting sequence
TAQTIKSHHNVGGLPED

SEQ ID NO: 67041 - protein, 6 aa, Artificial sequence
  Protein classification predicting sequence
KLEIVR

SEQ ID NO: 67042 - protein, 15 aa, Artificial sequence
  Protein classification predicting sequence
IRAITSIDGMTADFA

SEQ ID NO: 67043 - protein, 11 aa, Artificial sequence
  Protein classification predicting sequence
RIVNEVKHVNR

SEQ ID NO: 67044 - protein, 7 aa, Artificial sequence
  Protein classification predicting sequence
GGKVERA

SEQ ID NO: 67045 - protein, 9 aa, Artificial sequence
  Protein classification predicting sequence
LSGGVDSSV

SEQ ID NO: 67046 - protein, 7 aa, Artificial sequence
  Protein classification predicting sequence
NIIKVDA

SEQ ID NO: 67047 - protein, 10 aa, Artificial sequence
  Protein classification predicting sequence
RAVTSIDGMT

SEQ ID NO: 67048 - protein, 13 aa, Artificial sequence
  Protein classification predicting sequence
QFHPEVRHSVYGN

SEQ ID NO: 67049 - protein, 7 aa, Artificial sequence
  Protein classification predicting sequence
DITSKPP

SEQ ID NO: 67050 - protein, 33 aa, Artificial sequence
  Protein classification predicting sequence
RPVLVVDFGAQYAQLIARRVREARVFSEVIPHT

SEQ ID NO: 67051 - protein, 8 aa, Artificial sequence
  Protein classification predicting sequence
DFVAATGA

SEQ ID NO: 67052 - protein, 14 aa, Artificial sequence
  Protein classification predicting sequence
DFVAATGAKLVTVD

SEQ ID NO: 67053 - protein, 26 aa, Artificial sequence
  Protein classification predicting sequence
LPEEIVARQPFPGPGLGIRIVGEVTA

SEQ ID NO: 67054 - protein, 6 aa, Artificial sequence
  Protein classification predicting sequence
VRSVGV

SEQ ID NO: 67055 - protein, 7 aa, Artificial sequence
  Protein classification predicting sequence
GIILSGG

SEQ ID NO: 67056 - protein, 8 aa, Artificial sequence
  Protein classification predicting sequence
KSVGVVGD

SEQ ID NO: 67057 - protein, 6 aa, Artificial sequence
  Protein classification predicting sequence
IREQVG

SEQ ID NO: 67058 - protein, 10 aa, Artificial sequence
  Protein classification predicting sequence
PVLGICYGMQ

SEQ ID NO: 67059 - protein, 9 aa, Artificial sequence
  Protein classification predicting sequence
VYCELHPFD

SEQ ID NO: 67060 - protein, 6 aa, Artificial sequence
  Protein classification predicting sequence
REFGYA

SEQ ID NO: 67061 - protein, 16 aa, Artificial sequence
  Protein classification predicting sequence
FYGVQFHPEVTHTRQG

SEQ ID NO: 67062 - protein, 7 aa, Artificial sequence
  Protein classification predicting sequence
DWNMPDY

SEQ ID NO: 67063 - protein, 6 aa, Artificial sequence
  Protein classification predicting sequence
AIGDQL

SEQ ID NO: 67064 - protein, 18 aa, Artificial sequence
  Protein classification predicting sequence
RHPFPGPGLGVRILGEVK

SEQ ID NO: 67065 - protein, 8 aa, Artificial sequence
  Protein classification predicting sequence
DFMTAHWA

SEQ ID NO: 67066 - protein, 7 aa, Artificial sequence
  Protein classification predicting sequence
SNRIINE

SEQ ID NO: 67067 - protein, 7 aa, Artificial sequence
  Protein classification predicting sequence
GVYSELH

SEQ ID NO: 67068 - protein, 11 aa, Artificial sequence
  Protein classification predicting sequence
YGVQFHPEVRH

SEQ ID NO: 67069 - protein, 9 aa, Artificial sequence
  Protein classification predicting sequence
FVDHGLLRK

SEQ ID NO: 67070 - protein, 9 aa, Artificial sequence
  Protein classification predicting sequence
KRKIIGNEF

SEQ ID NO: 67071 - protein, 12 aa, Artificial sequence
  Protein classification predicting sequence
VRESDAILREEI

SEQ ID NO: 67072 - protein, 12 aa, Artificial sequence
  Protein classification predicting sequence
GIRAVTSIDGMT

SEQ ID NO: 67073 - protein, 11 aa, Artificial sequence
  Protein classification predicting sequence
GVYCELWAWDV

SEQ ID NO: 67074 - protein, 8 aa, Artificial sequence
  Protein classification predicting sequence
IIEDAVAR

SEQ ID NO: 67075 - protein, 13 aa, Artificial sequence
  Protein classification predicting sequence
VILGLSGGVDSSV

SEQ ID NO: 67076 - protein, 7 aa, Artificial sequence
  Protein classification predicting sequence
KKEYCDL

SEQ ID NO: 67077 - protein, 12 aa, Artificial sequence
  Protein classification predicting sequence
GIILSGGPESTT

SEQ ID NO: 67078 - protein, 17 aa, Artificial sequence
  Protein classification predicting sequence
SPRAPEYVFNAGVPVLG

SEQ ID NO: 67079 - protein, 12 aa, Artificial sequence
  Protein classification predicting sequence
YGVQFHPEVTHT

SEQ ID NO: 67080 - protein, 10 aa, Artificial sequence
  Protein classification predicting sequence
CQCEALWTPA

SEQ ID NO: 67081 - protein, 7 aa, Artificial sequence
  Protein classification predicting sequence
LLHRAIG

SEQ ID NO: 67082 - protein, 7 aa, Artificial sequence
  Protein classification predicting sequence
GKFGLNI

SEQ ID NO: 67083 - protein, 28 aa, Artificial sequence
  Protein classification predicting sequence
GLVEPLKELFKDEVRKIGLELGLPYDML

SEQ ID NO: 67084 - protein, 19 aa, Artificial sequence
  Protein classification predicting sequence
NIHDQRILILDFGSQYTQL

SEQ ID NO: 67085 - protein, 8 aa, Artificial sequence
  Protein classification predicting sequence
REIGVYCE

SEQ ID NO: 67086 - protein, 14 aa, Artificial sequence
  Protein classification predicting sequence
REIGVYCELWSWDV

SEQ ID NO: 67087 - protein, 10 aa, Artificial sequence
  Protein classification predicting sequence
GVCYGMQTMA

SEQ ID NO: 67088 - protein, 10 aa, Artificial sequence
  Protein classification predicting sequence
DVWMSHGDKV

SEQ ID NO: 67089 - protein, 16 aa, Artificial sequence
  Protein classification predicting sequence
ALAGENDPEAKRKIIG

SEQ ID NO: 67090 - protein, 32 aa, Artificial sequence
  Protein classification predicting sequence
DVFDEESKKLKNAKWLAQGTIYPDVIESAASK

SEQ ID NO: 67091 - protein, 7 aa, Artificial sequence
  Protein classification predicting sequence
GDDKVIL

SEQ ID NO: 67092 - protein, 12 aa, Artificial sequence
  Protein classification predicting sequence
SGGVDSSVVAVL

SEQ ID NO: 67093 - protein, 7 aa, Artificial sequence
  Protein classification predicting sequence
GEITEEK

SEQ ID NO: 67094 - protein, 9 aa, Artificial sequence
  Protein classification predicting sequence
YGVQFHPEV

SEQ ID NO: 67095 - protein, 8 aa, Artificial sequence
  Protein classification predicting sequence
LIARRIRE

SEQ ID NO: 67096 - protein, 10 aa, Artificial sequence
  Protein classification predicting sequence
DPEEKRKIIG

SEQ ID NO: 67097 - protein, 10 aa, Artificial sequence
  Protein classification predicting sequence
EKLNCLRDAD

SEQ ID NO: 67098 - protein, 7 aa, Artificial sequence
  Protein classification predicting sequence
MTADWSR

SEQ ID NO: 67099 - protein, 9 aa, Artificial sequence
  Protein classification predicting sequence
VWMSHGDKV

SEQ ID NO: 67100 - protein, 12 aa, Artificial sequence
  Protein classification predicting sequence
LGLSGGVDSSVV

SEQ ID NO: 67101 - protein, 21 aa, Artificial sequence
  Protein classification predicting sequence
LAQGTIYPDVIESAGAKTGKA

SEQ ID NO: 67102 - protein, 8 aa, Artificial sequence
  Protein classification predicting sequence
ELFKDEVR

SEQ ID NO: 67103 - protein, 12 aa, Artificial sequence
  Protein classification predicting sequence
LRAVETIDFMTA

SEQ ID NO: 67104 - protein, 6 aa, Artificial sequence
  Protein classification predicting sequence
CEALWT

SEQ ID NO: 67105 - protein, 16 aa, Artificial sequence
  Protein classification predicting sequence
GKAHVIKSHHNVGGLP

SEQ ID NO: 67106 - protein, 9 aa, Artificial sequence
  Protein classification predicting sequence
SEDAMTADW

SEQ ID NO: 67107 - protein, 9 aa, Artificial sequence
  Protein classification predicting sequence
IILSGSHAS

SEQ ID NO: 67108 - protein, 15 aa, Artificial sequence
  Protein classification predicting sequence
HREFGYAEVRAHGHT

SEQ ID NO: 67109 - protein, 18 aa, Artificial sequence
  Protein classification predicting sequence
EGHGMLKVWMSHGDKVTE

SEQ ID NO: 67110 - protein, 10 aa, Artificial sequence
  Protein classification predicting sequence
PPGFKLMAST

SEQ ID NO: 67111 - protein, 9 aa, Artificial sequence
  Protein classification predicting sequence
YAVQFHPEV

SEQ ID NO: 67112 - protein, 15 aa, Artificial sequence
  Protein classification predicting sequence
YAVQFHPEVTHTVQG

SEQ ID NO: 67113 - protein, 10 aa, Artificial sequence
  Protein classification predicting sequence
DPEAKRKIIG

SEQ ID NO: 67114 - protein, 18 aa, Artificial sequence
  Protein classification predicting sequence
DPEAKRKIIGREFVEVFQ

SEQ ID NO: 67115 - protein, 15 aa, Artificial sequence
  Protein classification predicting sequence
KWLAQGTIYPDVIES

SEQ ID NO: 67116 - protein, 12 aa, Artificial sequence
  Protein classification predicting sequence
RHQVWMSHGDRV

SEQ ID NO: 67117 - protein, 9 aa, Artificial sequence
  Protein classification predicting sequence
VWMSHGDRV

SEQ ID NO: 67118 - protein, 10 aa, Artificial sequence
  Protein classification predicting sequence
AVEAIRKQVG

SEQ ID NO: 67119 - protein, 7 aa, Artificial sequence
  Protein classification predicting sequence
DPEKKRK

SEQ ID NO: 67120 - protein, 7 aa, Artificial sequence
  Protein classification predicting sequence
VQFHPEV

SEQ ID NO: 67121 - protein, 7 aa, Artificial sequence
  Protein classification predicting sequence
HLPYELL

SEQ ID NO: 67122 - protein, 7 aa, Artificial sequence
  Protein classification predicting sequence
DPEQKRK

SEQ ID NO: 67123 - protein, 8 aa, Artificial sequence
  Protein classification predicting sequence
IRKAGLYD

SEQ ID NO: 67124 - protein, 9 aa, Artificial sequence
  Protein classification predicting sequence
VRSVGVMGD

SEQ ID NO: 67125 - protein, 10 aa, Artificial sequence
  Protein classification predicting sequence
DSALVRGIED

SEQ ID NO: 67126 - protein, 13 aa, Artificial sequence
  Protein classification predicting sequence
GVYCELWAWDVTE

SEQ ID NO: 67127 - protein, 7 aa, Artificial sequence
  Protein classification predicting sequence
CYGMQTM

SEQ ID NO: 67128 - protein, 24 aa, Artificial sequence
  Protein classification predicting sequence
EEKRFYGVQFHPEVTHTRQGMRML

SEQ ID NO: 67129 - protein, 7 aa, Artificial sequence
  Protein classification predicting sequence
KRKIIGR

SEQ ID NO: 67130 - protein, 19 aa, Artificial sequence
  Protein classification predicting sequence
GLVEPLRELFKDEVRKIGL

SEQ ID NO: 67131 - protein, 34 aa, Artificial sequence
  Protein classification predicting sequence
KRKIIGNEFVYVFDDEASKLKGVDFLAQGTLYTD

SEQ ID NO: 67132 - protein, 9 aa, Artificial sequence
  Protein classification predicting sequence
INAKSDELF

SEQ ID NO: 67133 - protein, 7 aa, Artificial sequence
  Protein classification predicting sequence
NFVRRVC

SEQ ID NO: 67134 - protein, 16 aa, Artificial sequence
  Protein classification predicting sequence
WTMENFIEIEIEKIRQ

SEQ ID NO: 67135 - protein, 23 aa, Artificial sequence
  Protein classification predicting sequence
VLCAMSGGVDSSVVAVLLHKAIG

SEQ ID NO: 67136 - protein, 14 aa, Artificial sequence
  Protein classification predicting sequence
QLTCIFVDHGLLRK

SEQ ID NO: 67137 - protein, 28 aa, Artificial sequence
  Protein classification predicting sequence
QLTCIFVDHGLLRKGEGDMVMEQFGEGF

SEQ ID NO: 67138 - protein, 63 aa, Artificial sequence
  Protein classification predicting sequence
MNPKGIILSGGPNSVYEEGSFTIDPEIYNLGIPVLGICYGMQLTTKLLGGKVERANEREYGKA

SEQ ID NO: 67139 - protein, 28 aa, Artificial sequence
  Protein classification predicting sequence
EQTVWMSHSDKVIEIPEGFEVIADSPST

SEQ ID NO: 67140 - protein, 30 aa, Artificial sequence
  Protein classification predicting sequence
YAAIEDKKRRIYGVQFHPEVRHTEYGNDLL

SEQ ID NO: 67141 - protein, 54 aa, Artificial sequence
  Protein classification predicting sequence
VDFLAQGTLYTDVIESGTKTAQTIKSHHNVGGLPEDMEFELIEPINTLFKDEVR

SEQ ID NO: 67142 - protein, 46 aa, Artificial sequence
  Protein classification predicting sequence
LGIELGIPEHLVWRQPFPGPGLGIRVLGEITEDKLEIVRESDAILR

SEQ ID NO: 67143 - protein, 18 aa, Artificial sequence
  Protein classification predicting sequence
INPIGIVLSGGPNSVYAD

SEQ ID NO: 67144 - protein, 17 aa, Artificial sequence
  Protein classification predicting sequence
LIEPLNTLFKDEVRALG

SEQ ID NO: 67145 - protein, 10 aa, Artificial sequence
  Protein classification predicting sequence
LFKDEVRALG

SEQ ID NO: 67146 - protein, 11 aa, Artificial sequence
  Protein classification predicting sequence
VWRQPFPGPGL

SEQ ID NO: 67147 - protein, 36 aa, Artificial sequence
  Protein classification predicting sequence
QKIIVLDYGSQYNQLIARRIREFGVFSELKSHKITA

SEQ ID NO: 67148 - protein, 29 aa, Artificial sequence
  Protein classification predicting sequence
GTPQEQLVLMSHGDAVTEIPEGFHLVGDS

SEQ ID NO: 67149 - protein, 10 aa, Artificial sequence
  Protein classification predicting sequence
GVQYHPEVMH

SEQ ID NO: 67150 - protein, 19 aa, Artificial sequence
  Protein classification predicting sequence
AICGLSGGVDSAVAAALVQ

SEQ ID NO: 67151 - protein, 43 aa, Artificial sequence
  Protein classification predicting sequence
IWQCPVVLLADVRSVGVQGDGRTYGHPIVLRPVSSEDAMTADW

SEQ ID NO: 67152 - protein, 9 aa, Artificial sequence
  Protein classification predicting sequence
ISTRITNEV

SEQ ID NO: 67153 - protein, 24 aa, Artificial sequence
  Protein classification predicting sequence
QKIIVLDYGSQYNQLIARRIREFG

SEQ ID NO: 67154 - protein, 7 aa, Artificial sequence
  Protein classification predicting sequence
RRIREFG

SEQ ID NO: 67155 - protein, 9 aa, Artificial sequence
  Protein classification predicting sequence
DCPYAAIEN

SEQ ID NO: 67156 - protein, 8 aa, Artificial sequence
  Protein classification predicting sequence
QFHPEVRH

SEQ ID NO: 67157 - protein, 6 aa, Artificial sequence
  Protein classification predicting sequence
GDWSMD

SEQ ID NO: 67158 - protein, 19 aa, Artificial sequence
  Protein classification predicting sequence
KAIGDQLTCIFVDHGLLRK

SEQ ID NO: 67159 - protein, 19 aa, Artificial sequence
  Protein classification predicting sequence
KRKIIGNEFVYVFDDEASK

SEQ ID NO: 67160 - protein, 14 aa, Artificial sequence
  Protein classification predicting sequence
LIEPLNTLFKDEVR

SEQ ID NO: 67161 - protein, 18 aa, Artificial sequence
  Protein classification predicting sequence
EKLETVRESDAILREEIA

SEQ ID NO: 67162 - protein, 6 aa, Artificial sequence
  Protein classification predicting sequence
WQYFTV

SEQ ID NO: 67163 - protein, 42 aa, Artificial sequence
  Protein classification predicting sequence
WQYFTVNTGVRSVGVMGDGRTYDYTIAIRAITSIDGMTADFA

SEQ ID NO: 67164 - protein, 8 aa, Artificial sequence
  Protein classification predicting sequence
WEVLQKIS

SEQ ID NO: 67165 - protein, 8 aa, Artificial sequence
  Protein classification predicting sequence
KIRETVGD

SEQ ID NO: 67166 - protein, 11 aa, Artificial sequence
  Protein classification predicting sequence
GVFSELKSHKI

SEQ ID NO: 67167 - protein, 11 aa, Artificial sequence
  Protein classification predicting sequence
AGNREYGQSTL

SEQ ID NO: 67168 - protein, 13 aa, Artificial sequence
  Protein classification predicting sequence
VLMSHGDAVTEIP

SEQ ID NO: 67169 - protein, 19 aa, Artificial sequence
  Protein classification predicting sequence
YGIQFHPEVRHSVYGNDIL

SEQ ID NO: 67170 - protein, 11 aa, Artificial sequence
  Protein classification predicting sequence
GDWSMDNFIDM

SEQ ID NO: 67171 - protein, 16 aa, Artificial sequence
  Protein classification predicting sequence
GVSDPEQKRKIIGNEF

SEQ ID NO: 67172 - protein, 8 aa, Artificial sequence
  Protein classification predicting sequence
LIEPLNTL

SEQ ID NO: 67173 - protein, 8 aa, Artificial sequence
  Protein classification predicting sequence
KDEVRALG

SEQ ID NO: 67174 - protein, 7 aa, Artificial sequence
  Protein classification predicting sequence
LGIPILG

SEQ ID NO: 67175 - protein, 8 aa, Artificial sequence
  Protein classification predicting sequence
VTELPPGF

SEQ ID NO: 67176 - protein, 19 aa, Artificial sequence
  Protein classification predicting sequence
TGERVAVKIKSHHNVGGLP

SEQ ID NO: 67177 - protein, 10 aa, Artificial sequence
  Protein classification predicting sequence
DDPTDLLTNV

SEQ ID NO: 67178 - protein, 7 aa, Artificial sequence
  Protein classification predicting sequence
ILILDFG

SEQ ID NO: 67179 - protein, 8 aa, Artificial sequence
  Protein classification predicting sequence
GEITEEKL

SEQ ID NO: 67180 - protein, 6 aa, Artificial sequence
  Protein classification predicting sequence
DFGSQY

SEQ ID NO: 67181 - protein, 6 aa, Artificial sequence
  Protein classification predicting sequence
WMSHGD

SEQ ID NO: 67182 - protein, 7 aa, Artificial sequence
  Protein classification predicting sequence
QGTLYPD

SEQ ID NO: 67183 - protein, 10 aa, Artificial sequence
  Protein classification predicting sequence
IKSHHNVGGL

SEQ ID NO: 67184 - protein, 6 aa, Artificial sequence
  Protein classification predicting sequence
IWQCPV

SEQ ID NO: 67185 - protein, 7 aa, Artificial sequence
  Protein classification predicting sequence
RVVLDIT

SEQ ID NO: 67186 - protein, 14 aa, Artificial sequence
  Protein classification predicting sequence
RILILDFGSQYTQL

SEQ ID NO: 67187 - protein, 10 aa, Artificial sequence
  Protein classification predicting sequence
NSPRAPQYVF

SEQ ID NO: 67188 - protein, 16 aa, Artificial sequence
  Protein classification predicting sequence
NSPRAPQYVFDSGVPV

SEQ ID NO: 67189 - protein, 17 aa, Artificial sequence
  Protein classification predicting sequence
DEVILGLSGGVDSSVVA

SEQ ID NO: 67190 - protein, 12 aa, Artificial sequence
  Protein classification predicting sequence
IGRVFVEVFDEE

SEQ ID NO: 67191 - protein, 19 aa, Artificial sequence
  Protein classification predicting sequence
KKEYCDLLRRADAIFIEEL

SEQ ID NO: 67192 - protein, 13 aa, Artificial sequence
  Protein classification predicting sequence
YGVQFHPEVTHTK

SEQ ID NO: 67193 - protein, 19 aa, Artificial sequence
  Protein classification predicting sequence
MLYRHPFPGPGLGVRVLGE

SEQ ID NO: 67194 - protein, 18 aa, Artificial sequence
  Protein classification predicting sequence
ELFKDEVRKIGLELGLPY

SEQ ID NO: 67195 - protein, 7 aa, Artificial sequence
  Protein classification predicting sequence
LIHKAIG

SEQ ID NO: 67196 - protein, 6 aa, Artificial sequence
  Protein classification predicting sequence
DNGLLR

SEQ ID NO: 67197 - protein, 6 aa, Artificial sequence
  Protein classification predicting sequence
LFKDEV

SEQ ID NO: 67198 - protein, 9 aa, Artificial sequence
  Protein classification predicting sequence
WQAFAVLLP

SEQ ID NO: 67199 - protein, 9 aa, Artificial sequence
  Protein classification predicting sequence
VFVDHGLLR

SEQ ID NO: 67200 - protein, 9 aa, Artificial sequence
  Protein classification predicting sequence
DKILILDFG

SEQ ID NO: 67201 - protein, 7 aa, Artificial sequence
  Protein classification predicting sequence
LTCVFVD

SEQ ID NO: 67202 - protein, 11 aa, Artificial sequence
  Protein classification predicting sequence
ADLYDKVSQAF

SEQ ID NO: 67203 - protein, 7 aa, Artificial sequence
  Protein classification predicting sequence
LLHKAIG

SEQ ID NO: 67204 - protein, 7 aa, Artificial sequence
  Protein classification predicting sequence
HHNVGGL

SEQ ID NO: 67205 - protein, 6 aa, Artificial sequence
  Protein classification predicting sequence
PFPGPG

SEQ ID NO: 67206 - protein, 8 aa, Artificial sequence
  Protein classification predicting sequence
YDITSKPP

SEQ ID NO: 67207 - protein, 10 aa, Artificial sequence
  Protein classification predicting sequence
YDITSKPPAT

SEQ ID NO: 67208 - protein, 19 aa, Artificial sequence
  Protein classification predicting sequence
NIHKHRILILDFGSQYTQL

SEQ ID NO: 67209 - protein, 10 aa, Artificial sequence
  Protein classification predicting sequence
FNPSGIILSG

SEQ ID NO: 67210 - protein, 7 aa, Artificial sequence
  Protein classification predicting sequence
EIPADFV

SEQ ID NO: 67211 - protein, 8 aa, Artificial sequence
  Protein classification predicting sequence
DFVTVAST

SEQ ID NO: 67212 - protein, 25 aa, Artificial sequence
  Protein classification predicting sequence
CPFAIMANEEKRFYGVQFHPEVTHT

SEQ ID NO: 67213 - protein, 9 aa, Artificial sequence
  Protein classification predicting sequence
PEAKRKIIG

SEQ ID NO: 67214 - protein, 39 aa, Artificial sequence
  Protein classification predicting sequence
MLYRHPFPGPGLGVRVLGEVKKEYCDLLRRADAIFIEEL

SEQ ID NO: 67215 - protein, 35 aa, Artificial sequence
  Protein classification predicting sequence
KVSQAFTVFLPVRSVGVMGDGRKYDWVVSLRAVET

SEQ ID NO: 67216 - protein, 16 aa, Artificial sequence
  Protein classification predicting sequence
DFMTAHWAHLPYDFLG

SEQ ID NO: 67217 - protein, 9 aa, Artificial sequence
  Protein classification predicting sequence
VTAYDTLGE

SEQ ID NO: 67218 - protein, 12 aa, Artificial sequence
  Protein classification predicting sequence
NGEYIALEKLES

SEQ ID NO: 67219 - protein, 8 aa, Artificial sequence
  Protein classification predicting sequence
LKIIDRKK

SEQ ID NO: 67220 - protein, 9 aa, Artificial sequence
  Protein classification predicting sequence
LQYTGGTTG

SEQ ID NO: 67221 - protein, 7 aa, Artificial sequence
  Protein classification predicting sequence
VKGPQVM

SEQ ID NO: 67222 - protein, 7 aa, Artificial sequence
  Protein classification predicting sequence
VGKILRR

SEQ ID NO: 67223 - protein, 17 aa, Artificial sequence
  Protein classification predicting sequence
TFRKLEERSRAFAAYLQ

SEQ ID NO: 67224 - protein, 15 aa, Artificial sequence
  Protein classification predicting sequence
GDRVALMMPNLLQYP

SEQ ID NO: 67225 - protein, 13 aa, Artificial sequence
  Protein classification predicting sequence
VNVNPLYTPRELE

SEQ ID NO: 67226 - protein, 12 aa, Artificial sequence
  Protein classification predicting sequence
HVILTRMGDQLS

SEQ ID NO: 67227 - protein, 7 aa, Artificial sequence
  Protein classification predicting sequence
VNFVVKY

SEQ ID NO: 67228 - protein, 23 aa, Artificial sequence
  Protein classification predicting sequence
EDLAFLQYTGGTTGVAKGAMLTH

SEQ ID NO: 67229 - protein, 8 aa, Artificial sequence
  Protein classification predicting sequence
LITNPRDI

SEQ ID NO: 67230 - protein, 6 aa, Artificial sequence
  Protein classification predicting sequence
GYWQRP

SEQ ID NO: 67231 - protein, 9 aa, Artificial sequence
  Protein classification predicting sequence
LRIVDRKKD

SEQ ID NO: 67232 - protein, 8 aa, Artificial sequence
  Protein classification predicting sequence
KIFVVKKD

SEQ ID NO: 67233 - protein, 8 aa, Artificial sequence
  Protein classification predicting sequence
EFRDELPK

SEQ ID NO: 67234 - protein, 11 aa, Artificial sequence
  Protein classification predicting sequence
EINPDRYQSLV

SEQ ID NO: 67235 - protein, 13 aa, Artificial sequence
  Protein classification predicting sequence
IVSNFAHTLEKVV

SEQ ID NO: 67236 - protein, 10 aa, Artificial sequence
  Protein classification predicting sequence
GYRMQYVKPE

SEQ ID NO: 67237 - protein, 20 aa, Artificial sequence
  Protein classification predicting sequence
GVQEVAAVGVPSGSSGEAVK

SEQ ID NO: 67238 - protein, 27 aa, Artificial sequence
  Protein classification predicting sequence
ATYGPLLHPGKELVVTALPLYHIFALT

SEQ ID NO: 67239 - protein, 35 aa, Artificial sequence
  Protein classification predicting sequence
NCLLFIELGGQNLLITNPRDIPGLVKELAKYPFTA

SEQ ID NO: 67240 - protein, 35 aa, Artificial sequence
  Protein classification predicting sequence
TGVNTLFNALLNNKEFQQLDFSSLHLSAGGGMPVQ

SEQ ID NO: 67241 - protein, 31 aa, Artificial sequence
  Protein classification predicting sequence
VVAERWVKLTGQYLLEGYGLTECAPLVSVNP

SEQ ID NO: 67242 - protein, 28 aa, Artificial sequence
  Protein classification predicting sequence
DIDYHSGSIGLPVPSTEAKLVDDDDNEV

SEQ ID NO: 67243 - protein, 32 aa, Artificial sequence
  Protein classification predicting sequence
GFLRIVDRKKDMILVSGFNVYPNEIEDVVMQH

SEQ ID NO: 67244 - protein, 8 aa, Artificial sequence
  Protein classification predicting sequence
RYADQPAF

SEQ ID NO: 67245 - protein, 28 aa, Artificial sequence
  Protein classification predicting sequence
NMGEVMTFRKLEERSRAFAAYLQQGLGL

SEQ ID NO: 67246 - protein, 23 aa, Artificial sequence
  Protein classification predicting sequence
LRAGMIVVNVNPLYTPRELEHQL

SEQ ID NO: 67247 - protein, 15 aa, Artificial sequence
  Protein classification predicting sequence
VNFVVKYIKRLVPKY

SEQ ID NO: 67248 - protein, 8 aa, Artificial sequence
  Protein classification predicting sequence
LPDAISFR

SEQ ID NO: 67249 - protein, 16 aa, Artificial sequence
  Protein classification predicting sequence
AFLQYTGGTTGVAKGA

SEQ ID NO: 67250 - protein, 15 aa, Artificial sequence
  Protein classification predicting sequence
LVVTALPLYHIFALT

SEQ ID NO: 67251 - protein, 10 aa, Artificial sequence
  Protein classification predicting sequence
NCLLFIELGG

SEQ ID NO: 67252 - protein, 11 aa, Artificial sequence
  Protein classification predicting sequence
LLITNPRDIPG

SEQ ID NO: 67253 - protein, 10 aa, Artificial sequence
  Protein classification predicting sequence
LLEGYGLTEC

SEQ ID NO: 67254 - protein, 11 aa, Artificial sequence
  Protein classification predicting sequence
SGSIGLPVPST

SEQ ID NO: 67255 - protein, 16 aa, Artificial sequence
  Protein classification predicting sequence
GPQVMLGYWQRPDATD

SEQ ID NO: 67256 - protein, 23 aa, Artificial sequence
  Protein classification predicting sequence
VEFRDELPKSNVGKILRRELRDE

SEQ ID NO: 67257 - protein, 8 aa, Artificial sequence
  Protein classification predicting sequence
LAKYKVPK

SEQ ID NO: 67258 - protein, 28 aa, Artificial sequence
  Protein classification predicting sequence
AKDIPVYSFAEVMNGPKEEASIQEEFSL

SEQ ID NO: 67259 - protein, 35 aa, Artificial sequence
  Protein classification predicting sequence
EGEIVVKGPNVTGGYFNREDATRETIQNGWLHTGD

SEQ ID NO: 67260 - protein, 9 aa, Artificial sequence
  Protein classification predicting sequence
GYLDEEGFL

SEQ ID NO: 67261 - protein, 50 aa, Artificial sequence
  Protein classification predicting sequence
RGQKVAVLMKNGMEMITVIHALSYVGAVAVLLNTRLSREELLWQMDDAEV

SEQ ID NO: 67262 - protein, 8 aa, Artificial sequence
  Protein classification predicting sequence
CLVTDQDF

SEQ ID NO: 67263 - protein, 19 aa, Artificial sequence
  Protein classification predicting sequence
AEVMNGPKEEASIQEEFSL

SEQ ID NO: 67264 - protein, 33 aa, Artificial sequence
  Protein classification predicting sequence
EAMTIIYTSGTTGKPKGVILTYGNHWASAVGSS

SEQ ID NO: 67265 - protein, 25 aa, Artificial sequence
  Protein classification predicting sequence
IPVYQTYGMTETSSQICTLSADYML

SEQ ID NO: 67266 - protein, 8 aa, Artificial sequence
  Protein classification predicting sequence
PNWLMQRA

SEQ ID NO: 67267 - protein, 8 aa, Artificial sequence
  Protein classification predicting sequence
GMTETCSQ

SEQ ID NO: 67268 - protein, 8 aa, Artificial sequence
  Protein classification predicting sequence
GSAGKPLF

SEQ ID NO: 67269 - protein, 24 aa, Artificial sequence
  Protein classification predicting sequence
EGFLYVLDRRSDLIISGGENIYPA

SEQ ID NO: 67270 - protein, 8 aa, Artificial sequence
  Protein classification predicting sequence
GEILLKGP

SEQ ID NO: 67271 - protein, 11 aa, Artificial sequence
  Protein classification predicting sequence
LIISGGENIYP

SEQ ID NO: 67272 - protein, 7 aa, Artificial sequence
  Protein classification predicting sequence
ISGGENI

SEQ ID NO: 67273 - protein, 10 aa, Artificial sequence
  Protein classification predicting sequence
IISGGENIYP

SEQ ID NO: 67274 - protein, 7 aa, Artificial sequence
  Protein classification predicting sequence
LLGGGPA

SEQ ID NO: 67275 - protein, 6 aa, Artificial sequence
  Protein classification predicting sequence
NHWWSA

SEQ ID NO: 67276 - protein, 12 aa, Artificial sequence
  Protein classification predicting sequence
RCMLLGGGPAPK

SEQ ID NO: 67277 - protein, 10 aa, Artificial sequence
  Protein classification predicting sequence
YGMTETSSQI

SEQ ID NO: 67278 - protein, 13 aa, Artificial sequence
  Protein classification predicting sequence
LQKILLGGAKLSA

SEQ ID NO: 67279 - protein, 24 aa, Artificial sequence
  Protein classification predicting sequence
DAVCVGHPDDTWGQVPKLYFVSES

SEQ ID NO: 67280 - protein, 8 aa, Artificial sequence
  Protein classification predicting sequence
NGLLDNTM

SEQ ID NO: 67281 - protein, 43 aa, Artificial sequence
  Protein classification predicting sequence
IKNERITHISLVPQTLNWLMQQGLHEPYNLQKILLGGAKLSAT

SEQ ID NO: 67282 - protein, 10 aa, Artificial sequence
  Protein classification predicting sequence
LLDNTMGIQY

SEQ ID NO: 67283 - protein, 8 aa, Artificial sequence
  Protein classification predicting sequence
LIHACWLA

SEQ ID NO: 67284 - protein, 11 aa, Artificial sequence
  Protein classification predicting sequence
IEIAMINTRLT

SEQ ID NO: 67285 - protein, 21 aa, Artificial sequence
  Protein classification predicting sequence
IASIMFTSGTTGPQKAVPQTF

SEQ ID NO: 67286 - protein, 15 aa, Artificial sequence
  Protein classification predicting sequence
WLSVLPIYHISGLSV

SEQ ID NO: 67287 - protein, 11 aa, Artificial sequence
  Protein classification predicting sequence
LRAVIEGFTVR

SEQ ID NO: 67288 - protein, 10 aa, Artificial sequence
  Protein classification predicting sequence
KILLGGAKLS

SEQ ID NO: 67289 - protein, 16 aa, Artificial sequence
  Protein classification predicting sequence
YNSFGMTETCSQFLTA

SEQ ID NO: 67290 - protein, 7 aa, Artificial sequence
  Protein classification predicting sequence
VKIKNPN

SEQ ID NO: 67291 - protein, 9 aa, Artificial sequence
  Protein classification predicting sequence
NVMNGYLYP

SEQ ID NO: 67292 - protein, 23 aa, Artificial sequence
  Protein classification predicting sequence
IYDRRKDLIISGGENIYPYQIET

SEQ ID NO: 67293 - protein, 11 aa, Artificial sequence
  Protein classification predicting sequence
LPYTSTGKLQR

SEQ ID NO: 67294 - protein, 6 aa, Artificial sequence
  Protein classification predicting sequence
VVSTAI

SEQ ID NO: 67295 - protein, 9 aa, Artificial sequence
  Protein classification predicting sequence
GTHGKTTTT

SEQ ID NO: 67296 - protein, 8 aa, Artificial sequence
  Protein classification predicting sequence
RPTLTYGF

SEQ ID NO: 67297 - protein, 6 aa, Artificial sequence
  Protein classification predicting sequence
EADESD

SEQ ID NO: 67298 - protein, 10 aa, Artificial sequence
  Protein classification predicting sequence
DDYGHHPVEI

SEQ ID NO: 67299 - protein, 10 aa, Artificial sequence
  Protein classification predicting sequence
LGAGNITQWA

SEQ ID NO: 67300 - protein, 11 aa, Artificial sequence
  Protein classification predicting sequence
AVAGTHGKTTT

SEQ ID NO: 67301 - protein, 8 aa, Artificial sequence
  Protein classification predicting sequence
GTHGKTTT

SEQ ID NO: 67302 - protein, 7 aa, Artificial sequence
  Protein classification predicting sequence
EAGLDPT

SEQ ID NO: 67303 - protein, 13 aa, Artificial sequence
  Protein classification predicting sequence
DDYAHHPSEIRAT

SEQ ID NO: 67304 - protein, 8 aa, Artificial sequence
  Protein classification predicting sequence
HGKTTTTS

SEQ ID NO: 67305 - protein, 39 aa, Artificial sequence
  Protein classification predicting sequence
EGQVIIAGNAFPDTHEEIVAAKELNIPVHRYHHFLGDLM

SEQ ID NO: 67306 - protein, 17 aa, Artificial sequence
  Protein classification predicting sequence
PDYAIMTNIDFDHPDYF

SEQ ID NO: 67307 - protein, 11 aa, Artificial sequence
  Protein classification predicting sequence
TNIDFDHPDYF

SEQ ID NO: 67308 - protein, 11 aa, Artificial sequence
  Protein classification predicting sequence
GIKGSGMSALA

SEQ ID NO: 67309 - protein, 13 aa, Artificial sequence
  Protein classification predicting sequence
HGKTSTTGLLSHV

SEQ ID NO: 67310 - protein, 7 aa, Artificial sequence
  Protein classification predicting sequence
LIGDGTG

SEQ ID NO: 67311 - protein, 9 aa, Artificial sequence
  Protein classification predicting sequence
TFEGVKRRF

SEQ ID NO: 67312 - protein, 10 aa, Artificial sequence
  Protein classification predicting sequence
DDYAHHPTEI

SEQ ID NO: 67313 - protein, 9 aa, Artificial sequence
  Protein classification predicting sequence
FQPHTFSRT

SEQ ID NO: 67314 - protein, 12 aa, Artificial sequence
  Protein classification predicting sequence
VYLCDIFGSARE

SEQ ID NO: 67315 - protein, 9 aa, Artificial sequence
  Protein classification predicting sequence
FMGAGDIQK

SEQ ID NO: 67316 - protein, 7 aa, Artificial sequence
  Protein classification predicting sequence
LAQILHD

SEQ ID NO: 67317 - protein, 6 aa, Artificial sequence
  Protein classification predicting sequence
IAGNAF

SEQ ID NO: 67318 - protein, 10 aa, Artificial sequence
  Protein classification predicting sequence
IAGNAFPDTH

SEQ ID NO: 67319 - protein, 7 aa, Artificial sequence
  Protein classification predicting sequence
RYHKFLG

SEQ ID NO: 67320 - protein, 7 aa, Artificial sequence
  Protein classification predicting sequence
DVFDAFQ

SEQ ID NO: 67321 - protein, 10 aa, Artificial sequence
  Protein classification predicting sequence
KGIIACGDDE

SEQ ID NO: 67322 - protein, 8 aa, Artificial sequence
  Protein classification predicting sequence
FDVFVRNT

SEQ ID NO: 67323 - protein, 13 aa, Artificial sequence
  Protein classification predicting sequence
HGKTSTTGLLAHV

SEQ ID NO: 67324 - protein, 8 aa, Artificial sequence
  Protein classification predicting sequence
VIALCHYE

SEQ ID NO: 67325 - protein, 18 aa, Artificial sequence
  Protein classification predicting sequence
TSVAVTGAHGKTSTTGLL

SEQ ID NO: 67326 - protein, 9 aa, Artificial sequence
  Protein classification predicting sequence
AFQEMALQV

SEQ ID NO: 67327 - protein, 7 aa, Artificial sequence
  Protein classification predicting sequence
EFAESLS

SEQ ID NO: 67328 - protein, 8 aa, Artificial sequence
  Protein classification predicting sequence
IHFVGIGG

SEQ ID NO: 67329 - protein, 8 aa, Artificial sequence
  Protein classification predicting sequence
AENLGDAE

SEQ ID NO: 67330 - protein, 7 aa, Artificial sequence
  Protein classification predicting sequence
EHLDHYG

SEQ ID NO: 67331 - protein, 14 aa, Artificial sequence
  Protein classification predicting sequence
AFRQFVENVPFYGF

SEQ ID NO: 67332 - protein, 7 aa, Artificial sequence
  Protein classification predicting sequence
HFVGVGG

SEQ ID NO: 67333 - protein, 20 aa, Artificial sequence
  Protein classification predicting sequence
MRLKRGIAVAGTHGKTTTTS

SEQ ID NO: 67334 - protein, 10 aa, Artificial sequence
  Protein classification predicting sequence
GTHGKTTTTS

SEQ ID NO: 67335 - protein, 7 aa, Artificial sequence
  Protein classification predicting sequence
DDYGHHP

SEQ ID NO: 67336 - protein, 7 aa, Artificial sequence
  Protein classification predicting sequence
IPGVTSE

SEQ ID NO: 67337 - protein, 7 aa, Artificial sequence
  Protein classification predicting sequence
HFIGIGG

SEQ ID NO: 67338 - protein, 6 aa, Artificial sequence
  Protein classification predicting sequence
HGKTTT

SEQ ID NO: 67339 - protein, 7 aa, Artificial sequence
  Protein classification predicting sequence
DDYAHHP

SEQ ID NO: 67340 - protein, 7 aa, Artificial sequence
  Protein classification predicting sequence
MLAELMR

SEQ ID NO: 67341 - protein, 12 aa, Artificial sequence
  Protein classification predicting sequence
AGTHGKTTTTSL

SEQ ID NO: 67342 - protein, 6 aa, Artificial sequence
  Protein classification predicting sequence
GIKGSG

SEQ ID NO: 67343 - protein, 7 aa, Artificial sequence
  Protein classification predicting sequence
PHTFTRT

SEQ ID NO: 67344 - protein, 6 aa, Artificial sequence
  Protein classification predicting sequence
NLPFYG

SEQ ID NO: 67345 - protein, 6 aa, Artificial sequence
  Protein classification predicting sequence
AVMCID

SEQ ID NO: 67346 - protein, 6 aa, Artificial sequence
  Protein classification predicting sequence
VYAAGE

SEQ ID NO: 67347 - protein, 6 aa, Artificial sequence
  Protein classification predicting sequence
AGEAPI

SEQ ID NO: 67348 - protein, 7 aa, Artificial sequence
  Protein classification predicting sequence
GIGGAGM

SEQ ID NO: 67349 - protein, 6 aa, Artificial sequence
  Protein classification predicting sequence
QGAGNI

SEQ ID NO: 67350 - protein, 8 aa, Artificial sequence
  Protein classification predicting sequence
EADESDGS

SEQ ID NO: 67351 - protein, 7 aa, Artificial sequence
  Protein classification predicting sequence
TNIEPDH

SEQ ID NO: 67352 - protein, 6 aa, Artificial sequence
  Protein classification predicting sequence
DYGHHP

SEQ ID NO: 67353 - protein, 10 aa, Artificial sequence
  Protein classification predicting sequence
EADESDASFL

SEQ ID NO: 67354 - protein, 7 aa, Artificial sequence
  Protein classification predicting sequence
HNLPFYG

SEQ ID NO: 67355 - protein, 6 aa, Artificial sequence
  Protein classification predicting sequence
IPGADS

SEQ ID NO: 67356 - protein, 9 aa, Artificial sequence
  Protein classification predicting sequence
LILVQGAGN

SEQ ID NO: 67357 - protein, 42 aa, Artificial sequence
  Protein classification predicting sequence
AGTHGKTTTTSLVASVLAAGGLDPTFVIGGRLTSAGANARLG

SEQ ID NO: 67358 - protein, 7 aa, Artificial sequence
  Protein classification predicting sequence
TNIDADH

SEQ ID NO: 67359 - protein, 15 aa, Artificial sequence
  Protein classification predicting sequence
AFIEFTQRLPFYGSA

SEQ ID NO: 67360 - protein, 9 aa, Artificial sequence
  Protein classification predicting sequence
AGKVEPVFV

SEQ ID NO: 67361 - protein, 6 aa, Artificial sequence
  Protein classification predicting sequence
PHRYTR

SEQ ID NO: 67362 - protein, 7 aa, Artificial sequence
  Protein classification predicting sequence
GMSGIAE

SEQ ID NO: 67363 - protein, 10 aa, Artificial sequence
  Protein classification predicting sequence
EADESDGSFL

SEQ ID NO: 67364 - protein, 5 aa, Artificial sequence
  Protein classification predicting sequence
HMDTY

SEQ ID NO: 67365 - protein, 5 aa, Artificial sequence
  Protein classification predicting sequence
HHPTE

SEQ ID NO: 67366 - protein, 16 aa, Artificial sequence
  Protein classification predicting sequence
GIAIAGTHGKTTTTSL

SEQ ID NO: 67367 - protein, 7 aa, Artificial sequence
  Protein classification predicting sequence
GLDPTFV

SEQ ID NO: 67368 - protein, 10 aa, Artificial sequence
  Protein classification predicting sequence
PGRHNVLNAL

SEQ ID NO: 67369 - protein, 9 aa, Artificial sequence
  Protein classification predicting sequence
DDYGHHPVE

SEQ ID NO: 67370 - protein, 8 aa, Artificial sequence
  Protein classification predicting sequence
VAADGRAL

SEQ ID NO: 67371 - protein, 6 aa, Artificial sequence
  Protein classification predicting sequence
NIDADH

SEQ ID NO: 67372 - protein, 6 aa, Artificial sequence
  Protein classification predicting sequence
HNILNA

SEQ ID NO: 67373 - protein, 7 aa, Artificial sequence
  Protein classification predicting sequence
LMDIYAA

SEQ ID NO: 67374 - protein, 6 aa, Artificial sequence
  Protein classification predicting sequence
GHKAEN

SEQ ID NO: 67375 - protein, 7 aa, Artificial sequence
  Protein classification predicting sequence
NVLNALA

SEQ ID NO: 67376 - protein, 7 aa, Artificial sequence
  Protein classification predicting sequence
DIYPARE

SEQ ID NO: 67377 - protein, 6 aa, Artificial sequence
  Protein classification predicting sequence
MGAGDI

SEQ ID NO: 67378 - protein, 6 aa, Artificial sequence
  Protein classification predicting sequence
GTHGKT

SEQ ID NO: 67379 - protein, 6 aa, Artificial sequence
  Protein classification predicting sequence
IPVIRR

SEQ ID NO: 67380 - protein, 7 aa, Artificial sequence
  Protein classification predicting sequence
QGAGNIG

SEQ ID NO: 67381 - protein, 8 aa, Artificial sequence
  Protein classification predicting sequence
GIGGIGMS

SEQ ID NO: 67382 - protein, 6 aa, Artificial sequence
  Protein classification predicting sequence
VVTNID

SEQ ID NO: 67383 - protein, 8 aa, Artificial sequence
  Protein classification predicting sequence
DNPEVLAA

SEQ ID NO: 67384 - protein, 7 aa, Artificial sequence
  Protein classification predicting sequence
GANARLG

SEQ ID NO: 67385 - protein, 6 aa, Artificial sequence
  Protein classification predicting sequence
GVGRRF

SEQ ID NO: 67386 - protein, 18 aa, Artificial sequence
  Protein classification predicting sequence
TRTRDLYDDFANVLTQVD

SEQ ID NO: 67387 - protein, 19 aa, Artificial sequence
  Protein classification predicting sequence
MLAPVLTGNDLILVQGAGN

SEQ ID NO: 67388 - protein, 10 aa, Artificial sequence
  Protein classification predicting sequence
DLILVQGAGN

SEQ ID NO: 67389 - protein, 7 aa, Artificial sequence
  Protein classification predicting sequence
EIKLKPQ

SEQ ID NO: 67390 - protein, 11 aa, Artificial sequence
  Protein classification predicting sequence
PTSYLIGDGTG

SEQ ID NO: 67391 - protein, 10 aa, Artificial sequence
  Protein classification predicting sequence
TNIDFDHPDY

SEQ ID NO: 67392 - protein, 7 aa, Artificial sequence
  Protein classification predicting sequence
DVFSAFQ

SEQ ID NO: 67393 - protein, 6 aa, Artificial sequence
  Protein classification predicting sequence
ARQKYP

SEQ ID NO: 67394 - protein, 10 aa, Artificial sequence
  Protein classification predicting sequence
FMGAGDVQKF

SEQ ID NO: 67395 - protein, 9 aa, Artificial sequence
  Protein classification predicting sequence
ISGSDLAPN

SEQ ID NO: 67396 - protein, 37 aa, Artificial sequence
  Protein classification predicting sequence
ARIPVIRRAEMLAELMRFRHGIAIAGTHGKTTTTAMV

SEQ ID NO: 67397 - protein, 22 aa, Artificial sequence
  Protein classification predicting sequence
SIYAEAGLDPTFVNGGLVKAAG

SEQ ID NO: 67398 - protein, 21 aa, Artificial sequence
  Protein classification predicting sequence
GDFENLKQTFINFLHNLPFYG

SEQ ID NO: 67399 - protein, 13 aa, Artificial sequence
  Protein classification predicting sequence
EGIDDEAILRALE

SEQ ID NO: 67400 - protein, 8 aa, Artificial sequence
  Protein classification predicting sequence
PIPGADSR

SEQ ID NO: 67401 - protein, 15 aa, Artificial sequence
  Protein classification predicting sequence
PIPGADSRSLCRTIR

SEQ ID NO: 67402 - protein, 9 aa, Artificial sequence
  Protein classification predicting sequence
RGKIDPILV

SEQ ID NO: 67403 - protein, 6 aa, Artificial sequence
  Protein classification predicting sequence
DHMATY

SEQ ID NO: 67404 - protein, 8 aa, Artificial sequence
  Protein classification predicting sequence
YHFVGIKG

SEQ ID NO: 67405 - protein, 9 aa, Artificial sequence
  Protein classification predicting sequence
FFTQKALEE

SEQ ID NO: 67406 - protein, 24 aa, Artificial sequence
  Protein classification predicting sequence
TTGLLAHVMQGAHPTSYLIGDGTG

SEQ ID NO: 67407 - protein, 9 aa, Artificial sequence
  Protein classification predicting sequence
DVVVTSTAV

SEQ ID NO: 67408 - protein, 7 aa, Artificial sequence
  Protein classification predicting sequence
IPVIPRA

SEQ ID NO: 67409 - protein, 11 aa, Artificial sequence
  Protein classification predicting sequence
GIGGAGMSGIA

SEQ ID NO: 67410 - protein, 10 aa, Artificial sequence
  Protein classification predicting sequence
NEGYQISGSD

SEQ ID NO: 67411 - protein, 19 aa, Artificial sequence
  Protein classification predicting sequence
RIPVIQRAQMLAEIMRFRH

SEQ ID NO: 67412 - protein, 11 aa, Artificial sequence
  Protein classification predicting sequence
DHMDTYGGDFE

SEQ ID NO: 67413 - protein, 14 aa, Artificial sequence
  Protein classification predicting sequence
VDVLIMLDVYAAGE

SEQ ID NO: 67414 - protein, 9 aa, Artificial sequence
  Protein classification predicting sequence
MLDVYAAGE

SEQ ID NO: 67415 - protein, 12 aa, Artificial sequence
  Protein classification predicting sequence
LDPTFVNGGLVK

SEQ ID NO: 67416 - protein, 27 aa, Artificial sequence
  Protein classification predicting sequence
SRYLIAEADESDASFLHLQPMVSVVTN

SEQ ID NO: 67417 - protein, 6 aa, Artificial sequence
  Protein classification predicting sequence
DHMDTY

SEQ ID NO: 67418 - protein, 12 aa, Artificial sequence
  Protein classification predicting sequence
DHMDTYEGDFEK

SEQ ID NO: 67419 - protein, 9 aa, Artificial sequence
  Protein classification predicting sequence
FLHNLPFYG

SEQ ID NO: 67420 - protein, 7 aa, Artificial sequence
  Protein classification predicting sequence
GIKGTGM

SEQ ID NO: 67421 - protein, 18 aa, Artificial sequence
  Protein classification predicting sequence
GIKGSGMSALALMLHQMG

SEQ ID NO: 67422 - protein, 9 aa, Artificial sequence
  Protein classification predicting sequence
FTQRGLEQA

SEQ ID NO: 67423 - protein, 7 aa, Artificial sequence
  Protein classification predicting sequence
HNVLNAL

SEQ ID NO: 67424 - protein, 7 aa, Artificial sequence
  Protein classification predicting sequence
AHHPTEI

SEQ ID NO: 67425 - protein, 9 aa, Artificial sequence
  Protein classification predicting sequence
FQPHTFTRT

SEQ ID NO: 67426 - protein, 14 aa, Artificial sequence
  Protein classification predicting sequence
VYLAQIYGSAREVD

SEQ ID NO: 67427 - protein, 8 aa, Artificial sequence
  Protein classification predicting sequence
VYVFMGAG

SEQ ID NO: 67428 - protein, 8 aa, Artificial sequence
  Protein classification predicting sequence
LPFSEDNI

SEQ ID NO: 67429 - protein, 7 aa, Artificial sequence
  Protein classification predicting sequence
HGKTSTT

SEQ ID NO: 67430 - protein, 6 aa, Artificial sequence
  Protein classification predicting sequence
EYRRHF

SEQ ID NO: 67431 - protein, 7 aa, Artificial sequence
  Protein classification predicting sequence
DFDHPDY

SEQ ID NO: 67432 - protein, 8 aa, Artificial sequence
  Protein classification predicting sequence
FSGVKRRF

SEQ ID NO: 67433 - protein, 6 aa, Artificial sequence
  Protein classification predicting sequence
SLSKAD

SEQ ID NO: 67434 - protein, 14 aa, Artificial sequence
  Protein classification predicting sequence
GIAIAGTHGKTTTT

SEQ ID NO: 67435 - protein, 8 aa, Artificial sequence
  Protein classification predicting sequence
QPHLYSRT

SEQ ID NO: 67436 - protein, 9 aa, Artificial sequence
  Protein classification predicting sequence
VLDVYGARE

SEQ ID NO: 67437 - protein, 8 aa, Artificial sequence
  Protein classification predicting sequence
GIKGSGMS

SEQ ID NO: 67438 - protein, 7 aa, Artificial sequence
  Protein classification predicting sequence
IIAGNAF

SEQ ID NO: 67439 - protein, 6 aa, Artificial sequence
  Protein classification predicting sequence
DHPDYF

SEQ ID NO: 67440 - protein, 10 aa, Artificial sequence
  Protein classification predicting sequence
AVILFMGAGD

SEQ ID NO: 67441 - protein, 8 aa, Artificial sequence
  Protein classification predicting sequence
GIAEVLLN

SEQ ID NO: 67442 - protein, 20 aa, Artificial sequence
  Protein classification predicting sequence
AGLDPTFVNGGLVKSAGTNA

SEQ ID NO: 67443 - protein, 6 aa, Artificial sequence
  Protein classification predicting sequence
VYPAGE

SEQ ID NO: 67444 - protein, 9 aa, Artificial sequence
  Protein classification predicting sequence
GADSRSLCR

SEQ ID NO: 67445 - protein, 11 aa, Artificial sequence
  Protein classification predicting sequence
GGLDPTFVIGG

SEQ ID NO: 67446 - protein, 7 aa, Artificial sequence
  Protein classification predicting sequence
AEADESD

SEQ ID NO: 67447 - protein, 11 aa, Artificial sequence
  Protein classification predicting sequence
AEADESDASFL

SEQ ID NO: 67448 - protein, 13 aa, Artificial sequence
  Protein classification predicting sequence
AEADESDASFLHL

SEQ ID NO: 67449 - protein, 8 aa, Artificial sequence
  Protein classification predicting sequence
VDDYGHHP

SEQ ID NO: 67450 - protein, 25 aa, Artificial sequence
  Protein classification predicting sequence
GMSGIARILLDRGGLVSGSDAKESR

SEQ ID NO: 67451 - protein, 19 aa, Artificial sequence
  Protein classification predicting sequence
AIPKTNPELVEARRRGIPV

SEQ ID NO: 67452 - protein, 7 aa, Artificial sequence
  Protein classification predicting sequence
VALQHCG

SEQ ID NO: 67453 - protein, 7 aa, Artificial sequence
  Protein classification predicting sequence
GTNAHHG

SEQ ID NO: 67454 - protein, 7 aa, Artificial sequence
  Protein classification predicting sequence
AVVTNID

SEQ ID NO: 67455 - protein, 11 aa, Artificial sequence
  Protein classification predicting sequence
GVRRRFELVGT

SEQ ID NO: 67456 - protein, 16 aa, Artificial sequence
  Protein classification predicting sequence
GAREQPLAGVSGASVA

SEQ ID NO: 67457 - protein, 9 aa, Artificial sequence
  Protein classification predicting sequence
PGDVIVTMG

SEQ ID NO: 67458 - protein, 9 aa, Artificial sequence
  Protein classification predicting sequence
DPSFAVGGE

SEQ ID NO: 67459 - protein, 13 aa, Artificial sequence
  Protein classification predicting sequence
GMSGIAEVLHNLG

SEQ ID NO: 67460 - protein, 7 aa, Artificial sequence
  Protein classification predicting sequence
SLGIQVY

SEQ ID NO: 67461 - protein, 7 aa, Artificial sequence
  Protein classification predicting sequence
EVYPAGE

SEQ ID NO: 67462 - protein, 13 aa, Artificial sequence
  Protein classification predicting sequence
TTSMLIVALQHCG

SEQ ID NO: 67463 - protein, 9 aa, Artificial sequence
  Protein classification predicting sequence
FVAEADESD

SEQ ID NO: 67464 - protein, 9 aa, Artificial sequence
  Protein classification predicting sequence
DDYAHHPTE

SEQ ID NO: 67465 - protein, 15 aa, Artificial sequence
  Protein classification predicting sequence
GAHGKTSTTGLLSHV

SEQ ID NO: 67466 - protein, 12 aa, Artificial sequence
  Protein classification predicting sequence
HTVLNALAVIAI

SEQ ID NO: 67467 - protein, 7 aa, Artificial sequence
  Protein classification predicting sequence
VYLCDIF

SEQ ID NO: 67468 - protein, 8 aa, Artificial sequence
  Protein classification predicting sequence
QKFQAAYE

SEQ ID NO: 67469 - protein, 7 aa, Artificial sequence
  Protein classification predicting sequence
VVVSSAI

SEQ ID NO: 67470 - protein, 8 aa, Artificial sequence
  Protein classification predicting sequence
MIFQPHRY

SEQ ID NO: 67471 - protein, 14 aa, Artificial sequence
  Protein classification predicting sequence
MIFQPHRYSRTRDL

SEQ ID NO: 67472 - protein, 7 aa, Artificial sequence
  Protein classification predicting sequence
FNHRPEN

SEQ ID NO: 67473 - protein, 12 aa, Artificial sequence
  Protein classification predicting sequence
AGTHGKTTTTAM

SEQ ID NO: 67474 - protein, 47 aa, Artificial sequence
  Protein classification predicting sequence
AGLDPTFVNGGLVKAAGTHARLGSSRYLIAEADESDASFLHLQPMVA

SEQ ID NO: 67475 - protein, 11 aa, Artificial sequence
  Protein classification predicting sequence
TNIEADHMDTY

SEQ ID NO: 67476 - protein, 26 aa, Artificial sequence
  Protein classification predicting sequence
GDFENLKQTFINFLHNLPFYGRAVMC

SEQ ID NO: 67477 - protein, 24 aa, Artificial sequence
  Protein classification predicting sequence
LNAPGRHNALNAAAAVAVATEEGI

SEQ ID NO: 67478 - protein, 12 aa, Artificial sequence
  Protein classification predicting sequence
FQGTGRRFDFLG

SEQ ID NO: 67479 - protein, 28 aa, Artificial sequence
  Protein classification predicting sequence
AMLVDDYGHHPTEVDATIKAARAGWPDK

SEQ ID NO: 67480 - protein, 15 aa, Artificial sequence
  Protein classification predicting sequence
EAGLDPTFVNGGLVK

SEQ ID NO: 67481 - protein, 12 aa, Artificial sequence
  Protein classification predicting sequence
VTNIEADHMDTY

SEQ ID NO: 67482 - protein, 9 aa, Artificial sequence
  Protein classification predicting sequence
AVMCVDDPV

SEQ ID NO: 67483 - protein, 10 aa, Artificial sequence
  Protein classification predicting sequence
AAVAVATEEG

SEQ ID NO: 67484 - protein, 8 aa, Artificial sequence
  Protein classification predicting sequence
VLEQVDVL

SEQ ID NO: 67485 - protein, 8 aa, Artificial sequence
  Protein classification predicting sequence
RSLCRTIR

SEQ ID NO: 67486 - protein, 8 aa, Artificial sequence
  Protein classification predicting sequence
IGGAGMSG

SEQ ID NO: 67487 - protein, 6 aa, Artificial sequence
  Protein classification predicting sequence
NIDFDH

SEQ ID NO: 67488 - protein, 9 aa, Artificial sequence
  Protein classification predicting sequence
LGYEVSGSD

SEQ ID NO: 67489 - protein, 7 aa, Artificial sequence
  Protein classification predicting sequence
SEDADVR

SEQ ID NO: 67490 - protein, 7 aa, Artificial sequence
  Protein classification predicting sequence
QPHRYSR

SEQ ID NO: 67491 - protein, 9 aa, Artificial sequence
  Protein classification predicting sequence
RTRDLYDDF

SEQ ID NO: 67492 - protein, 7 aa, Artificial sequence
  Protein classification predicting sequence
RGKLDPI

SEQ ID NO: 67493 - protein, 6 aa, Artificial sequence
  Protein classification predicting sequence
PGADSR

SEQ ID NO: 67494 - protein, 11 aa, Artificial sequence
  Protein classification predicting sequence
GDNPEVLAARA

SEQ ID NO: 67495 - protein, 25 aa, Artificial sequence
  Protein classification predicting sequence
IGLVHFIGIGGIGMSGIAEVLHNLG

SEQ ID NO: 67496 - protein, 22 aa, Artificial sequence
  Protein classification predicting sequence
FDAVRAAFRQFVENVPFYGFGV

SEQ ID NO: 67497 - protein, 9 aa, Artificial sequence
  Protein classification predicting sequence
HNVSNATAA

SEQ ID NO: 67498 - protein, 7 aa, Artificial sequence
  Protein classification predicting sequence
GTNARLG

SEQ ID NO: 67499 - protein, 10 aa, Artificial sequence
  Protein classification predicting sequence
FVENVPFYGF

SEQ ID NO: 67500 - protein, 7 aa, Artificial sequence
  Protein classification predicting sequence
QPHRFSR

SEQ ID NO: 67501 - protein, 9 aa, Artificial sequence
  Protein classification predicting sequence
TNIDPEHLD

SEQ ID NO: 67502 - protein, 9 aa, Artificial sequence
  Protein classification predicting sequence
QGHFTLLRQ

SEQ ID NO: 67503 - protein, 9 aa, Artificial sequence
  Protein classification predicting sequence
LVMLFQPHR

SEQ ID NO: 67504 - protein, 14 aa, Artificial sequence
  Protein classification predicting sequence
TRTRDLYDDFANVL

SEQ ID NO: 67505 - protein, 7 aa, Artificial sequence
  Protein classification predicting sequence
LLMLDVY

SEQ ID NO: 67506 - protein, 21 aa, Artificial sequence
  Protein classification predicting sequence
FNHRPENVRDASVVVVSSAIS

SEQ ID NO: 67507 - protein, 30 aa, Artificial sequence
  Protein classification predicting sequence
AILRALESFQGTGRRFDFLGEFPLEPVNGK

SEQ ID NO: 67508 - protein, 8 aa, Artificial sequence
  Protein classification predicting sequence
VVVVSTAI

SEQ ID NO: 67509 - protein, 9 aa, Artificial sequence
  Protein classification predicting sequence
FVGIGGAGM

SEQ ID NO: 67510 - protein, 10 aa, Artificial sequence
  Protein classification predicting sequence
RAEMLAELMR

SEQ ID NO: 67511 - protein, 13 aa, Artificial sequence
  Protein classification predicting sequence
TFIDFLHNLPFYG

SEQ ID NO: 67512 - protein, 9 aa, Artificial sequence
  Protein classification predicting sequence
TYGFSEDAD

SEQ ID NO: 67513 - protein, 9 aa, Artificial sequence
  Protein classification predicting sequence
MVVIQGNAF

SEQ ID NO: 67514 - protein, 8 aa, Artificial sequence
  Protein classification predicting sequence
HEEIVRAH

SEQ ID NO: 67515 - protein, 18 aa, Artificial sequence
  Protein classification predicting sequence
SDYFAFEACEYRRHFLSY

SEQ ID NO: 67516 - protein, 13 aa, Artificial sequence
  Protein classification predicting sequence
NVKKGIIAWGDDE

SEQ ID NO: 67517 - protein, 7 aa, Artificial sequence
  Protein classification predicting sequence
FLSPQYG

SEQ ID NO: 67518 - protein, 8 aa, Artificial sequence
  Protein classification predicting sequence
LNALAVIA

SEQ ID NO: 67519 - protein, 13 aa, Artificial sequence
  Protein classification predicting sequence
LNALAVIAISYLE

SEQ ID NO: 67520 - protein, 10 aa, Artificial sequence
  Protein classification predicting sequence
EFAESLSKAD

SEQ ID NO: 67521 - protein, 15 aa, Artificial sequence
  Protein classification predicting sequence
VFLCEIFGSIRENTG

SEQ ID NO: 67522 - protein, 23 aa, Artificial sequence
  Protein classification predicting sequence
YVFTEVALRNKGIKILPFDANNI

SEQ ID NO: 67523 - protein, 43 aa, Artificial sequence
  Protein classification predicting sequence
QYTSVAVTGAHGKTSTTGLLSHVMNGDKKTSFLIGDGTGMGLP

SEQ ID NO: 67524 - protein, 27 aa, Artificial sequence
  Protein classification predicting sequence
NQVIVDDYAHHPREISATIETARKKYP

SEQ ID NO: 67525 - protein, 28 aa, Artificial sequence
  Protein classification predicting sequence
VVAVFQPHTFSRTQAFLNEFAESLSKAD

SEQ ID NO: 67526 - protein, 13 aa, Artificial sequence
  Protein classification predicting sequence
KYYFTQRGLEQAG

SEQ ID NO: 67527 - protein, 7 aa, Artificial sequence
  Protein classification predicting sequence
NGSDFKV

SEQ ID NO: 67528 - protein, 24 aa, Artificial sequence
  Protein classification predicting sequence
IGQFHVPAYGKHNILNATAVIANL

SEQ ID NO: 67529 - protein, 12 aa, Artificial sequence
  Protein classification predicting sequence
SFEELLANLTKN

SEQ ID NO: 67530 - protein, 15 aa, Artificial sequence
  Protein classification predicting sequence
CVVVSSAIREDNPEL

SEQ ID NO: 67531 - protein, 37 aa, Artificial sequence
  Protein classification predicting sequence
QYFVFESDEYERHFMPYHPEYSIITNIDFDHPDYFTG

SEQ ID NO: 67532 - protein, 7 aa, Artificial sequence
  Protein classification predicting sequence
PIYYYGF

SEQ ID NO: 67533 - protein, 12 aa, Artificial sequence
  Protein classification predicting sequence
HLKTFSGVKRRF

SEQ ID NO: 67534 - protein, 21 aa, Artificial sequence
  Protein classification predicting sequence
ALNEADSVYLAQIYGSAREVD

SEQ ID NO: 67535 - protein, 7 aa, Artificial sequence
  Protein classification predicting sequence
VKVEDLA

SEQ ID NO: 67536 - protein, 12 aa, Artificial sequence
  Protein classification predicting sequence
IIDDFAHHPTEI

SEQ ID NO: 67537 - protein, 12 aa, Artificial sequence
  Protein classification predicting sequence
TNIDFDHPDYFT

SEQ ID NO: 67538 - protein, 14 aa, Artificial sequence
  Protein classification predicting sequence
DAARQKYPSKEIVA

SEQ ID NO: 67539 - protein, 6 aa, Artificial sequence
  Protein classification predicting sequence
GMSALA

SEQ ID NO: 67540 - protein, 8 aa, Artificial sequence
  Protein classification predicting sequence
PGRHNALN

SEQ ID NO: 67541 - protein, 6 aa, Artificial sequence
  Protein classification predicting sequence
DNPEIV

SEQ ID NO: 67542 - protein, 8 aa, Artificial sequence
  Protein classification predicting sequence
DHLENYGN

SEQ ID NO: 67543 - protein, 7 aa, Artificial sequence
  Protein classification predicting sequence
ASVVVVS

SEQ ID NO: 67544 - protein, 19 aa, Artificial sequence
  Protein classification predicting sequence
LIAEADESDASFLHLQPMV

SEQ ID NO: 67545 - protein, 6 aa, Artificial sequence
  Protein classification predicting sequence
CIDDPV

SEQ ID NO: 67546 - protein, 13 aa, Artificial sequence
  Protein classification predicting sequence
CIDDPVIRELIPR

SEQ ID NO: 67547 - protein, 7 aa, Artificial sequence
  Protein classification predicting sequence
RGKIDPI

SEQ ID NO: 67548 - protein, 9 aa, Artificial sequence
  Protein classification predicting sequence
PGRHNALNA

SEQ ID NO: 67549 - protein, 10 aa, Artificial sequence
  Protein classification predicting sequence
MLVDDYGHHP

SEQ ID NO: 67550 - protein, 6 aa, Artificial sequence
  Protein classification predicting sequence
DYAHHP

SEQ ID NO: 67551 - protein, 9 aa, Artificial sequence
  Protein classification predicting sequence
MLAELMRFR

SEQ ID NO: 67552 - protein, 7 aa, Artificial sequence
  Protein classification predicting sequence
HFVGIGG

SEQ ID NO: 67553 - protein, 43 aa, Artificial sequence
  Protein classification predicting sequence
IVPEMRRVRHIHFVGIGGAGMGGIAEVLANEGYQISGSDLAPN

SEQ ID NO: 67554 - protein, 35 aa, Artificial sequence
  Protein classification predicting sequence
RYLIAEADESDASFLHLQPMVAIVTNIEADHMDTY

SEQ ID NO: 67555 - protein, 9 aa, Artificial sequence
  Protein classification predicting sequence
RELLPRVGR

SEQ ID NO: 67556 - protein, 6 aa, Artificial sequence
  Protein classification predicting sequence
LCRTIR

SEQ ID NO: 67557 - protein, 9 aa, Artificial sequence
  Protein classification predicting sequence
VVEADESDG

SEQ ID NO: 67558 - protein, 7 aa, Artificial sequence
  Protein classification predicting sequence
EADESDG

SEQ ID NO: 67559 - protein, 7 aa, Artificial sequence
  Protein classification predicting sequence
KSTVTTL

SEQ ID NO: 67560 - protein, 11 aa, Artificial sequence
  Protein classification predicting sequence
VLLSPACASFD

SEQ ID NO: 67561 - protein, 13 aa, Artificial sequence
  Protein classification predicting sequence
VLLSPACASFDMF

SEQ ID NO: 67562 - protein, 6 aa, Artificial sequence
  Protein classification predicting sequence
NQTEED

SEQ ID NO: 67563 - protein, 7 aa, Artificial sequence
  Protein classification predicting sequence
FRGLPHR

SEQ ID NO: 67564 - protein, 6 aa, Artificial sequence
  Protein classification predicting sequence
STTPHA

SEQ ID NO: 67565 - protein, 7 aa, Artificial sequence
  Protein classification predicting sequence
EERGEKF

SEQ ID NO: 67566 - protein, 10 aa, Artificial sequence
  Protein classification predicting sequence
AAGNISPAAL

SEQ ID NO: 67567 - protein, 8 aa, Artificial sequence
  Protein classification predicting sequence
AATVLNVT

SEQ ID NO: 67568 - protein, 8 aa, Artificial sequence
  Protein classification predicting sequence
AGGLDRGN

SEQ ID NO: 67569 - protein, 22 aa, Artificial sequence
  Protein classification predicting sequence
LFSTTKEIEDGACIKDNALYFK

SEQ ID NO: 67570 - protein, 24 aa, Artificial sequence
  Protein classification predicting sequence
DIVLPGQHNLENILAAMSIAKLLG

SEQ ID NO: 67571 - protein, 45 aa, Artificial sequence
  Protein classification predicting sequence
VLKRFTGVKHRLEYVTTINNRKFYNDSKATNMLATEKALSAFTQP

SEQ ID NO: 67572 - protein, 11 aa, Artificial sequence
  Protein classification predicting sequence
VLLAGGLDRGN

SEQ ID NO: 67573 - protein, 18 aa, Artificial sequence
  Protein classification predicting sequence
IESVDTLDEAVVKAYAHS

SEQ ID NO: 67574 - protein, 11 aa, Artificial sequence
  Protein classification predicting sequence
LLSPACASWDQ

SEQ ID NO: 67575 - protein, 9 aa, Artificial sequence
  Protein classification predicting sequence
LVLGLAKSG

SEQ ID NO: 67576 - protein, 6 aa, Artificial sequence
  Protein classification predicting sequence
VKNPGI

SEQ ID NO: 67577 - protein, 12 aa, Artificial sequence
  Protein classification predicting sequence
ILLSPACASWDQ

SEQ ID NO: 67578 - protein, 17 aa, Artificial sequence
  Protein classification predicting sequence
ILLSPACASWDQYRTFE

SEQ ID NO: 67579 - protein, 8 aa, Artificial sequence
  Protein classification predicting sequence
AKSGYAAA

SEQ ID NO: 67580 - protein, 7 aa, Artificial sequence
  Protein classification predicting sequence
FTGVKHR

SEQ ID NO: 67581 - protein, 6 aa, Artificial sequence
  Protein classification predicting sequence
FEERGD

SEQ ID NO: 67582 - protein, 8 aa, Artificial sequence
  Protein classification predicting sequence
VVCGGHPL

SEQ ID NO: 67583 - protein, 7 aa, Artificial sequence
  Protein classification predicting sequence
KNPGIPY

SEQ ID NO: 67584 - protein, 9 aa, Artificial sequence
  Protein classification predicting sequence
TFGQTAPKL

SEQ ID NO: 67585 - protein, 8 aa, Artificial sequence
  Protein classification predicting sequence
LLNLTPDH

SEQ ID NO: 67586 - protein, 7 aa, Artificial sequence
  Protein classification predicting sequence
SSYQIDL

SEQ ID NO: 67587 - protein, 7 aa, Artificial sequence
  Protein classification predicting sequence
LNISEDH

SEQ ID NO: 67588 - protein, 9 aa, Artificial sequence
  Protein classification predicting sequence
GVRWINDSK

SEQ ID NO: 67589 - protein, 7 aa, Artificial sequence
  Protein classification predicting sequence
YCFGRDG

SEQ ID NO: 67590 - protein, 6 aa, Artificial sequence
  Protein classification predicting sequence
DHLDRY

SEQ ID NO: 67591 - protein, 6 aa, Artificial sequence
  Protein classification predicting sequence
WINDSK

SEQ ID NO: 67592 - protein, 9 aa, Artificial sequence
  Protein classification predicting sequence
VLELSSFQL

SEQ ID NO: 67593 - protein, 6 aa, Artificial sequence
  Protein classification predicting sequence
GKGQDF

SEQ ID NO: 67594 - protein, 8 aa, Artificial sequence
  Protein classification predicting sequence
LLSPACAS

SEQ ID NO: 67595 - protein, 10 aa, Artificial sequence
  Protein classification predicting sequence
LLSPACASLD

SEQ ID NO: 67596 - protein, 8 aa, Artificial sequence
  Protein classification predicting sequence
GDVILLSP

SEQ ID NO: 67597 - protein, 7 aa, Artificial sequence
  Protein classification predicting sequence
DQFRSFE

SEQ ID NO: 67598 - protein, 6 aa, Artificial sequence
  Protein classification predicting sequence
DHMDRY

SEQ ID NO: 67599 - protein, 10 aa, Artificial sequence
  Protein classification predicting sequence
DSKGTNVGAT

SEQ ID NO: 67600 - protein, 11 aa, Artificial sequence
  Protein classification predicting sequence
VLLSPACASLD

SEQ ID NO: 67601 - protein, 13 aa, Artificial sequence
  Protein classification predicting sequence
VLLSPACASLDMF

SEQ ID NO: 67602 - protein, 6 aa, Artificial sequence
  Protein classification predicting sequence
KYYNDS

SEQ ID NO: 67603 - protein, 6 aa, Artificial sequence
  Protein classification predicting sequence
NFEVRG

SEQ ID NO: 67604 - protein, 8 aa, Artificial sequence
  Protein classification predicting sequence
EVIGDVEL

SEQ ID NO: 67605 - protein, 9 aa, Artificial sequence
  Protein classification predicting sequence
ELSSFQLHW

SEQ ID NO: 67606 - protein, 6 aa, Artificial sequence
  Protein classification predicting sequence
GDIELF

SEQ ID NO: 67607 - protein, 11 aa, Artificial sequence
  Protein classification predicting sequence
PIIAITGSNGK

SEQ ID NO: 67608 - protein, 7 aa, Artificial sequence
  Protein classification predicting sequence
HRCQWVR

SEQ ID NO: 67609 - protein, 6 aa, Artificial sequence
  Protein classification predicting sequence
LNDEWL

SEQ ID NO: 67610 - protein, 7 aa, Artificial sequence
  Protein classification predicting sequence
NDSKATN

SEQ ID NO: 67611 - protein, 11 aa, Artificial sequence
  Protein classification predicting sequence
NDSKATNVGST

SEQ ID NO: 67612 - protein, 9 aa, Artificial sequence
  Protein classification predicting sequence
VKNPGIPYT

SEQ ID NO: 67613 - protein, 8 aa, Artificial sequence
  Protein classification predicting sequence
NGKTTTTT

SEQ ID NO: 67614 - protein, 6 aa, Artificial sequence
  Protein classification predicting sequence
IAVITN

SEQ ID NO: 67615 - protein, 6 aa, Artificial sequence
  Protein classification predicting sequence
YVAAKW

SEQ ID NO: 67616 - protein, 11 aa, Artificial sequence
  Protein classification predicting sequence
PGSHNIENALA

SEQ ID NO: 67617 - protein, 7 aa, Artificial sequence
  Protein classification predicting sequence
ALSGFDN

SEQ ID NO: 67618 - protein, 9 aa, Artificial sequence
  Protein classification predicting sequence
KKVLVLGLA

SEQ ID NO: 67619 - protein, 7 aa, Artificial sequence
  Protein classification predicting sequence
VTVNDGK

SEQ ID NO: 67620 - protein, 8 aa, Artificial sequence
  Protein classification predicting sequence
VKNPGIPY

SEQ ID NO: 67621 - protein, 8 aa, Artificial sequence
  Protein classification predicting sequence
GNIGYPAS

SEQ ID NO: 67622 - protein, 9 aa, Artificial sequence
  Protein classification predicting sequence
VMELSSFQL

SEQ ID NO: 67623 - protein, 13 aa, Artificial sequence
  Protein classification predicting sequence
GVPGSHNVENALA

SEQ ID NO: 67624 - protein, 10 aa, Artificial sequence
  Protein classification predicting sequence
LLSPANASWD

SEQ ID NO: 67625 - protein, 22 aa, Artificial sequence
  Protein classification predicting sequence
VVIIGLGLTGLSCVDFFLARGV

SEQ ID NO: 67626 - protein, 9 aa, Artificial sequence
  Protein classification predicting sequence
ADLIVASPG

SEQ ID NO: 67627 - protein, 43 aa, Artificial sequence
  Protein classification predicting sequence
AADAGIEIVGDIELFCREAQAPIVAITGSNGKSTVTTLVGEMA

SEQ ID NO: 67628 - protein, 12 aa, Artificial sequence
  Protein classification predicting sequence
VGVGGNIGLPAL

SEQ ID NO: 67629 - protein, 7 aa, Artificial sequence
  Protein classification predicting sequence
LNVTEDH

SEQ ID NO: 67630 - protein, 14 aa, Artificial sequence
  Protein classification predicting sequence
RYPFGLQQYRAAKL

SEQ ID NO: 67631 - protein, 9 aa, Artificial sequence
  Protein classification predicting sequence
QQGETWLRV

SEQ ID NO: 67632 - protein, 12 aa, Artificial sequence
  Protein classification predicting sequence
AEQTETMEQAMR

SEQ ID NO: 67633 - protein, 5 aa, Artificial sequence
  Protein classification predicting sequence
PGIPY

SEQ ID NO: 67634 - protein, 6 aa, Artificial sequence
  Protein classification predicting sequence
AHLDYH

SEQ ID NO: 67635 - protein, 16 aa, Artificial sequence
  Protein classification predicting sequence
DIVLPGQHNLENILAA

SEQ ID NO: 67636 - protein, 9 aa, Artificial sequence
  Protein classification predicting sequence
HNLENILAA

SEQ ID NO: 67637 - protein, 11 aa, Artificial sequence
  Protein classification predicting sequence
TNILATQKALS

SEQ ID NO: 67638 - protein, 8 aa, Artificial sequence
  Protein classification predicting sequence
KTFEERGD

SEQ ID NO: 67639 - protein, 11 aa, Artificial sequence
  Protein classification predicting sequence
KTFEERGDIFI

SEQ ID NO: 67640 - protein, 8 aa, Artificial sequence
  Protein classification predicting sequence
GLKSFPGL

SEQ ID NO: 67641 - protein, 12 aa, Artificial sequence
  Protein classification predicting sequence
VLELSSFQLETT

SEQ ID NO: 67642 - protein, 9 aa, Artificial sequence
  Protein classification predicting sequence
AKLRIYENA

SEQ ID NO: 67643 - protein, 7 aa, Artificial sequence
  Protein classification predicting sequence
GLAHRFQ

SEQ ID NO: 67644 - protein, 9 aa, Artificial sequence
  Protein classification predicting sequence
WVNDSKATN

SEQ ID NO: 67645 - protein, 7 aa, Artificial sequence
  Protein classification predicting sequence
TGLSCVD

SEQ ID NO: 67646 - protein, 17 aa, Artificial sequence
  Protein classification predicting sequence
AAAATVLNVTEDHMDRY

SEQ ID NO: 67647 - protein, 11 aa, Artificial sequence
  Protein classification predicting sequence
LNVTEDHMDRY

SEQ ID NO: 67648 - protein, 6 aa, Artificial sequence
  Protein classification predicting sequence
ASLDQF

SEQ ID NO: 67649 - protein, 9 aa, Artificial sequence
  Protein classification predicting sequence
VLLSPACAS

SEQ ID NO: 67650 - protein, 8 aa, Artificial sequence
  Protein classification predicting sequence
NKNILVLG

SEQ ID NO: 67651 - protein, 6 aa, Artificial sequence
  Protein classification predicting sequence
YDNPMV

SEQ ID NO: 67652 - protein, 10 aa, Artificial sequence
  Protein classification predicting sequence
SEAPIIGITG

SEQ ID NO: 67653 - protein, 13 aa, Artificial sequence
  Protein classification predicting sequence
LSGNIGFPASEVA

SEQ ID NO: 67654 - protein, 7 aa, Artificial sequence
  Protein classification predicting sequence
MVVFGQT

SEQ ID NO: 67655 - protein, 11 aa, Artificial sequence
  Protein classification predicting sequence
HKLGAFVTVND

SEQ ID NO: 67656 - protein, 13 aa, Artificial sequence
  Protein classification predicting sequence
VVKNPGIPYSNPI

SEQ ID NO: 67657 - protein, 10 aa, Artificial sequence
  Protein classification predicting sequence
NGKTTTTTMI

SEQ ID NO: 67658 - protein, 8 aa, Artificial sequence
  Protein classification predicting sequence
PHIAVITN

SEQ ID NO: 67659 - protein, 8 aa, Artificial sequence
  Protein classification predicting sequence
HNVENALA

SEQ ID NO: 67660 - protein, 7 aa, Artificial sequence
  Protein classification predicting sequence
LSPACAS

SEQ ID NO: 67661 - protein, 7 aa, Artificial sequence
  Protein classification predicting sequence
NGKSTVT

SEQ ID NO: 67662 - protein, 7 aa, Artificial sequence
  Protein classification predicting sequence
ATILNVT

SEQ ID NO: 67663 - protein, 9 aa, Artificial sequence
  Protein classification predicting sequence
GDTVLLAPA

SEQ ID NO: 67664 - protein, 10 aa, Artificial sequence
  Protein classification predicting sequence
GIKVICGSHP

SEQ ID NO: 67665 - protein, 6 aa, Artificial sequence
  Protein classification predicting sequence
ISEAPI

SEQ ID NO: 67666 - protein, 8 aa, Artificial sequence
  Protein classification predicting sequence
TGLSCVDF

SEQ ID NO: 67667 - protein, 7 aa, Artificial sequence
  Protein classification predicting sequence
FPGLAHR

SEQ ID NO: 67668 - protein, 8 aa, Artificial sequence
  Protein classification predicting sequence
ELSSFQLE

SEQ ID NO: 67669 - protein, 12 aa, Artificial sequence
  Protein classification predicting sequence
VLNIAEDHLDWH

SEQ ID NO: 67670 - protein, 14 aa, Artificial sequence
  Protein classification predicting sequence
GRHRAEVVAVADGI

SEQ ID NO: 67671 - protein, 10 aa, Artificial sequence
  Protein classification predicting sequence
SVLAYPRVVW

SEQ ID NO: 67672 - protein, 10 aa, Artificial sequence
  Protein classification predicting sequence
VAEALSRHAP

SEQ ID NO: 67673 - protein, 11 aa, Artificial sequence
  Protein classification predicting sequence
LVGAVLIGRDR

SEQ ID NO: 67674 - protein, 7 aa, Artificial sequence
  Protein classification predicting sequence
FQNKKIL

SEQ ID NO: 67675 - protein, 11 aa, Artificial sequence
  Protein classification predicting sequence
LELSSFQLETT

SEQ ID NO: 67676 - protein, 7 aa, Artificial sequence
  Protein classification predicting sequence
LNLSEDH

SEQ ID NO: 67677 - protein, 7 aa, Artificial sequence
  Protein classification predicting sequence
PVWGDVE

SEQ ID NO: 67678 - protein, 7 aa, Artificial sequence
  Protein classification predicting sequence
LIGVDAP

SEQ ID NO: 67679 - protein, 7 aa, Artificial sequence
  Protein classification predicting sequence
ELSSFQL

SEQ ID NO: 67680 - protein, 6 aa, Artificial sequence
  Protein classification predicting sequence
LTTFSG

SEQ ID NO: 67681 - protein, 12 aa, Artificial sequence
  Protein classification predicting sequence
YNDSKATNILAT

SEQ ID NO: 67682 - protein, 10 aa, Artificial sequence
  Protein classification predicting sequence
LLAGGLDRGN

SEQ ID NO: 67683 - protein, 17 aa, Artificial sequence
  Protein classification predicting sequence
VVIIGLGLTGLSCVDFF

SEQ ID NO: 67684 - protein, 7 aa, Artificial sequence
  Protein classification predicting sequence
RCVSFGV

SEQ ID NO: 67685 - protein, 7 aa, Artificial sequence
  Protein classification predicting sequence
GGDGKGA

SEQ ID NO: 67686 - protein, 10 aa, Artificial sequence
  Protein classification predicting sequence
ELSSFQLETT

SEQ ID NO: 67687 - protein, 13 aa, Artificial sequence
  Protein classification predicting sequence
GEIELFARALAGL

SEQ ID NO: 67688 - protein, 10 aa, Artificial sequence
  Protein classification predicting sequence
LRDYAGEPHR

SEQ ID NO: 67689 - protein, 14 aa, Artificial sequence
  Protein classification predicting sequence
SFPGLAHRMEQVGR

SEQ ID NO: 67690 - protein, 7 aa, Artificial sequence
  Protein classification predicting sequence
DQFKNFE

SEQ ID NO: 67691 - protein, 9 aa, Artificial sequence
  Protein classification predicting sequence
YKNFEVRGD

SEQ ID NO: 67692 - protein, 7 aa, Artificial sequence
  Protein classification predicting sequence
NFEVRGD

SEQ ID NO: 67693 - protein, 8 aa, Artificial sequence
  Protein classification predicting sequence
AGVEVIGD

SEQ ID NO: 67694 - protein, 7 aa, Artificial sequence
  Protein classification predicting sequence
TPDHLDR

SEQ ID NO: 67695 - protein, 20 aa, Artificial sequence
  Protein classification predicting sequence
RGADERCVSFGVNMGDYHLN

SEQ ID NO: 67696 - protein, 17 aa, Artificial sequence
  Protein classification predicting sequence
GLPRASSLKALTTFTGL

SEQ ID NO: 67697 - protein, 26 aa, Artificial sequence
  Protein classification predicting sequence
VQPGDMVLLSPACASLDQFKNFEQRG

SEQ ID NO: 67698 - protein, 22 aa, Artificial sequence
  Protein classification predicting sequence
AADLIVASPGIALAHPSLSAAA

SEQ ID NO: 67699 - protein, 59 aa, Artificial sequence
  Protein classification predicting sequence
EIVGDIELFCREAQAPIVAITGSNGKSTVTTLVGEMAKAAGVNVGVGGNIGLPALMLLD

SEQ ID NO: 67700 - protein, 24 aa, Artificial sequence
  Protein classification predicting sequence
LNVTEDHMDRYPFGLQQYRAAKLR

SEQ ID NO: 67701 - protein, 7 aa, Artificial sequence
  Protein classification predicting sequence
EDHMDRY

SEQ ID NO: 67702 - protein, 10 aa, Artificial sequence
  Protein classification predicting sequence
TNVGATVAAL

SEQ ID NO: 67703 - protein, 7 aa, Artificial sequence
  Protein classification predicting sequence
FTGLAHR

SEQ ID NO: 67704 - protein, 7 aa, Artificial sequence
  Protein classification predicting sequence
NFMARGD

SEQ ID NO: 67705 - protein, 16 aa, Artificial sequence
  Protein classification predicting sequence
PIIVKNPGIPYTVSII

SEQ ID NO: 67706 - protein, 40 aa, Artificial sequence
  Protein classification predicting sequence
RGLKILTEVELSYLISEAPIIAVTGTNGKTTVTSLIGDMF

SEQ ID NO: 67707 - protein, 8 aa, Artificial sequence
  Protein classification predicting sequence
TELSSFQL

SEQ ID NO: 67708 - protein, 12 aa, Artificial sequence
  Protein classification predicting sequence
TELSSFQLLGIE

SEQ ID NO: 67709 - protein, 20 aa, Artificial sequence
  Protein classification predicting sequence
YKPHIAIITNIYSAHLDYHE

SEQ ID NO: 67710 - protein, 16 aa, Artificial sequence
  Protein classification predicting sequence
LENYQNAKKQIYKNQT

SEQ ID NO: 67711 - protein, 10 aa, Artificial sequence
  Protein classification predicting sequence
DYLICNYHQR

SEQ ID NO: 67712 - protein, 19 aa, Artificial sequence
  Protein classification predicting sequence
DLVLPGEHNLENILAAVLA

SEQ ID NO: 67713 - protein, 11 aa, Artificial sequence
  Protein classification predicting sequence
KFAKLGNSQGK

SEQ ID NO: 67714 - protein, 7 aa, Artificial sequence
  Protein classification predicting sequence
VEDAVDK

SEQ ID NO: 67715 - protein, 18 aa, Artificial sequence
  Protein classification predicting sequence
EPNDVVLLSPACASWDQY

SEQ ID NO: 67716 - protein, 10 aa, Artificial sequence
  Protein classification predicting sequence
TFEERGEKFI

SEQ ID NO: 67717 - protein, 22 aa, Artificial sequence
  Protein classification predicting sequence
LENKNVLVVGLAKSGYEAAKLL

SEQ ID NO: 67718 - protein, 14 aa, Artificial sequence
  Protein classification predicting sequence
LTGRLSGNIGYVAS

SEQ ID NO: 67719 - protein, 27 aa, Artificial sequence
  Protein classification predicting sequence
GTNRTNKYYNDSKATNTLATQFALNSF

SEQ ID NO: 67720 - protein, 27 aa, Artificial sequence
  Protein classification predicting sequence
QPIIWLCGGLDRGNEFDELIPYMENVR

SEQ ID NO: 67721 - protein, 8 aa, Artificial sequence
  Protein classification predicting sequence
LLEEGIKV

SEQ ID NO: 67722 - protein, 8 aa, Artificial sequence
  Protein classification predicting sequence
GNIGFPAS

SEQ ID NO: 67723 - protein, 30 aa, Artificial sequence
  Protein classification predicting sequence
FRPHIAVITNLMPTHLDYHGSFEDYVAAKW

SEQ ID NO: 67724 - protein, 10 aa, Artificial sequence
  Protein classification predicting sequence
YVAAKWNIQN

SEQ ID NO: 67725 - protein, 9 aa, Artificial sequence
  Protein classification predicting sequence
DFLVLNFNQ

SEQ ID NO: 67726 - protein, 8 aa, Artificial sequence
  Protein classification predicting sequence
LAKTTKAT

SEQ ID NO: 67727 - protein, 6 aa, Artificial sequence
  Protein classification predicting sequence
FYNDSK

SEQ ID NO: 67728 - protein, 12 aa, Artificial sequence
  Protein classification predicting sequence
LLSPANASWDMY

SEQ ID NO: 67729 - protein, 23 aa, Artificial sequence
  Protein classification predicting sequence
LLSPANASWDMYKNFEVRGDEFI

SEQ ID NO: 67730 - protein, 9 aa, Artificial sequence
  Protein classification predicting sequence
ALAAAALAR

SEQ ID NO: 67731 - protein, 26 aa, Artificial sequence
  Protein classification predicting sequence
SEAPIIGITGSNGKTTTTTMIADVLN

SEQ ID NO: 67732 - protein, 10 aa, Artificial sequence
  Protein classification predicting sequence
AVITNLMPTH

SEQ ID NO: 67733 - protein, 7 aa, Artificial sequence
  Protein classification predicting sequence
DYHGSFE

SEQ ID NO: 67734 - protein, 7 aa, Artificial sequence
  Protein classification predicting sequence
GVPGSHN

SEQ ID NO: 67735 - protein, 12 aa, Artificial sequence
  Protein classification predicting sequence
ENALATIAVAKL

SEQ ID NO: 67736 - protein, 9 aa, Artificial sequence
  Protein classification predicting sequence
FGGVKHRLQ

SEQ ID NO: 67737 - protein, 12 aa, Artificial sequence
  Protein classification predicting sequence
GGLDRGNEFDEL

SEQ ID NO: 67738 - protein, 8 aa, Artificial sequence
  Protein classification predicting sequence
MIILGESA

SEQ ID NO: 67739 - protein, 11 aa, Artificial sequence
  Protein classification predicting sequence
AGGLDRGNEFD

SEQ ID NO: 67740 - protein, 11 aa, Artificial sequence
  Protein classification predicting sequence
AQSLLEEGIKV

SEQ ID NO: 67741 - protein, 8 aa, Artificial sequence
  Protein classification predicting sequence
GGHPLELL

SEQ ID NO: 67742 - protein, 16 aa, Artificial sequence
  Protein classification predicting sequence
KNPGIPYNNPMIEKAL

SEQ ID NO: 67743 - protein, 6 aa, Artificial sequence
  Protein classification predicting sequence
DYHGSF

SEQ ID NO: 67744 - protein, 8 aa, Artificial sequence
  Protein classification predicting sequence
ELLDENFE

SEQ ID NO: 67745 - protein, 9 aa, Artificial sequence
  Protein classification predicting sequence
LNFNQDLAK

SEQ ID NO: 67746 - protein, 5 aa, Artificial sequence
  Protein classification predicting sequence
FYNDS

SEQ ID NO: 67747 - protein, 6 aa, Artificial sequence
  Protein classification predicting sequence
QLCCFG

SEQ ID NO: 67748 - protein, 6 aa, Artificial sequence
  Protein classification predicting sequence
DQFKNF

SEQ ID NO: 67749 - protein, 7 aa, Artificial sequence
  Protein classification predicting sequence
VGDIELF

SEQ ID NO: 67750 - protein, 12 aa, Artificial sequence
  Protein classification predicting sequence
GLTHRCQVVADN

SEQ ID NO: 67751 - protein, 12 aa, Artificial sequence
  Protein classification predicting sequence
AITGSNGKSTVT

SEQ ID NO: 67752 - protein, 6 aa, Artificial sequence
  Protein classification predicting sequence
TGLSCV

SEQ ID NO: 67753 - protein, 12 aa, Artificial sequence
  Protein classification predicting sequence
GGNLGTPALDLL

SEQ ID NO: 67754 - protein, 10 aa, Artificial sequence
  Protein classification predicting sequence
GDIVLLSPAC

SEQ ID NO: 67755 - protein, 6 aa, Artificial sequence
  Protein classification predicting sequence
ERGEKF

SEQ ID NO: 67756 - protein, 8 aa, Artificial sequence
  Protein classification predicting sequence
GKSTTTAL

SEQ ID NO: 67757 - protein, 7 aa, Artificial sequence
  Protein classification predicting sequence
LLNAADP

SEQ ID NO: 67758 - protein, 6 aa, Artificial sequence
  Protein classification predicting sequence
HLDWHG

SEQ ID NO: 67759 - protein, 12 aa, Artificial sequence
  Protein classification predicting sequence
ARGVTPRVMDTR

SEQ ID NO: 67760 - protein, 8 aa, Artificial sequence
  Protein classification predicting sequence
AGVEIIGD

SEQ ID NO: 67761 - protein, 15 aa, Artificial sequence
  Protein classification predicting sequence
AKVCVVNADDALTMP

SEQ ID NO: 67762 - protein, 12 aa, Artificial sequence
  Protein classification predicting sequence
PRASSLKALTTF

SEQ ID NO: 67763 - protein, 19 aa, Artificial sequence
  Protein classification predicting sequence
VDGTLHLLLGGDGKSADFS

SEQ ID NO: 67764 - protein, 7 aa, Artificial sequence
  Protein classification predicting sequence
YENAKVC

SEQ ID NO: 67765 - protein, 15 aa, Artificial sequence
  Protein classification predicting sequence
VNADDALTMPVRGAD

SEQ ID NO: 67766 - protein, 8 aa, Artificial sequence
  Protein classification predicting sequence
VLGLARSG

SEQ ID NO: 67767 - protein, 7 aa, Artificial sequence
  Protein classification predicting sequence
PACASFD

SEQ ID NO: 67768 - protein, 6 aa, Artificial sequence
  Protein classification predicting sequence
AGKGHE

SEQ ID NO: 67769 - protein, 8 aa, Artificial sequence
  Protein classification predicting sequence
NLSQDHLD

SEQ ID NO: 67770 - protein, 6 aa, Artificial sequence
  Protein classification predicting sequence
AKSLLF

SEQ ID NO: 67771 - protein, 6 aa, Artificial sequence
  Protein classification predicting sequence
TSDNPR

SEQ ID NO: 67772 - protein, 9 aa, Artificial sequence
  Protein classification predicting sequence
DYAHTPDAL

SEQ ID NO: 67773 - protein, 9 aa, Artificial sequence
  Protein classification predicting sequence
VFGCGGDRD

SEQ ID NO: 67774 - protein, 14 aa, Artificial sequence
  Protein classification predicting sequence
VFGCGGDRDKGKRP

SEQ ID NO: 67775 - protein, 8 aa, Artificial sequence
  Protein classification predicting sequence
NLTQDHLD

SEQ ID NO: 67776 - protein, 8 aa, Artificial sequence
  Protein classification predicting sequence
HSDMEDYF

SEQ ID NO: 67777 - protein, 7 aa, Artificial sequence
  Protein classification predicting sequence
GVPGRME

SEQ ID NO: 67778 - protein, 9 aa, Artificial sequence
  Protein classification predicting sequence
AGKGHEDYQ

SEQ ID NO: 67779 - protein, 7 aa, Artificial sequence
  Protein classification predicting sequence
QDHLDYH

SEQ ID NO: 67780 - protein, 7 aa, Artificial sequence
  Protein classification predicting sequence
GYTVDSH

SEQ ID NO: 67781 - protein, 6 aa, Artificial sequence
  Protein classification predicting sequence
VLNNDD

SEQ ID NO: 67782 - protein, 7 aa, Artificial sequence
  Protein classification predicting sequence
ETKNTTP

SEQ ID NO: 67783 - protein, 6 aa, Artificial sequence
  Protein classification predicting sequence
TTPESL

SEQ ID NO: 67784 - protein, 6 aa, Artificial sequence
  Protein classification predicting sequence
DHLDYH

SEQ ID NO: 67785 - protein, 7 aa, Artificial sequence
  Protein classification predicting sequence
VYNVLAA

SEQ ID NO: 67786 - protein, 8 aa, Artificial sequence
  Protein classification predicting sequence
MEVSSHAL

SEQ ID NO: 67787 - protein, 11 aa, Artificial sequence
  Protein classification predicting sequence
HAKSLLFSQLG

SEQ ID NO: 67788 - protein, 10 aa, Artificial sequence
  Protein classification predicting sequence
VIVDYAHTPD

SEQ ID NO: 67789 - protein, 8 aa, Artificial sequence
  Protein classification predicting sequence
GCGGDRDK

SEQ ID NO: 67790 - protein, 7 aa, Artificial sequence
  Protein classification predicting sequence
RDKGKRP

SEQ ID NO: 67791 - protein, 9 aa, Artificial sequence
  Protein classification predicting sequence
RVYGLTFDV

SEQ ID NO: 67792 - protein, 8 aa, Artificial sequence
  Protein classification predicting sequence
FDVAIFSN

SEQ ID NO: 67793 - protein, 6 aa, Artificial sequence
  Protein classification predicting sequence
LPFSDH

SEQ ID NO: 67794 - protein, 7 aa, Artificial sequence
  Protein classification predicting sequence
VDYAHKP

SEQ ID NO: 67795 - protein, 7 aa, Artificial sequence
  Protein classification predicting sequence
VAGKGHE

SEQ ID NO: 67796 - protein, 8 aa, Artificial sequence
  Protein classification predicting sequence
FGCGGERD

SEQ ID NO: 67797 - protein, 10 aa, Artificial sequence
  Protein classification predicting sequence
FTNLTQDHLD

SEQ ID NO: 67798 - protein, 12 aa, Artificial sequence
  Protein classification predicting sequence
TGTNGKTTVSHL

SEQ ID NO: 67799 - protein, 8 aa, Artificial sequence
  Protein classification predicting sequence
YQIFKHQT

SEQ ID NO: 67800 - protein, 7 aa, Artificial sequence
  Protein classification predicting sequence
DRAEAIR

SEQ ID NO: 67801 - protein, 8 aa, Artificial sequence
  Protein classification predicting sequence
RDHLDYHG

SEQ ID NO: 67802 - protein, 13 aa, Artificial sequence
  Protein classification predicting sequence
DYAHTPDALEKAL

SEQ ID NO: 67803 - protein, 46 aa, Artificial sequence
  Protein classification predicting sequence
HHCGQAIINADDEVGRRWLAKLPDAVAVSMEDHINPNCHGRWLKAT

SEQ ID NO: 67804 - protein, 23 aa, Artificial sequence
  Protein classification predicting sequence
VNYHDSGATIRFSSSWGDGEIES

SEQ ID NO: 67805 - protein, 13 aa, Artificial sequence
  Protein classification predicting sequence
FTGTKGKTTAAYF

SEQ ID NO: 67806 - protein, 10 aa, Artificial sequence
  Protein classification predicting sequence
TLDGKTFFKS

SEQ ID NO: 67807 - protein, 8 aa, Artificial sequence
  Protein classification predicting sequence
TTPESLDL

SEQ ID NO: 67808 - protein, 6 aa, Artificial sequence
  Protein classification predicting sequence
MTLDSR

SEQ ID NO: 67809 - protein, 9 aa, Artificial sequence
  Protein classification predicting sequence
KALQAARLH

SEQ ID NO: 67810 - protein, 6 aa, Artificial sequence
  Protein classification predicting sequence
DHLDFH

SEQ ID NO: 67811 - protein, 6 aa, Artificial sequence
  Protein classification predicting sequence
LSYDSR

SEQ ID NO: 67812 - protein, 6 aa, Artificial sequence
  Protein classification predicting sequence
FNQENA

SEQ ID NO: 67813 - protein, 6 aa, Artificial sequence
  Protein classification predicting sequence
VPGRME

SEQ ID NO: 67814 - protein, 8 aa, Artificial sequence
  Protein classification predicting sequence
GNKGESRR

SEQ ID NO: 67815 - protein, 9 aa, Artificial sequence
  Protein classification predicting sequence
DAVIIAGKG

SEQ ID NO: 67816 - protein, 6 aa, Artificial sequence
  Protein classification predicting sequence
GHEDYQ

SEQ ID NO: 67817 - protein, 11 aa, Artificial sequence
  Protein classification predicting sequence
DVVLVAGKGHE

SEQ ID NO: 67818 - protein, 9 aa, Artificial sequence
  Protein classification predicting sequence
GEIASRLAD

SEQ ID NO: 67819 - protein, 7 aa, Artificial sequence
  Protein classification predicting sequence
YIPQAIA

SEQ ID NO: 67820 - protein, 7 aa, Artificial sequence
  Protein classification predicting sequence
EVSSHGL

SEQ ID NO: 67821 - protein, 10 aa, Artificial sequence
  Protein classification predicting sequence
VDYAHTPDAL

SEQ ID NO: 67822 - protein, 14 aa, Artificial sequence
  Protein classification predicting sequence
VDYAHTPDALEKAL

SEQ ID NO: 67823 - protein, 10 aa, Artificial sequence
  Protein classification predicting sequence
CVFGCGGDRD

SEQ ID NO: 67824 - protein, 7 aa, Artificial sequence
  Protein classification predicting sequence
VTDDNPR

SEQ ID NO: 67825 - protein, 9 aa, Artificial sequence
  Protein classification predicting sequence
LREMTLDSR

SEQ ID NO: 67826 - protein, 12 aa, Artificial sequence
  Protein classification predicting sequence
YIPQAIAQGVAA

SEQ ID NO: 67827 - protein, 14 aa, Artificial sequence
  Protein classification predicting sequence
VFTNLSRDHLDYHG

SEQ ID NO: 67828 - protein, 26 aa, Artificial sequence
  Protein classification predicting sequence
VFTNLSRDHLDYHGDMEHYEAAKWLL

SEQ ID NO: 67829 - protein, 7 aa, Artificial sequence
  Protein classification predicting sequence
RLDYSDR

SEQ ID NO: 67830 - protein, 6 aa, Artificial sequence
  Protein classification predicting sequence
RYIPQA

SEQ ID NO: 67831 - protein, 10 aa, Artificial sequence
  Protein classification predicting sequence
AGKGHEDYQI

SEQ ID NO: 67832 - protein, 9 aa, Artificial sequence
  Protein classification predicting sequence
AVAMEVSSH

SEQ ID NO: 67833 - protein, 13 aa, Artificial sequence
  Protein classification predicting sequence
VVVDYAHTPDALE

SEQ ID NO: 67834 - protein, 6 aa, Artificial sequence
  Protein classification predicting sequence
GKRPQM

SEQ ID NO: 67835 - protein, 16 aa, Artificial sequence
  Protein classification predicting sequence
MEASSHGLDQRRLDGV

SEQ ID NO: 67836 - protein, 7 aa, Artificial sequence
  Protein classification predicting sequence
GDLFVAV

SEQ ID NO: 67837 - protein, 23 aa, Artificial sequence
  Protein classification predicting sequence
EGVTHAAMEASSHGLDQRRLDGV

SEQ ID NO: 67838 - protein, 6 aa, Artificial sequence
  Protein classification predicting sequence
TDDNPR

SEQ ID NO: 67839 - protein, 16 aa, Artificial sequence
  Protein classification predicting sequence
VTGTNGKSSVVSYIAQ

SEQ ID NO: 67840 - protein, 7 aa, Artificial sequence
  Protein classification predicting sequence
DYLSFRK

SEQ ID NO: 67841 - protein, 26 aa, Artificial sequence
  Protein classification predicting sequence
FTSFSQDHLDYHHTKENYLLAKLKLF

SEQ ID NO: 67842 - protein, 21 aa, Artificial sequence
  Protein classification predicting sequence
GIAILNSDIEEIEFVKDYLHN

SEQ ID NO: 67843 - protein, 13 aa, Artificial sequence
  Protein classification predicting sequence
IIGSFQASNLLIA

SEQ ID NO: 67844 - protein, 17 aa, Artificial sequence
  Protein classification predicting sequence
EAIKYGINNLKQDDILL

SEQ ID NO: 67845 - protein, 12 aa, Artificial sequence
  Protein classification predicting sequence
DGEIREMHGVPV

SEQ ID NO: 67846 - protein, 9 aa, Artificial sequence
  Protein classification predicting sequence
AMEVSSHGL

SEQ ID NO: 67847 - protein, 10 aa, Artificial sequence
  Protein classification predicting sequence
RDHLDYHGDM

SEQ ID NO: 67848 - protein, 12 aa, Artificial sequence
  Protein classification predicting sequence
NADDEVGRRWLA

SEQ ID NO: 67849 - protein, 10 aa, Artificial sequence
  Protein classification predicting sequence
LPDAVAVSME

SEQ ID NO: 67850 - protein, 13 aa, Artificial sequence
  Protein classification predicting sequence
HINPNCHGRWLKA

SEQ ID NO: 67851 - protein, 8 aa, Artificial sequence
  Protein classification predicting sequence
VVTDDNPR

SEQ ID NO: 67852 - protein, 21 aa, Artificial sequence
  Protein classification predicting sequence
YLSQLNERLSALAGRFYHEPS

SEQ ID NO: 67853 - protein, 24 aa, Artificial sequence
  Protein classification predicting sequence
LMGAFNVSNLLLALATLLALGYPL

SEQ ID NO: 67854 - protein, 27 aa, Artificial sequence
  Protein classification predicting sequence
VVTDDNPRTEEPRAIINDILAGMLDAG

SEQ ID NO: 67855 - protein, 20 aa, Artificial sequence
  Protein classification predicting sequence
LWCVFGCGGDRDKGKRPLMG

SEQ ID NO: 67856 - protein, 9 aa, Artificial sequence
  Protein classification predicting sequence
AGKGHETYQ

SEQ ID NO: 67857 - protein, 22 aa, Artificial sequence
  Protein classification predicting sequence
ANVTQVVVPDTLRVASILAHTL

SEQ ID NO: 67858 - protein, 20 aa, Artificial sequence
  Protein classification predicting sequence
NIQESLQGVSFDFVTPFGTY

SEQ ID NO: 67859 - protein, 10 aa, Artificial sequence
  Protein classification predicting sequence
DDITTDSRTA

SEQ ID NO: 67860 - protein, 15 aa, Artificial sequence
  Protein classification predicting sequence
NVTQVVVPDTLRVAS

SEQ ID NO: 67861 - protein, 18 aa, Artificial sequence
  Protein classification predicting sequence
GVTGTNGKTSIATMIHLI

SEQ ID NO: 67862 - protein, 12 aa, Artificial sequence
  Protein classification predicting sequence
KNSAYLGTNGFQ

SEQ ID NO: 67863 - protein, 15 aa, Artificial sequence
  Protein classification predicting sequence
NETKTKGANTTPETV

SEQ ID NO: 67864 - protein, 11 aa, Artificial sequence
  Protein classification predicting sequence
LTKKIKEAVDA

SEQ ID NO: 67865 - protein, 9 aa, Artificial sequence
  Protein classification predicting sequence
EAQFMAKNI

SEQ ID NO: 67866 - protein, 18 aa, Artificial sequence
  Protein classification predicting sequence
FNISNIMAAMIAVWSKGT

SEQ ID NO: 67867 - protein, 12 aa, Artificial sequence
  Protein classification predicting sequence
NYIEFDDRAEGI

SEQ ID NO: 67868 - protein, 11 aa, Artificial sequence
  Protein classification predicting sequence
KVPHRDDLIGL

SEQ ID NO: 67869 - protein, 6 aa, Artificial sequence
  Protein classification predicting sequence
KFGGGP

SEQ ID NO: 67870 - protein, 58 aa, Artificial sequence
  Protein classification predicting sequence
LGRLRGVEFDVAIFSNLTQDHLDFHGTMEAYGHAKSLLFSQLGEDLSKEKYVVLNNDD

SEQ ID NO: 67871 - protein, 98 aa, Artificial sequence
  Protein classification predicting sequence
LEPVEGRLEVLDPSLPIDLIIDYAHTADGMNKLIDAVQPFVKQKLIFLVGMAGERDLTKTPEMGRVACRADYVIFTPDNPANDDPKMLTAELAKGATH

SEQ ID NO: 67872 - protein, 28 aa, Artificial sequence
  Protein classification predicting sequence
HAIDIAEPGDTVVLASKGREPYQIMPGH

SEQ ID NO: 67873 - protein, 6 aa, Artificial sequence
  Protein classification predicting sequence
DHNFRE

SEQ ID NO: 67874 - protein, 9 aa, Artificial sequence
  Protein classification predicting sequence
DIKKAMSLI

SEQ ID NO: 67875 - protein, 32 aa, Artificial sequence
  Protein classification predicting sequence
RVYGLTFDVGVFLNISPDHIGPIEHPTFEDYF

SEQ ID NO: 67876 - protein, 10 aa, Artificial sequence
  Protein classification predicting sequence
AAGLACLRLG

SEQ ID NO: 67877 - protein, 8 aa, Artificial sequence
  Protein classification predicting sequence
LGAPGNKG

SEQ ID NO: 67878 - protein, 7 aa, Artificial sequence
  Protein classification predicting sequence
GCGGDRD

SEQ ID NO: 67879 - protein, 9 aa, Artificial sequence
  Protein classification predicting sequence
LAGHYDIQL

SEQ ID NO: 67880 - protein, 25 aa, Artificial sequence
  Protein classification predicting sequence
AKVFVDYAHNGDSLEKLLSVVEEHQ

SEQ ID NO: 67881 - protein, 18 aa, Artificial sequence
  Protein classification predicting sequence
LILGAPGNKGESRRADFG

SEQ ID NO: 67882 - protein, 9 aa, Artificial sequence
  Protein classification predicting sequence
STMNTTLDG

SEQ ID NO: 67883 - protein, 23 aa, Artificial sequence
  Protein classification predicting sequence
FYGNPQEKLKLLAFTGTKGKTTA

SEQ ID NO: 67884 - protein, 15 aa, Artificial sequence
  Protein classification predicting sequence
RVYGLTFDVGVFLNI

SEQ ID NO: 67885 - protein, 10 aa, Artificial sequence
  Protein classification predicting sequence
PDHIGPIEHP

SEQ ID NO: 67886 - protein, 18 aa, Artificial sequence
  Protein classification predicting sequence
FEDYFYHKRLLMENSRAV

SEQ ID NO: 67887 - protein, 10 aa, Artificial sequence
  Protein classification predicting sequence
VVVDYAHTPD

SEQ ID NO: 67888 - protein, 8 aa, Artificial sequence
  Protein classification predicting sequence
VDYAHTPD

SEQ ID NO: 67889 - protein, 10 aa, Artificial sequence
  Protein classification predicting sequence
NLTQDHLDFH

SEQ ID NO: 67890 - protein, 14 aa, Artificial sequence
  Protein classification predicting sequence
NLTQDHLDFHGTME

SEQ ID NO: 67891 - protein, 6 aa, Artificial sequence
  Protein classification predicting sequence
KRPLMG

SEQ ID NO: 67892 - protein, 7 aa, Artificial sequence
  Protein classification predicting sequence
GVPVIYL

SEQ ID NO: 67893 - protein, 9 aa, Artificial sequence
  Protein classification predicting sequence
VAYAESGIT

SEQ ID NO: 67894 - protein, 11 aa, Artificial sequence
  Protein classification predicting sequence
LHAPLIGEFNA

SEQ ID NO: 67895 - protein, 6 aa, Artificial sequence
  Protein classification predicting sequence
ALRVHC

SEQ ID NO: 67896 - protein, 20 aa, Artificial sequence
  Protein classification predicting sequence
LIGVTGTNGKTTITQLIAQW

SEQ ID NO: 67897 - protein, 13 aa, Artificial sequence
  Protein classification predicting sequence
KAAVMGTTGNGFL

SEQ ID NO: 67898 - protein, 10 aa, Artificial sequence
  Protein classification predicting sequence
PVLGRMELFQ

SEQ ID NO: 67899 - protein, 6 aa, Artificial sequence
  Protein classification predicting sequence
DNPRSE

SEQ ID NO: 67900 - protein, 14 aa, Artificial sequence
  Protein classification predicting sequence
AAAGDLFVAVVGHQ

SEQ ID NO: 67901 - protein, 17 aa, Artificial sequence
  Protein classification predicting sequence
DGRRYIPQAIAQGVAAI

SEQ ID NO: 67902 - protein, 22 aa, Artificial sequence
  Protein classification predicting sequence
APGKPTVVVDYAHTPDALEKAL

SEQ ID NO: 67903 - protein, 6 aa, Artificial sequence
  Protein classification predicting sequence
AARLHC

SEQ ID NO: 67904 - protein, 7 aa, Artificial sequence
  Protein classification predicting sequence
GRAEAVT

SEQ ID NO: 67905 - protein, 8 aa, Artificial sequence
  Protein classification predicting sequence
YNANPDSM

SEQ ID NO: 67906 - protein, 10 aa, Artificial sequence
  Protein classification predicting sequence
TGFFTKFGDG

SEQ ID NO: 67907 - protein, 7 aa, Artificial sequence
  Protein classification predicting sequence
DDYLEGK

SEQ ID NO: 67908 - protein, 10 aa, Artificial sequence
  Protein classification predicting sequence
SGGQDSTLAG

SEQ ID NO: 67909 - protein, 7 aa, Artificial sequence
  Protein classification predicting sequence
QDAIAFI

SEQ ID NO: 67910 - protein, 7 aa, Artificial sequence
  Protein classification predicting sequence
KARERMK

SEQ ID NO: 67911 - protein, 8 aa, Artificial sequence
  Protein classification predicting sequence
LPDEEALG

SEQ ID NO: 67912 - protein, 7 aa, Artificial sequence
  Protein classification predicting sequence
FIAVRLP

SEQ ID NO: 67913 - protein, 8 aa, Artificial sequence
  Protein classification predicting sequence
IDDYLEGK

SEQ ID NO: 67914 - protein, 6 aa, Artificial sequence
  Protein classification predicting sequence
DCQDAI

SEQ ID NO: 67915 - protein, 12 aa, Artificial sequence
  Protein classification predicting sequence
GNEKARERMKVQ

SEQ ID NO: 67916 - protein, 12 aa, Artificial sequence
  Protein classification predicting sequence
HAAENITGFFTK

SEQ ID NO: 67917 - protein, 14 aa, Artificial sequence
  Protein classification predicting sequence
GISGGQDSTLTGKL

SEQ ID NO: 67918 - protein, 7 aa, Artificial sequence
  Protein classification predicting sequence
PTADLED

SEQ ID NO: 67919 - protein, 7 aa, Artificial sequence
  Protein classification predicting sequence
QADEDDA

SEQ ID NO: 67920 - protein, 6 aa, Artificial sequence
  Protein classification predicting sequence
QYAIAG

SEQ ID NO: 67921 - protein, 7 aa, Artificial sequence
  Protein classification predicting sequence
GTDHAAE

SEQ ID NO: 67922 - protein, 6 aa, Artificial sequence
  Protein classification predicting sequence
ALGVTY

SEQ ID NO: 67923 - protein, 6 aa, Artificial sequence
  Protein classification predicting sequence
GNIKAR

SEQ ID NO: 67924 - protein, 12 aa, Artificial sequence
  Protein classification predicting sequence
AVRLPYGVQADE

SEQ ID NO: 67925 - protein, 9 aa, Artificial sequence
  Protein classification predicting sequence
DEVALGVTY

SEQ ID NO: 67926 - protein, 6 aa, Artificial sequence
  Protein classification predicting sequence
IKPAVD

SEQ ID NO: 67927 - protein, 15 aa, Artificial sequence
  Protein classification predicting sequence
PLFRLNKRQGKALLK

SEQ ID NO: 67928 - protein, 7 aa, Artificial sequence
  Protein classification predicting sequence
GTSNKSE

SEQ ID NO: 67929 - protein, 10 aa, Artificial sequence
  Protein classification predicting sequence
VLGISGGQDS

SEQ ID NO: 67930 - protein, 22 aa, Artificial sequence
  Protein classification predicting sequence
GTDHAAENITGFFTKFGDGGAD

SEQ ID NO: 67931 - protein, 10 aa, Artificial sequence
  Protein classification predicting sequence
YEKVPTADLE

SEQ ID NO: 67932 - protein, 8 aa, Artificial sequence
  Protein classification predicting sequence
KVPTADLE

SEQ ID NO: 67933 - protein, 8 aa, Artificial sequence
  Protein classification predicting sequence
AQLALSFI

SEQ ID NO: 67934 - protein, 10 aa, Artificial sequence
  Protein classification predicting sequence
VPASMFDDWW

SEQ ID NO: 67935 - protein, 7 aa, Artificial sequence
  Protein classification predicting sequence
GTDHSAE

SEQ ID NO: 67936 - protein, 6 aa, Artificial sequence
  Protein classification predicting sequence
FTKFGD

SEQ ID NO: 67937 - protein, 6 aa, Artificial sequence
  Protein classification predicting sequence
LPYGVQ

SEQ ID NO: 67938 - protein, 8 aa, Artificial sequence
  Protein classification predicting sequence
AGVEISDF

SEQ ID NO: 67939 - protein, 14 aa, Artificial sequence
  Protein classification predicting sequence
GNEKARERMKAQYS

SEQ ID NO: 67940 - protein, 6 aa, Artificial sequence
  Protein classification predicting sequence
TGFYTK

SEQ ID NO: 67941 - protein, 7 aa, Artificial sequence
  Protein classification predicting sequence
FGLNKRQ

SEQ ID NO: 67942 - protein, 6 aa, Artificial sequence
  Protein classification predicting sequence
TKYGDG

SEQ ID NO: 67943 - protein, 6 aa, Artificial sequence
  Protein classification predicting sequence
RMVAQY

SEQ ID NO: 67944 - protein, 12 aa, Artificial sequence
  Protein classification predicting sequence
EEEIRRSVDFLK

SEQ ID NO: 67945 - protein, 30 aa, Artificial sequence
  Protein classification predicting sequence
GVVVGTDHAAEAITGFFTKYGDGGTDINPL

SEQ ID NO: 67946 - protein, 8 aa, Artificial sequence
  Protein classification predicting sequence
RLNKRQGK

SEQ ID NO: 67947 - protein, 16 aa, Artificial sequence
  Protein classification predicting sequence
ALGVTYDNIDDYLEGK

SEQ ID NO: 67948 - protein, 8 aa, Artificial sequence
  Protein classification predicting sequence
LVLGISGG

SEQ ID NO: 67949 - protein, 6 aa, Artificial sequence
  Protein classification predicting sequence
RMIAQY

SEQ ID NO: 67950 - protein, 6 aa, Artificial sequence
  Protein classification predicting sequence
AYLGAP

SEQ ID NO: 67951 - protein, 13 aa, Artificial sequence
  Protein classification predicting sequence
LTYEQIDDFLEGK

SEQ ID NO: 67952 - protein, 6 aa, Artificial sequence
  Protein classification predicting sequence
LNKRQG

SEQ ID NO: 67953 - protein, 60 aa, Artificial sequence
  Protein classification predicting sequence
YVQSHSFIKSLVLGISGGQDSTLVGKLVQMSVNELREEGIDCTFIAVKLPYGVQKDADEV

SEQ ID NO: 67954 - protein, 18 aa, Artificial sequence
  Protein classification predicting sequence
VLGISGGQDSTLTGKLAQ

SEQ ID NO: 67955 - protein, 11 aa, Artificial sequence
  Protein classification predicting sequence
FIAVKLPYGVQ

SEQ ID NO: 67956 - protein, 15 aa, Artificial sequence
  Protein classification predicting sequence
TVNIKPAVDQSVQSL

SEQ ID NO: 67957 - protein, 10 aa, Artificial sequence
  Protein classification predicting sequence
QLLAYLGAPK

SEQ ID NO: 67958 - protein, 15 aa, Artificial sequence
  Protein classification predicting sequence
PTADLEDDKPQLPDE

SEQ ID NO: 67959 - protein, 13 aa, Artificial sequence
  Protein classification predicting sequence
RNAHKRELAYTRY

SEQ ID NO: 67960 - protein, 24 aa, Artificial sequence
  Protein classification predicting sequence
LTDFQKGNEKARERMKVQFSIASN

SEQ ID NO: 67961 - protein, 34 aa, Artificial sequence
  Protein classification predicting sequence
GTDHSAENITGFYTKYGDGAADIAPIFGLNKRQG

SEQ ID NO: 67962 - protein, 22 aa, Artificial sequence
  Protein classification predicting sequence
KHSFLKTYVLGISGGQDSTLAG

SEQ ID NO: 67963 - protein, 14 aa, Artificial sequence
  Protein classification predicting sequence
VLGISGGQDSTLAG

SEQ ID NO: 67964 - protein, 8 aa, Artificial sequence
  Protein classification predicting sequence
EIERRVAF

SEQ ID NO: 67965 - protein, 8 aa, Artificial sequence
  Protein classification predicting sequence
PLTGLTKR

SEQ ID NO: 67966 - protein, 7 aa, Artificial sequence
  Protein classification predicting sequence
KADEDAL

SEQ ID NO: 67967 - protein, 7 aa, Artificial sequence
  Protein classification predicting sequence
NIKPAVD

SEQ ID NO: 67968 - protein, 9 aa, Artificial sequence
  Protein classification predicting sequence
VAALAEAGV

SEQ ID NO: 67969 - protein, 6 aa, Artificial sequence
  Protein classification predicting sequence
KTEHKR

SEQ ID NO: 67970 - protein, 13 aa, Artificial sequence
  Protein classification predicting sequence
ALYEKIPTADLEE

SEQ ID NO: 67971 - protein, 14 aa, Artificial sequence
  Protein classification predicting sequence
WWHKGQHKRHLPIT

SEQ ID NO: 67972 - protein, 15 aa, Artificial sequence
  Protein classification predicting sequence
GTDHSAENITGFYTK

SEQ ID NO: 67973 - protein, 15 aa, Artificial sequence
  Protein classification predicting sequence
PTADLEELAPQKADE

SEQ ID NO: 67974 - protein, 7 aa, Artificial sequence
  Protein classification predicting sequence
FQGGALG

SEQ ID NO: 67975 - protein, 18 aa, Artificial sequence
  Protein classification predicting sequence
FPGGSITGAPKVRAMEII

SEQ ID NO: 67976 - protein, 12 aa, Artificial sequence
  Protein classification predicting sequence
MEIIDELEPQRR

SEQ ID NO: 67977 - protein, 12 aa, Artificial sequence
  Protein classification predicting sequence
KDRAENLMIVDL

SEQ ID NO: 67978 - protein, 8 aa, Artificial sequence
  Protein classification predicting sequence
RAAFPGGS

SEQ ID NO: 67979 - protein, 8 aa, Artificial sequence
  Protein classification predicting sequence
IGFVPTMG

SEQ ID NO: 67980 - protein, 9 aa, Artificial sequence
  Protein classification predicting sequence
KLFNLVQPD

SEQ ID NO: 67981 - protein, 7 aa, Artificial sequence
  Protein classification predicting sequence
LVALFVR

SEQ ID NO: 67982 - protein, 6 aa, Artificial sequence
  Protein classification predicting sequence
FRGVAT

SEQ ID NO: 67983 - protein, 7 aa, Artificial sequence
  Protein classification predicting sequence
REEDGLA

SEQ ID NO: 67984 - protein, 33 aa, Artificial sequence
  Protein classification predicting sequence
ELRASGKSIGFVPTMGYLHEGHATLLRKAREEN

SEQ ID NO: 67985 - protein, 69 aa, Artificial sequence
  Protein classification predicting sequence
IVVLSVFVNPLQFGPNEDLDRYPRDIDRDENVAKENGVDYLFYPSVEEMYPAEQTTTVEVVKRTDVLCG

SEQ ID NO: 67986 - protein, 20 aa, Artificial sequence
  Protein classification predicting sequence
QRPGHFAGVATVLMKLFNIT

SEQ ID NO: 67987 - protein, 21 aa, Artificial sequence
  Protein classification predicting sequence
PTRAYFGMKDAQQVAVIEGFV

SEQ ID NO: 67988 - protein, 6 aa, Artificial sequence
  Protein classification predicting sequence
GHFDGV

SEQ ID NO: 67989 - protein, 8 aa, Artificial sequence
  Protein classification predicting sequence
FSKARLID

SEQ ID NO: 67990 - protein, 6 aa, Artificial sequence
  Protein classification predicting sequence
SIFVNP

SEQ ID NO: 67991 - protein, 7 aa, Artificial sequence
  Protein classification predicting sequence
PTRAYFG

SEQ ID NO: 67992 - protein, 8 aa, Artificial sequence
  Protein classification predicting sequence
EDFDKYPR

SEQ ID NO: 67993 - protein, 8 aa, Artificial sequence
  Protein classification predicting sequence
FGEKDFQQ

SEQ ID NO: 67994 - protein, 6 aa, Artificial sequence
  Protein classification predicting sequence
VQPDVA

SEQ ID NO: 67995 - protein, 9 aa, Artificial sequence
  Protein classification predicting sequence
DGLAMSSRN

SEQ ID NO: 67996 - protein, 8 aa, Artificial sequence
  Protein classification predicting sequence
KLFNLIQP

SEQ ID NO: 67997 - protein, 8 aa, Artificial sequence
  Protein classification predicting sequence
VPTMGNLH

SEQ ID NO: 67998 - protein, 6 aa, Artificial sequence
  Protein classification predicting sequence
GVCTVV

SEQ ID NO: 67999 - protein, 6 aa, Artificial sequence
  Protein classification predicting sequence
GHFRGV

SEQ ID NO: 68000 - protein, 8 aa, Artificial sequence
  Protein classification predicting sequence
EDFDAYPR

SEQ ID NO: 68001 - protein, 9 aa, Artificial sequence
  Protein classification predicting sequence
DGLALSSRN

SEQ ID NO: 68002 - protein, 6 aa, Artificial sequence
  Protein classification predicting sequence
TMGALH

SEQ ID NO: 68003 - protein, 7 aa, Artificial sequence
  Protein classification predicting sequence
SSRNIYL

SEQ ID NO: 68004 - protein, 10 aa, Artificial sequence
  Protein classification predicting sequence
AFVPTMGNLH

SEQ ID NO: 68005 - protein, 8 aa, Artificial sequence
  Protein classification predicting sequence
VVVSIFVN

SEQ ID NO: 68006 - protein, 19 aa, Artificial sequence
  Protein classification predicting sequence
VVVSIFVNRLQFGQGEDFD

SEQ ID NO: 68007 - protein, 7 aa, Artificial sequence
  Protein classification predicting sequence
QFGPNED

SEQ ID NO: 68008 - protein, 12 aa, Artificial sequence
  Protein classification predicting sequence
REEDGLAKSSRN

SEQ ID NO: 68009 - protein, 9 aa, Artificial sequence
  Protein classification predicting sequence
DGLAKSSRN

SEQ ID NO: 68010 - protein, 8 aa, Artificial sequence
  Protein classification predicting sequence
GLALSSRN

SEQ ID NO: 68011 - protein, 6 aa, Artificial sequence
  Protein classification predicting sequence
LHSGHA

SEQ ID NO: 68012 - protein, 5 aa, Artificial sequence
  Protein classification predicting sequence
HFRGV

SEQ ID NO: 68013 - protein, 19 aa, Artificial sequence
  Protein classification predicting sequence
RYPRTLQEDCEKLNKRKVD

SEQ ID NO: 68014 - protein, 14 aa, Artificial sequence
  Protein classification predicting sequence
YLTAEQRKIAPGLY

SEQ ID NO: 68015 - protein, 7 aa, Artificial sequence
  Protein classification predicting sequence
SKRAVIL

SEQ ID NO: 68016 - protein, 10 aa, Artificial sequence
  Protein classification predicting sequence
ALVPTMGNLH

SEQ ID NO: 68017 - protein, 7 aa, Artificial sequence
  Protein classification predicting sequence
FVNPMQF

SEQ ID NO: 68018 - protein, 14 aa, Artificial sequence
  Protein classification predicting sequence
RYPRTLQEDCEKLN

SEQ ID NO: 68019 - protein, 14 aa, Artificial sequence
  Protein classification predicting sequence
SVFVNPLQFGPNED

SEQ ID NO: 68020 - protein, 12 aa, Artificial sequence
  Protein classification predicting sequence
GVATVLMKLFNI

SEQ ID NO: 68021 - protein, 8 aa, Artificial sequence
  Protein classification predicting sequence
KDAQQVAV

SEQ ID NO: 68022 - protein, 8 aa, Artificial sequence
  Protein classification predicting sequence
VREADGLA

SEQ ID NO: 68023 - protein, 8 aa, Artificial sequence
  Protein classification predicting sequence
YPRDLERD

SEQ ID NO: 68024 - protein, 7 aa, Artificial sequence
  Protein classification predicting sequence
SSRNAYL

SEQ ID NO: 68025 - protein, 8 aa, Artificial sequence
  Protein classification predicting sequence
FVNPTQFG

SEQ ID NO: 68026 - protein, 11 aa, Artificial sequence
  Protein classification predicting sequence
AYFGKKDAQQL

SEQ ID NO: 68027 - protein, 7 aa, Artificial sequence
  Protein classification predicting sequence
SSRNVYL

SEQ ID NO: 68028 - protein, 7 aa, Artificial sequence
  Protein classification predicting sequence
SSRNGYL

SEQ ID NO: 68029 - protein, 8 aa, Artificial sequence
  Protein classification predicting sequence
QFGPNEDF

SEQ ID NO: 68030 - protein, 8 aa, Artificial sequence
  Protein classification predicting sequence
FGKKDYQQ

SEQ ID NO: 68031 - protein, 9 aa, Artificial sequence
  Protein classification predicting sequence
QFGAGEDLD

SEQ ID NO: 68032 - protein, 8 aa, Artificial sequence
  Protein classification predicting sequence
ELEGGPRP

SEQ ID NO: 68033 - protein, 6 aa, Artificial sequence
  Protein classification predicting sequence
TRLLDN

SEQ ID NO: 68034 - protein, 6 aa, Artificial sequence
  Protein classification predicting sequence
LHDGHL

SEQ ID NO: 68035 - protein, 10 aa, Artificial sequence
  Protein classification predicting sequence
KLLQIVRPDR

SEQ ID NO: 68036 - protein, 6 aa, Artificial sequence
  Protein classification predicting sequence
KLFNIV

SEQ ID NO: 68037 - protein, 7 aa, Artificial sequence
  Protein classification predicting sequence
LEGASRP

SEQ ID NO: 68038 - protein, 6 aa, Artificial sequence
  Protein classification predicting sequence
VPTVRE

SEQ ID NO: 68039 - protein, 24 aa, Artificial sequence
  Protein classification predicting sequence
VLEGAKRPGHFDGVVTVVNKLFNI

SEQ ID NO: 68040 - protein, 6 aa, Artificial sequence
  Protein classification predicting sequence
ARLIDN

SEQ ID NO: 68041 - protein, 12 aa, Artificial sequence
  Protein classification predicting sequence
YPRTLQEDCEKL

SEQ ID NO: 68042 - protein, 6 aa, Artificial sequence
  Protein classification predicting sequence
VSKLFN

SEQ ID NO: 68043 - protein, 10 aa, Artificial sequence
  Protein classification predicting sequence
AVILMAAWLG

SEQ ID NO: 68044 - protein, 12 aa, Artificial sequence
  Protein classification predicting sequence
VVVSIFVNPMQF

SEQ ID NO: 68045 - protein, 25 aa, Artificial sequence
  Protein classification predicting sequence
AMDIEIIGVPTVREMDGLAMSSRNG

SEQ ID NO: 68046 - protein, 7 aa, Artificial sequence
  Protein classification predicting sequence
GEPTVRA

SEQ ID NO: 68047 - protein, 16 aa, Artificial sequence
  Protein classification predicting sequence
DLNMPIQIIGEPTVRA

SEQ ID NO: 68048 - protein, 9 aa, Artificial sequence
  Protein classification predicting sequence
FGEKDYQQL

SEQ ID NO: 68049 - protein, 8 aa, Artificial sequence
  Protein classification predicting sequence
PSVEEMYP

SEQ ID NO: 68050 - protein, 6 aa, Artificial sequence
  Protein classification predicting sequence
LHEGHL

SEQ ID NO: 68051 - protein, 6 aa, Artificial sequence
  Protein classification predicting sequence
TRLIDN

SEQ ID NO: 68052 - protein, 7 aa, Artificial sequence
  Protein classification predicting sequence
FVNPTQF

SEQ ID NO: 68053 - protein, 9 aa, Artificial sequence
  Protein classification predicting sequence
VSDMYPRPM

SEQ ID NO: 68054 - protein, 9 aa, Artificial sequence
  Protein classification predicting sequence
FGEKDFQQL

SEQ ID NO: 68055 - protein, 10 aa, Artificial sequence
  Protein classification predicting sequence
VSIFVNPMQF

SEQ ID NO: 68056 - protein, 21 aa, Artificial sequence
  Protein classification predicting sequence
QELNEKGFRADDIQIRDADTL

SEQ ID NO: 68057 - protein, 14 aa, Artificial sequence
  Protein classification predicting sequence
TYVDVPGLSTMLEG

SEQ ID NO: 68058 - protein, 6 aa, Artificial sequence
  Protein classification predicting sequence
SRPGHF

SEQ ID NO: 68059 - protein, 9 aa, Artificial sequence
  Protein classification predicting sequence
SRPGHFRGV

SEQ ID NO: 68060 - protein, 25 aa, Artificial sequence
  Protein classification predicting sequence
QPDIACFGEKDFQQLALIRKMVADM

SEQ ID NO: 68061 - protein, 7 aa, Artificial sequence
  Protein classification predicting sequence
KARLIDN

SEQ ID NO: 68062 - protein, 6 aa, Artificial sequence
  Protein classification predicting sequence
KDYQQL

SEQ ID NO: 68063 - protein, 15 aa, Artificial sequence
  Protein classification predicting sequence
EGKRVALVPTMGNLH

SEQ ID NO: 68064 - protein, 16 aa, Artificial sequence
  Protein classification predicting sequence
GHMKLVDEAKARADVV

SEQ ID NO: 68065 - protein, 7 aa, Artificial sequence
  Protein classification predicting sequence
PTMGALH

SEQ ID NO: 68066 - protein, 12 aa, Artificial sequence
  Protein classification predicting sequence
FVNPLQFGPNED

SEQ ID NO: 68067 - protein, 6 aa, Artificial sequence
  Protein classification predicting sequence
MVKDFN

SEQ ID NO: 68068 - protein, 23 aa, Artificial sequence
  Protein classification predicting sequence
GRIFISLAVKFSKARLIDNIIIG

SEQ ID NO: 68069 - protein, 7 aa, Artificial sequence
  Protein classification predicting sequence
VFHPAVE

SEQ ID NO: 68070 - protein, 7 aa, Artificial sequence
  Protein classification predicting sequence
GIDIVRE

SEQ ID NO: 68071 - protein, 12 aa, Artificial sequence
  Protein classification predicting sequence
ERQEAVHLSKSL

SEQ ID NO: 68072 - protein, 8 aa, Artificial sequence
  Protein classification predicting sequence
FVNPLQFG

SEQ ID NO: 68073 - protein, 7 aa, Artificial sequence
  Protein classification predicting sequence
QQLALIR

SEQ ID NO: 68074 - protein, 11 aa, Artificial sequence
  Protein classification predicting sequence
SVFVNPLQFGP

SEQ ID NO: 68075 - protein, 7 aa, Artificial sequence
  Protein classification predicting sequence
TVVARLF

SEQ ID NO: 68076 - protein, 14 aa, Artificial sequence
  Protein classification predicting sequence
AFVPTMGNLHEGHL

SEQ ID NO: 68077 - protein, 14 aa, Artificial sequence
  Protein classification predicting sequence
VVVSIFVNPMQFDR

SEQ ID NO: 68078 - protein, 10 aa, Artificial sequence
  Protein classification predicting sequence
FGEKDFQQLA

SEQ ID NO: 68079 - protein, 7 aa, Artificial sequence
  Protein classification predicting sequence
QQLAVIR

SEQ ID NO: 68080 - protein, 7 aa, Artificial sequence
  Protein classification predicting sequence
DIEIVGV

SEQ ID NO: 68081 - protein, 12 aa, Artificial sequence
  Protein classification predicting sequence
PDEIFIRDARTL

SEQ ID NO: 68082 - protein, 13 aa, Artificial sequence
  Protein classification predicting sequence
STILEGASRPGHF

SEQ ID NO: 68083 - protein, 10 aa, Artificial sequence
  Protein classification predicting sequence
LEGASRPGHF

SEQ ID NO: 68084 - protein, 8 aa, Artificial sequence
  Protein classification predicting sequence
GASRPGHF

SEQ ID NO: 68085 - protein, 12 aa, Artificial sequence
  Protein classification predicting sequence
ACFGEKDFQQLA

SEQ ID NO: 68086 - protein, 7 aa, Artificial sequence
  Protein classification predicting sequence
GVPTVRE

SEQ ID NO: 68087 - protein, 8 aa, Artificial sequence
  Protein classification predicting sequence
RPGHFRGV

SEQ ID NO: 68088 - protein, 12 aa, Artificial sequence
  Protein classification predicting sequence
RVALVPTMGNLH

SEQ ID NO: 68089 - protein, 34 aa, Artificial sequence
  Protein classification predicting sequence
GHYSLVMLARQYADRVVSSVFVNPTQFGPNEDFA

SEQ ID NO: 68090 - protein, 18 aa, Artificial sequence
  Protein classification predicting sequence
YADRVVSSVFVNPTQFGP

SEQ ID NO: 68091 - protein, 9 aa, Artificial sequence
  Protein classification predicting sequence
FVNPTQFGP

SEQ ID NO: 68092 - protein, 7 aa, Artificial sequence
  Protein classification predicting sequence
TMYPLGT

SEQ ID NO: 68093 - protein, 7 aa, Artificial sequence
  Protein classification predicting sequence
VSDVLEG

SEQ ID NO: 68094 - protein, 13 aa, Artificial sequence
  Protein classification predicting sequence
GVCTVVARLFNQV

SEQ ID NO: 68095 - protein, 6 aa, Artificial sequence
  Protein classification predicting sequence
RLIDNI

SEQ ID NO: 68096 - protein, 10 aa, Artificial sequence
  Protein classification predicting sequence
NDVDALCNLR

SEQ ID NO: 68097 - protein, 16 aa, Artificial sequence
  Protein classification predicting sequence
RECHDPSDRLVPELDT

SEQ ID NO: 68098 - protein, 22 aa, Artificial sequence
  Protein classification predicting sequence
QHKRGKLTARERISLLLDPGSF

SEQ ID NO: 68099 - protein, 35 aa, Artificial sequence
  Protein classification predicting sequence
TVGAPVIGLNDSGGARIQEGVESLAGYADIFLRNV

SEQ ID NO: 68100 - protein, 17 aa, Artificial sequence
  Protein classification predicting sequence
ESDMFVEHRCADFGMAA

SEQ ID NO: 68101 - protein, 13 aa, Artificial sequence
  Protein classification predicting sequence
VFSQDFTVFGGSL

SEQ ID NO: 68102 - protein, 12 aa, Artificial sequence
  Protein classification predicting sequence
NDSGGARIQEGV

SEQ ID NO: 68103 - protein, 24 aa, Artificial sequence
  Protein classification predicting sequence
ASGVIPQISLIMGPCAGGAVYSPA

SEQ ID NO: 68104 - protein, 10 aa, Artificial sequence
  Protein classification predicting sequence
VDVPGFLPGT

SEQ ID NO: 68105 - protein, 15 aa, Artificial sequence
  Protein classification predicting sequence
TVITRKAYGGAYDVM

SEQ ID NO: 68106 - protein, 8 aa, Artificial sequence
  Protein classification predicting sequence
AFAKEKAI

SEQ ID NO: 68107 - protein, 6 aa, Artificial sequence
  Protein classification predicting sequence
VVIGPE

SEQ ID NO: 68108 - protein, 8 aa, Artificial sequence
  Protein classification predicting sequence
NTGGMGAY

SEQ ID NO: 68109 - protein, 7 aa, Artificial sequence
  Protein classification predicting sequence
LYAGLMI

SEQ ID NO: 68110 - protein, 6 aa, Artificial sequence
  Protein classification predicting sequence
GGREHA

SEQ ID NO: 68111 - protein, 6 aa, Artificial sequence
  Protein classification predicting sequence
AWKVAQ

SEQ ID NO: 68112 - protein, 7 aa, Artificial sequence
  Protein classification predicting sequence
GLKIFGP

SEQ ID NO: 68113 - protein, 7 aa, Artificial sequence
  Protein classification predicting sequence
FMKKYGI

SEQ ID NO: 68114 - protein, 8 aa, Artificial sequence
  Protein classification predicting sequence
RVVIEEFL

SEQ ID NO: 68115 - protein, 7 aa, Artificial sequence
  Protein classification predicting sequence
TSQDHKR

SEQ ID NO: 68116 - protein, 5 aa, Artificial sequence
  Protein classification predicting sequence
QDHKR

SEQ ID NO: 68117 - protein, 7 aa, Artificial sequence
  Protein classification predicting sequence
KYNIPTA

SEQ ID NO: 68118 - protein, 7 aa, Artificial sequence
  Protein classification predicting sequence
PTVKGMA

SEQ ID NO: 68119 - protein, 7 aa, Artificial sequence
  Protein classification predicting sequence
VGPEVPL

SEQ ID NO: 68120 - protein, 15 aa, Artificial sequence
  Protein classification predicting sequence
PIVIKADGLAAGKGV

SEQ ID NO: 68121 - protein, 12 aa, Artificial sequence
  Protein classification predicting sequence
DQGPNTGGMGAY

SEQ ID NO: 68122 - protein, 6 aa, Artificial sequence
  Protein classification predicting sequence
LYAGLM

SEQ ID NO: 68123 - protein, 8 aa, Artificial sequence
  Protein classification predicting sequence
GPKVIEFN

SEQ ID NO: 68124 - protein, 7 aa, Artificial sequence
  Protein classification predicting sequence
APGNDGM

SEQ ID NO: 68125 - protein, 17 aa, Artificial sequence
  Protein classification predicting sequence
GAPIVIKADGLAAGKGV

SEQ ID NO: 68126 - protein, 13 aa, Artificial sequence
  Protein classification predicting sequence
GDKGPNTGGMGAY

SEQ ID NO: 68127 - protein, 6 aa, Artificial sequence
  Protein classification predicting sequence
RMESDL

SEQ ID NO: 68128 - protein, 6 aa, Artificial sequence
  Protein classification predicting sequence
ASEGYP

SEQ ID NO: 68129 - protein, 7 aa, Artificial sequence
  Protein classification predicting sequence
VTNGGRV

SEQ ID NO: 68130 - protein, 12 aa, Artificial sequence
  Protein classification predicting sequence
DTGPNTGGMGAY

SEQ ID NO: 68131 - protein, 10 aa, Artificial sequence
  Protein classification predicting sequence
GPNTGGMGAY

SEQ ID NO: 68132 - protein, 6 aa, Artificial sequence
  Protein classification predicting sequence
DIGWRA

SEQ ID NO: 68133 - protein, 8 aa, Artificial sequence
  Protein classification predicting sequence
SKAFTKDF

SEQ ID NO: 68134 - protein, 8 aa, Artificial sequence
  Protein classification predicting sequence
GPNTGGMG

SEQ ID NO: 68135 - protein, 8 aa, Artificial sequence
  Protein classification predicting sequence
NARFGDPE

SEQ ID NO: 68136 - protein, 6 aa, Artificial sequence
  Protein classification predicting sequence
GPEQPL

SEQ ID NO: 68137 - protein, 7 aa, Artificial sequence
  Protein classification predicting sequence
RHGIPTA

SEQ ID NO: 68138 - protein, 6 aa, Artificial sequence
  Protein classification predicting sequence
YTGFLY

SEQ ID NO: 68139 - protein, 6 aa, Artificial sequence
  Protein classification predicting sequence
GDPETQ

SEQ ID NO: 68140 - protein, 7 aa, Artificial sequence
  Protein classification predicting sequence
GYPDAYE

SEQ ID NO: 68141 - protein, 7 aa, Artificial sequence
  Protein classification predicting sequence
AQLEGSK

SEQ ID NO: 68142 - protein, 6 aa, Artificial sequence
  Protein classification predicting sequence
ASKGYP

SEQ ID NO: 68143 - protein, 8 aa, Artificial sequence
  Protein classification predicting sequence
AAQIEGSK

SEQ ID NO: 68144 - protein, 13 aa, Artificial sequence
  Protein classification predicting sequence
LVIGSGAREHALL

SEQ ID NO: 68145 - protein, 8 aa, Artificial sequence
  Protein classification predicting sequence
VSSGGRVL

SEQ ID NO: 68146 - protein, 11 aa, Artificial sequence
  Protein classification predicting sequence
KADGLAAGKGV

SEQ ID NO: 68147 - protein, 9 aa, Artificial sequence
  Protein classification predicting sequence
DGLAAGKGV

SEQ ID NO: 68148 - protein, 18 aa, Artificial sequence
  Protein classification predicting sequence
VHQRTMERIIWPTVKGMA

SEQ ID NO: 68149 - protein, 12 aa, Artificial sequence
  Protein classification predicting sequence
FRAAGLKIFGPT

SEQ ID NO: 68150 - protein, 10 aa, Artificial sequence
  Protein classification predicting sequence
GGREHALAWK

SEQ ID NO: 68151 - protein, 8 aa, Artificial sequence
  Protein classification predicting sequence
AAQLEGSK

SEQ ID NO: 68152 - protein, 18 aa, Artificial sequence
  Protein classification predicting sequence
AAQLEGSKAFTKDFLARH

SEQ ID NO: 68153 - protein, 10 aa, Artificial sequence
  Protein classification predicting sequence
NTGGMGAYSP

SEQ ID NO: 68154 - protein, 7 aa, Artificial sequence
  Protein classification predicting sequence
GMAAEGN

SEQ ID NO: 68155 - protein, 15 aa, Artificial sequence
  Protein classification predicting sequence
EGNVYTGFLYAGLMI

SEQ ID NO: 68156 - protein, 8 aa, Artificial sequence
  Protein classification predicting sequence
SDLVELCL

SEQ ID NO: 68157 - protein, 7 aa, Artificial sequence
  Protein classification predicting sequence
VFVAPGN

SEQ ID NO: 68158 - protein, 11 aa, Artificial sequence
  Protein classification predicting sequence
IEFNARFGDPE

SEQ ID NO: 68159 - protein, 8 aa, Artificial sequence
  Protein classification predicting sequence
EEFLDGEE

SEQ ID NO: 68160 - protein, 6 aa, Artificial sequence
  Protein classification predicting sequence
GSGGRE

SEQ ID NO: 68161 - protein, 7 aa, Artificial sequence
  Protein classification predicting sequence
GGREHAI

SEQ ID NO: 68162 - protein, 15 aa, Artificial sequence
  Protein classification predicting sequence
GLILTADGPKVIEFN

SEQ ID NO: 68163 - protein, 10 aa, Artificial sequence
  Protein classification predicting sequence
QDHKRAYEGD

SEQ ID NO: 68164 - protein, 7 aa, Artificial sequence
  Protein classification predicting sequence
PHAYEGD

SEQ ID NO: 68165 - protein, 7 aa, Artificial sequence
  Protein classification predicting sequence
GDPEAMN

SEQ ID NO: 68166 - protein, 7 aa, Artificial sequence
  Protein classification predicting sequence
GILYGQF

SEQ ID NO: 68167 - protein, 7 aa, Artificial sequence
  Protein classification predicting sequence
AFIGPEA

SEQ ID NO: 68168 - protein, 9 aa, Artificial sequence
  Protein classification predicting sequence
NARFGDPEA

SEQ ID NO: 68169 - protein, 7 aa, Artificial sequence
  Protein classification predicting sequence
LAAGKGV

SEQ ID NO: 68170 - protein, 8 aa, Artificial sequence
  Protein classification predicting sequence
EGSKAFAK

SEQ ID NO: 68171 - protein, 17 aa, Artificial sequence
  Protein classification predicting sequence
GPAVVEFNCRFGDPETQ

SEQ ID NO: 68172 - protein, 12 aa, Artificial sequence
  Protein classification predicting sequence
EFNCRFGDPETQ

SEQ ID NO: 68173 - protein, 6 aa, Artificial sequence
  Protein classification predicting sequence
MLLDNK

SEQ ID NO: 68174 - protein, 12 aa, Artificial sequence
  Protein classification predicting sequence
GEEASFIVMVDG

SEQ ID NO: 68175 - protein, 8 aa, Artificial sequence
  Protein classification predicting sequence
KGDVISGL

SEQ ID NO: 68176 - protein, 15 aa, Artificial sequence
  Protein classification predicting sequence
NTGGMGAYSPAPVVT

SEQ ID NO: 68177 - protein, 6 aa, Artificial sequence
  Protein classification predicting sequence
GYPGDY

SEQ ID NO: 68178 - protein, 9 aa, Artificial sequence
  Protein classification predicting sequence
VAPGNAGTA

SEQ ID NO: 68179 - protein, 7 aa, Artificial sequence
  Protein classification predicting sequence
EPALAYL

SEQ ID NO: 68180 - protein, 16 aa, Artificial sequence
  Protein classification predicting sequence
LTIVGPEAPLVIGVVD

SEQ ID NO: 68181 - protein, 32 aa, Artificial sequence
  Protein classification predicting sequence
EKGAPIVIKADGLAAGKGVIVAMTLEEAEAAV

SEQ ID NO: 68182 - protein, 7 aa, Artificial sequence
  Protein classification predicting sequence
LTIVGPE

SEQ ID NO: 68183 - protein, 17 aa, Artificial sequence
  Protein classification predicting sequence
KADGLAAGKGVIVAMTL

SEQ ID NO: 68184 - protein, 10 aa, Artificial sequence
  Protein classification predicting sequence
AQWDPRPSLG

SEQ ID NO: 68185 - protein, 8 aa, Artificial sequence
  Protein classification predicting sequence
VLAAGGYP

SEQ ID NO: 68186 - protein, 29 aa, Artificial sequence
  Protein classification predicting sequence
PVVVKPLGLTGGKGVKVVGYQLKDNEEAK

SEQ ID NO: 68187 - protein, 5 aa, Artificial sequence
  Protein classification predicting sequence
EFNCR

SEQ ID NO: 68188 - protein, 9 aa, Artificial sequence
  Protein classification predicting sequence
GDPETQPIM

SEQ ID NO: 68189 - protein, 6 aa, Artificial sequence
  Protein classification predicting sequence
YNIPTA

SEQ ID NO: 68190 - protein, 8 aa, Artificial sequence
  Protein classification predicting sequence
EAQKRAYA

SEQ ID NO: 68191 - protein, 7 aa, Artificial sequence
  Protein classification predicting sequence
KVFHAGT

SEQ ID NO: 68192 - protein, 21 aa, Artificial sequence
  Protein classification predicting sequence
TALGHTVAEAQKRAYALMTDI

SEQ ID NO: 68193 - protein, 59 aa, Artificial sequence
  Protein classification predicting sequence
PVVVKKDGLAAGKGVIIADTIEAARSAIEIMYGDEEEGTVVFETFLEGEEFSLMTFVNG

SEQ ID NO: 68194 - protein, 59 aa, Artificial sequence
  Protein classification predicting sequence
IVGVMLASKGYPDAYEKGHKVSGFDLNENYFVSGLKKQGDTFVTSGGRVILAIGKGDNV

SEQ ID NO: 68195 - protein, 15 aa, Artificial sequence
  Protein classification predicting sequence
GPKVIEFNARFGDPE

SEQ ID NO: 68196 - protein, 8 aa, Artificial sequence
  Protein classification predicting sequence
GGREHALA

SEQ ID NO: 68197 - protein, 13 aa, Artificial sequence
  Protein classification predicting sequence
IGPEQPLIDGLAD

SEQ ID NO: 68198 - protein, 12 aa, Artificial sequence
  Protein classification predicting sequence
AAQIEGSKLFAK

SEQ ID NO: 68199 - protein, 14 aa, Artificial sequence
  Protein classification predicting sequence
KKDGLAAGKGVIIA

SEQ ID NO: 68200 - protein, 16 aa, Artificial sequence
  Protein classification predicting sequence
AVPFDCIAQDHKRAFD

SEQ ID NO: 68201 - protein, 9 aa, Artificial sequence
  Protein classification predicting sequence
AQDHKRAFD

SEQ ID NO: 68202 - protein, 9 aa, Artificial sequence
  Protein classification predicting sequence
IAQPIAKAM

SEQ ID NO: 68203 - protein, 6 aa, Artificial sequence
  Protein classification predicting sequence
ESDLMQ

SEQ ID NO: 68204 - protein, 10 aa, Artificial sequence
  Protein classification predicting sequence
SGGRVILAIG

SEQ ID NO: 68205 - protein, 12 aa, Artificial sequence
  Protein classification predicting sequence
EGSKAFAKDVMA

SEQ ID NO: 68206 - protein, 14 aa, Artificial sequence
  Protein classification predicting sequence
LLSNGGRVYMLVTT

SEQ ID NO: 68207 - protein, 17 aa, Artificial sequence
  Protein classification predicting sequence
FIGPDDALAAGIVDDFN

SEQ ID NO: 68208 - protein, 19 aa, Artificial sequence
  Protein classification predicting sequence
AAAELEWSKDFAKEIMVKY

SEQ ID NO: 68209 - protein, 8 aa, Artificial sequence
  Protein classification predicting sequence
YGTFSDFE

SEQ ID NO: 68210 - protein, 12 aa, Artificial sequence
  Protein classification predicting sequence
GAPIVVKADGLA

SEQ ID NO: 68211 - protein, 7 aa, Artificial sequence
  Protein classification predicting sequence
AQDHKRA

SEQ ID NO: 68212 - protein, 29 aa, Artificial sequence
  Protein classification predicting sequence
DGDKGPNTGGMGAYAPVPHLPQSVVDTAV

SEQ ID NO: 68213 - protein, 22 aa, Artificial sequence
  Protein classification predicting sequence
RFGDPETQIILPRLTSDFAQNI

SEQ ID NO: 68214 - protein, 7 aa, Artificial sequence
  Protein classification predicting sequence
GYPLDYE

SEQ ID NO: 68215 - protein, 30 aa, Artificial sequence
  Protein classification predicting sequence
GAPIVVKADGLALGKGVVVAETVEQAVEAA

SEQ ID NO: 68216 - protein, 14 aa, Artificial sequence
  Protein classification predicting sequence
GPDDALAAGIVDDF

SEQ ID NO: 68217 - protein, 12 aa, Artificial sequence
  Protein classification predicting sequence
AAELEWSKDFAK

SEQ ID NO: 68218 - protein, 6 aa, Artificial sequence
  Protein classification predicting sequence
SKDFAK

SEQ ID NO: 68219 - protein, 21 aa, Artificial sequence
  Protein classification predicting sequence
EMLLDNKFGDSGARVVIEEFL

SEQ ID NO: 68220 - protein, 6 aa, Artificial sequence
  Protein classification predicting sequence
GEEFSL

SEQ ID NO: 68221 - protein, 13 aa, Artificial sequence
  Protein classification predicting sequence
VPHLPQSVVDTAV

SEQ ID NO: 68222 - protein, 9 aa, Artificial sequence
  Protein classification predicting sequence
QDTTGLFYR

SEQ ID NO: 68223 - protein, 7 aa, Artificial sequence
  Protein classification predicting sequence
PGNGGTA

SEQ ID NO: 68224 - protein, 7 aa, Artificial sequence
  Protein classification predicting sequence
LVVVGPE

SEQ ID NO: 68225 - protein, 10 aa, Artificial sequence
  Protein classification predicting sequence
NCRFGDPETQ

SEQ ID NO: 68226 - protein, 6 aa, Artificial sequence
  Protein classification predicting sequence
TIVGPE

SEQ ID NO: 68227 - protein, 10 aa, Artificial sequence
  Protein classification predicting sequence
EFNARFGDPE

SEQ ID NO: 68228 - protein, 7 aa, Artificial sequence
  Protein classification predicting sequence
VTSGGRV

SEQ ID NO: 68229 - protein, 6 aa, Artificial sequence
  Protein classification predicting sequence
EPALAY

SEQ ID NO: 68230 - protein, 9 aa, Artificial sequence
  Protein classification predicting sequence
DMLAGNAFG

SEQ ID NO: 68231 - protein, 21 aa, Artificial sequence
  Protein classification predicting sequence
PKVIEYNCRFGDPETQPIMMR

SEQ ID NO: 68232 - protein, 7 aa, Artificial sequence
  Protein classification predicting sequence
SDLVELC

SEQ ID NO: 68233 - protein, 16 aa, Artificial sequence
  Protein classification predicting sequence
KLDQVESKWDPRASIG

SEQ ID NO: 68234 - protein, 8 aa, Artificial sequence
  Protein classification predicting sequence
APGNAGTA

SEQ ID NO: 68235 - protein, 19 aa, Artificial sequence
  Protein classification predicting sequence
LTIVGPEAPLVIGVVDAFR

SEQ ID NO: 68236 - protein, 19 aa, Artificial sequence
  Protein classification predicting sequence
VIEEFLDGEEASFIVMVDG

SEQ ID NO: 68237 - protein, 7 aa, Artificial sequence
  Protein classification predicting sequence
PTVRGMA

SEQ ID NO: 68238 - protein, 7 aa, Artificial sequence
  Protein classification predicting sequence
KDFLARH

SEQ ID NO: 68239 - protein, 8 aa, Artificial sequence
  Protein classification predicting sequence
GNAFGDAG

SEQ ID NO: 68240 - protein, 7 aa, Artificial sequence
  Protein classification predicting sequence
PKVIEFN

SEQ ID NO: 68241 - protein, 9 aa, Artificial sequence
  Protein classification predicting sequence
RFGDPETQP

SEQ ID NO: 68242 - protein, 11 aa, Artificial sequence
  Protein classification predicting sequence
GGRVLCVTALG

SEQ ID NO: 68243 - protein, 7 aa, Artificial sequence
  Protein classification predicting sequence
GGREHAL

SEQ ID NO: 68244 - protein, 13 aa, Artificial sequence
  Protein classification predicting sequence
GGREHALGWKAAQ

SEQ ID NO: 68245 - protein, 25 aa, Artificial sequence
  Protein classification predicting sequence
IFGPTQAAAQLEGSKAFTKDFLARH

SEQ ID NO: 68246 - protein, 7 aa, Artificial sequence
  Protein classification predicting sequence
AEYQNFT

SEQ ID NO: 68247 - protein, 7 aa, Artificial sequence
  Protein classification predicting sequence
GKGVIIA

SEQ ID NO: 68248 - protein, 8 aa, Artificial sequence
  Protein classification predicting sequence
GPKLIEYN

SEQ ID NO: 68249 - protein, 12 aa, Artificial sequence
  Protein classification predicting sequence
GDPECQVLMMRL

SEQ ID NO: 68250 - protein, 17 aa, Artificial sequence
  Protein classification predicting sequence
AGVDIDAGNLMVEKIKP

SEQ ID NO: 68251 - protein, 11 aa, Artificial sequence
  Protein classification predicting sequence
GIDLVAMCVND

SEQ ID NO: 68252 - protein, 13 aa, Artificial sequence
  Protein classification predicting sequence
GCALIGGETAEMP

SEQ ID NO: 68253 - protein, 16 aa, Artificial sequence
  Protein classification predicting sequence
GCALIGGETAEMPGMY

SEQ ID NO: 68254 - protein, 7 aa, Artificial sequence
  Protein classification predicting sequence
GVDIDAG

SEQ ID NO: 68255 - protein, 7 aa, Artificial sequence
  Protein classification predicting sequence
PLFFLDY

SEQ ID NO: 68256 - protein, 7 aa, Artificial sequence
  Protein classification predicting sequence
GIDCVAM

SEQ ID NO: 68257 - protein, 8 aa, Artificial sequence
  Protein classification predicting sequence
SSGIHSNG

SEQ ID NO: 68258 - protein, 14 aa, Artificial sequence
  Protein classification predicting sequence
SSGIHSNGLTLARK

SEQ ID NO: 68259 - protein, 7 aa, Artificial sequence
  Protein classification predicting sequence
EMYRTFN

SEQ ID NO: 68260 - protein, 15 aa, Artificial sequence
  Protein classification predicting sequence
EPVLVSGTDGVGTKL

SEQ ID NO: 68261 - protein, 22 aa, Artificial sequence
  Protein classification predicting sequence
EGCRQAGCALIGGETAEMPGMY

SEQ ID NO: 68262 - protein, 6 aa, Artificial sequence
  Protein classification predicting sequence
YDLAGF

SEQ ID NO: 68263 - protein, 6 aa, Artificial sequence
  Protein classification predicting sequence
RMKKHV

SEQ ID NO: 68264 - protein, 8 aa, Artificial sequence
  Protein classification predicting sequence
FGGMFDLS

SEQ ID NO: 68265 - protein, 6 aa, Artificial sequence
  Protein classification predicting sequence
FLDYIA

SEQ ID NO: 68266 - protein, 6 aa, Artificial sequence
  Protein classification predicting sequence
FNMGIG

SEQ ID NO: 68267 - protein, 9 aa, Artificial sequence
  Protein classification predicting sequence
GGETAEMPG

SEQ ID NO: 68268 - protein, 6 aa, Artificial sequence
  Protein classification predicting sequence
YVKPVL

SEQ ID NO: 68269 - protein, 8 aa, Artificial sequence
  Protein classification predicting sequence
TGGGFIEN

SEQ ID NO: 68270 - protein, 9 aa, Artificial sequence
  Protein classification predicting sequence
LEQVVAGVA

SEQ ID NO: 68271 - protein, 6 aa, Artificial sequence
  Protein classification predicting sequence
GCVQAG

SEQ ID NO: 68272 - protein, 7 aa, Artificial sequence
  Protein classification predicting sequence
VGVAEKS

SEQ ID NO: 68273 - protein, 7 aa, Artificial sequence
  Protein classification predicting sequence
GIDLVAM

SEQ ID NO: 68274 - protein, 9 aa, Artificial sequence
  Protein classification predicting sequence
LTYAQAGVD

SEQ ID NO: 68275 - protein, 7 aa, Artificial sequence
  Protein classification predicting sequence
GDIAEGD

SEQ ID NO: 68276 - protein, 6 aa, Artificial sequence
  Protein classification predicting sequence
RTFNCG

SEQ ID NO: 68277 - protein, 11 aa, Artificial sequence
  Protein classification predicting sequence
YRDAGVDIDAG

SEQ ID NO: 68278 - protein, 21 aa, Artificial sequence
  Protein classification predicting sequence
KYKEPVLVSGTDGVGTKLKLA

SEQ ID NO: 68279 - protein, 17 aa, Artificial sequence
  Protein classification predicting sequence
PVLVSGTDGVGTKLKLA

SEQ ID NO: 68280 - protein, 31 aa, Artificial sequence
  Protein classification predicting sequence
LAFDWNRHDTVGIDLVAMSVNDILVQGAEPL

SEQ ID NO: 68281 - protein, 8 aa, Artificial sequence
  Protein classification predicting sequence
GEYDLAGF

SEQ ID NO: 68282 - protein, 9 aa, Artificial sequence
  Protein classification predicting sequence
YDLAGFAVG

SEQ ID NO: 68283 - protein, 14 aa, Artificial sequence
  Protein classification predicting sequence
PVLVSGTDGVGTKL

SEQ ID NO: 68284 - protein, 6 aa, Artificial sequence
  Protein classification predicting sequence
IIDGSK

SEQ ID NO: 68285 - protein, 6 aa, Artificial sequence
  Protein classification predicting sequence
DTVGID

SEQ ID NO: 68286 - protein, 8 aa, Artificial sequence
  Protein classification predicting sequence
SSGVHSNG

SEQ ID NO: 68287 - protein, 6 aa, Artificial sequence
  Protein classification predicting sequence
GVHSNG

SEQ ID NO: 68288 - protein, 7 aa, Artificial sequence
  Protein classification predicting sequence
HSNGYSL

SEQ ID NO: 68289 - protein, 6 aa, Artificial sequence
  Protein classification predicting sequence
YKDAGV

SEQ ID NO: 68290 - protein, 7 aa, Artificial sequence
  Protein classification predicting sequence
DGVGTKL

SEQ ID NO: 68291 - protein, 6 aa, Artificial sequence
  Protein classification predicting sequence
KRTRRP

SEQ ID NO: 68292 - protein, 10 aa, Artificial sequence
  Protein classification predicting sequence
GAEPLFFLDY

SEQ ID NO: 68293 - protein, 7 aa, Artificial sequence
  Protein classification predicting sequence
DYDLAGF

SEQ ID NO: 68294 - protein, 10 aa, Artificial sequence
  Protein classification predicting sequence
AGFCVGVVEK

SEQ ID NO: 68295 - protein, 7 aa, Artificial sequence
  Protein classification predicting sequence
PTRIYVK

SEQ ID NO: 68296 - protein, 19 aa, Artificial sequence
  Protein classification predicting sequence
AIAHLTGGGFWENIPRVLP

SEQ ID NO: 68297 - protein, 9 aa, Artificial sequence
  Protein classification predicting sequence
ENAYSKAGV

SEQ ID NO: 68298 - protein, 11 aa, Artificial sequence
  Protein classification predicting sequence
VEAGYEVVERI

SEQ ID NO: 68299 - protein, 22 aa, Artificial sequence
  Protein classification predicting sequence
LKEPVLVSGTDGVGTKLLLAIE

SEQ ID NO: 68300 - protein, 7 aa, Artificial sequence
  Protein classification predicting sequence
VAMCVND

SEQ ID NO: 68301 - protein, 11 aa, Artificial sequence
  Protein classification predicting sequence
ALIGGETAEMP

SEQ ID NO: 68302 - protein, 8 aa, Artificial sequence
  Protein classification predicting sequence
GGETAEMP

SEQ ID NO: 68303 - protein, 6 aa, Artificial sequence
  Protein classification predicting sequence
LAVSPE

SEQ ID NO: 68304 - protein, 7 aa, Artificial sequence
  Protein classification predicting sequence
HDTIGID

SEQ ID NO: 68305 - protein, 6 aa, Artificial sequence
  Protein classification predicting sequence
AGFCVG

SEQ ID NO: 68306 - protein, 6 aa, Artificial sequence
  Protein classification predicting sequence
SQIIDG

SEQ ID NO: 68307 - protein, 7 aa, Artificial sequence
  Protein classification predicting sequence
AHITGGG

SEQ ID NO: 68308 - protein, 12 aa, Artificial sequence
  Protein classification predicting sequence
LVSGTDGVGTKL

SEQ ID NO: 68309 - protein, 6 aa, Artificial sequence
  Protein classification predicting sequence
KHDTIG

SEQ ID NO: 68310 - protein, 9 aa, Artificial sequence
  Protein classification predicting sequence
DLVAMCVND

SEQ ID NO: 68311 - protein, 11 aa, Artificial sequence
  Protein classification predicting sequence
SSGAHSNGYSL

SEQ ID NO: 68312 - protein, 7 aa, Artificial sequence
  Protein classification predicting sequence
PTKIYVK

SEQ ID NO: 68313 - protein, 7 aa, Artificial sequence
  Protein classification predicting sequence
ESSWQWP

SEQ ID NO: 68314 - protein, 8 aa, Artificial sequence
  Protein classification predicting sequence
GEKAWVIG

SEQ ID NO: 68315 - protein, 17 aa, Artificial sequence
  Protein classification predicting sequence
NAYAKSGVDVEAGYEVV

SEQ ID NO: 68316 - protein, 7 aa, Artificial sequence
  Protein classification predicting sequence
RIKKHVA

SEQ ID NO: 68317 - protein, 10 aa, Artificial sequence
  Protein classification predicting sequence
DCVAMCVNDI

SEQ ID NO: 68318 - protein, 23 aa, Artificial sequence
  Protein classification predicting sequence
DCVAMCVNDIIAAGAEPLYFLDY

SEQ ID NO: 68319 - protein, 13 aa, Artificial sequence
  Protein classification predicting sequence
KLEQVVAGVAEGC

SEQ ID NO: 68320 - protein, 6 aa, Artificial sequence
  Protein classification predicting sequence
GVAEGC

SEQ ID NO: 68321 - protein, 6 aa, Artificial sequence
  Protein classification predicting sequence
GLASSG

SEQ ID NO: 68322 - protein, 9 aa, Artificial sequence
  Protein classification predicting sequence
HSNGYSLVR

SEQ ID NO: 68323 - protein, 7 aa, Artificial sequence
  Protein classification predicting sequence
PLYFLDY

SEQ ID NO: 68324 - protein, 14 aa, Artificial sequence
  Protein classification predicting sequence
SSGIHSNGYSLVRK

SEQ ID NO: 68325 - protein, 17 aa, Artificial sequence
  Protein classification predicting sequence
SSGIHSNGYSLVRKIFF

SEQ ID NO: 68326 - protein, 10 aa, Artificial sequence
  Protein classification predicting sequence
HSNGYSLVRK

SEQ ID NO: 68327 - protein, 7 aa, Artificial sequence
  Protein classification predicting sequence
LPIFKAL

SEQ ID NO: 68328 - protein, 7 aa, Artificial sequence
  Protein classification predicting sequence
IFNMGIG

SEQ ID NO: 68329 - protein, 6 aa, Artificial sequence
  Protein classification predicting sequence
GGETAE

SEQ ID NO: 68330 - protein, 6 aa, Artificial sequence
  Protein classification predicting sequence
PTRIYV

SEQ ID NO: 68331 - protein, 6 aa, Artificial sequence
  Protein classification predicting sequence
HITGGG

SEQ ID NO: 68332 - protein, 15 aa, Artificial sequence
  Protein classification predicting sequence
QAGAALIGGETAEMP

SEQ ID NO: 68333 - protein, 6 aa, Artificial sequence
  Protein classification predicting sequence
VGAVEK

SEQ ID NO: 68334 - protein, 8 aa, Artificial sequence
  Protein classification predicting sequence
YKDAGVDI

SEQ ID NO: 68335 - protein, 6 aa, Artificial sequence
  Protein classification predicting sequence
AHITGG

SEQ ID NO: 68336 - protein, 8 aa, Artificial sequence
  Protein classification predicting sequence
GIGGFGAL

SEQ ID NO: 68337 - protein, 7 aa, Artificial sequence
  Protein classification predicting sequence
KKHVART

SEQ ID NO: 68338 - protein, 13 aa, Artificial sequence
  Protein classification predicting sequence
SGTDGVGTKLKLA

SEQ ID NO: 68339 - protein, 7 aa, Artificial sequence
  Protein classification predicting sequence
HITGGGF

SEQ ID NO: 68340 - protein, 12 aa, Artificial sequence
  Protein classification predicting sequence
IGIDLVAMCVND

SEQ ID NO: 68341 - protein, 21 aa, Artificial sequence
  Protein classification predicting sequence
VQGAEPLFFLDYYATGKLDVD

SEQ ID NO: 68342 - protein, 7 aa, Artificial sequence
  Protein classification predicting sequence
IIDGSKV

SEQ ID NO: 68343 - protein, 19 aa, Artificial sequence
  Protein classification predicting sequence
GDVLIALGSSGPHSNGYSL

SEQ ID NO: 68344 - protein, 8 aa, Artificial sequence
  Protein classification predicting sequence
AVIDESSW

SEQ ID NO: 68345 - protein, 18 aa, Artificial sequence
  Protein classification predicting sequence
HEMYRTFNCGVGMIIALP

SEQ ID NO: 68346 - protein, 7 aa, Artificial sequence
  Protein classification predicting sequence
RIKGVVK

SEQ ID NO: 68347 - protein, 15 aa, Artificial sequence
  Protein classification predicting sequence
LVSGTDGVGTKLRLA

SEQ ID NO: 68348 - protein, 14 aa, Artificial sequence
  Protein classification predicting sequence
TGGGFWENIPRVLP

SEQ ID NO: 68349 - protein, 7 aa, Artificial sequence
  Protein classification predicting sequence
HSNGFSL

SEQ ID NO: 68350 - protein, 9 aa, Artificial sequence
  Protein classification predicting sequence
GTDGVGTKL

SEQ ID NO: 68351 - protein, 5 aa, Artificial sequence
  Protein classification predicting sequence
MCVND

SEQ ID NO: 68352 - protein, 7 aa, Artificial sequence
  Protein classification predicting sequence
GCELAGC

SEQ ID NO: 68353 - protein, 13 aa, Artificial sequence
  Protein classification predicting sequence
LVGGETAEMPGMY

SEQ ID NO: 68354 - protein, 7 aa, Artificial sequence
  Protein classification predicting sequence
NIPRVLP

SEQ ID NO: 68355 - protein, 7 aa, Artificial sequence
  Protein classification predicting sequence
RKILEVS

SEQ ID NO: 68356 - protein, 9 aa, Artificial sequence
  Protein classification predicting sequence
FDWLQQQGN

SEQ ID NO: 68357 - protein, 9 aa, Artificial sequence
  Protein classification predicting sequence
LLEPTRIYV

SEQ ID NO: 68358 - protein, 6 aa, Artificial sequence
  Protein classification predicting sequence
FNMGVG

SEQ ID NO: 68359 - protein, 8 aa, Artificial sequence
  Protein classification predicting sequence
YRDAGVDI

SEQ ID NO: 68360 - protein, 11 aa, Artificial sequence
  Protein classification predicting sequence
AGDALVDRIKP

SEQ ID NO: 68361 - protein, 8 aa, Artificial sequence
  Protein classification predicting sequence
IKPFAKRT

SEQ ID NO: 68362 - protein, 7 aa, Artificial sequence
  Protein classification predicting sequence
NRHDTVG

SEQ ID NO: 68363 - protein, 31 aa, Artificial sequence
  Protein classification predicting sequence
DLVAMSVNDILVQGAEPLFFLDYFACGKLDV

SEQ ID NO: 68364 - protein, 8 aa, Artificial sequence
  Protein classification predicting sequence
AGFAVGAV

SEQ ID NO: 68365 - protein, 11 aa, Artificial sequence
  Protein classification predicting sequence
HSNGYSLVRKI

SEQ ID NO: 68366 - protein, 7 aa, Artificial sequence
  Protein classification predicting sequence
FNCGIGM

SEQ ID NO: 68367 - protein, 8 aa, Artificial sequence
  Protein classification predicting sequence
VRSTRRPG

SEQ ID NO: 68368 - protein, 16 aa, Artificial sequence
  Protein classification predicting sequence
DGEIGGFGGLFDLKAA

SEQ ID NO: 68369 - protein, 24 aa, Artificial sequence
  Protein classification predicting sequence
TRRPGADGEIGGFGGLFDLKAAGF

SEQ ID NO: 68370 - protein, 13 aa, Artificial sequence
  Protein classification predicting sequence
VVQGAEPLFFLDY

SEQ ID NO: 68371 - protein, 11 aa, Artificial sequence
  Protein classification predicting sequence
GGETAEMPGMY

SEQ ID NO: 68372 - protein, 10 aa, Artificial sequence
  Protein classification predicting sequence
DYDLAGFAVG

SEQ ID NO: 68373 - protein, 9 aa, Artificial sequence
  Protein classification predicting sequence
HSNGFSLVR

SEQ ID NO: 68374 - protein, 12 aa, Artificial sequence
  Protein classification predicting sequence
HSNGFSLVRRIV

SEQ ID NO: 68375 - protein, 7 aa, Artificial sequence
  Protein classification predicting sequence
YKDAGVD

SEQ ID NO: 68376 - protein, 6 aa, Artificial sequence
  Protein classification predicting sequence
PTKIYV

SEQ ID NO: 68377 - protein, 11 aa, Artificial sequence
  Protein classification predicting sequence
RIKGVVKKTRR

SEQ ID NO: 68378 - protein, 11 aa, Artificial sequence
  Protein classification predicting sequence
GIAEGCLQSGC

SEQ ID NO: 68379 - protein, 37 aa, Artificial sequence
  Protein classification predicting sequence
LVGGETAEMPGMYHGEDYDVAGFCVGVVEKSEIIDGS

SEQ ID NO: 68380 - protein, 9 aa, Artificial sequence
  Protein classification predicting sequence
VSGCDPQTT

SEQ ID NO: 68381 - protein, 9 aa, Artificial sequence
  Protein classification predicting sequence
GKPLADHLL

SEQ ID NO: 68382 - protein, 14 aa, Artificial sequence
  Protein classification predicting sequence
PTRIYVKSVLELIE

SEQ ID NO: 68383 - protein, 8 aa, Artificial sequence
  Protein classification predicting sequence
DKALALLN

SEQ ID NO: 68384 - protein, 8 aa, Artificial sequence
  Protein classification predicting sequence
WLQTAGNV

SEQ ID NO: 68385 - protein, 20 aa, Artificial sequence
  Protein classification predicting sequence
VQGAEPLFFLDYYATGKLDV

SEQ ID NO: 68386 - protein, 29 aa, Artificial sequence
  Protein classification predicting sequence
GGETAEMPGMYEGEDYDLAGFCVGVVEKA

SEQ ID NO: 68387 - protein, 15 aa, Artificial sequence
  Protein classification predicting sequence
TGGGFWENIPRVLPE

SEQ ID NO: 68388 - protein, 7 aa, Artificial sequence
  Protein classification predicting sequence
GGLGGFG

SEQ ID NO: 68389 - protein, 15 aa, Artificial sequence
  Protein classification predicting sequence
GGLGGFGATFDLSQL

SEQ ID NO: 68390 - protein, 25 aa, Artificial sequence
  Protein classification predicting sequence
APVLVSGTDGVGTKLKLAIDYGKHD

SEQ ID NO: 68391 - protein, 10 aa, Artificial sequence
  Protein classification predicting sequence
IEQIVKGISD

SEQ ID NO: 68392 - protein, 23 aa, Artificial sequence
  Protein classification predicting sequence
TNTALIGGETAEMGEMYHEGEYD

SEQ ID NO: 68393 - protein, 8 aa, Artificial sequence
  Protein classification predicting sequence
PTKLYVKP

SEQ ID NO: 68394 - protein, 6 aa, Artificial sequence
  Protein classification predicting sequence
YVKPIL

SEQ ID NO: 68395 - protein, 7 aa, Artificial sequence
  Protein classification predicting sequence
EVFNWLQ

SEQ ID NO: 68396 - protein, 15 aa, Artificial sequence
  Protein classification predicting sequence
TNEMYNIFNMGIGYT

SEQ ID NO: 68397 - protein, 11 aa, Artificial sequence
  Protein classification predicting sequence
LGGFGGMFDLS

SEQ ID NO: 68398 - protein, 8 aa, Artificial sequence
  Protein classification predicting sequence
TGVKEPVL

SEQ ID NO: 68399 - protein, 10 aa, Artificial sequence
  Protein classification predicting sequence
GAEPLYFLDY

SEQ ID NO: 68400 - protein, 10 aa, Artificial sequence
  Protein classification predicting sequence
KNAYAQSGVD

SEQ ID NO: 68401 - protein, 11 aa, Artificial sequence
  Protein classification predicting sequence
RIKKHVARTER

SEQ ID NO: 68402 - protein, 19 aa, Artificial sequence
  Protein classification predicting sequence
SGTDGVGTKLMLAIKYDKH

SEQ ID NO: 68403 - protein, 13 aa, Artificial sequence
  Protein classification predicting sequence
LIGGETAEMPGMY

SEQ ID NO: 68404 - protein, 7 aa, Artificial sequence
  Protein classification predicting sequence
DDLAAEI

SEQ ID NO: 68405 - protein, 9 aa, Artificial sequence
  Protein classification predicting sequence
GLMLAVSPE

SEQ ID NO: 68406 - protein, 10 aa, Artificial sequence
  Protein classification predicting sequence
SGTDGVGTKL

SEQ ID NO: 68407 - protein, 14 aa, Artificial sequence
  Protein classification predicting sequence
ALIGGETAEMPGMY

SEQ ID NO: 68408 - protein, 10 aa, Artificial sequence
  Protein classification predicting sequence
HITGGGFIEN

SEQ ID NO: 68409 - protein, 25 aa, Artificial sequence
  Protein classification predicting sequence
IKHEEMFEIFNMGVGLMLAVSPENV

SEQ ID NO: 68410 - protein, 13 aa, Artificial sequence
  Protein classification predicting sequence
SSGIHSNGYSLVR

SEQ ID NO: 68411 - protein, 24 aa, Artificial sequence
  Protein classification predicting sequence
SGVDVEAGYEVVERIKKHVARTER

SEQ ID NO: 68412 - protein, 10 aa, Artificial sequence
  Protein classification predicting sequence
LGGFGGMFDL

SEQ ID NO: 68413 - protein, 14 aa, Artificial sequence
  Protein classification predicting sequence
SGTDGVGTKLMLAI

SEQ ID NO: 68414 - protein, 32 aa, Artificial sequence
  Protein classification predicting sequence
YDKHDTIGQDCVAMCVNDIIAAGAEPLYFLDY

SEQ ID NO: 68415 - protein, 26 aa, Artificial sequence
  Protein classification predicting sequence
LIGGETAEMPGMYGEDDYDLAGFAVG

SEQ ID NO: 68416 - protein, 13 aa, Artificial sequence
  Protein classification predicting sequence
LKDVLLEPTRIYV

SEQ ID NO: 68417 - protein, 6 aa, Artificial sequence
  Protein classification predicting sequence
PVLPIF

SEQ ID NO: 68418 - protein, 7 aa, Artificial sequence
  Protein classification predicting sequence
NGYSLVR

SEQ ID NO: 68419 - protein, 6 aa, Artificial sequence
  Protein classification predicting sequence
DGVGTK

SEQ ID NO: 68420 - protein, 9 aa, Artificial sequence
  Protein classification predicting sequence
AGFCVGVVE

SEQ ID NO: 68421 - protein, 7 aa, Artificial sequence
  Protein classification predicting sequence
GVDVEAG

SEQ ID NO: 68422 - protein, 8 aa, Artificial sequence
  Protein classification predicting sequence
MAHITGGG

SEQ ID NO: 68423 - protein, 9 aa, Artificial sequence
  Protein classification predicting sequence
MAHITGGGL

SEQ ID NO: 68424 - protein, 8 aa, Artificial sequence
  Protein classification predicting sequence
AHITGGGL

SEQ ID NO: 68425 - protein, 7 aa, Artificial sequence
  Protein classification predicting sequence
RPEVMGG

SEQ ID NO: 68426 - protein, 7 aa, Artificial sequence
  Protein classification predicting sequence
EIPAGYK

SEQ ID NO: 68427 - protein, 15 aa, Artificial sequence
  Protein classification predicting sequence
PVLVSGTDGVGTKLK

SEQ ID NO: 68428 - protein, 8 aa, Artificial sequence
  Protein classification predicting sequence
DGVGTKLK

SEQ ID NO: 68429 - protein, 21 aa, Artificial sequence
  Protein classification predicting sequence
VAMCVNDILTTGAEPLYFLDY

SEQ ID NO: 68430 - protein, 8 aa, Artificial sequence
  Protein classification predicting sequence
MYEIFNMG

SEQ ID NO: 68431 - protein, 7 aa, Artificial sequence
  Protein classification predicting sequence
GGFGALC

SEQ ID NO: 68432 - protein, 17 aa, Artificial sequence
  Protein classification predicting sequence
PVLVSGTDGVGTKLRLA

SEQ ID NO: 68433 - protein, 18 aa, Artificial sequence
  Protein classification predicting sequence
QAGCALIGGETAEMPGMY

SEQ ID NO: 68434 - protein, 36 aa, Artificial sequence
  Protein classification predicting sequence
QAGCALIGGETAEMPGMYEGEDYDVAGFCVGVVEKE

SEQ ID NO: 68435 - protein, 7 aa, Artificial sequence
  Protein classification predicting sequence
TIGEHLL

SEQ ID NO: 68436 - protein, 6 aa, Artificial sequence
  Protein classification predicting sequence
GGFGAL

SEQ ID NO: 68437 - protein, 32 aa, Artificial sequence
  Protein classification predicting sequence
HDIHAISHITGGGFWENIPRVLPEGTKAVIDG

SEQ ID NO: 68438 - protein, 9 aa, Artificial sequence
  Protein classification predicting sequence
DAGVDIDAG

SEQ ID NO: 68439 - protein, 19 aa, Artificial sequence
  Protein classification predicting sequence
VQGAEPLFFLDYFATGKLD

SEQ ID NO: 68440 - protein, 16 aa, Artificial sequence
  Protein classification predicting sequence
DTAAAVVGGIARGCEL

SEQ ID NO: 68441 - protein, 14 aa, Artificial sequence
  Protein classification predicting sequence
TGGGLTENIIRVIP

SEQ ID NO: 68442 - protein, 49 aa, Artificial sequence
  Protein classification predicting sequence
LVSGTDGVGTKLRLAMDLKRHDTIGIDLVAMCVNDLVVQGAEPLFFLDY

SEQ ID NO: 68443 - protein, 25 aa, Artificial sequence
  Protein classification predicting sequence
GIDLVAMCVNDLVVQGAEPLFFLDY

SEQ ID NO: 68444 - protein, 7 aa, Artificial sequence
  Protein classification predicting sequence
EGDMMRI

SEQ ID NO: 68445 - protein, 15 aa, Artificial sequence
  Protein classification predicting sequence
PTHFIRRLNMREQLI

SEQ ID NO: 68446 - protein, 7 aa, Artificial sequence
  Protein classification predicting sequence
ADEISPD

SEQ ID NO: 68447 - protein, 7 aa, Artificial sequence
  Protein classification predicting sequence
HFIRRLN

SEQ ID NO: 68448 - protein, 7 aa, Artificial sequence
  Protein classification predicting sequence
EEHITAF

SEQ ID NO: 68449 - protein, 11 aa, Artificial sequence
  Protein classification predicting sequence
MALAIRVNDFL

SEQ ID NO: 68450 - protein, 6 aa, Artificial sequence
  Protein classification predicting sequence
DKDRFR

SEQ ID NO: 68451 - protein, 10 aa, Artificial sequence
  Protein classification predicting sequence
LNNEISSLIF

SEQ ID NO: 68452 - protein, 7 aa, Artificial sequence
  Protein classification predicting sequence
IIPLEVV

SEQ ID NO: 68453 - protein, 6 aa, Artificial sequence
  Protein classification predicting sequence
PIVEFY

SEQ ID NO: 68454 - protein, 7 aa, Artificial sequence
  Protein classification predicting sequence
AGSLAKR

SEQ ID NO: 68455 - protein, 7 aa, Artificial sequence
  Protein classification predicting sequence
GKGRLNN

SEQ ID NO: 68456 - protein, 7 aa, Artificial sequence
  Protein classification predicting sequence
DFKLEFG

SEQ ID NO: 68457 - protein, 12 aa, Artificial sequence
  Protein classification predicting sequence
LLADEISPDTCR

SEQ ID NO: 68458 - protein, 19 aa, Artificial sequence
  Protein classification predicting sequence
LLADEISPDTCRLWDKETN

SEQ ID NO: 68459 - protein, 8 aa, Artificial sequence
  Protein classification predicting sequence
SAFDVVLP

SEQ ID NO: 68460 - protein, 7 aa, Artificial sequence
  Protein classification predicting sequence
RLGVEEG

SEQ ID NO: 68461 - protein, 7 aa, Artificial sequence
  Protein classification predicting sequence
LVDFKIE

SEQ ID NO: 68462 - protein, 12 aa, Artificial sequence
  Protein classification predicting sequence
SAFDVILDDPIP

SEQ ID NO: 68463 - protein, 7 aa, Artificial sequence
  Protein classification predicting sequence
DPIPGKG

SEQ ID NO: 68464 - protein, 14 aa, Artificial sequence
  Protein classification predicting sequence
PPSFDKQFVRDWLE

SEQ ID NO: 68465 - protein, 6 aa, Artificial sequence
  Protein classification predicting sequence
EVIVRN

SEQ ID NO: 68466 - protein, 8 aa, Artificial sequence
  Protein classification predicting sequence
EVIVRNVA

SEQ ID NO: 68467 - protein, 12 aa, Artificial sequence
  Protein classification predicting sequence
DEVLTPDSSRFW

SEQ ID NO: 68468 - protein, 9 aa, Artificial sequence
  Protein classification predicting sequence
DEISPDTCR

SEQ ID NO: 68469 - protein, 8 aa, Artificial sequence
  Protein classification predicting sequence
DRLSAFDV

SEQ ID NO: 68470 - protein, 7 aa, Artificial sequence
  Protein classification predicting sequence
LTPDSSR

SEQ ID NO: 68471 - protein, 11 aa, Artificial sequence
  Protein classification predicting sequence
EKTAAKYREAL

SEQ ID NO: 68472 - protein, 6 aa, Artificial sequence
  Protein classification predicting sequence
YEGKAK

SEQ ID NO: 68473 - protein, 8 aa, Artificial sequence
  Protein classification predicting sequence
KDDATAFN

SEQ ID NO: 68474 - protein, 8 aa, Artificial sequence
  Protein classification predicting sequence
VRNVAAGS

SEQ ID NO: 68475 - protein, 7 aa, Artificial sequence
  Protein classification predicting sequence
DFKIEFG

SEQ ID NO: 68476 - protein, 7 aa, Artificial sequence
  Protein classification predicting sequence
GKVRDIY

SEQ ID NO: 68477 - protein, 10 aa, Artificial sequence
  Protein classification predicting sequence
RIPEEVLGRA

SEQ ID NO: 68478 - protein, 13 aa, Artificial sequence
  Protein classification predicting sequence
ECVARGYLTGSGL

SEQ ID NO: 68479 - protein, 10 aa, Artificial sequence
  Protein classification predicting sequence
DEVLTPDSSR

SEQ ID NO: 68480 - protein, 7 aa, Artificial sequence
  Protein classification predicting sequence
GKVREIY

SEQ ID NO: 68481 - protein, 8 aa, Artificial sequence
  Protein classification predicting sequence
ADTKFEFG

SEQ ID NO: 68482 - protein, 7 aa, Artificial sequence
  Protein classification predicting sequence
LHDPMIN

SEQ ID NO: 68483 - protein, 9 aa, Artificial sequence
  Protein classification predicting sequence
DEISPDSCR

SEQ ID NO: 68484 - protein, 7 aa, Artificial sequence
  Protein classification predicting sequence
LDKDRFR

SEQ ID NO: 68485 - protein, 9 aa, Artificial sequence
  Protein classification predicting sequence
GEILLADEI

SEQ ID NO: 68486 - protein, 7 aa, Artificial sequence
  Protein classification predicting sequence
LVDFKLE

SEQ ID NO: 68487 - protein, 8 aa, Artificial sequence
  Protein classification predicting sequence
SPDNCRLW

SEQ ID NO: 68488 - protein, 6 aa, Artificial sequence
  Protein classification predicting sequence
LNCQIS

SEQ ID NO: 68489 - protein, 7 aa, Artificial sequence
  Protein classification predicting sequence
LNGARKE

SEQ ID NO: 68490 - protein, 7 aa, Artificial sequence
  Protein classification predicting sequence
IVEFYYK

SEQ ID NO: 68491 - protein, 18 aa, Artificial sequence
  Protein classification predicting sequence
IVEFYYKDDALDDPFIND

SEQ ID NO: 68492 - protein, 8 aa, Artificial sequence
  Protein classification predicting sequence
LDDPFIND

SEQ ID NO: 68493 - protein, 7 aa, Artificial sequence
  Protein classification predicting sequence
DKDVFRR

SEQ ID NO: 68494 - protein, 7 aa, Artificial sequence
  Protein classification predicting sequence
EQLNKKV

SEQ ID NO: 68495 - protein, 6 aa, Artificial sequence
  Protein classification predicting sequence
DKDVFR

SEQ ID NO: 68496 - protein, 8 aa, Artificial sequence
  Protein classification predicting sequence
RGYLTGSG

SEQ ID NO: 68497 - protein, 6 aa, Artificial sequence
  Protein classification predicting sequence
DSSRYW

SEQ ID NO: 68498 - protein, 7 aa, Artificial sequence
  Protein classification predicting sequence
DTKFEFG

SEQ ID NO: 68499 - protein, 7 aa, Artificial sequence
  Protein classification predicting sequence
GIESHFI

SEQ ID NO: 68500 - protein, 8 aa, Artificial sequence
  Protein classification predicting sequence
TAFNGEKK

SEQ ID NO: 68501 - protein, 7 aa, Artificial sequence
  Protein classification predicting sequence
DTCRFWD

SEQ ID NO: 68502 - protein, 11 aa, Artificial sequence
  Protein classification predicting sequence
DKDVFRFDKGD

SEQ ID NO: 68503 - protein, 7 aa, Artificial sequence
  Protein classification predicting sequence
RLWDKET

SEQ ID NO: 68504 - protein, 7 aa, Artificial sequence
  Protein classification predicting sequence
FTPATKA

SEQ ID NO: 68505 - protein, 12 aa, Artificial sequence
  Protein classification predicting sequence
GIIIADTKFEFG

SEQ ID NO: 68506 - protein, 8 aa, Artificial sequence
  Protein classification predicting sequence
IFTPSTKA

SEQ ID NO: 68507 - protein, 9 aa, Artificial sequence
  Protein classification predicting sequence
DTKFEFGLD

SEQ ID NO: 68508 - protein, 8 aa, Artificial sequence
  Protein classification predicting sequence
GSGWKDYQ

SEQ ID NO: 68509 - protein, 6 aa, Artificial sequence
  Protein classification predicting sequence
HDENIS

SEQ ID NO: 68510 - protein, 11 aa, Artificial sequence
  Protein classification predicting sequence
IIIADTKFEFG

SEQ ID NO: 68511 - protein, 6 aa, Artificial sequence
  Protein classification predicting sequence
SYDKQF

SEQ ID NO: 68512 - protein, 6 aa, Artificial sequence
  Protein classification predicting sequence
DATAFN

SEQ ID NO: 68513 - protein, 8 aa, Artificial sequence
  Protein classification predicting sequence
GSITKRLG

SEQ ID NO: 68514 - protein, 12 aa, Artificial sequence
  Protein classification predicting sequence
AELYRGKAKTVY

SEQ ID NO: 68515 - protein, 14 aa, Artificial sequence
  Protein classification predicting sequence
PDLLVLEFRNDTSA

SEQ ID NO: 68516 - protein, 16 aa, Artificial sequence
  Protein classification predicting sequence
RIEQFDRKGMVNNKFN

SEQ ID NO: 68517 - protein, 20 aa, Artificial sequence
  Protein classification predicting sequence
RIEQFDRKGMVNNKFNHFIM

SEQ ID NO: 68518 - protein, 23 aa, Artificial sequence
  Protein classification predicting sequence
FIMSKLAEAGIPTQMERLLSDTE

SEQ ID NO: 68519 - protein, 14 aa, Artificial sequence
  Protein classification predicting sequence
LNPPLFDLFLKNDA

SEQ ID NO: 68520 - protein, 19 aa, Artificial sequence
  Protein classification predicting sequence
HDPMVNESYCETFGWVSKE

SEQ ID NO: 68521 - protein, 9 aa, Artificial sequence
  Protein classification predicting sequence
PIFTPSTKA

SEQ ID NO: 68522 - protein, 12 aa, Artificial sequence
  Protein classification predicting sequence
PIFTPSTKAEQG

SEQ ID NO: 68523 - protein, 6 aa, Artificial sequence
  Protein classification predicting sequence
SFDKQF

SEQ ID NO: 68524 - protein, 7 aa, Artificial sequence
  Protein classification predicting sequence
RNIASGS

SEQ ID NO: 68525 - protein, 6 aa, Artificial sequence
  Protein classification predicting sequence
IPLEVV

SEQ ID NO: 68526 - protein, 8 aa, Artificial sequence
  Protein classification predicting sequence
GQIVLGDE

SEQ ID NO: 68527 - protein, 8 aa, Artificial sequence
  Protein classification predicting sequence
ELYRGKAK

SEQ ID NO: 68528 - protein, 7 aa, Artificial sequence
  Protein classification predicting sequence
FRNDTSA

SEQ ID NO: 68529 - protein, 8 aa, Artificial sequence
  Protein classification predicting sequence
KLFDDAGL

SEQ ID NO: 68530 - protein, 10 aa, Artificial sequence
  Protein classification predicting sequence
VLGDEFSPDG

SEQ ID NO: 68531 - protein, 5 aa, Artificial sequence
  Protein classification predicting sequence
CRLWD

SEQ ID NO: 68532 - protein, 11 aa, Artificial sequence
  Protein classification predicting sequence
DRKGMVNNKFN

SEQ ID NO: 68533 - protein, 10 aa, Artificial sequence
  Protein classification predicting sequence
AAGSLVKRLG

SEQ ID NO: 68534 - protein, 6 aa, Artificial sequence
  Protein classification predicting sequence
YKDDAL

SEQ ID NO: 68535 - protein, 7 aa, Artificial sequence
  Protein classification predicting sequence
KDDATAF

SEQ ID NO: 68536 - protein, 11 aa, Artificial sequence
  Protein classification predicting sequence
SLPLLGRGKVR

SEQ ID NO: 68537 - protein, 9 aa, Artificial sequence
  Protein classification predicting sequence
YAVGDDKLL

SEQ ID NO: 68538 - protein, 13 aa, Artificial sequence
  Protein classification predicting sequence
VVKRLKPILVEAV

SEQ ID NO: 68539 - protein, 10 aa, Artificial sequence
  Protein classification predicting sequence
DYQATGKVCG

SEQ ID NO: 68540 - protein, 8 aa, Artificial sequence
  Protein classification predicting sequence
LPEPIFTP

SEQ ID NO: 68541 - protein, 6 aa, Artificial sequence
  Protein classification predicting sequence
DSSRFW

SEQ ID NO: 68542 - protein, 9 aa, Artificial sequence
  Protein classification predicting sequence
DDIMALAIR

SEQ ID NO: 68543 - protein, 8 aa, Artificial sequence
  Protein classification predicting sequence
DKDRFRRD

SEQ ID NO: 68544 - protein, 25 aa, Artificial sequence
  Protein classification predicting sequence
DKDRFRRDMGGLVEAYQEVARRLGI

SEQ ID NO: 68545 - protein, 7 aa, Artificial sequence
  Protein classification predicting sequence
NMREQLI

SEQ ID NO: 68546 - protein, 6 aa, Artificial sequence
  Protein classification predicting sequence
HDPMVN

SEQ ID NO: 68547 - protein, 10 aa, Artificial sequence
  Protein classification predicting sequence
SYCETFGWVS

SEQ ID NO: 68548 - protein, 61 aa, Artificial sequence
  Protein classification predicting sequence
ENLARMKELTYKANDVLKKLFDDAGLILVDFKLEFGLYKGEVVLGDEFSPDGSRLWDKETL

SEQ ID NO: 68549 - protein, 7 aa, Artificial sequence
  Protein classification predicting sequence
DRISAYD

SEQ ID NO: 68550 - protein, 7 aa, Artificial sequence
  Protein classification predicting sequence
FTPSTKA

SEQ ID NO: 68551 - protein, 13 aa, Artificial sequence
  Protein classification predicting sequence
VHSGKVRSVYWLT

SEQ ID NO: 68552 - protein, 17 aa, Artificial sequence
  Protein classification predicting sequence
PLAIMVISDRISAFDCI

SEQ ID NO: 68553 - protein, 10 aa, Artificial sequence
  Protein classification predicting sequence
YITGSMWRAY

SEQ ID NO: 68554 - protein, 8 aa, Artificial sequence
  Protein classification predicting sequence
LPEGLEKD

SEQ ID NO: 68555 - protein, 18 aa, Artificial sequence
  Protein classification predicting sequence
KLIYMDEVGTPDSSRIWD

SEQ ID NO: 68556 - protein, 6 aa, Artificial sequence
  Protein classification predicting sequence
TPDSSR

SEQ ID NO: 68557 - protein, 13 aa, Artificial sequence
  Protein classification predicting sequence
ENSKEGFRQFLLN

SEQ ID NO: 68558 - protein, 20 aa, Artificial sequence
  Protein classification predicting sequence
LRVEYKDEVTAGNGAKKDTM

SEQ ID NO: 68559 - protein, 7 aa, Artificial sequence
  Protein classification predicting sequence
LNNQITS

SEQ ID NO: 68560 - protein, 9 aa, Artificial sequence
  Protein classification predicting sequence
EPLVEFFYK

SEQ ID NO: 68561 - protein, 13 aa, Artificial sequence
  Protein classification predicting sequence
ILLADEISPDTCR

SEQ ID NO: 68562 - protein, 17 aa, Artificial sequence
  Protein classification predicting sequence
ILLADEISPDTCRIWDK

SEQ ID NO: 68563 - protein, 19 aa, Artificial sequence
  Protein classification predicting sequence
NFDKDVYRNNTGSLIETYQ

SEQ ID NO: 68564 - protein, 8 aa, Artificial sequence
  Protein classification predicting sequence
DPFINDEH

SEQ ID NO: 68565 - protein, 19 aa, Artificial sequence
  Protein classification predicting sequence
WFAQIGLNLIDFKLEFGFD

SEQ ID NO: 68566 - protein, 32 aa, Artificial sequence
  Protein classification predicting sequence
LIDFKLEFGFDKDGKIILADEFSPDNCRLWDA

SEQ ID NO: 68567 - protein, 7 aa, Artificial sequence
  Protein classification predicting sequence
GKVRDLY

SEQ ID NO: 68568 - protein, 7 aa, Artificial sequence
  Protein classification predicting sequence
DRLSAFD

SEQ ID NO: 68569 - protein, 6 aa, Artificial sequence
  Protein classification predicting sequence
ATALNG

SEQ ID NO: 68570 - protein, 10 aa, Artificial sequence
  Protein classification predicting sequence
IIPLEVVLRN

SEQ ID NO: 68571 - protein, 6 aa, Artificial sequence
  Protein classification predicting sequence
ETRRIN

SEQ ID NO: 68572 - protein, 9 aa, Artificial sequence
  Protein classification predicting sequence
LIDFKLEFG

SEQ ID NO: 68573 - protein, 12 aa, Artificial sequence
  Protein classification predicting sequence
DPFINDEHVKFL

SEQ ID NO: 68574 - protein, 7 aa, Artificial sequence
  Protein classification predicting sequence
GKAKDIY

SEQ ID NO: 68575 - protein, 11 aa, Artificial sequence
  Protein classification predicting sequence
TAGSFSKRFGV

SEQ ID NO: 68576 - protein, 7 aa, Artificial sequence
  Protein classification predicting sequence
PLEVVVR

SEQ ID NO: 68577 - protein, 7 aa, Artificial sequence
  Protein classification predicting sequence
RNYAAGS

SEQ ID NO: 68578 - protein, 7 aa, Artificial sequence
  Protein classification predicting sequence
RGYLTGS

SEQ ID NO: 68579 - protein, 5 aa, Artificial sequence
  Protein classification predicting sequence
KFEFG

SEQ ID NO: 68580 - protein, 15 aa, Artificial sequence
  Protein classification predicting sequence
PVHSGKVRSVYWLTE

SEQ ID NO: 68581 - protein, 8 aa, Artificial sequence
  Protein classification predicting sequence
RLIKEKGY

SEQ ID NO: 68582 - protein, 21 aa, Artificial sequence
  Protein classification predicting sequence
DAPLAIMVISDRISAFDCIWH

SEQ ID NO: 68583 - protein, 17 aa, Artificial sequence
  Protein classification predicting sequence
SHILDIPHPFVWIVQKA

SEQ ID NO: 68584 - protein, 7 aa, Artificial sequence
  Protein classification predicting sequence
KIEAICR

SEQ ID NO: 68585 - protein, 13 aa, Artificial sequence
  Protein classification predicting sequence
GIPGVPEADDVNI

SEQ ID NO: 68586 - protein, 11 aa, Artificial sequence
  Protein classification predicting sequence
FVDTKFEFGYV

SEQ ID NO: 68587 - protein, 10 aa, Artificial sequence
  Protein classification predicting sequence
FPDPDILLNK

SEQ ID NO: 68588 - protein, 12 aa, Artificial sequence
  Protein classification predicting sequence
RMPEREALARDN

SEQ ID NO: 68589 - protein, 6 aa, Artificial sequence
  Protein classification predicting sequence
DKQFVR

SEQ ID NO: 68590 - protein, 16 aa, Artificial sequence
  Protein classification predicting sequence
EAGIPTQMERLLSDTE

SEQ ID NO: 68591 - protein, 12 aa, Artificial sequence
  Protein classification predicting sequence
RQSLGGLIEAYE

SEQ ID NO: 68592 - protein, 8 aa, Artificial sequence
  Protein classification predicting sequence
QWGDEGKG

SEQ ID NO: 68593 - protein, 7 aa, Artificial sequence
  Protein classification predicting sequence
VIGNGVV

SEQ ID NO: 68594 - protein, 10 aa, Artificial sequence
  Protein classification predicting sequence
VIGNGVVVDP

SEQ ID NO: 68595 - protein, 6 aa, Artificial sequence
  Protein classification predicting sequence
LFEGAQ

SEQ ID NO: 68596 - protein, 6 aa, Artificial sequence
  Protein classification predicting sequence
TGRPRR

SEQ ID NO: 68597 - protein, 8 aa, Artificial sequence
  Protein classification predicting sequence
RRCGWLDL

SEQ ID NO: 68598 - protein, 7 aa, Artificial sequence
  Protein classification predicting sequence
YETLPGW

SEQ ID NO: 68599 - protein, 14 aa, Artificial sequence
  Protein classification predicting sequence
QWGDEGKGKIVDWL

SEQ ID NO: 68600 - protein, 14 aa, Artificial sequence
  Protein classification predicting sequence
VVRFQGGHNAGHTL

SEQ ID NO: 68601 - protein, 6 aa, Artificial sequence
  Protein classification predicting sequence
PSGILR

SEQ ID NO: 68602 - protein, 8 aa, Artificial sequence
  Protein classification predicting sequence
CPLILPYH

SEQ ID NO: 68603 - protein, 11 aa, Artificial sequence
  Protein classification predicting sequence
KIGTTGRGIGP

SEQ ID NO: 68604 - protein, 8 aa, Artificial sequence
  Protein classification predicting sequence
YEDKVARR

SEQ ID NO: 68605 - protein, 7 aa, Artificial sequence
  Protein classification predicting sequence
VAYKLDG

SEQ ID NO: 68606 - protein, 10 aa, Artificial sequence
  Protein classification predicting sequence
GDEGKGKIVD

SEQ ID NO: 68607 - protein, 7 aa, Artificial sequence
  Protein classification predicting sequence
LTKLDVL

SEQ ID NO: 68608 - protein, 7 aa, Artificial sequence
  Protein classification predicting sequence
GTTKKGI

SEQ ID NO: 68609 - protein, 6 aa, Artificial sequence
  Protein classification predicting sequence
FEGAQG

SEQ ID NO: 68610 - protein, 6 aa, Artificial sequence
  Protein classification predicting sequence
DYVLGI

SEQ ID NO: 68611 - protein, 7 aa, Artificial sequence
  Protein classification predicting sequence
NSLSGFC

SEQ ID NO: 68612 - protein, 8 aa, Artificial sequence
  Protein classification predicting sequence
TKLDVLDG

SEQ ID NO: 68613 - protein, 9 aa, Artificial sequence
  Protein classification predicting sequence
TKLDVLDGL

SEQ ID NO: 68614 - protein, 13 aa, Artificial sequence
  Protein classification predicting sequence
TKLDVLDGLKEVK

SEQ ID NO: 68615 - protein, 9 aa, Artificial sequence
  Protein classification predicting sequence
TTPLAADDW

SEQ ID NO: 68616 - protein, 7 aa, Artificial sequence
  Protein classification predicting sequence
ESTFGVK

SEQ ID NO: 68617 - protein, 7 aa, Artificial sequence
  Protein classification predicting sequence
EELTGVP

SEQ ID NO: 68618 - protein, 16 aa, Artificial sequence
  Protein classification predicting sequence
VTSSNTVAGQAAAGSG

SEQ ID NO: 68619 - protein, 8 aa, Artificial sequence
  Protein classification predicting sequence
NAGHTIVV

SEQ ID NO: 68620 - protein, 6 aa, Artificial sequence
  Protein classification predicting sequence
DHGTYP

SEQ ID NO: 68621 - protein, 7 aa, Artificial sequence
  Protein classification predicting sequence
IDRVIGV

SEQ ID NO: 68622 - protein, 8 aa, Artificial sequence
  Protein classification predicting sequence
KAYTTRVG

SEQ ID NO: 68623 - protein, 8 aa, Artificial sequence
  Protein classification predicting sequence
EFGTTTGR

SEQ ID NO: 68624 - protein, 14 aa, Artificial sequence
  Protein classification predicting sequence
QWGDEGKGKIVDLL

SEQ ID NO: 68625 - protein, 6 aa, Artificial sequence
  Protein classification predicting sequence
VRYQGG

SEQ ID NO: 68626 - protein, 9 aa, Artificial sequence
  Protein classification predicting sequence
EGGQATMLD

SEQ ID NO: 68627 - protein, 6 aa, Artificial sequence
  Protein classification predicting sequence
TGRRRR

SEQ ID NO: 68628 - protein, 6 aa, Artificial sequence
  Protein classification predicting sequence
VILPYH

SEQ ID NO: 68629 - protein, 7 aa, Artificial sequence
  Protein classification predicting sequence
KGIGPAY

SEQ ID NO: 68630 - protein, 14 aa, Artificial sequence
  Protein classification predicting sequence
YVCDTSVVLNDALD

SEQ ID NO: 68631 - protein, 14 aa, Artificial sequence
  Protein classification predicting sequence
GTYPFVTSSNPIAG

SEQ ID NO: 68632 - protein, 19 aa, Artificial sequence
  Protein classification predicting sequence
GVCKAYTSRVGDGPFPTEL

SEQ ID NO: 68633 - protein, 7 aa, Artificial sequence
  Protein classification predicting sequence
GPFPTEL

SEQ ID NO: 68634 - protein, 34 aa, Artificial sequence
  Protein classification predicting sequence
EYGTTTGRPRRVGWFDSVVVRHARRVSGLTDLSL

SEQ ID NO: 68635 - protein, 6 aa, Artificial sequence
  Protein classification predicting sequence
EELPGW

SEQ ID NO: 68636 - protein, 7 aa, Artificial sequence
  Protein classification predicting sequence
ELPENAR

SEQ ID NO: 68637 - protein, 17 aa, Artificial sequence
  Protein classification predicting sequence
VVVGTQWGDEGKGKITD

SEQ ID NO: 68638 - protein, 12 aa, Artificial sequence
  Protein classification predicting sequence
QWGDEGKGKITD

SEQ ID NO: 68639 - protein, 13 aa, Artificial sequence
  Protein classification predicting sequence
VDTSNLRISNRAH

SEQ ID NO: 68640 - protein, 13 aa, Artificial sequence
  Protein classification predicting sequence
KGIGPAYMDKAAR

SEQ ID NO: 68641 - protein, 27 aa, Artificial sequence
  Protein classification predicting sequence
RVLFEGAQGVMLDIDQGTYPFVTSSNP

SEQ ID NO: 68642 - protein, 6 aa, Artificial sequence
  Protein classification predicting sequence
VTSSNP

SEQ ID NO: 68643 - protein, 7 aa, Artificial sequence
  Protein classification predicting sequence
RRVSGIT

SEQ ID NO: 68644 - protein, 7 aa, Artificial sequence
  Protein classification predicting sequence
EFPASLK

SEQ ID NO: 68645 - protein, 7 aa, Artificial sequence
  Protein classification predicting sequence
IARYQGG

SEQ ID NO: 68646 - protein, 14 aa, Artificial sequence
  Protein classification predicting sequence
VIGNGMVVDPKALV

SEQ ID NO: 68647 - protein, 7 aa, Artificial sequence
  Protein classification predicting sequence
TDNLRIS

SEQ ID NO: 68648 - protein, 18 aa, Artificial sequence
  Protein classification predicting sequence
RVGWFDSVVVRHARRVSG

SEQ ID NO: 68649 - protein, 9 aa, Artificial sequence
  Protein classification predicting sequence
LSLNSIDVL

SEQ ID NO: 68650 - protein, 6 aa, Artificial sequence
  Protein classification predicting sequence
GIGPTY

SEQ ID NO: 68651 - protein, 5 aa, Artificial sequence
  Protein classification predicting sequence
RRCGW

SEQ ID NO: 68652 - protein, 7 aa, Artificial sequence
  Protein classification predicting sequence
GGNNAGH

SEQ ID NO: 68653 - protein, 7 aa, Artificial sequence
  Protein classification predicting sequence
YADKINR

SEQ ID NO: 68654 - protein, 6 aa, Artificial sequence
  Protein classification predicting sequence
LILPYH

SEQ ID NO: 68655 - protein, 13 aa, Artificial sequence
  Protein classification predicting sequence
GIGPAYEDKVARR

SEQ ID NO: 68656 - protein, 17 aa, Artificial sequence
  Protein classification predicting sequence
GIGPAYEDKVARRALRV

SEQ ID NO: 68657 - protein, 8 aa, Artificial sequence
  Protein classification predicting sequence
ARKRGDKI

SEQ ID NO: 68658 - protein, 9 aa, Artificial sequence
  Protein classification predicting sequence
GTYPYVTSS

SEQ ID NO: 68659 - protein, 8 aa, Artificial sequence
  Protein classification predicting sequence
KAYSTRVG

SEQ ID NO: 68660 - protein, 7 aa, Artificial sequence
  Protein classification predicting sequence
TTGRRRR

SEQ ID NO: 68661 - protein, 6 aa, Artificial sequence
  Protein classification predicting sequence
GWFDAV

SEQ ID NO: 68662 - protein, 10 aa, Artificial sequence
  Protein classification predicting sequence
IGTTGRGIGP

SEQ ID NO: 68663 - protein, 19 aa, Artificial sequence
  Protein classification predicting sequence
VVRFQGGHNAGHTLVINGK

SEQ ID NO: 68664 - protein, 10 aa, Artificial sequence
  Protein classification predicting sequence
QGGHNAGHTL

SEQ ID NO: 68665 - protein, 11 aa, Artificial sequence
  Protein classification predicting sequence
LFEGAQGALLD

SEQ ID NO: 68666 - protein, 10 aa, Artificial sequence
  Protein classification predicting sequence
LLDVDHGTYP

SEQ ID NO: 68667 - protein, 7 aa, Artificial sequence
  Protein classification predicting sequence
VEPIYET

SEQ ID NO: 68668 - protein, 7 aa, Artificial sequence
  Protein classification predicting sequence
RIEELVG

SEQ ID NO: 68669 - protein, 7 aa, Artificial sequence
  Protein classification predicting sequence
LSTSPER

SEQ ID NO: 68670 - protein, 13 aa, Artificial sequence
  Protein classification predicting sequence
LSTSPEREDTILV

SEQ ID NO: 68671 - protein, 9 aa, Artificial sequence
  Protein classification predicting sequence
QWGDEGKGK

SEQ ID NO: 68672 - protein, 7 aa, Artificial sequence
  Protein classification predicting sequence
RRTGWLD

SEQ ID NO: 68673 - protein, 10 aa, Artificial sequence
  Protein classification predicting sequence
LCITKLDVLD

SEQ ID NO: 68674 - protein, 7 aa, Artificial sequence
  Protein classification predicting sequence
TKLDVLD

SEQ ID NO: 68675 - protein, 18 aa, Artificial sequence
  Protein classification predicting sequence
GNEFGATTGRRRRTGWLD

SEQ ID NO: 68676 - protein, 9 aa, Artificial sequence
  Protein classification predicting sequence
LDIDHGTYP

SEQ ID NO: 68677 - protein, 11 aa, Artificial sequence
  Protein classification predicting sequence
RGIGPAYEDKV

SEQ ID NO: 68678 - protein, 8 aa, Artificial sequence
  Protein classification predicting sequence
EVGVNTGR

SEQ ID NO: 68679 - protein, 7 aa, Artificial sequence
  Protein classification predicting sequence
GDEGKGK

SEQ ID NO: 68680 - protein, 7 aa, Artificial sequence
  Protein classification predicting sequence
VVRYQGG

SEQ ID NO: 68681 - protein, 9 aa, Artificial sequence
  Protein classification predicting sequence
QGGANAGHT

SEQ ID NO: 68682 - protein, 10 aa, Artificial sequence
  Protein classification predicting sequence
VIGNGVVIDP

SEQ ID NO: 68683 - protein, 8 aa, Artificial sequence
  Protein classification predicting sequence
LHLIPSGI

SEQ ID NO: 68684 - protein, 11 aa, Artificial sequence
  Protein classification predicting sequence
GAQWGDEGKGK

SEQ ID NO: 68685 - protein, 8 aa, Artificial sequence
  Protein classification predicting sequence
GTYPYVTS

SEQ ID NO: 68686 - protein, 14 aa, Artificial sequence
  Protein classification predicting sequence
GAQWGDEGKGKATD

SEQ ID NO: 68687 - protein, 7 aa, Artificial sequence
  Protein classification predicting sequence
PIYETMP

SEQ ID NO: 68688 - protein, 7 aa, Artificial sequence
  Protein classification predicting sequence
KNQVLVK

SEQ ID NO: 68689 - protein, 11 aa, Artificial sequence
  Protein classification predicting sequence
KTILRLIPSGI

SEQ ID NO: 68690 - protein, 6 aa, Artificial sequence
  Protein classification predicting sequence
ISDRAH

SEQ ID NO: 68691 - protein, 14 aa, Artificial sequence
  Protein classification predicting sequence
VVLGAQWGDEGKGK

SEQ ID NO: 68692 - protein, 10 aa, Artificial sequence
  Protein classification predicting sequence
IGNGVVIHLP

SEQ ID NO: 68693 - protein, 8 aa, Artificial sequence
  Protein classification predicting sequence
SEACPLIL

SEQ ID NO: 68694 - protein, 16 aa, Artificial sequence
  Protein classification predicting sequence
NVVVLGTQWGDEGKGK

SEQ ID NO: 68695 - protein, 12 aa, Artificial sequence
  Protein classification predicting sequence
QWGDEGKGKVVD

SEQ ID NO: 68696 - protein, 45 aa, Artificial sequence
  Protein classification predicting sequence
VDLLTERAKYVVRYQGGHNAGHTLVINGEKTVLHLIPSGILRENV

SEQ ID NO: 68697 - protein, 10 aa, Artificial sequence
  Protein classification predicting sequence
NGVVLAPDAL

SEQ ID NO: 68698 - protein, 16 aa, Artificial sequence
  Protein classification predicting sequence
PVRERLLLSEACPLIL

SEQ ID NO: 68699 - protein, 10 aa, Artificial sequence
  Protein classification predicting sequence
LTKLDVLDGL

SEQ ID NO: 68700 - protein, 6 aa, Artificial sequence
  Protein classification predicting sequence
NAGHTI

SEQ ID NO: 68701 - protein, 34 aa, Artificial sequence
  Protein classification predicting sequence
NAGHTIKFDGVTYKLHLIPSGIFYKEKISVIGNG

SEQ ID NO: 68702 - protein, 23 aa, Artificial sequence
  Protein classification predicting sequence
KISVIGNGVVVNPKSLVKELAYL

SEQ ID NO: 68703 - protein, 10 aa, Artificial sequence
  Protein classification predicting sequence
LDQLQEDAKG

SEQ ID NO: 68704 - protein, 6 aa, Artificial sequence
  Protein classification predicting sequence
NKIGTT

SEQ ID NO: 68705 - protein, 22 aa, Artificial sequence
  Protein classification predicting sequence
GVCKAYTSRVGDGPFPTELFDE

SEQ ID NO: 68706 - protein, 10 aa, Artificial sequence
  Protein classification predicting sequence
GPFPTELFDE

SEQ ID NO: 68707 - protein, 19 aa, Artificial sequence
  Protein classification predicting sequence
EYGTTTGRPRRVGWFDSVV

SEQ ID NO: 68708 - protein, 12 aa, Artificial sequence
  Protein classification predicting sequence
TVKICTAYELDG

SEQ ID NO: 68709 - protein, 7 aa, Artificial sequence
  Protein classification predicting sequence
YEELPGW

SEQ ID NO: 68710 - protein, 14 aa, Artificial sequence
  Protein classification predicting sequence
ELVGVRISTFSVGP

SEQ ID NO: 68711 - protein, 15 aa, Artificial sequence
  Protein classification predicting sequence
VVVGTQWGDEGKGKI

SEQ ID NO: 68712 - protein, 12 aa, Artificial sequence
  Protein classification predicting sequence
GTQWGDEGKGKI

SEQ ID NO: 68713 - protein, 10 aa, Artificial sequence
  Protein classification predicting sequence
QWGDEGKGKI

SEQ ID NO: 68714 - protein, 9 aa, Artificial sequence
  Protein classification predicting sequence
QGGNNAGHT

SEQ ID NO: 68715 - protein, 9 aa, Artificial sequence
  Protein classification predicting sequence
TGRPRRCGW

SEQ ID NO: 68716 - protein, 7 aa, Artificial sequence
  Protein classification predicting sequence
IDVLSGL

SEQ ID NO: 68717 - protein, 16 aa, Artificial sequence
  Protein classification predicting sequence
IGTTGRGIGPTYADKS

SEQ ID NO: 68718 - protein, 16 aa, Artificial sequence
  Protein classification predicting sequence
KAYTTRVGEGPFPTEL

SEQ ID NO: 68719 - protein, 19 aa, Artificial sequence
  Protein classification predicting sequence
IGTTGRGIGPAYEDKVARR

SEQ ID NO: 68720 - protein, 12 aa, Artificial sequence
  Protein classification predicting sequence
RRCGWFDAVAVR

SEQ ID NO: 68721 - protein, 29 aa, Artificial sequence
  Protein classification predicting sequence
KAIGTTGRGIGPAYEDKVARRGLRVGDLF

SEQ ID NO: 68722 - protein, 8 aa, Artificial sequence
  Protein classification predicting sequence
TRVGGGPF

SEQ ID NO: 68723 - protein, 8 aa, Artificial sequence
  Protein classification predicting sequence
GVEPIYET

SEQ ID NO: 68724 - protein, 6 aa, Artificial sequence
  Protein classification predicting sequence
GDEGKG

SEQ ID NO: 68725 - protein, 7 aa, Artificial sequence
  Protein classification predicting sequence
RAHVILP

SEQ ID NO: 68726 - protein, 9 aa, Artificial sequence
  Protein classification predicting sequence
GTTGRGIGP

SEQ ID NO: 68727 - protein, 15 aa, Artificial sequence
  Protein classification predicting sequence
YPYVTSSNPTAGGAA

SEQ ID NO: 68728 - protein, 7 aa, Artificial sequence
  Protein classification predicting sequence
IGVGPGR

SEQ ID NO: 68729 - protein, 9 aa, Artificial sequence
  Protein classification predicting sequence
DVVVRYQGG

SEQ ID NO: 68730 - protein, 9 aa, Artificial sequence
  Protein classification predicting sequence
VTSSNPTAG

SEQ ID NO: 68731 - protein, 9 aa, Artificial sequence
  Protein classification predicting sequence
GNGVVINLE

SEQ ID NO: 68732 - protein, 9 aa, Artificial sequence
  Protein classification predicting sequence
RAHIILPYH

SEQ ID NO: 68733 - protein, 9 aa, Artificial sequence
  Protein classification predicting sequence
RRCGWFDAV

SEQ ID NO: 68734 - protein, 6 aa, Artificial sequence
  Protein classification predicting sequence
EFGTTT

SEQ ID NO: 68735 - protein, 7 aa, Artificial sequence
  Protein classification predicting sequence
KLDVLDG

SEQ ID NO: 68736 - protein, 9 aa, Artificial sequence
  Protein classification predicting sequence
RAHVILPYH

SEQ ID NO: 68737 - protein, 10 aa, Artificial sequence
  Protein classification predicting sequence
VTSSNPVAGG

SEQ ID NO: 68738 - protein, 10 aa, Artificial sequence
  Protein classification predicting sequence
GWFDSVVLRH

SEQ ID NO: 68739 - protein, 15 aa, Artificial sequence
  Protein classification predicting sequence
QWGDEGKGKIVDLLT

SEQ ID NO: 68740 - protein, 7 aa, Artificial sequence
  Protein classification predicting sequence
NGVVLSP

SEQ ID NO: 68741 - protein, 7 aa, Artificial sequence
  Protein classification predicting sequence
LFEGAQG

SEQ ID NO: 68742 - protein, 18 aa, Artificial sequence
  Protein classification predicting sequence
EFGAVTGRPRRCGWFDAV

SEQ ID NO: 68743 - protein, 13 aa, Artificial sequence
  Protein classification predicting sequence
TGRPRRCGWFDAV

SEQ ID NO: 68744 - protein, 6 aa, Artificial sequence
  Protein classification predicting sequence
DKVTER

SEQ ID NO: 68745 - protein, 6 aa, Artificial sequence
  Protein classification predicting sequence
KPIYEE

SEQ ID NO: 68746 - protein, 7 aa, Artificial sequence
  Protein classification predicting sequence
QWGDEGK

SEQ ID NO: 68747 - protein, 6 aa, Artificial sequence
  Protein classification predicting sequence
STGPDR

SEQ ID NO: 68748 - protein, 8 aa, Artificial sequence
  Protein classification predicting sequence
EYYEYGQQ

SEQ ID NO: 68749 - protein, 25 aa, Artificial sequence
  Protein classification predicting sequence
IREVGHEYGTTTGRPRRVGWFDSVV

SEQ ID NO: 68750 - protein, 10 aa, Artificial sequence
  Protein classification predicting sequence
GAGVLVDPEV

SEQ ID NO: 68751 - protein, 7 aa, Artificial sequence
  Protein classification predicting sequence
IIEEKHK

SEQ ID NO: 68752 - protein, 19 aa, Artificial sequence
  Protein classification predicting sequence
LSLYYGTYPYVTSKDTTAS

SEQ ID NO: 68753 - protein, 14 aa, Artificial sequence
  Protein classification predicting sequence
FPTRVGAGPFPTEM

SEQ ID NO: 68754 - protein, 6 aa, Artificial sequence
  Protein classification predicting sequence
IISTGP

SEQ ID NO: 68755 - protein, 6 aa, Artificial sequence
  Protein classification predicting sequence
YPYVTS

SEQ ID NO: 68756 - protein, 8 aa, Artificial sequence
  Protein classification predicting sequence
DYRCAIIE

SEQ ID NO: 68757 - protein, 8 aa, Artificial sequence
  Protein classification predicting sequence
VGPGREQT

SEQ ID NO: 68758 - protein, 7 aa, Artificial sequence
  Protein classification predicting sequence
LHLIPSG

SEQ ID NO: 68759 - protein, 13 aa, Artificial sequence
  Protein classification predicting sequence
AGAASAGAGVGPQ

SEQ ID NO: 68760 - protein, 7 aa, Artificial sequence
  Protein classification predicting sequence
CITKLDV

SEQ ID NO: 68761 - protein, 6 aa, Artificial sequence
  Protein classification predicting sequence
CKPIYE

SEQ ID NO: 68762 - protein, 6 aa, Artificial sequence
  Protein classification predicting sequence
GSGVGP

SEQ ID NO: 68763 - protein, 7 aa, Artificial sequence
  Protein classification predicting sequence
ISTGPDR

SEQ ID NO: 68764 - protein, 13 aa, Artificial sequence
  Protein classification predicting sequence
ARYQGGNNAGHTI

SEQ ID NO: 68765 - protein, 10 aa, Artificial sequence
  Protein classification predicting sequence
KLHLIPSGIF

SEQ ID NO: 68766 - protein, 12 aa, Artificial sequence
  Protein classification predicting sequence
AGGVTIGSGVGP

SEQ ID NO: 68767 - protein, 14 aa, Artificial sequence
  Protein classification predicting sequence
IREVGREYGTTTGR

SEQ ID NO: 68768 - protein, 8 aa, Artificial sequence
  Protein classification predicting sequence
EYGTTTGR

SEQ ID NO: 68769 - protein, 15 aa, Artificial sequence
  Protein classification predicting sequence
DVLTGIETLKICVAY

SEQ ID NO: 68770 - protein, 9 aa, Artificial sequence
  Protein classification predicting sequence
PGWQEDITG

SEQ ID NO: 68771 - protein, 13 aa, Artificial sequence
  Protein classification predicting sequence
IGNGVVLSPAALM

SEQ ID NO: 68772 - protein, 14 aa, Artificial sequence
  Protein classification predicting sequence
NFQLVNYYKAEAVD

SEQ ID NO: 68773 - protein, 7 aa, Artificial sequence
  Protein classification predicting sequence
TGVPVDI

SEQ ID NO: 68774 - protein, 9 aa, Artificial sequence
  Protein classification predicting sequence
GIGPAYEDK

SEQ ID NO: 68775 - protein, 6 aa, Artificial sequence
  Protein classification predicting sequence
AHLIMP

SEQ ID NO: 68776 - protein, 7 aa, Artificial sequence
  Protein classification predicting sequence
GLRVGDL

SEQ ID NO: 68777 - protein, 8 aa, Artificial sequence
  Protein classification predicting sequence
EFGSVTGR

SEQ ID NO: 68778 - protein, 6 aa, Artificial sequence
  Protein classification predicting sequence
SVGPDR

SEQ ID NO: 68779 - protein, 9 aa, Artificial sequence
  Protein classification predicting sequence
SVGPDREQT

SEQ ID NO: 68780 - protein, 9 aa, Artificial sequence
  Protein classification predicting sequence
NAGHTIVVD

SEQ ID NO: 68781 - protein, 6 aa, Artificial sequence
  Protein classification predicting sequence
ETLPGW

SEQ ID NO: 68782 - protein, 6 aa, Artificial sequence
  Protein classification predicting sequence
RDQTIV

SEQ ID NO: 68783 - protein, 6 aa, Artificial sequence
  Protein classification predicting sequence
YHVALD

SEQ ID NO: 68784 - protein, 9 aa, Artificial sequence
  Protein classification predicting sequence
DIISTGPDR

SEQ ID NO: 68785 - protein, 10 aa, Artificial sequence
  Protein classification predicting sequence
KTVLHLIPSG

SEQ ID NO: 68786 - protein, 11 aa, Artificial sequence
  Protein classification predicting sequence
KELEPYLTDVA

SEQ ID NO: 68787 - protein, 7 aa, Artificial sequence
  Protein classification predicting sequence
TMLDKYD

SEQ ID NO: 68788 - protein, 12 aa, Artificial sequence
  Protein classification predicting sequence
EAFGVTDYDKLP

SEQ ID NO: 68789 - protein, 22 aa, Artificial sequence
  Protein classification predicting sequence
EEIEERVGVPVGLIKTGPELEH

SEQ ID NO: 68790 - protein, 20 aa, Artificial sequence
  Protein classification predicting sequence
KIGTTGRGIGPAYEDKVARR

SEQ ID NO: 68791 - protein, 28 aa, Artificial sequence
  Protein classification predicting sequence
KIGTTGRGIGPAYEDKVARRALRVQDLF

SEQ ID NO: 68792 - protein, 7 aa, Artificial sequence
  Protein classification predicting sequence
RRAIQIN

SEQ ID NO: 68793 - protein, 15 aa, Artificial sequence
  Protein classification predicting sequence
RGIGPAYEDKVGRRA

SEQ ID NO: 68794 - protein, 7 aa, Artificial sequence
  Protein classification predicting sequence
ELTSVAD

SEQ ID NO: 68795 - protein, 24 aa, Artificial sequence
  Protein classification predicting sequence
AIGYVLGITKAYTTRVGEGPFPTE

SEQ ID NO: 68796 - protein, 15 aa, Artificial sequence
  Protein classification predicting sequence
KAYTTRVGEGPFPTE

SEQ ID NO: 68797 - protein, 8 aa, Artificial sequence
  Protein classification predicting sequence
EIGEFLGT

SEQ ID NO: 68798 - protein, 20 aa, Artificial sequence
  Protein classification predicting sequence
GHEFGVVTGRKRRCGWFDAV

SEQ ID NO: 68799 - protein, 13 aa, Artificial sequence
  Protein classification predicting sequence
TGRKRRCGWFDAV

SEQ ID NO: 68800 - protein, 20 aa, Artificial sequence
  Protein classification predicting sequence
TTAGARSWNDLPAQAVKYVR

SEQ ID NO: 68801 - protein, 9 aa, Artificial sequence
  Protein classification predicting sequence
EELIGAPVA

SEQ ID NO: 68802 - protein, 26 aa, Artificial sequence
  Protein classification predicting sequence
NVVVVGSQWGDEGKGKIVDWLSERAD

SEQ ID NO: 68803 - protein, 5 aa, Artificial sequence
  Protein classification predicting sequence
RCQGG

SEQ ID NO: 68804 - protein, 8 aa, Artificial sequence
  Protein classification predicting sequence
GGNNAGHT

SEQ ID NO: 68805 - protein, 7 aa, Artificial sequence
  Protein classification predicting sequence
VTSSNTT

SEQ ID NO: 68806 - protein, 10 aa, Artificial sequence
  Protein classification predicting sequence
TVGGVCTGLG

SEQ ID NO: 68807 - protein, 13 aa, Artificial sequence
  Protein classification predicting sequence
KTVLHLIPSGILR

SEQ ID NO: 68808 - protein, 10 aa, Artificial sequence
  Protein classification predicting sequence
RRGLRVGDLF

SEQ ID NO: 68809 - protein, 9 aa, Artificial sequence
  Protein classification predicting sequence
FAEKLKEVM

SEQ ID NO: 68810 - protein, 13 aa, Artificial sequence
  Protein classification predicting sequence
YETMPGWSESTFG

SEQ ID NO: 68811 - protein, 9 aa, Artificial sequence
  Protein classification predicting sequence
TRVGAGPFP

SEQ ID NO: 68812 - protein, 7 aa, Artificial sequence
  Protein classification predicting sequence
ELFDETG

SEQ ID NO: 68813 - protein, 6 aa, Artificial sequence
  Protein classification predicting sequence
GIGPCY

SEQ ID NO: 68814 - protein, 7 aa, Artificial sequence
  Protein classification predicting sequence
AQGVMLD

SEQ ID NO: 68815 - protein, 14 aa, Artificial sequence
  Protein classification predicting sequence
VLFEGAQGVMLDID

SEQ ID NO: 68816 - protein, 10 aa, Artificial sequence
  Protein classification predicting sequence
RHSRRVSGIT

SEQ ID NO: 68817 - protein, 8 aa, Artificial sequence
  Protein classification predicting sequence
QLKRCKPI

SEQ ID NO: 68818 - protein, 20 aa, Artificial sequence
  Protein classification predicting sequence
RGDNKIGTTKKGIGPAYVDK

SEQ ID NO: 68819 - protein, 18 aa, Artificial sequence
  Protein classification predicting sequence
QRIGIRMADLLEKETFER

SEQ ID NO: 68820 - protein, 10 aa, Artificial sequence
  Protein classification predicting sequence
FKGMFNETCP

SEQ ID NO: 68821 - protein, 10 aa, Artificial sequence
  Protein classification predicting sequence
EYYAAGQRLK

SEQ ID NO: 68822 - protein, 13 aa, Artificial sequence
  Protein classification predicting sequence
DHGTYPFVTSSNP

SEQ ID NO: 68823 - protein, 13 aa, Artificial sequence
  Protein classification predicting sequence
AGNVTVGTGVGPT

SEQ ID NO: 68824 - protein, 9 aa, Artificial sequence
  Protein classification predicting sequence
VSKVIGVCK

SEQ ID NO: 68825 - protein, 9 aa, Artificial sequence
  Protein classification predicting sequence
EELPGWTED

SEQ ID NO: 68826 - protein, 8 aa, Artificial sequence
  Protein classification predicting sequence
LPENARNY

SEQ ID NO: 68827 - protein, 9 aa, Artificial sequence
  Protein classification predicting sequence
YLERISELC

SEQ ID NO: 68828 - protein, 16 aa, Artificial sequence
  Protein classification predicting sequence
ISIFSVGPDREQTNLL

SEQ ID NO: 68829 - protein, 64 aa, Artificial sequence
  Protein classification predicting sequence
DVIARFSGGNNAGHTIQFGGETYKLHLVPSGIFYKDKLAVIGNGVVVDPVALLKELDGLNERGI

SEQ ID NO: 68830 - protein, 24 aa, Artificial sequence
  Protein classification predicting sequence
NLRISNRAQVILPYHLAQDEYEER

SEQ ID NO: 68831 - protein, 31 aa, Artificial sequence
  Protein classification predicting sequence
VADEKVLFEGAQGVMLDIDHGTYPFVTSSNP

SEQ ID NO: 68832 - protein, 83 aa, Artificial sequence
  Protein classification predicting sequence
YTSRVGDGPFPTELFDEDGHHIREVGREYGTTTGRPRRVGWFDSVVLRHSRRVSGITDLSINSIDVLTGLDTVKICTAYELDG

SEQ ID NO: 68833 - protein, 8 aa, Artificial sequence
  Protein classification predicting sequence
KISVIGNG

SEQ ID NO: 68834 - protein, 19 aa, Artificial sequence
  Protein classification predicting sequence
INLAEKNRLFEKMYDSTPL

SEQ ID NO: 68835 - protein, 6 aa, Artificial sequence
  Protein classification predicting sequence
LPGWSE

SEQ ID NO: 68836 - protein, 36 aa, Artificial sequence
  Protein classification predicting sequence
AEVIARYQGGDNAGHTIVIDGKKFKLHLIPSGIFFP

SEQ ID NO: 68837 - protein, 21 aa, Artificial sequence
  Protein classification predicting sequence
GVCKAYTSRVGDGPFPTELFD

SEQ ID NO: 68838 - protein, 9 aa, Artificial sequence
  Protein classification predicting sequence
GPFPTELFD

SEQ ID NO: 68839 - protein, 11 aa, Artificial sequence
  Protein classification predicting sequence
VKICVAYDLDG

SEQ ID NO: 68840 - protein, 9 aa, Artificial sequence
  Protein classification predicting sequence
QTNILESVW

SEQ ID NO: 68841 - protein, 7 aa, Artificial sequence
  Protein classification predicting sequence
RIDYYPA

SEQ ID NO: 68842 - protein, 17 aa, Artificial sequence
  Protein classification predicting sequence
LEQLKRCKPIYEELPGW

SEQ ID NO: 68843 - protein, 11 aa, Artificial sequence
  Protein classification predicting sequence
VVNPKSLVKEL

SEQ ID NO: 68844 - protein, 6 aa, Artificial sequence
  Protein classification predicting sequence
ILPYHI

SEQ ID NO: 68845 - protein, 9 aa, Artificial sequence
  Protein classification predicting sequence
FDDIFEEYY

SEQ ID NO: 68846 - protein, 7 aa, Artificial sequence
  Protein classification predicting sequence
RRCGWFD

SEQ ID NO: 68847 - protein, 10 aa, Artificial sequence
  Protein classification predicting sequence
VPIAIVSLGA

SEQ ID NO: 68848 - protein, 27 aa, Artificial sequence
  Protein classification predicting sequence
VIGAQWGDEGKGKITDLLSRSADVVVR

SEQ ID NO: 68849 - protein, 7 aa, Artificial sequence
  Protein classification predicting sequence
TAHVTMP

SEQ ID NO: 68850 - protein, 7 aa, Artificial sequence
  Protein classification predicting sequence
IGVAKAY

SEQ ID NO: 68851 - protein, 9 aa, Artificial sequence
  Protein classification predicting sequence
KLHLIPSGI

SEQ ID NO: 68852 - protein, 6 aa, Artificial sequence
  Protein classification predicting sequence
RIGIRM

SEQ ID NO: 68853 - protein, 12 aa, Artificial sequence
  Protein classification predicting sequence
ILFEGAQGTLLD

SEQ ID NO: 68854 - protein, 10 aa, Artificial sequence
  Protein classification predicting sequence
GDEGKGKITD

SEQ ID NO: 68855 - protein, 8 aa, Artificial sequence
  Protein classification predicting sequence
VIGVAKAY

SEQ ID NO: 68856 - protein, 12 aa, Artificial sequence
  Protein classification predicting sequence
DLFHRERFAAKL

SEQ ID NO: 68857 - protein, 8 aa, Artificial sequence
  Protein classification predicting sequence
LDYHNFVL

SEQ ID NO: 68858 - protein, 7 aa, Artificial sequence
  Protein classification predicting sequence
VGYRVNG

SEQ ID NO: 68859 - protein, 5 aa, Artificial sequence
  Protein classification predicting sequence
PGWSE

SEQ ID NO: 68860 - protein, 14 aa, Artificial sequence
  Protein classification predicting sequence
GTTGRGIGPTYADK

SEQ ID NO: 68861 - protein, 6 aa, Artificial sequence
  Protein classification predicting sequence
LDVDHG

SEQ ID NO: 68862 - protein, 9 aa, Artificial sequence
  Protein classification predicting sequence
IGNGVVLSP

SEQ ID NO: 68863 - protein, 12 aa, Artificial sequence
  Protein classification predicting sequence
TRVGAGPFPTEL

SEQ ID NO: 68864 - protein, 6 aa, Artificial sequence
  Protein classification predicting sequence
KICTGY

SEQ ID NO: 68865 - protein, 7 aa, Artificial sequence
  Protein classification predicting sequence
PGWSETT

SEQ ID NO: 68866 - protein, 12 aa, Artificial sequence
  Protein classification predicting sequence
YIKRIEELTGVP

SEQ ID NO: 68867 - protein, 6 aa, Artificial sequence
  Protein classification predicting sequence
LVNYYK

SEQ ID NO: 68868 - protein, 37 aa, Artificial sequence
  Protein classification predicting sequence
GKHLGTVGHEFGATTGRLRRTGWFDAVAMRRAIQINS

SEQ ID NO: 68869 - protein, 12 aa, Artificial sequence
  Protein classification predicting sequence
LEVSPMAAEAFE

SEQ ID NO: 68870 - protein, 9 aa, Artificial sequence
  Protein classification predicting sequence
YETMPGWSE

SEQ ID NO: 68871 - protein, 11 aa, Artificial sequence
  Protein classification predicting sequence
PIDIISTGPDR

SEQ ID NO: 68872 - protein, 12 aa, Artificial sequence
  Protein classification predicting sequence
IGNGVVLSPEAL

SEQ ID NO: 68873 - protein, 10 aa, Artificial sequence
  Protein classification predicting sequence
FAEKLKEVME

SEQ ID NO: 68874 - protein, 15 aa, Artificial sequence
  Protein classification predicting sequence
VRYQGGHNAGHTLVI

SEQ ID NO: 68875 - protein, 17 aa, Artificial sequence
  Protein classification predicting sequence
VRYQGGHNAGHTLVIDG

SEQ ID NO: 68876 - protein, 46 aa, Artificial sequence
  Protein classification predicting sequence
NNVVVLGTQWGDEGKGKIVDLLTEDAKYVVRYQGGHNAGHTLVIDG

SEQ ID NO: 68877 - protein, 9 aa, Artificial sequence
  Protein classification predicting sequence
RRRRCGWFD

SEQ ID NO: 68878 - protein, 10 aa, Artificial sequence
  Protein classification predicting sequence
VIGNGVVVNP

SEQ ID NO: 68879 - protein, 8 aa, Artificial sequence
  Protein classification predicting sequence
KAYCTRVG

SEQ ID NO: 68880 - protein, 12 aa, Artificial sequence
  Protein classification predicting sequence
LGAQWGDEGKGK

SEQ ID NO: 68881 - protein, 12 aa, Artificial sequence
  Protein classification predicting sequence
QWGDEGKGKIVD

SEQ ID NO: 68882 - protein, 11 aa, Artificial sequence
  Protein classification predicting sequence
GKRVLFEGAQG

SEQ ID NO: 68883 - protein, 16 aa, Artificial sequence
  Protein classification predicting sequence
NGISGLCITKLDVLDG

SEQ ID NO: 68884 - protein, 12 aa, Artificial sequence
  Protein classification predicting sequence
GLCITKLDVLDG

SEQ ID NO: 68885 - protein, 6 aa, Artificial sequence
  Protein classification predicting sequence
GNGVVI

SEQ ID NO: 68886 - protein, 40 aa, Artificial sequence
  Protein classification predicting sequence
YHVALDNAREKARGAKAIGTTGRGIGPAYEDKVARRGLRV

SEQ ID NO: 68887 - protein, 31 aa, Artificial sequence
  Protein classification predicting sequence
MFEGAQGTLLDIDHGTYPYVTSSNTTAGGVA

SEQ ID NO: 68888 - protein, 16 aa, Artificial sequence
  Protein classification predicting sequence
TKLDVLDGLKEVKLCV

SEQ ID NO: 68889 - protein, 9 aa, Artificial sequence
  Protein classification predicting sequence
LPQAALNYI

SEQ ID NO: 68890 - protein, 20 aa, Artificial sequence
  Protein classification predicting sequence
TATGALPLAATDNLNFGNPE

SEQ ID NO: 68891 - protein, 10 aa, Artificial sequence
  Protein classification predicting sequence
TDNLNFGNPE

SEQ ID NO: 68892 - protein, 8 aa, Artificial sequence
  Protein classification predicting sequence
MALGLMET

SEQ ID NO: 68893 - protein, 6 aa, Artificial sequence
  Protein classification predicting sequence
GIGNPV

SEQ ID NO: 68894 - protein, 7 aa, Artificial sequence
  Protein classification predicting sequence
QDMGAAG

SEQ ID NO: 68895 - protein, 7 aa, Artificial sequence
  Protein classification predicting sequence
VAEAARN

SEQ ID NO: 68896 - protein, 9 aa, Artificial sequence
  Protein classification predicting sequence
GAATGVGGI

SEQ ID NO: 68897 - protein, 12 aa, Artificial sequence
  Protein classification predicting sequence
GVVSGISFYGNC

SEQ ID NO: 68898 - protein, 6 aa, Artificial sequence
  Protein classification predicting sequence
YGNCIG

SEQ ID NO: 68899 - protein, 6 aa, Artificial sequence
  Protein classification predicting sequence
VQIGDP

SEQ ID NO: 68900 - protein, 6 aa, Artificial sequence
  Protein classification predicting sequence
QYDYQV

SEQ ID NO: 68901 - protein, 7 aa, Artificial sequence
  Protein classification predicting sequence
LNFGNPE

SEQ ID NO: 68902 - protein, 12 aa, Artificial sequence
  Protein classification predicting sequence
LNFGNPERPEIM

SEQ ID NO: 68903 - protein, 5 aa, Artificial sequence
  Protein classification predicting sequence
WSEHC

SEQ ID NO: 68904 - protein, 5 aa, Artificial sequence
  Protein classification predicting sequence
YKSSK

SEQ ID NO: 68905 - protein, 13 aa, Artificial sequence
  Protein classification predicting sequence
TGRDGIHGVTFAS

SEQ ID NO: 68906 - protein, 6 aa, Artificial sequence
  Protein classification predicting sequence
QYDHEV

SEQ ID NO: 68907 - protein, 22 aa, Artificial sequence
  Protein classification predicting sequence
LAAVTMGKVTEDKMLRLFHKGE

SEQ ID NO: 68908 - protein, 7 aa, Artificial sequence
  Protein classification predicting sequence
GSELQKM

SEQ ID NO: 68909 - protein, 29 aa, Artificial sequence
  Protein classification predicting sequence
AIQAGLVQSAHDVAEGGLAVAISESAIGA

SEQ ID NO: 68910 - protein, 10 aa, Artificial sequence
  Protein classification predicting sequence
VEAIQVGEVT

SEQ ID NO: 68911 - protein, 10 aa, Artificial sequence
  Protein classification predicting sequence
EMGLTDEEFA

SEQ ID NO: 68912 - protein, 16 aa, Artificial sequence
  Protein classification predicting sequence
YLFEEVVAGIAGYGNC

SEQ ID NO: 68913 - protein, 28 aa, Artificial sequence
  Protein classification predicting sequence
GMTPYEMMLSESQERMLIVVKKGREQEI

SEQ ID NO: 68914 - protein, 7 aa, Artificial sequence
  Protein classification predicting sequence
WVYEQYD

SEQ ID NO: 68915 - protein, 6 aa, Artificial sequence
  Protein classification predicting sequence
QYDYMV

SEQ ID NO: 68916 - protein, 8 aa, Artificial sequence
  Protein classification predicting sequence
DGMSEACR

SEQ ID NO: 68917 - protein, 8 aa, Artificial sequence
  Protein classification predicting sequence
GNVSLYNE

SEQ ID NO: 68918 - protein, 6 aa, Artificial sequence
  Protein classification predicting sequence
AVYPTP

SEQ ID NO: 68919 - protein, 6 aa, Artificial sequence
  Protein classification predicting sequence
ESQSRF

SEQ ID NO: 68920 - protein, 10 aa, Artificial sequence
  Protein classification predicting sequence
ESQSRFLVSV

SEQ ID NO: 68921 - protein, 53 aa, Artificial sequence
  Protein classification predicting sequence
GGKIAVAEAARNIVCSGGEPLAITDCLNFGNPEKPEIFWQIEKSVDGMSEACR

SEQ ID NO: 68922 - protein, 9 aa, Artificial sequence
  Protein classification predicting sequence
GNTVMYVGA

SEQ ID NO: 68923 - protein, 16 aa, Artificial sequence
  Protein classification predicting sequence
QPTIASKEWVYDQYDY

SEQ ID NO: 68924 - protein, 11 aa, Artificial sequence
  Protein classification predicting sequence
LNFGNPEKPEI

SEQ ID NO: 68925 - protein, 9 aa, Artificial sequence
  Protein classification predicting sequence
IEKAADGIS

SEQ ID NO: 68926 - protein, 6 aa, Artificial sequence
  Protein classification predicting sequence
GSELQK

SEQ ID NO: 68927 - protein, 6 aa, Artificial sequence
  Protein classification predicting sequence
LFSETQ

SEQ ID NO: 68928 - protein, 10 aa, Artificial sequence
  Protein classification predicting sequence
RDVFSMGARP

SEQ ID NO: 68929 - protein, 14 aa, Artificial sequence
  Protein classification predicting sequence
PTVGGEVQFDPCYE

SEQ ID NO: 68930 - protein, 11 aa, Artificial sequence
  Protein classification predicting sequence
SSSAEMASKAG

SEQ ID NO: 68931 - protein, 7 aa, Artificial sequence
  Protein classification predicting sequence
QPTIASK

SEQ ID NO: 68932 - protein, 7 aa, Artificial sequence
  Protein classification predicting sequence
PGSDAAV

SEQ ID NO: 68933 - protein, 9 aa, Artificial sequence
  Protein classification predicting sequence
DPEMGGKIA

SEQ ID NO: 68934 - protein, 6 aa, Artificial sequence
  Protein classification predicting sequence
LRKFPT

SEQ ID NO: 68935 - protein, 26 aa, Artificial sequence
  Protein classification predicting sequence
GERVLQGPGEGAGIVDIGDNQAVVFK

SEQ ID NO: 68936 - protein, 16 aa, Artificial sequence
  Protein classification predicting sequence
EPYQGAATGVGGIIRD

SEQ ID NO: 68937 - protein, 34 aa, Artificial sequence
  Protein classification predicting sequence
SPRVKYLFEEVVAGIAGYGNCIGIPTVGGEVQFD

SEQ ID NO: 68938 - protein, 25 aa, Artificial sequence
  Protein classification predicting sequence
YEGNPLVNAMCVGLINHEDIKKGQA

SEQ ID NO: 68939 - protein, 10 aa, Artificial sequence
  Protein classification predicting sequence
WKGAIPCLLK

SEQ ID NO: 68940 - protein, 7 aa, Artificial sequence
  Protein classification predicting sequence
AGVVDIG

SEQ ID NO: 68941 - protein, 9 aa, Artificial sequence
  Protein classification predicting sequence
AAMNALRFG

SEQ ID NO: 68942 - protein, 12 aa, Artificial sequence
  Protein classification predicting sequence
EKRPTVQVGDPF

SEQ ID NO: 68943 - protein, 6 aa, Artificial sequence
  Protein classification predicting sequence
DVTPRY

SEQ ID NO: 68944 - protein, 9 aa, Artificial sequence
  Protein classification predicting sequence
EPYQGAATG

SEQ ID NO: 68945 - protein, 6 aa, Artificial sequence
  Protein classification predicting sequence
MASAEF

SEQ ID NO: 68946 - protein, 12 aa, Artificial sequence
  Protein classification predicting sequence
EKCLLEACLELM

SEQ ID NO: 68947 - protein, 9 aa, Artificial sequence
  Protein classification predicting sequence
REENMTAYE

SEQ ID NO: 68948 - protein, 11 aa, Artificial sequence
  Protein classification predicting sequence
DVTPRYCEADP

SEQ ID NO: 68949 - protein, 7 aa, Artificial sequence
  Protein classification predicting sequence
EGGKQAV

SEQ ID NO: 68950 - protein, 6 aa, Artificial sequence
  Protein classification predicting sequence
GATPLA

SEQ ID NO: 68951 - protein, 8 aa, Artificial sequence
  Protein classification predicting sequence
EHCSYKSS

SEQ ID NO: 68952 - protein, 6 aa, Artificial sequence
  Protein classification predicting sequence
EPYQGA

SEQ ID NO: 68953 - protein, 7 aa, Artificial sequence
  Protein classification predicting sequence
GVPTVGG

SEQ ID NO: 68954 - protein, 7 aa, Artificial sequence
  Protein classification predicting sequence
MASAEFD

SEQ ID NO: 68955 - protein, 26 aa, Artificial sequence
  Protein classification predicting sequence
VIAIQDMGAAGLTCSAVEMGAKGDLG

SEQ ID NO: 68956 - protein, 9 aa, Artificial sequence
  Protein classification predicting sequence
EGGKQAVAE

SEQ ID NO: 68957 - protein, 8 aa, Artificial sequence
  Protein classification predicting sequence
HDLSDGGL

SEQ ID NO: 68958 - protein, 9 aa, Artificial sequence
  Protein classification predicting sequence
GENAGVVDI

SEQ ID NO: 68959 - protein, 13 aa, Artificial sequence
  Protein classification predicting sequence
GVGLPVVYLGAKT

SEQ ID NO: 68960 - protein, 44 aa, Artificial sequence
  Protein classification predicting sequence
RDGVGGATMASAEFDESIEEKRPTVQVGDPFTEKCLLEACLELM

SEQ ID NO: 68961 - protein, 7 aa, Artificial sequence
  Protein classification predicting sequence
ESHNHPS

SEQ ID NO: 68962 - protein, 6 aa, Artificial sequence
  Protein classification predicting sequence
FTMGAR

SEQ ID NO: 68963 - protein, 6 aa, Artificial sequence
  Protein classification predicting sequence
DCLNYG

SEQ ID NO: 68964 - protein, 10 aa, Artificial sequence
  Protein classification predicting sequence
FKMESHNHPS

SEQ ID NO: 68965 - protein, 8 aa, Artificial sequence
  Protein classification predicting sequence
LVNAMCVG

SEQ ID NO: 68966 - protein, 6 aa, Artificial sequence
  Protein classification predicting sequence
GMAEAC

SEQ ID NO: 68967 - protein, 7 aa, Artificial sequence
  Protein classification predicting sequence
FTMGARP

SEQ ID NO: 68968 - protein, 14 aa, Artificial sequence
  Protein classification predicting sequence
TGRDGIHGATFASE

SEQ ID NO: 68969 - protein, 7 aa, Artificial sequence
  Protein classification predicting sequence
EKLLLEA

SEQ ID NO: 68970 - protein, 11 aa, Artificial sequence
  Protein classification predicting sequence
QDMGAAGLTSS

SEQ ID NO: 68971 - protein, 11 aa, Artificial sequence
  Protein classification predicting sequence
MLSESQERMLI

SEQ ID NO: 68972 - protein, 14 aa, Artificial sequence
  Protein classification predicting sequence
VEPYQGAATGVGGI

SEQ ID NO: 68973 - protein, 9 aa, Artificial sequence
  Protein classification predicting sequence
AVMDQLRFG

SEQ ID NO: 68974 - protein, 7 aa, Artificial sequence
  Protein classification predicting sequence
GIGGYGN

SEQ ID NO: 68975 - protein, 12 aa, Artificial sequence
  Protein classification predicting sequence
EKVLIECCLELY

SEQ ID NO: 68976 - protein, 7 aa, Artificial sequence
  Protein classification predicting sequence
CATSELA

SEQ ID NO: 68977 - protein, 18 aa, Artificial sequence
  Protein classification predicting sequence
SRAFITEQYDRYVRGNTV

SEQ ID NO: 68978 - protein, 6 aa, Artificial sequence
  Protein classification predicting sequence
QGAATG

SEQ ID NO: 68979 - protein, 14 aa, Artificial sequence
  Protein classification predicting sequence
GGIVRDIMAMGARP

SEQ ID NO: 68980 - protein, 7 aa, Artificial sequence
  Protein classification predicting sequence
DASGRYT

SEQ ID NO: 68981 - protein, 8 aa, Artificial sequence
  Protein classification predicting sequence
HDLSEGGL

SEQ ID NO: 68982 - protein, 7 aa, Artificial sequence
  Protein classification predicting sequence
YKNSRPL

SEQ ID NO: 68983 - protein, 7 aa, Artificial sequence
  Protein classification predicting sequence
VLQGPGE

SEQ ID NO: 68984 - protein, 10 aa, Artificial sequence
  Protein classification predicting sequence
QGAATGVGGI

SEQ ID NO: 68985 - protein, 13 aa, Artificial sequence
  Protein classification predicting sequence
QGAATGVGGILRD

SEQ ID NO: 68986 - protein, 15 aa, Artificial sequence
  Protein classification predicting sequence
QGAATGVGGILRDIF

SEQ ID NO: 68987 - protein, 7 aa, Artificial sequence
  Protein classification predicting sequence
GIAHYGN

SEQ ID NO: 68988 - protein, 15 aa, Artificial sequence
  Protein classification predicting sequence
YVGSKTGRDGLGGAV

SEQ ID NO: 68989 - protein, 7 aa, Artificial sequence
  Protein classification predicting sequence
LDPYAGA

SEQ ID NO: 68990 - protein, 8 aa, Artificial sequence
  Protein classification predicting sequence
AVAEAARN

SEQ ID NO: 68991 - protein, 7 aa, Artificial sequence
  Protein classification predicting sequence
VGATPLA

SEQ ID NO: 68992 - protein, 7 aa, Artificial sequence
  Protein classification predicting sequence
GNVSLYN

SEQ ID NO: 68993 - protein, 26 aa, Artificial sequence
  Protein classification predicting sequence
PNYTETGLFSVMWSEHCSYKNSKPVL

SEQ ID NO: 68994 - protein, 11 aa, Artificial sequence
  Protein classification predicting sequence
ESHNHPSAVEP

SEQ ID NO: 68995 - protein, 6 aa, Artificial sequence
  Protein classification predicting sequence
PTVGGE

SEQ ID NO: 68996 - protein, 24 aa, Artificial sequence
  Protein classification predicting sequence
EQQRSAVQVGDPFMEKLLLEACLD

SEQ ID NO: 68997 - protein, 14 aa, Artificial sequence
  Protein classification predicting sequence
PYEMLLSESQERML

SEQ ID NO: 68998 - protein, 9 aa, Artificial sequence
  Protein classification predicting sequence
LSESQERML

SEQ ID NO: 68999 - protein, 6 aa, Artificial sequence
  Protein classification predicting sequence
YGNCVG

SEQ ID NO: 69000 - protein, 8 aa, Artificial sequence
  Protein classification predicting sequence
TTDCNSRY

SEQ ID NO: 69001 - protein, 7 aa, Artificial sequence
  Protein classification predicting sequence
VMWSEHC

SEQ ID NO: 69002 - protein, 8 aa, Artificial sequence
  Protein classification predicting sequence
GPGENAGV

SEQ ID NO: 69003 - protein, 9 aa, Artificial sequence
  Protein classification predicting sequence
FTMGARPIA

SEQ ID NO: 69004 - protein, 7 aa, Artificial sequence
  Protein classification predicting sequence
MGARPIA

SEQ ID NO: 69005 - protein, 7 aa, Artificial sequence
  Protein classification predicting sequence
LNSLRFG

SEQ ID NO: 69006 - protein, 11 aa, Artificial sequence
  Protein classification predicting sequence
QDMGAAGLTCS

SEQ ID NO: 69007 - protein, 12 aa, Artificial sequence
  Protein classification predicting sequence
LLSESQERMLFV

SEQ ID NO: 69008 - protein, 11 aa, Artificial sequence
  Protein classification predicting sequence
SVMWSEHCSYK

SEQ ID NO: 69009 - protein, 8 aa, Artificial sequence
  Protein classification predicting sequence
WSEHCSYK

SEQ ID NO: 69010 - protein, 11 aa, Artificial sequence
  Protein classification predicting sequence
GVPTVGGEVNF

SEQ ID NO: 69011 - protein, 8 aa, Artificial sequence
  Protein classification predicting sequence
ACRALDFP

SEQ ID NO: 69012 - protein, 9 aa, Artificial sequence
  Protein classification predicting sequence
RPAVQVGDP

SEQ ID NO: 69013 - protein, 6 aa, Artificial sequence
  Protein classification predicting sequence
VQVGDP

SEQ ID NO: 69014 - protein, 6 aa, Artificial sequence
  Protein classification predicting sequence
ESQERM

SEQ ID NO: 69015 - protein, 6 aa, Artificial sequence
  Protein classification predicting sequence
GNPEKP

SEQ ID NO: 69016 - protein, 11 aa, Artificial sequence
  Protein classification predicting sequence
PVVGGNVSLYN

SEQ ID NO: 69017 - protein, 9 aa, Artificial sequence
  Protein classification predicting sequence
ESHNHPSYV

SEQ ID NO: 69018 - protein, 7 aa, Artificial sequence
  Protein classification predicting sequence
GISDYGN

SEQ ID NO: 69019 - protein, 7 aa, Artificial sequence
  Protein classification predicting sequence
EKLLIEA

SEQ ID NO: 69020 - protein, 7 aa, Artificial sequence
  Protein classification predicting sequence
GPGENAG

SEQ ID NO: 69021 - protein, 27 aa, Artificial sequence
  Protein classification predicting sequence
IVGIQDMGAAGLTSSSFEMAGRSGSGM

SEQ ID NO: 69022 - protein, 20 aa, Artificial sequence
  Protein classification predicting sequence
PYELMLSESQERMLICAKKG

SEQ ID NO: 69023 - protein, 9 aa, Artificial sequence
  Protein classification predicting sequence
PVVSGNVSL

SEQ ID NO: 69024 - protein, 7 aa, Artificial sequence
  Protein classification predicting sequence
RLPNYTE

SEQ ID NO: 69025 - protein, 7 aa, Artificial sequence
  Protein classification predicting sequence
GPGEGAG

SEQ ID NO: 69026 - protein, 6 aa, Artificial sequence
  Protein classification predicting sequence
VMYVGA

SEQ ID NO: 69027 - protein, 10 aa, Artificial sequence
  Protein classification predicting sequence
NPLVNAMCVG

SEQ ID NO: 69028 - protein, 6 aa, Artificial sequence
  Protein classification predicting sequence
GASFAS

SEQ ID NO: 69029 - protein, 15 aa, Artificial sequence
  Protein classification predicting sequence
RSAVQVGDPFMEKLL

SEQ ID NO: 69030 - protein, 12 aa, Artificial sequence
  Protein classification predicting sequence
SGNVSLYNETNG

SEQ ID NO: 69031 - protein, 7 aa, Artificial sequence
  Protein classification predicting sequence
FSETQGR

SEQ ID NO: 69032 - protein, 12 aa, Artificial sequence
  Protein classification predicting sequence
VMWSEHCCYKNS

SEQ ID NO: 69033 - protein, 8 aa, Artificial sequence
  Protein classification predicting sequence
AGVVDIGD

SEQ ID NO: 69034 - protein, 10 aa, Artificial sequence
  Protein classification predicting sequence
VEPYEGAATG

SEQ ID NO: 69035 - protein, 7 aa, Artificial sequence
  Protein classification predicting sequence
PTVGGEV

SEQ ID NO: 69036 - protein, 8 aa, Artificial sequence
  Protein classification predicting sequence
YAGNPLVN

SEQ ID NO: 69037 - protein, 6 aa, Artificial sequence
  Protein classification predicting sequence
MCVGLI

SEQ ID NO: 69038 - protein, 9 aa, Artificial sequence
  Protein classification predicting sequence
TGRDGIHGA

SEQ ID NO: 69039 - protein, 7 aa, Artificial sequence
  Protein classification predicting sequence
HKGEMVA

SEQ ID NO: 69040 - protein, 10 aa, Artificial sequence
  Protein classification predicting sequence
TNTVVAPGSD

SEQ ID NO: 69041 - protein, 9 aa, Artificial sequence
  Protein classification predicting sequence
GNVSLYNET

SEQ ID NO: 69042 - protein, 7 aa, Artificial sequence
  Protein classification predicting sequence
HDLAEGG

SEQ ID NO: 69043 - protein, 11 aa, Artificial sequence
  Protein classification predicting sequence
NAQLFSETQGR

SEQ ID NO: 69044 - protein, 7 aa, Artificial sequence
  Protein classification predicting sequence
TETGLFS

SEQ ID NO: 69045 - protein, 9 aa, Artificial sequence
  Protein classification predicting sequence
MWSEHCSYK

SEQ ID NO: 69046 - protein, 9 aa, Artificial sequence
  Protein classification predicting sequence
NLDLVPQRE

SEQ ID NO: 69047 - protein, 6 aa, Artificial sequence
  Protein classification predicting sequence
TVVKPG

SEQ ID NO: 69048 - protein, 7 aa, Artificial sequence
  Protein classification predicting sequence
GLKPDEY

SEQ ID NO: 69049 - protein, 8 aa, Artificial sequence
  Protein classification predicting sequence
ESHNHPSY

SEQ ID NO: 69050 - protein, 7 aa, Artificial sequence
  Protein classification predicting sequence
MGARPVA

SEQ ID NO: 69051 - protein, 10 aa, Artificial sequence
  Protein classification predicting sequence
RPAVQVGDPF

SEQ ID NO: 69052 - protein, 9 aa, Artificial sequence
  Protein classification predicting sequence
PAVQVGDPF

SEQ ID NO: 69053 - protein, 8 aa, Artificial sequence
  Protein classification predicting sequence
PVTGGNVS

SEQ ID NO: 69054 - protein, 11 aa, Artificial sequence
  Protein classification predicting sequence
GGNVSFYNQTG

SEQ ID NO: 69055 - protein, 6 aa, Artificial sequence
  Protein classification predicting sequence
PTPVVG

SEQ ID NO: 69056 - protein, 10 aa, Artificial sequence
  Protein classification predicting sequence
PTPVVGVLGV

SEQ ID NO: 69057 - protein, 9 aa, Artificial sequence
  Protein classification predicting sequence
FKIESHNHP

SEQ ID NO: 69058 - protein, 6 aa, Artificial sequence
  Protein classification predicting sequence
YGNSLG

SEQ ID NO: 69059 - protein, 7 aa, Artificial sequence
  Protein classification predicting sequence
NPLVNAM

SEQ ID NO: 69060 - protein, 25 aa, Artificial sequence
  Protein classification predicting sequence
FKVESHNHPSYVEPYQGAATGVGGI

SEQ ID NO: 69061 - protein, 7 aa, Artificial sequence
  Protein classification predicting sequence
EMASKAG

SEQ ID NO: 69062 - protein, 8 aa, Artificial sequence
  Protein classification predicting sequence
QYDYQVRT

SEQ ID NO: 69063 - protein, 8 aa, Artificial sequence
  Protein classification predicting sequence
VRVRGTEK

SEQ ID NO: 69064 - protein, 6 aa, Artificial sequence
  Protein classification predicting sequence
IASKEW

SEQ ID NO: 69065 - protein, 8 aa, Artificial sequence
  Protein classification predicting sequence
RDIISMGA

SEQ ID NO: 69066 - protein, 8 aa, Artificial sequence
  Protein classification predicting sequence
TGRDGIHG

SEQ ID NO: 69067 - protein, 8 aa, Artificial sequence
  Protein classification predicting sequence
KDLGGGGL

SEQ ID NO: 69068 - protein, 7 aa, Artificial sequence
  Protein classification predicting sequence
VQVGDPF

SEQ ID NO: 69069 - protein, 32 aa, Artificial sequence
  Protein classification predicting sequence
DTRRVLDGVVRGIGGYGNSLGLPNIGGETVFD

SEQ ID NO: 69070 - protein, 7 aa, Artificial sequence
  Protein classification predicting sequence
GNPLVNA

SEQ ID NO: 69071 - protein, 11 aa, Artificial sequence
  Protein classification predicting sequence
SESQERMCAVV

SEQ ID NO: 69072 - protein, 5 aa, Artificial sequence
  Protein classification predicting sequence
VMWQF

SEQ ID NO: 69073 - protein, 11 aa, Artificial sequence
  Protein classification predicting sequence
DEFDGSVWAQV

SEQ ID NO: 69074 - protein, 15 aa, Artificial sequence
  Protein classification predicting sequence
LFSESAGRVLVAVPR

SEQ ID NO: 69075 - protein, 10 aa, Artificial sequence
  Protein classification predicting sequence
RIGVVDQGSD

SEQ ID NO: 69076 - protein, 6 aa, Artificial sequence
  Protein classification predicting sequence
DEYQRI

SEQ ID NO: 69077 - protein, 11 aa, Artificial sequence
  Protein classification predicting sequence
CVGVLRQEDLH

SEQ ID NO: 69078 - protein, 16 aa, Artificial sequence
  Protein classification predicting sequence
SESQERMCAVVTPENV

SEQ ID NO: 69079 - protein, 40 aa, Artificial sequence
  Protein classification predicting sequence
LDPYAGAQLALAEAYRNVAVTGATPVAVTNCLNFGSPEDP

SEQ ID NO: 69080 - protein, 8 aa, Artificial sequence
  Protein classification predicting sequence
GENAGVVD

SEQ ID NO: 69081 - protein, 7 aa, Artificial sequence
  Protein classification predicting sequence
SESQERM

SEQ ID NO: 69082 - protein, 6 aa, Artificial sequence
  Protein classification predicting sequence
AVCRKW

SEQ ID NO: 69083 - protein, 22 aa, Artificial sequence
  Protein classification predicting sequence
TWHGETVVDVPPRTVAHEGPVY

SEQ ID NO: 69084 - protein, 14 aa, Artificial sequence
  Protein classification predicting sequence
SAAHDLSEGGLAQA

SEQ ID NO: 69085 - protein, 10 aa, Artificial sequence
  Protein classification predicting sequence
ALAGETGCRI

SEQ ID NO: 69086 - protein, 14 aa, Artificial sequence
  Protein classification predicting sequence
GIFSVMWSEHCSYK

SEQ ID NO: 69087 - protein, 7 aa, Artificial sequence
  Protein classification predicting sequence
AGVIDIG

SEQ ID NO: 69088 - protein, 12 aa, Artificial sequence
  Protein classification predicting sequence
NPLVNAMCVGLI

SEQ ID NO: 69089 - protein, 14 aa, Artificial sequence
  Protein classification predicting sequence
NPLVNAMCVGLINH

SEQ ID NO: 69090 - protein, 13 aa, Artificial sequence
  Protein classification predicting sequence
TGRDGIHGATFAS

SEQ ID NO: 69091 - protein, 12 aa, Artificial sequence
  Protein classification predicting sequence
IQDMGAAGLTSS

SEQ ID NO: 69092 - protein, 9 aa, Artificial sequence
  Protein classification predicting sequence
KEWVYDQYD

SEQ ID NO: 69093 - protein, 8 aa, Artificial sequence
  Protein classification predicting sequence
LAMTTDCN

SEQ ID NO: 69094 - protein, 11 aa, Artificial sequence
  Protein classification predicting sequence
LAMTTDCNSRY

SEQ ID NO: 69095 - protein, 17 aa, Artificial sequence
  Protein classification predicting sequence
LAMTTDCNSRYIYLDPE

SEQ ID NO: 69096 - protein, 6 aa, Artificial sequence
  Protein classification predicting sequence
LNFGNP

SEQ ID NO: 69097 - protein, 6 aa, Artificial sequence
  Protein classification predicting sequence
PEIFWQ

SEQ ID NO: 69098 - protein, 6 aa, Artificial sequence
  Protein classification predicting sequence
PVYQRP

SEQ ID NO: 69099 - protein, 7 aa, Artificial sequence
  Protein classification predicting sequence
GNVSFYN

SEQ ID NO: 69100 - protein, 12 aa, Artificial sequence
  Protein classification predicting sequence
MWSEHCSYKSSK

SEQ ID NO: 69101 - protein, 15 aa, Artificial sequence
  Protein classification predicting sequence
MWSEHCSYKSSKKYL

SEQ ID NO: 69102 - protein, 9 aa, Artificial sequence
  Protein classification predicting sequence
EHCSYKSSK

SEQ ID NO: 69103 - protein, 8 aa, Artificial sequence
  Protein classification predicting sequence
ESKRPSVQ

SEQ ID NO: 69104 - protein, 7 aa, Artificial sequence
  Protein classification predicting sequence
VIGEVTD

SEQ ID NO: 69105 - protein, 11 aa, Artificial sequence
  Protein classification predicting sequence
ESHNHPSAIEP

SEQ ID NO: 69106 - protein, 18 aa, Artificial sequence
  Protein classification predicting sequence
YVGSTTGRDGMGGASFAS

SEQ ID NO: 69107 - protein, 7 aa, Artificial sequence
  Protein classification predicting sequence
GIELDLD

SEQ ID NO: 69108 - protein, 8 aa, Artificial sequence
  Protein classification predicting sequence
ESHNHPSA

SEQ ID NO: 69109 - protein, 6 aa, Artificial sequence
  Protein classification predicting sequence
GMTPYE

SEQ ID NO: 69110 - protein, 6 aa, Artificial sequence
  Protein classification predicting sequence
VGMVGL

SEQ ID NO: 69111 - protein, 8 aa, Artificial sequence
  Protein classification predicting sequence
GVPTVGGE

SEQ ID NO: 69112 - protein, 6 aa, Artificial sequence
  Protein classification predicting sequence
LIEACL

SEQ ID NO: 69113 - protein, 6 aa, Artificial sequence
  Protein classification predicting sequence
SSAEMA

SEQ ID NO: 69114 - protein, 7 aa, Artificial sequence
  Protein classification predicting sequence
WVYRQYD

SEQ ID NO: 69115 - protein, 5 aa, Artificial sequence
  Protein classification predicting sequence
DCNSR

SEQ ID NO: 69116 - protein, 6 aa, Artificial sequence
  Protein classification predicting sequence
VMWSEH

SEQ ID NO: 69117 - protein, 7 aa, Artificial sequence
  Protein classification predicting sequence
GGIVRDI

SEQ ID NO: 69118 - protein, 7 aa, Artificial sequence
  Protein classification predicting sequence
DLGGGGL

SEQ ID NO: 69119 - protein, 6 aa, Artificial sequence
  Protein classification predicting sequence
VSLYNE

SEQ ID NO: 69120 - protein, 8 aa, Artificial sequence
  Protein classification predicting sequence
GNVSFYNE

SEQ ID NO: 69121 - protein, 9 aa, Artificial sequence
  Protein classification predicting sequence
LNPYHGAMG

SEQ ID NO: 69122 - protein, 12 aa, Artificial sequence
  Protein classification predicting sequence
ILPTPTIGGVGL

SEQ ID NO: 69123 - protein, 29 aa, Artificial sequence
  Protein classification predicting sequence
FTELGIFSAMWNEHCSYKSSKKWLRTLPT

SEQ ID NO: 69124 - protein, 7 aa, Artificial sequence
  Protein classification predicting sequence
PTTGPQV

SEQ ID NO: 69125 - protein, 14 aa, Artificial sequence
  Protein classification predicting sequence
IEPYQGAATGVGGI

SEQ ID NO: 69126 - protein, 25 aa, Artificial sequence
  Protein classification predicting sequence
IEPYQGAATGVGGILRDVFTMGARP

SEQ ID NO: 69127 - protein, 10 aa, Artificial sequence
  Protein classification predicting sequence
FGVPTVGGEV

SEQ ID NO: 69128 - protein, 8 aa, Artificial sequence
  Protein classification predicting sequence
RWVWEQYD

SEQ ID NO: 69129 - protein, 7 aa, Artificial sequence
  Protein classification predicting sequence
PGGDAGV

SEQ ID NO: 69130 - protein, 11 aa, Artificial sequence
  Protein classification predicting sequence
DIGDNQAVVFK

SEQ ID NO: 69131 - protein, 12 aa, Artificial sequence
  Protein classification predicting sequence
VVFKMESHNHPS

SEQ ID NO: 69132 - protein, 10 aa, Artificial sequence
  Protein classification predicting sequence
LVNAFAAGLA

SEQ ID NO: 69133 - protein, 7 aa, Artificial sequence
  Protein classification predicting sequence
LMEATLE

SEQ ID NO: 69134 - protein, 5 aa, Artificial sequence
  Protein classification predicting sequence
YDRPW

SEQ ID NO: 69135 - protein, 7 aa, Artificial sequence
  Protein classification predicting sequence
SDVTPRY

SEQ ID NO: 69136 - protein, 10 aa, Artificial sequence
  Protein classification predicting sequence
SGNVSLYNET

SEQ ID NO: 69137 - protein, 7 aa, Artificial sequence
  Protein classification predicting sequence
YEMMLSE

SEQ ID NO: 69138 - protein, 49 aa, Artificial sequence
  Protein classification predicting sequence
YVYNNPYEGGKMVVAEAYRNLIAVGATPLAMTDCLNYGSPEKKEIYQQL

SEQ ID NO: 69139 - protein, 37 aa, Artificial sequence
  Protein classification predicting sequence
DSTKGMAEACDILKTPVVSGNVSLYNETKGTSIFPTP

SEQ ID NO: 69140 - protein, 8 aa, Artificial sequence
  Protein classification predicting sequence
PQVGDKLY

SEQ ID NO: 69141 - protein, 27 aa, Artificial sequence
  Protein classification predicting sequence
IGDTKDDFGGSQLEKLIYGKVNHEFES

SEQ ID NO: 69142 - protein, 29 aa, Artificial sequence
  Protein classification predicting sequence
LSHVQTVGKGGLLITLAKLSAHYGLGLKS

SEQ ID NO: 69143 - protein, 8 aa, Artificial sequence
  Protein classification predicting sequence
YQDMGLSD

SEQ ID NO: 69144 - protein, 11 aa, Artificial sequence
  Protein classification predicting sequence
KQNQRLLKGVV

SEQ ID NO: 69145 - protein, 15 aa, Artificial sequence
  Protein classification predicting sequence
KHELDSAVIGEVTDT

SEQ ID NO: 69146 - protein, 16 aa, Artificial sequence
  Protein classification predicting sequence
PLADEAPVYILEGEEK

SEQ ID NO: 69147 - protein, 8 aa, Artificial sequence
  Protein classification predicting sequence
YNTSKNDY

SEQ ID NO: 69148 - protein, 14 aa, Artificial sequence
  Protein classification predicting sequence
KAIASTIDGEARYV

SEQ ID NO: 69149 - protein, 6 aa, Artificial sequence
  Protein classification predicting sequence
GMSEAC

SEQ ID NO: 69150 - protein, 17 aa, Artificial sequence
  Protein classification predicting sequence
GTSIFPTPVVGMVGLIE

SEQ ID NO: 69151 - protein, 7 aa, Artificial sequence
  Protein classification predicting sequence
GMVGLIE

SEQ ID NO: 69152 - protein, 11 aa, Artificial sequence
  Protein classification predicting sequence
DDFGGSQLEKL

SEQ ID NO: 69153 - protein, 7 aa, Artificial sequence
  Protein classification predicting sequence
VNHEFES

SEQ ID NO: 69154 - protein, 12 aa, Artificial sequence
  Protein classification predicting sequence
SHVQTVGKGGLL

SEQ ID NO: 69155 - protein, 8 aa, Artificial sequence
  Protein classification predicting sequence
ENVSDIKQ

SEQ ID NO: 69156 - protein, 25 aa, Artificial sequence
  Protein classification predicting sequence
GIFSVMWSEHCSYKHSKPFLKQFPT

SEQ ID NO: 69157 - protein, 36 aa, Artificial sequence
  Protein classification predicting sequence
GIGGYGNCIGIPTTAGEIEFDERYDGNPLVNAMCVG

SEQ ID NO: 69158 - protein, 26 aa, Artificial sequence
  Protein classification predicting sequence
QYDQQVGANTIIKPGLQASVVRVEGT

SEQ ID NO: 69159 - protein, 10 aa, Artificial sequence
  Protein classification predicting sequence
CLNFGSPEDP

SEQ ID NO: 69160 - protein, 8 aa, Artificial sequence
  Protein classification predicting sequence
VLGVIDDV

SEQ ID NO: 69161 - protein, 8 aa, Artificial sequence
  Protein classification predicting sequence
LFSESAGR

SEQ ID NO: 69162 - protein, 10 aa, Artificial sequence
  Protein classification predicting sequence
MFGVMWSEHC

SEQ ID NO: 69163 - protein, 6 aa, Artificial sequence
  Protein classification predicting sequence
LVNAMC

SEQ ID NO: 69164 - protein, 7 aa, Artificial sequence
  Protein classification predicting sequence
TGRDGIH

SEQ ID NO: 69165 - protein, 6 aa, Artificial sequence
  Protein classification predicting sequence
GARPVA

SEQ ID NO: 69166 - protein, 14 aa, Artificial sequence
  Protein classification predicting sequence
YGNCVGVPTVGGEV

SEQ ID NO: 69167 - protein, 9 aa, Artificial sequence
  Protein classification predicting sequence
GVPTVGGEV

SEQ ID NO: 69168 - protein, 7 aa, Artificial sequence
  Protein classification predicting sequence
LNFGSPE

SEQ ID NO: 69169 - protein, 10 aa, Artificial sequence
  Protein classification predicting sequence
FKVESHNHPS

SEQ ID NO: 69170 - protein, 7 aa, Artificial sequence
  Protein classification predicting sequence
EMAAKGG

SEQ ID NO: 69171 - protein, 5 aa, Artificial sequence
  Protein classification predicting sequence
TTDCN

SEQ ID NO: 69172 - protein, 8 aa, Artificial sequence
  Protein classification predicting sequence
AEGGLAVA

SEQ ID NO: 69173 - protein, 15 aa, Artificial sequence
  Protein classification predicting sequence
ELGMFGVMWSEHCCY

SEQ ID NO: 69174 - protein, 6 aa, Artificial sequence
  Protein classification predicting sequence
IYPTPV

SEQ ID NO: 69175 - protein, 6 aa, Artificial sequence
  Protein classification predicting sequence
GGIVRD

SEQ ID NO: 69176 - protein, 7 aa, Artificial sequence
  Protein classification predicting sequence
DYGNRIG

SEQ ID NO: 69177 - protein, 6 aa, Artificial sequence
  Protein classification predicting sequence
QVGDPF

SEQ ID NO: 69178 - protein, 8 aa, Artificial sequence
  Protein classification predicting sequence
NPLVNAMC

SEQ ID NO: 69179 - protein, 9 aa, Artificial sequence
  Protein classification predicting sequence
AHDVAEGGL

SEQ ID NO: 69180 - protein, 13 aa, Artificial sequence
  Protein classification predicting sequence
MYSVMWSEHCSYK

SEQ ID NO: 69181 - protein, 9 aa, Artificial sequence
  Protein classification predicting sequence
MGARPIALL

SEQ ID NO: 69182 - protein, 9 aa, Artificial sequence
  Protein classification predicting sequence
YGNCIGIPT

SEQ ID NO: 69183 - protein, 9 aa, Artificial sequence
  Protein classification predicting sequence
AKGIGNPVM

SEQ ID NO: 69184 - protein, 10 aa, Artificial sequence
  Protein classification predicting sequence
VQVGDPFMEK

SEQ ID NO: 69185 - protein, 7 aa, Artificial sequence
  Protein classification predicting sequence
PEKKEIY

SEQ ID NO: 69186 - protein, 10 aa, Artificial sequence
  Protein classification predicting sequence
FKIESHNHPS

SEQ ID NO: 69187 - protein, 9 aa, Artificial sequence
  Protein classification predicting sequence
EPFQGAATG

SEQ ID NO: 69188 - protein, 10 aa, Artificial sequence
  Protein classification predicting sequence
RPTVQVGDPF

SEQ ID NO: 69189 - protein, 13 aa, Artificial sequence
  Protein classification predicting sequence
YEMMLSESQERML

SEQ ID NO: 69190 - protein, 9 aa, Artificial sequence
  Protein classification predicting sequence
EAGLLPGAL

SEQ ID NO: 69191 - protein, 6 aa, Artificial sequence
  Protein classification predicting sequence
NKEGNV

SEQ ID NO: 69192 - protein, 31 aa, Artificial sequence
  Protein classification predicting sequence
RNENLKFMCRTVQLRVENNETMFTSQYEKDE

SEQ ID NO: 69193 - protein, 7 aa, Artificial sequence
  Protein classification predicting sequence
LGEEVDY

SEQ ID NO: 69194 - protein, 17 aa, Artificial sequence
  Protein classification predicting sequence
YDAILLPGGFSYGDYLR

SEQ ID NO: 69195 - protein, 5 aa, Artificial sequence
  Protein classification predicting sequence
CNGFQ

SEQ ID NO: 69196 - protein, 7 aa, Artificial sequence
  Protein classification predicting sequence
PVAHGEG

SEQ ID NO: 69197 - protein, 6 aa, Artificial sequence
  Protein classification predicting sequence
PGSNCD

SEQ ID NO: 69198 - protein, 13 aa, Artificial sequence
  Protein classification predicting sequence
DMFHAIKDELGEE

SEQ ID NO: 69199 - protein, 10 aa, Artificial sequence
  Protein classification predicting sequence
DGVLIPGGFS

SEQ ID NO: 69200 - protein, 16 aa, Artificial sequence
  Protein classification predicting sequence
PGGFSYGDYLRCGAIA

SEQ ID NO: 69201 - protein, 7 aa, Artificial sequence
  Protein classification predicting sequence
YCDEETL

SEQ ID NO: 69202 - protein, 7 aa, Artificial sequence
  Protein classification predicting sequence
ENNQIAF

SEQ ID NO: 69203 - protein, 8 aa, Artificial sequence
  Protein classification predicting sequence
VENNETMF

SEQ ID NO: 69204 - protein, 9 aa, Artificial sequence
  Protein classification predicting sequence
GMMPHPERA

SEQ ID NO: 69205 - protein, 9 aa, Artificial sequence
  Protein classification predicting sequence
NGSVSDIAG

SEQ ID NO: 69206 - protein, 7 aa, Artificial sequence
  Protein classification predicting sequence
EAGLLPG

SEQ ID NO: 69207 - protein, 6 aa, Artificial sequence
  Protein classification predicting sequence
TNPNGS

SEQ ID NO: 69208 - protein, 16 aa, Artificial sequence
  Protein classification predicting sequence
GQIIRCPVAHHDGNYF

SEQ ID NO: 69209 - protein, 6 aa, Artificial sequence
  Protein classification predicting sequence
NRDRDM

SEQ ID NO: 69210 - protein, 11 aa, Artificial sequence
  Protein classification predicting sequence
PGGFSYGDYLR

SEQ ID NO: 69211 - protein, 7 aa, Artificial sequence
  Protein classification predicting sequence
LEGEGRV

SEQ ID NO: 69212 - protein, 6 aa, Artificial sequence
  Protein classification predicting sequence
IAGIVN

SEQ ID NO: 69213 - protein, 7 aa, Artificial sequence
  Protein classification predicting sequence
GMMPHPE

SEQ ID NO: 69214 - protein, 11 aa, Artificial sequence
  Protein classification predicting sequence
LEGEGQVVFRY

SEQ ID NO: 69215 - protein, 5 aa, Artificial sequence
  Protein classification predicting sequence
LWHAD

SEQ ID NO: 69216 - protein, 18 aa, Artificial sequence
  Protein classification predicting sequence
GVDAVVVPGGFSYGDYLR

SEQ ID NO: 69217 - protein, 7 aa, Artificial sequence
  Protein classification predicting sequence
GICNGFQ

SEQ ID NO: 69218 - protein, 7 aa, Artificial sequence
  Protein classification predicting sequence
DIAGIVN

SEQ ID NO: 69219 - protein, 15 aa, Artificial sequence
  Protein classification predicting sequence
GNVLGMMPHPERAVE

SEQ ID NO: 69220 - protein, 7 aa, Artificial sequence
  Protein classification predicting sequence
CNGFQIL

SEQ ID NO: 69221 - protein, 9 aa, Artificial sequence
  Protein classification predicting sequence
CNGFQILTE

SEQ ID NO: 69222 - protein, 10 aa, Artificial sequence
  Protein classification predicting sequence
AHGEGNYYCD

SEQ ID NO: 69223 - protein, 8 aa, Artificial sequence
  Protein classification predicting sequence
EAGLLPGA

SEQ ID NO: 69224 - protein, 8 aa, Artificial sequence
  Protein classification predicting sequence
DIAGIVNE

SEQ ID NO: 69225 - protein, 7 aa, Artificial sequence
  Protein classification predicting sequence
PVMQAVR

SEQ ID NO: 69226 - protein, 7 aa, Artificial sequence
  Protein classification predicting sequence
PIAHGEG

SEQ ID NO: 69227 - protein, 12 aa, Artificial sequence
  Protein classification predicting sequence
LPGGFSYGDYLR

SEQ ID NO: 69228 - protein, 8 aa, Artificial sequence
  Protein classification predicting sequence
LPGALIRN

SEQ ID NO: 69229 - protein, 6 aa, Artificial sequence
  Protein classification predicting sequence
FPGTNC

SEQ ID NO: 69230 - protein, 8 aa, Artificial sequence
  Protein classification predicting sequence
DGLRLFES

SEQ ID NO: 69231 - protein, 6 aa, Artificial sequence
  Protein classification predicting sequence
MPHPER

SEQ ID NO: 69232 - protein, 7 aa, Artificial sequence
  Protein classification predicting sequence
FPGSNCD

SEQ ID NO: 69233 - protein, 9 aa, Artificial sequence
  Protein classification predicting sequence
FPGSNCDRD

SEQ ID NO: 69234 - protein, 35 aa, Artificial sequence
  Protein classification predicting sequence
VSLWHADADLKGVDAVVVPGGFSYGDYLRAGAIAR

SEQ ID NO: 69235 - protein, 16 aa, Artificial sequence
  Protein classification predicting sequence
RNVGLHFICRDVWLRV

SEQ ID NO: 69236 - protein, 12 aa, Artificial sequence
  Protein classification predicting sequence
STSTAWTSRFEP

SEQ ID NO: 69237 - protein, 12 aa, Artificial sequence
  Protein classification predicting sequence
VPGGFSYGDYLR

SEQ ID NO: 69238 - protein, 23 aa, Artificial sequence
  Protein classification predicting sequence
VPGGFSYGDYLRAGAIARFAPVM

SEQ ID NO: 69239 - protein, 12 aa, Artificial sequence
  Protein classification predicting sequence
GMPVLGICNGFQ

SEQ ID NO: 69240 - protein, 8 aa, Artificial sequence
  Protein classification predicting sequence
VFPGSNCD

SEQ ID NO: 69241 - protein, 10 aa, Artificial sequence
  Protein classification predicting sequence
VFPGSNCDRD

SEQ ID NO: 69242 - protein, 8 aa, Artificial sequence
  Protein classification predicting sequence
TFPGTLDD

SEQ ID NO: 69243 - protein, 10 aa, Artificial sequence
  Protein classification predicting sequence
PVLGICNGFQ

SEQ ID NO: 69244 - protein, 6 aa, Artificial sequence
  Protein classification predicting sequence
HGEGNY

SEQ ID NO: 69245 - protein, 5 aa, Artificial sequence
  Protein classification predicting sequence
LHFIC

SEQ ID NO: 69246 - protein, 6 aa, Artificial sequence
  Protein classification predicting sequence
NEKGNV

SEQ ID NO: 69247 - protein, 7 aa, Artificial sequence
  Protein classification predicting sequence
GGFSYGD

SEQ ID NO: 69248 - protein, 9 aa, Artificial sequence
  Protein classification predicting sequence
PIAHGEGRY

SEQ ID NO: 69249 - protein, 6 aa, Artificial sequence
  Protein classification predicting sequence
PGGFSY

SEQ ID NO: 69250 - protein, 16 aa, Artificial sequence
  Protein classification predicting sequence
PVAHHDGNYFADAETL

SEQ ID NO: 69251 - protein, 14 aa, Artificial sequence
  Protein classification predicting sequence
MPHPENLIEAAHGG

SEQ ID NO: 69252 - protein, 9 aa, Artificial sequence
  Protein classification predicting sequence
DMIAALTKI

SEQ ID NO: 69253 - protein, 25 aa, Artificial sequence
  Protein classification predicting sequence
IPGGFSYGDYLRCGAIAARMPVMQA

SEQ ID NO: 69254 - protein, 26 aa, Artificial sequence
  Protein classification predicting sequence
EAGLLPGALMRNASLKFVCREVKLEV

SEQ ID NO: 69255 - protein, 7 aa, Artificial sequence
  Protein classification predicting sequence
AVLVFPG

SEQ ID NO: 69256 - protein, 11 aa, Artificial sequence
  Protein classification predicting sequence
GNVLGMMPHPE

SEQ ID NO: 69257 - protein, 7 aa, Artificial sequence
  Protein classification predicting sequence
AHHDGNY

SEQ ID NO: 69258 - protein, 38 aa, Artificial sequence
  Protein classification predicting sequence
EGKPVLGVCNGFQILTEIGLLPGALLHNDSHLFISRNE

SEQ ID NO: 69259 - protein, 17 aa, Artificial sequence
  Protein classification predicting sequence
YPVAHGEGHYYCTDEIY

SEQ ID NO: 69260 - protein, 20 aa, Artificial sequence
  Protein classification predicting sequence
GNVCGMMPHPERALETLLGT

SEQ ID NO: 69261 - protein, 7 aa, Artificial sequence
  Protein classification predicting sequence
SGVKLFE

SEQ ID NO: 69262 - protein, 8 aa, Artificial sequence
  Protein classification predicting sequence
MVKSWREQ

SEQ ID NO: 69263 - protein, 10 aa, Artificial sequence
  Protein classification predicting sequence
GGFSYGDYLR

SEQ ID NO: 69264 - protein, 7 aa, Artificial sequence
  Protein classification predicting sequence
MPHPERA

SEQ ID NO: 69265 - protein, 6 aa, Artificial sequence
  Protein classification predicting sequence
GHYERF

SEQ ID NO: 69266 - protein, 7 aa, Artificial sequence
  Protein classification predicting sequence
GHYERFL

SEQ ID NO: 69267 - protein, 11 aa, Artificial sequence
  Protein classification predicting sequence
QELRRIGIQPD

SEQ ID NO: 69268 - protein, 7 aa, Artificial sequence
  Protein classification predicting sequence
RGVEGKI

SEQ ID NO: 69269 - protein, 9 aa, Artificial sequence
  Protein classification predicting sequence
NVDPGTMSP

SEQ ID NO: 69270 - protein, 24 aa, Artificial sequence
  Protein classification predicting sequence
QHGEVFVTDDGAETDLDLGHYERF

SEQ ID NO: 69271 - protein, 15 aa, Artificial sequence
  Protein classification predicting sequence
DGAETDLDLGHYERF

SEQ ID NO: 69272 - protein, 7 aa, Artificial sequence
  Protein classification predicting sequence
TVQVIPH

SEQ ID NO: 69273 - protein, 15 aa, Artificial sequence
  Protein classification predicting sequence
CEIGGTVGDIEAMPF

SEQ ID NO: 69274 - protein, 12 aa, Artificial sequence
  Protein classification predicting sequence
ERRKLSLFCNVR

SEQ ID NO: 69275 - protein, 9 aa, Artificial sequence
  Protein classification predicting sequence
IYDVPIAYH

SEQ ID NO: 69276 - protein, 7 aa, Artificial sequence
  Protein classification predicting sequence
VPYFGIC

SEQ ID NO: 69277 - protein, 9 aa, Artificial sequence
  Protein classification predicting sequence
AASLGRLLK

SEQ ID NO: 69278 - protein, 13 aa, Artificial sequence
  Protein classification predicting sequence
YSVSILKLDPYIN

SEQ ID NO: 69279 - protein, 7 aa, Artificial sequence
  Protein classification predicting sequence
DPGTMSP

SEQ ID NO: 69280 - protein, 6 aa, Artificial sequence
  Protein classification predicting sequence
NSVTTG

SEQ ID NO: 69281 - protein, 9 aa, Artificial sequence
  Protein classification predicting sequence
SIGIQPDIL

SEQ ID NO: 69282 - protein, 14 aa, Artificial sequence
  Protein classification predicting sequence
ERHRHRYEFNNDYR

SEQ ID NO: 69283 - protein, 7 aa, Artificial sequence
  Protein classification predicting sequence
SSLGKGI

SEQ ID NO: 69284 - protein, 11 aa, Artificial sequence
  Protein classification predicting sequence
GTMSPYQHGEV

SEQ ID NO: 69285 - protein, 8 aa, Artificial sequence
  Protein classification predicting sequence
YKSVIEAL

SEQ ID NO: 69286 - protein, 6 aa, Artificial sequence
  Protein classification predicting sequence
RENNIP

SEQ ID NO: 69287 - protein, 6 aa, Artificial sequence
  Protein classification predicting sequence
ANSTEF

SEQ ID NO: 69288 - protein, 11 aa, Artificial sequence
  Protein classification predicting sequence
ERHRHRYEFNN

SEQ ID NO: 69289 - protein, 7 aa, Artificial sequence
  Protein classification predicting sequence
PFQHGEV

SEQ ID NO: 69290 - protein, 6 aa, Artificial sequence
  Protein classification predicting sequence
TTGKIY

SEQ ID NO: 69291 - protein, 8 aa, Artificial sequence
  Protein classification predicting sequence
VPEEAVIS

SEQ ID NO: 69292 - protein, 7 aa, Artificial sequence
  Protein classification predicting sequence
RGAEGKI

SEQ ID NO: 69293 - protein, 6 aa, Artificial sequence
  Protein classification predicting sequence
PFLGIC

SEQ ID NO: 69294 - protein, 8 aa, Artificial sequence
  Protein classification predicting sequence
MGGTMRLG

SEQ ID NO: 69295 - protein, 7 aa, Artificial sequence
  Protein classification predicting sequence
GGTMRLG

SEQ ID NO: 69296 - protein, 9 aa, Artificial sequence
  Protein classification predicting sequence
DLDLGNYER

SEQ ID NO: 69297 - protein, 6 aa, Artificial sequence
  Protein classification predicting sequence
KTKPTQ

SEQ ID NO: 69298 - protein, 18 aa, Artificial sequence
  Protein classification predicting sequence
VTDDGAETDLDLGHYERF

SEQ ID NO: 69299 - protein, 10 aa, Artificial sequence
  Protein classification predicting sequence
EIGGTVGDIE

SEQ ID NO: 69300 - protein, 8 aa, Artificial sequence
  Protein classification predicting sequence
GGTVGDIE

SEQ ID NO: 69301 - protein, 8 aa, Artificial sequence
  Protein classification predicting sequence
PYIPTAGE

SEQ ID NO: 69302 - protein, 7 aa, Artificial sequence
  Protein classification predicting sequence
KIALFCN

SEQ ID NO: 69303 - protein, 12 aa, Artificial sequence
  Protein classification predicting sequence
GEVTIAVVGKYT

SEQ ID NO: 69304 - protein, 7 aa, Artificial sequence
  Protein classification predicting sequence
RGTEGKI

SEQ ID NO: 69305 - protein, 6 aa, Artificial sequence
  Protein classification predicting sequence
GLMTEW

SEQ ID NO: 69306 - protein, 6 aa, Artificial sequence
  Protein classification predicting sequence
HPWFVA

SEQ ID NO: 69307 - protein, 12 aa, Artificial sequence
  Protein classification predicting sequence
AASLGRLLKNRG

SEQ ID NO: 69308 - protein, 7 aa, Artificial sequence
  Protein classification predicting sequence
TNEIKER

SEQ ID NO: 69309 - protein, 10 aa, Artificial sequence
  Protein classification predicting sequence
KPTQHSVKEL

SEQ ID NO: 69310 - protein, 6 aa, Artificial sequence
  Protein classification predicting sequence
IVVRTE

SEQ ID NO: 69311 - protein, 6 aa, Artificial sequence
  Protein classification predicting sequence
ADMTEW

SEQ ID NO: 69312 - protein, 10 aa, Artificial sequence
  Protein classification predicting sequence
DGILVPGGFG

SEQ ID NO: 69313 - protein, 13 aa, Artificial sequence
  Protein classification predicting sequence
EDMGGTLRLGLYP

SEQ ID NO: 69314 - protein, 27 aa, Artificial sequence
  Protein classification predicting sequence
KKERRGDYLGGTVQVIPHITNELKDRV

SEQ ID NO: 69315 - protein, 29 aa, Artificial sequence
  Protein classification predicting sequence
ETNADVVITEIGGTVGDIESLPFLEAIRQ

SEQ ID NO: 69316 - protein, 6 aa, Artificial sequence
  Protein classification predicting sequence
NVMYIH

SEQ ID NO: 69317 - protein, 14 aa, Artificial sequence
  Protein classification predicting sequence
KTKPTQHSVKELRS

SEQ ID NO: 69318 - protein, 8 aa, Artificial sequence
  Protein classification predicting sequence
IGLVGKYV

SEQ ID NO: 69319 - protein, 6 aa, Artificial sequence
  Protein classification predicting sequence
HGEVFV

SEQ ID NO: 69320 - protein, 7 aa, Artificial sequence
  Protein classification predicting sequence
RHRYEVN

SEQ ID NO: 69321 - protein, 8 aa, Artificial sequence
  Protein classification predicting sequence
PEGEVTIA

SEQ ID NO: 69322 - protein, 25 aa, Artificial sequence
  Protein classification predicting sequence
QHGEVFVTEDGAETDLDLGHYERFI

SEQ ID NO: 69323 - protein, 16 aa, Artificial sequence
  Protein classification predicting sequence
DGAETDLDLGHYERFI

SEQ ID NO: 69324 - protein, 11 aa, Artificial sequence
  Protein classification predicting sequence
KERRGDYLGAT

SEQ ID NO: 69325 - protein, 22 aa, Artificial sequence
  Protein classification predicting sequence
LVEIGGTVGDIESLPFLEAIRQ

SEQ ID NO: 69326 - protein, 6 aa, Artificial sequence
  Protein classification predicting sequence
SIYKIP

SEQ ID NO: 69327 - protein, 7 aa, Artificial sequence
  Protein classification predicting sequence
EALKHAG

SEQ ID NO: 69328 - protein, 8 aa, Artificial sequence
  Protein classification predicting sequence
HPWFLACQ

SEQ ID NO: 69329 - protein, 29 aa, Artificial sequence
  Protein classification predicting sequence
QHGEVFVTEDGAETDLDLGHYERFIRTKM

SEQ ID NO: 69330 - protein, 6 aa, Artificial sequence
  Protein classification predicting sequence
IYSEVL

SEQ ID NO: 69331 - protein, 12 aa, Artificial sequence
  Protein classification predicting sequence
KTKPTQHSVKEL

SEQ ID NO: 69332 - protein, 6 aa, Artificial sequence
  Protein classification predicting sequence
NNFTTG

SEQ ID NO: 69333 - protein, 8 aa, Artificial sequence
  Protein classification predicting sequence
VDSIYKIP

SEQ ID NO: 69334 - protein, 13 aa, Artificial sequence
  Protein classification predicting sequence
NNVPFFGICLGMQ

SEQ ID NO: 69335 - protein, 10 aa, Artificial sequence
  Protein classification predicting sequence
PFFGICLGMQ

SEQ ID NO: 69336 - protein, 6 aa, Artificial sequence
  Protein classification predicting sequence
QFHPEF

SEQ ID NO: 69337 - protein, 6 aa, Artificial sequence
  Protein classification predicting sequence
QVIPHI

SEQ ID NO: 69338 - protein, 8 aa, Artificial sequence
  Protein classification predicting sequence
MRLGLRPT

SEQ ID NO: 69339 - protein, 9 aa, Artificial sequence
  Protein classification predicting sequence
ETDLDLGHY

SEQ ID NO: 69340 - protein, 9 aa, Artificial sequence
  Protein classification predicting sequence
KTKPTQHSV

SEQ ID NO: 69341 - protein, 6 aa, Artificial sequence
  Protein classification predicting sequence
LFCNVP

SEQ ID NO: 69342 - protein, 7 aa, Artificial sequence
  Protein classification predicting sequence
IGLVGKY

SEQ ID NO: 69343 - protein, 19 aa, Artificial sequence
  Protein classification predicting sequence
VAMLKLDPYLNVDPGTMNP

SEQ ID NO: 69344 - protein, 15 aa, Artificial sequence
  Protein classification predicting sequence
KLDPYLNVDPGTMNP

SEQ ID NO: 69345 - protein, 11 aa, Artificial sequence
  Protein classification predicting sequence
GDIESLPFLEA

SEQ ID NO: 69346 - protein, 7 aa, Artificial sequence
  Protein classification predicting sequence
KPTQHSV

SEQ ID NO: 69347 - protein, 7 aa, Artificial sequence
  Protein classification predicting sequence
LVPGGFG

SEQ ID NO: 69348 - protein, 7 aa, Artificial sequence
  Protein classification predicting sequence
IFVTGGV

SEQ ID NO: 69349 - protein, 7 aa, Artificial sequence
  Protein classification predicting sequence
TVQVVPH

SEQ ID NO: 69350 - protein, 6 aa, Artificial sequence
  Protein classification predicting sequence
PYIKAA

SEQ ID NO: 69351 - protein, 7 aa, Artificial sequence
  Protein classification predicting sequence
GIQPDIL

SEQ ID NO: 69352 - protein, 7 aa, Artificial sequence
  Protein classification predicting sequence
HPELKSR

SEQ ID NO: 69353 - protein, 9 aa, Artificial sequence
  Protein classification predicting sequence
KERRGDYLG

SEQ ID NO: 69354 - protein, 11 aa, Artificial sequence
  Protein classification predicting sequence
QVIPHITNAIK

SEQ ID NO: 69355 - protein, 14 aa, Artificial sequence
  Protein classification predicting sequence
GDIESLPFLEAIRQ

SEQ ID NO: 69356 - protein, 14 aa, Artificial sequence
  Protein classification predicting sequence
ERHRHRYEFNNEYR

SEQ ID NO: 69357 - protein, 17 aa, Artificial sequence
  Protein classification predicting sequence
TGGVVSSLGKGLTAASL

SEQ ID NO: 69358 - protein, 6 aa, Artificial sequence
  Protein classification predicting sequence
VYSTVI

SEQ ID NO: 69359 - protein, 9 aa, Artificial sequence
  Protein classification predicting sequence
KERRGEYLG

SEQ ID NO: 69360 - protein, 21 aa, Artificial sequence
  Protein classification predicting sequence
GGTVGDIESQPFLEAARQVRH

SEQ ID NO: 69361 - protein, 8 aa, Artificial sequence
  Protein classification predicting sequence
LPFRDVDW

SEQ ID NO: 69362 - protein, 8 aa, Artificial sequence
  Protein classification predicting sequence
PGGFGIRG

SEQ ID NO: 69363 - protein, 9 aa, Artificial sequence
  Protein classification predicting sequence
LGLCLGLQC

SEQ ID NO: 69364 - protein, 7 aa, Artificial sequence
  Protein classification predicting sequence
KIDPYIN

SEQ ID NO: 69365 - protein, 7 aa, Artificial sequence
  Protein classification predicting sequence
GAETDLD

SEQ ID NO: 69366 - protein, 7 aa, Artificial sequence
  Protein classification predicting sequence
HLTLVPY

SEQ ID NO: 69367 - protein, 6 aa, Artificial sequence
  Protein classification predicting sequence
RGIEGK

SEQ ID NO: 69368 - protein, 8 aa, Artificial sequence
  Protein classification predicting sequence
HPEFKSRP

SEQ ID NO: 69369 - protein, 8 aa, Artificial sequence
  Protein classification predicting sequence
FAGFVKAA

SEQ ID NO: 69370 - protein, 7 aa, Artificial sequence
  Protein classification predicting sequence
ARENNIP

SEQ ID NO: 69371 - protein, 6 aa, Artificial sequence
  Protein classification predicting sequence
HGEVYV

SEQ ID NO: 69372 - protein, 6 aa, Artificial sequence
  Protein classification predicting sequence
ERHRHR

SEQ ID NO: 69373 - protein, 9 aa, Artificial sequence
  Protein classification predicting sequence
GDYLGKTVQ

SEQ ID NO: 69374 - protein, 11 aa, Artificial sequence
  Protein classification predicting sequence
PDVCIIELGGT

SEQ ID NO: 69375 - protein, 24 aa, Artificial sequence
  Protein classification predicting sequence
TNYIFVTGGVVSSLGKGIAAASLA

SEQ ID NO: 69376 - protein, 21 aa, Artificial sequence
  Protein classification predicting sequence
IFVTGGVVSSLGKGIAAASLA

SEQ ID NO: 69377 - protein, 7 aa, Artificial sequence
  Protein classification predicting sequence
ILEARGL

SEQ ID NO: 69378 - protein, 27 aa, Artificial sequence
  Protein classification predicting sequence
ILEARGLNVTIMKLDPYINVDPGTMSP

SEQ ID NO: 69379 - protein, 13 aa, Artificial sequence
  Protein classification predicting sequence
DPYINVDPGTMSP

SEQ ID NO: 69380 - protein, 7 aa, Artificial sequence
  Protein classification predicting sequence
LICRSDR

SEQ ID NO: 69381 - protein, 17 aa, Artificial sequence
  Protein classification predicting sequence
IPANERKKIALFCNVPE

SEQ ID NO: 69382 - protein, 10 aa, Artificial sequence
  Protein classification predicting sequence
KIALFCNVPE

SEQ ID NO: 69383 - protein, 7 aa, Artificial sequence
  Protein classification predicting sequence
LSEWEQV

SEQ ID NO: 69384 - protein, 9 aa, Artificial sequence
  Protein classification predicting sequence
ELPDAYKSV

SEQ ID NO: 69385 - protein, 10 aa, Artificial sequence
  Protein classification predicting sequence
PYLGICLGMQ

SEQ ID NO: 69386 - protein, 17 aa, Artificial sequence
  Protein classification predicting sequence
QFHPEFTSTPRDGHPLF

SEQ ID NO: 69387 - protein, 21 aa, Artificial sequence
  Protein classification predicting sequence
QFHPEFTSTPRDGHPLFAGFV

SEQ ID NO: 69388 - protein, 27 aa, Artificial sequence
  Protein classification predicting sequence
DGAETDLDLGHYERFIRTKMTKRNNFT

SEQ ID NO: 69389 - protein, 8 aa, Artificial sequence
  Protein classification predicting sequence
KIALFCNV

SEQ ID NO: 69390 - protein, 7 aa, Artificial sequence
  Protein classification predicting sequence
DSQDVET

SEQ ID NO: 69391 - protein, 10 aa, Artificial sequence
  Protein classification predicting sequence
SDLGGTMRLG

SEQ ID NO: 69392 - protein, 14 aa, Artificial sequence
  Protein classification predicting sequence
SDLGGTMRLGAQQC

SEQ ID NO: 69393 - protein, 10 aa, Artificial sequence
  Protein classification predicting sequence
PQIEKAGLKV

SEQ ID NO: 69394 - protein, 10 aa, Artificial sequence
  Protein classification predicting sequence
GLSADKKLVE

SEQ ID NO: 69395 - protein, 7 aa, Artificial sequence
  Protein classification predicting sequence
DPYLNVD

SEQ ID NO: 69396 - protein, 7 aa, Artificial sequence
  Protein classification predicting sequence
PYQHGEV

SEQ ID NO: 69397 - protein, 7 aa, Artificial sequence
  Protein classification predicting sequence
TVQIIPH

SEQ ID NO: 69398 - protein, 8 aa, Artificial sequence
  Protein classification predicting sequence
PFLGLCLG

SEQ ID NO: 69399 - protein, 6 aa, Artificial sequence
  Protein classification predicting sequence
LGLCLG

SEQ ID NO: 69400 - protein, 8 aa, Artificial sequence
  Protein classification predicting sequence
ERHRHRYE

SEQ ID NO: 69401 - protein, 7 aa, Artificial sequence
  Protein classification predicting sequence
DPYINID

SEQ ID NO: 69402 - protein, 8 aa, Artificial sequence
  Protein classification predicting sequence
ERKGEYLG

SEQ ID NO: 69403 - protein, 8 aa, Artificial sequence
  Protein classification predicting sequence
TDEIKRRI

SEQ ID NO: 69404 - protein, 8 aa, Artificial sequence
  Protein classification predicting sequence
ILVPGGFG

SEQ ID NO: 69405 - protein, 7 aa, Artificial sequence
  Protein classification predicting sequence
RGIEGKI

SEQ ID NO: 69406 - protein, 9 aa, Artificial sequence
  Protein classification predicting sequence
VTSIKIDPY

SEQ ID NO: 69407 - protein, 8 aa, Artificial sequence
  Protein classification predicting sequence
PFLGVCLG

SEQ ID NO: 69408 - protein, 9 aa, Artificial sequence
  Protein classification predicting sequence
VEFSRNVLG

SEQ ID NO: 69409 - protein, 6 aa, Artificial sequence
  Protein classification predicting sequence
QKFDPY

SEQ ID NO: 69410 - protein, 9 aa, Artificial sequence
  Protein classification predicting sequence
GEYLGATVQ

SEQ ID NO: 69411 - protein, 9 aa, Artificial sequence
  Protein classification predicting sequence
LKEKIKRAA

SEQ ID NO: 69412 - protein, 8 aa, Artificial sequence
  Protein classification predicting sequence
EVGGTVGD

SEQ ID NO: 69413 - protein, 15 aa, Artificial sequence
  Protein classification predicting sequence
DVEHLYQIPLNLQAQ

SEQ ID NO: 69414 - protein, 8 aa, Artificial sequence
  Protein classification predicting sequence
KIALVGKY

SEQ ID NO: 69415 - protein, 8 aa, Artificial sequence
  Protein classification predicting sequence
WVNANDVT

SEQ ID NO: 69416 - protein, 7 aa, Artificial sequence
  Protein classification predicting sequence
IDIMRDQ

SEQ ID NO: 69417 - protein, 11 aa, Artificial sequence
  Protein classification predicting sequence
MGGTLRLGLYP

SEQ ID NO: 69418 - protein, 10 aa, Artificial sequence
  Protein classification predicting sequence
RHRHRYEFNN

SEQ ID NO: 69419 - protein, 18 aa, Artificial sequence
  Protein classification predicting sequence
QYHPELQSRPNRPEELYT

SEQ ID NO: 69420 - protein, 7 aa, Artificial sequence
  Protein classification predicting sequence
EWSAMVD

SEQ ID NO: 69421 - protein, 9 aa, Artificial sequence
  Protein classification predicting sequence
GIIVPGGFG

SEQ ID NO: 69422 - protein, 11 aa, Artificial sequence
  Protein classification predicting sequence
VTIQKFDPYIN

SEQ ID NO: 69423 - protein, 7 aa, Artificial sequence
  Protein classification predicting sequence
EALRQMK

SEQ ID NO: 69424 - protein, 9 aa, Artificial sequence
  Protein classification predicting sequence
YIHTTLIPY

SEQ ID NO: 69425 - protein, 8 aa, Artificial sequence
  Protein classification predicting sequence
GIQPNMLV

SEQ ID NO: 69426 - protein, 6 aa, Artificial sequence
  Protein classification predicting sequence
DAYISV

SEQ ID NO: 69427 - protein, 6 aa, Artificial sequence
  Protein classification predicting sequence
SSLGKG

SEQ ID NO: 69428 - protein, 7 aa, Artificial sequence
  Protein classification predicting sequence
PHITNEI

SEQ ID NO: 69429 - protein, 6 aa, Artificial sequence
  Protein classification predicting sequence
WFIGVQ

SEQ ID NO: 69430 - protein, 7 aa, Artificial sequence
  Protein classification predicting sequence
HPLFAGF

SEQ ID NO: 69431 - protein, 13 aa, Artificial sequence
  Protein classification predicting sequence
DPGTMSPYQHGEV

SEQ ID NO: 69432 - protein, 22 aa, Artificial sequence
  Protein classification predicting sequence
ITEIGGTVGDIESLPFLEAIRQ

SEQ ID NO: 69433 - protein, 17 aa, Artificial sequence
  Protein classification predicting sequence
IGLVGKYVSLQDAYLSV

SEQ ID NO: 69434 - protein, 8 aa, Artificial sequence
  Protein classification predicting sequence
FGICLGMQ

SEQ ID NO: 69435 - protein, 9 aa, Artificial sequence
  Protein classification predicting sequence
TSPDGRLVE

SEQ ID NO: 69436 - protein, 8 aa, Artificial sequence
  Protein classification predicting sequence
PFLEAVRQ

SEQ ID NO: 69437 - protein, 7 aa, Artificial sequence
  Protein classification predicting sequence
VGKYTNL

SEQ ID NO: 69438 - protein, 10 aa, Artificial sequence
  Protein classification predicting sequence
ERHRHRYEVN

SEQ ID NO: 69439 - protein, 8 aa, Artificial sequence
  Protein classification predicting sequence
IDAGTMSP

SEQ ID NO: 69440 - protein, 6 aa, Artificial sequence
  Protein classification predicting sequence
NITTGK

SEQ ID NO: 69441 - protein, 7 aa, Artificial sequence
  Protein classification predicting sequence
ENVLYIH

SEQ ID NO: 69442 - protein, 7 aa, Artificial sequence
  Protein classification predicting sequence
GLEGANS

SEQ ID NO: 69443 - protein, 6 aa, Artificial sequence
  Protein classification predicting sequence
TGGVVS

SEQ ID NO: 69444 - protein, 15 aa, Artificial sequence
  Protein classification predicting sequence
DVVLVEIGGTVGDIE

SEQ ID NO: 69445 - protein, 12 aa, Artificial sequence
  Protein classification predicting sequence
ARENDIPFLGIC

SEQ ID NO: 69446 - protein, 13 aa, Artificial sequence
  Protein classification predicting sequence
VTGGVVSSIGKGI

SEQ ID NO: 69447 - protein, 8 aa, Artificial sequence
  Protein classification predicting sequence
GKGITAAS

SEQ ID NO: 69448 - protein, 6 aa, Artificial sequence
  Protein classification predicting sequence
ADLSEW

SEQ ID NO: 69449 - protein, 6 aa, Artificial sequence
  Protein classification predicting sequence
EALKHA

SEQ ID NO: 69450 - protein, 9 aa, Artificial sequence
  Protein classification predicting sequence
GGTVGDIES

SEQ ID NO: 69451 - protein, 7 aa, Artificial sequence
  Protein classification predicting sequence
SGTSPDG

SEQ ID NO: 69452 - protein, 7 aa, Artificial sequence
  Protein classification predicting sequence
PYEHGEV

SEQ ID NO: 69453 - protein, 7 aa, Artificial sequence
  Protein classification predicting sequence
GGTLRLG

SEQ ID NO: 69454 - protein, 6 aa, Artificial sequence
  Protein classification predicting sequence
HPEFTS

SEQ ID NO: 69455 - protein, 9 aa, Artificial sequence
  Protein classification predicting sequence
VPYIAAAGE

SEQ ID NO: 69456 - protein, 7 aa, Artificial sequence
  Protein classification predicting sequence
KTKPTQH

SEQ ID NO: 69457 - protein, 8 aa, Artificial sequence
  Protein classification predicting sequence
QPDILICR

SEQ ID NO: 69458 - protein, 10 aa, Artificial sequence
  Protein classification predicting sequence
DAILVPGGFG

SEQ ID NO: 69459 - protein, 9 aa, Artificial sequence
  Protein classification predicting sequence
SVIKALEHS

SEQ ID NO: 69460 - protein, 6 aa, Artificial sequence
  Protein classification predicting sequence
IGIQPD

SEQ ID NO: 69461 - protein, 12 aa, Artificial sequence
  Protein classification predicting sequence
IGIQPDVLLCRS

SEQ ID NO: 69462 - protein, 7 aa, Artificial sequence
  Protein classification predicting sequence
LITEWRD

SEQ ID NO: 69463 - protein, 25 aa, Artificial sequence
  Protein classification predicting sequence
VTIQKFDPYINVDPGTMSPYQHGEV

SEQ ID NO: 69464 - protein, 15 aa, Artificial sequence
  Protein classification predicting sequence
NVDPGTMSPYQHGEV

SEQ ID NO: 69465 - protein, 8 aa, Artificial sequence
  Protein classification predicting sequence
VMYVHCTL

SEQ ID NO: 69466 - protein, 19 aa, Artificial sequence
  Protein classification predicting sequence
KTKPTQHSVKELRSLGIQP

SEQ ID NO: 69467 - protein, 8 aa, Artificial sequence
  Protein classification predicting sequence
DAYLSVVE

SEQ ID NO: 69468 - protein, 8 aa, Artificial sequence
  Protein classification predicting sequence
QFHPEFTS

SEQ ID NO: 69469 - protein, 14 aa, Artificial sequence
  Protein classification predicting sequence
EVGGTVGDIESLPF

SEQ ID NO: 69470 - protein, 7 aa, Artificial sequence
  Protein classification predicting sequence
IEYARNV

SEQ ID NO: 69471 - protein, 6 aa, Artificial sequence
  Protein classification predicting sequence
LVCRSD

SEQ ID NO: 69472 - protein, 6 aa, Artificial sequence
  Protein classification predicting sequence
RTKVNL

SEQ ID NO: 69473 - protein, 18 aa, Artificial sequence
  Protein classification predicting sequence
DGAETDLDLGHYERFIRT

SEQ ID NO: 69474 - protein, 6 aa, Artificial sequence
  Protein classification predicting sequence
TTGRIY

SEQ ID NO: 69475 - protein, 7 aa, Artificial sequence
  Protein classification predicting sequence
QVIPHIT

SEQ ID NO: 69476 - protein, 10 aa, Artificial sequence
  Protein classification predicting sequence
QPDVLICRSD

SEQ ID NO: 69477 - protein, 12 aa, Artificial sequence
  Protein classification predicting sequence
PYLGICLGMQVA

SEQ ID NO: 69478 - protein, 6 aa, Artificial sequence
  Protein classification predicting sequence
SQGLDD

SEQ ID NO: 69479 - protein, 9 aa, Artificial sequence
  Protein classification predicting sequence
IFVTGGVVS

SEQ ID NO: 69480 - protein, 9 aa, Artificial sequence
  Protein classification predicting sequence
TVQVIPHIT

SEQ ID NO: 69481 - protein, 7 aa, Artificial sequence
  Protein classification predicting sequence
IPFLGIC

SEQ ID NO: 69482 - protein, 23 aa, Artificial sequence
  Protein classification predicting sequence
IPFLGICFGFQLTVVEFARNVLG

SEQ ID NO: 69483 - protein, 8 aa, Artificial sequence
  Protein classification predicting sequence
EFARNVLG

SEQ ID NO: 69484 - protein, 23 aa, Artificial sequence
  Protein classification predicting sequence
GAHSTEIDPQTPYPVVDLMPEQR

SEQ ID NO: 69485 - protein, 8 aa, Artificial sequence
  Protein classification predicting sequence
VYERHRHR

SEQ ID NO: 69486 - protein, 6 aa, Artificial sequence
  Protein classification predicting sequence
EVNPDY

SEQ ID NO: 69487 - protein, 8 aa, Artificial sequence
  Protein classification predicting sequence
DGAETDLD

SEQ ID NO: 69488 - protein, 17 aa, Artificial sequence
  Protein classification predicting sequence
EIGGTVGDIESLPFLEA

SEQ ID NO: 69489 - protein, 15 aa, Artificial sequence
  Protein classification predicting sequence
GGTVGDIESLPFLEA

SEQ ID NO: 69490 - protein, 8 aa, Artificial sequence
  Protein classification predicting sequence
YKSLIEAL

SEQ ID NO: 69491 - protein, 11 aa, Artificial sequence
  Protein classification predicting sequence
TGGVVSSLGKG

SEQ ID NO: 69492 - protein, 6 aa, Artificial sequence
  Protein classification predicting sequence
KIALFC

SEQ ID NO: 69493 - protein, 20 aa, Artificial sequence
  Protein classification predicting sequence
EIGGTVGDIESLPFLEAIRQ

SEQ ID NO: 69494 - protein, 8 aa, Artificial sequence
  Protein classification predicting sequence
PFLEAIRQ

SEQ ID NO: 69495 - protein, 9 aa, Artificial sequence
  Protein classification predicting sequence
FMHLTLVPY

SEQ ID NO: 69496 - protein, 15 aa, Artificial sequence
  Protein classification predicting sequence
KIALFCNVPEKAVIS

SEQ ID NO: 69497 - protein, 10 aa, Artificial sequence
  Protein classification predicting sequence
KDVDSIYKIP

SEQ ID NO: 69498 - protein, 14 aa, Artificial sequence
  Protein classification predicting sequence
LSEWEQVIYEEANP

SEQ ID NO: 69499 - protein, 20 aa, Artificial sequence
  Protein classification predicting sequence
EVTIGMVGKYIELPDAYKSV

SEQ ID NO: 69500 - protein, 9 aa, Artificial sequence
  Protein classification predicting sequence
DDSLVRQLY

SEQ ID NO: 69501 - protein, 25 aa, Artificial sequence
  Protein classification predicting sequence
GEVKTKPTQHSVKELLSIGIQPDIL

SEQ ID NO: 69502 - protein, 42 aa, Artificial sequence
  Protein classification predicting sequence
KDVDSIYKIPGLLKSQGLDDYICKRFSLNCPEANLSEWEQVI

SEQ ID NO: 69503 - protein, 25 aa, Artificial sequence
  Protein classification predicting sequence
NANSTEFVPDCKYPVVALITEWRDE

SEQ ID NO: 69504 - protein, 25 aa, Artificial sequence
  Protein classification predicting sequence
GNVEVRSEKSDLGGTMRLGAQQCQL

SEQ ID NO: 69505 - protein, 21 aa, Artificial sequence
  Protein classification predicting sequence
TIVERHRHRYEVNNMLLKQIE

SEQ ID NO: 69506 - protein, 7 aa, Artificial sequence
  Protein classification predicting sequence
PHVTNEI

SEQ ID NO: 69507 - protein, 9 aa, Artificial sequence
  Protein classification predicting sequence
IHVSLVPVI

SEQ ID NO: 69508 - protein, 9 aa, Artificial sequence
  Protein classification predicting sequence
FCHVGPEQV

SEQ ID NO: 69509 - protein, 6 aa, Artificial sequence
  Protein classification predicting sequence
STYHVP

SEQ ID NO: 69510 - protein, 7 aa, Artificial sequence
  Protein classification predicting sequence
AVIEFAR

SEQ ID NO: 69511 - protein, 9 aa, Artificial sequence
  Protein classification predicting sequence
LGKGITASS

SEQ ID NO: 69512 - protein, 16 aa, Artificial sequence
  Protein classification predicting sequence
ITEIGGTVGDIESLPF

SEQ ID NO: 69513 - protein, 14 aa, Artificial sequence
  Protein classification predicting sequence
EIGGTVGDIESLPF

SEQ ID NO: 69514 - protein, 8 aa, Artificial sequence
  Protein classification predicting sequence
NNDYREQL

SEQ ID NO: 69515 - protein, 8 aa, Artificial sequence
  Protein classification predicting sequence
GDIESLPF

SEQ ID NO: 69516 - protein, 25 aa, Artificial sequence
  Protein classification predicting sequence
KAAGEMKTKPTQHSVKELRGLGIQP

SEQ ID NO: 69517 - protein, 13 aa, Artificial sequence
  Protein classification predicting sequence
KTKPTQHSVKELR

SEQ ID NO: 69518 - protein, 7 aa, Artificial sequence
  Protein classification predicting sequence
SLGRLLK

SEQ ID NO: 69519 - protein, 9 aa, Artificial sequence
  Protein classification predicting sequence
VTIQKFDPY

SEQ ID NO: 69520 - protein, 25 aa, Artificial sequence
  Protein classification predicting sequence
VTDDGAETDLDLGHYERFIDINLNK

SEQ ID NO: 69521 - protein, 68 aa, Artificial sequence
  Protein classification predicting sequence
SNVTAGKVYSHVLKKERRGDYLGGTVQVIPHITNEIKERLLLAGESTNADVVITEIGGTTGDIESLPF

SEQ ID NO: 69522 - protein, 10 aa, Artificial sequence
  Protein classification predicting sequence
KDKIALFCDI

SEQ ID NO: 69523 - protein, 21 aa, Artificial sequence
  Protein classification predicting sequence
KESVIECRDADSLYEIPLQLS

SEQ ID NO: 69524 - protein, 8 aa, Artificial sequence
  Protein classification predicting sequence
QNMDDIVI

SEQ ID NO: 69525 - protein, 16 aa, Artificial sequence
  Protein classification predicting sequence
RLQLNAKYETQLDEWK

SEQ ID NO: 69526 - protein, 37 aa, Artificial sequence
  Protein classification predicting sequence
VNNLDGKITIGLVGKYVSLQDAYLSVVESLKHAGYPF

SEQ ID NO: 69527 - protein, 7 aa, Artificial sequence
  Protein classification predicting sequence
WIDSSEV

SEQ ID NO: 69528 - protein, 12 aa, Artificial sequence
  Protein classification predicting sequence
DVDGILVPGGFG

SEQ ID NO: 69529 - protein, 20 aa, Artificial sequence
  Protein classification predicting sequence
DVDGILVPGGFGFRASEGKI

SEQ ID NO: 69530 - protein, 14 aa, Artificial sequence
  Protein classification predicting sequence
FGICLGMQLATVEF

SEQ ID NO: 69531 - protein, 7 aa, Artificial sequence
  Protein classification predicting sequence
EGAHSAE

SEQ ID NO: 69532 - protein, 29 aa, Artificial sequence
  Protein classification predicting sequence
TPYPIIDLLPEQKDIEDLGGTLRLGLYPC

SEQ ID NO: 69533 - protein, 11 aa, Artificial sequence
  Protein classification predicting sequence
GGTLRLGLYPC

SEQ ID NO: 69534 - protein, 20 aa, Artificial sequence
  Protein classification predicting sequence
NDFFIACQFHPEFLSRPNRP

SEQ ID NO: 69535 - protein, 17 aa, Artificial sequence
  Protein classification predicting sequence
GGVASSLGKGLTASSLG

SEQ ID NO: 69536 - protein, 35 aa, Artificial sequence
  Protein classification predicting sequence
GSANVTTGQVYSTVIAKERRGEYLGDTVQVIPHIT

SEQ ID NO: 69537 - protein, 8 aa, Artificial sequence
  Protein classification predicting sequence
GIQPDAIV

SEQ ID NO: 69538 - protein, 8 aa, Artificial sequence
  Protein classification predicting sequence
SIYDIPKV

SEQ ID NO: 69539 - protein, 6 aa, Artificial sequence
  Protein classification predicting sequence
HPLFAG

SEQ ID NO: 69540 - protein, 11 aa, Artificial sequence
  Protein classification predicting sequence
MDQIVCDHLKL

SEQ ID NO: 69541 - protein, 16 aa, Artificial sequence
  Protein classification predicting sequence
GEYLGATVQVIPHITD

SEQ ID NO: 69542 - protein, 10 aa, Artificial sequence
  Protein classification predicting sequence
TVQVIPHITD

SEQ ID NO: 69543 - protein, 13 aa, Artificial sequence
  Protein classification predicting sequence
QGIKNKLAQFCDV

SEQ ID NO: 69544 - protein, 16 aa, Artificial sequence
  Protein classification predicting sequence
ADMTEWSAMVDKVMNL

SEQ ID NO: 69545 - protein, 7 aa, Artificial sequence
  Protein classification predicting sequence
VLGLEGA

SEQ ID NO: 69546 - protein, 17 aa, Artificial sequence
  Protein classification predicting sequence
SRPNRPEELYTAFVTAA

SEQ ID NO: 69547 - protein, 35 aa, Artificial sequence
  Protein classification predicting sequence
TTDSDVIITEVGGTVGDIESLPFLEALRQMKADVG

SEQ ID NO: 69548 - protein, 35 aa, Artificial sequence
  Protein classification predicting sequence
DADGIIVPGGFGQRGTEGKIQAIRYARENDVPMLG

SEQ ID NO: 69549 - protein, 28 aa, Artificial sequence
  Protein classification predicting sequence
TKYPIIDIMRDQIDIEDMGGTLRLGLYP

SEQ ID NO: 69550 - protein, 22 aa, Artificial sequence
  Protein classification predicting sequence
FEAAGFVFSGVSPDNRLVEIVE

SEQ ID NO: 69551 - protein, 6 aa, Artificial sequence
  Protein classification predicting sequence
LVEIIE

SEQ ID NO: 69552 - protein, 8 aa, Artificial sequence
  Protein classification predicting sequence
KIALFTNV

SEQ ID NO: 69553 - protein, 6 aa, Artificial sequence
  Protein classification predicting sequence
GFGSRG

SEQ ID NO: 69554 - protein, 7 aa, Artificial sequence
  Protein classification predicting sequence
LEDAGLV

SEQ ID NO: 69555 - protein, 12 aa, Artificial sequence
  Protein classification predicting sequence
AIKYARENNVPF

SEQ ID NO: 69556 - protein, 12 aa, Artificial sequence
  Protein classification predicting sequence
YEVPLLLEREGL

SEQ ID NO: 69557 - protein, 10 aa, Artificial sequence
  Protein classification predicting sequence
GTSPDGRLVE

SEQ ID NO: 69558 - protein, 11 aa, Artificial sequence
  Protein classification predicting sequence
EIGGTVGDIES

SEQ ID NO: 69559 - protein, 6 aa, Artificial sequence
  Protein classification predicting sequence
SGTSPD

SEQ ID NO: 69560 - protein, 8 aa, Artificial sequence
  Protein classification predicting sequence
ACQFHPEF

SEQ ID NO: 69561 - protein, 7 aa, Artificial sequence
  Protein classification predicting sequence
WIDSEKV

SEQ ID NO: 69562 - protein, 11 aa, Artificial sequence
  Protein classification predicting sequence
ERHRHRYEVNP

SEQ ID NO: 69563 - protein, 9 aa, Artificial sequence
  Protein classification predicting sequence
TPYPVVDLM

SEQ ID NO: 69564 - protein, 8 aa, Artificial sequence
  Protein classification predicting sequence
QHGEVFVT

SEQ ID NO: 69565 - protein, 7 aa, Artificial sequence
  Protein classification predicting sequence
SNVTAGK

SEQ ID NO: 69566 - protein, 7 aa, Artificial sequence
  Protein classification predicting sequence
QHSVKEL

SEQ ID NO: 69567 - protein, 9 aa, Artificial sequence
  Protein classification predicting sequence
MQKLDPYLN

SEQ ID NO: 69568 - protein, 7 aa, Artificial sequence
  Protein classification predicting sequence
KLDPYLN

SEQ ID NO: 69569 - protein, 33 aa, Artificial sequence
  Protein classification predicting sequence
PYLGICLGMQVALIEYARNVAGMEGAHSTEFNK

SEQ ID NO: 69570 - protein, 14 aa, Artificial sequence
  Protein classification predicting sequence
TKYPVVGLITEWVD

SEQ ID NO: 69571 - protein, 11 aa, Artificial sequence
  Protein classification predicting sequence
ERHRHRYEVNN

SEQ ID NO: 69572 - protein, 23 aa, Artificial sequence
  Protein classification predicting sequence
LRPQIEKAGLKVSGLSADKKLVE

SEQ ID NO: 69573 - protein, 7 aa, Artificial sequence
  Protein classification predicting sequence
KSQGLDD

SEQ ID NO: 69574 - protein, 7 aa, Artificial sequence
  Protein classification predicting sequence
AVEIGRE

SEQ ID NO: 69575 - protein, 8 aa, Artificial sequence
  Protein classification predicting sequence
KLDPYINV

SEQ ID NO: 69576 - protein, 8 aa, Artificial sequence
  Protein classification predicting sequence
GKIYSEVL

SEQ ID NO: 69577 - protein, 8 aa, Artificial sequence
  Protein classification predicting sequence
GKYTELPD

SEQ ID NO: 69578 - protein, 8 aa, Artificial sequence
  Protein classification predicting sequence
HAGLKNRL

SEQ ID NO: 69579 - protein, 17 aa, Artificial sequence
  Protein classification predicting sequence
VTDDGAETDLDLGHYER

SEQ ID NO: 69580 - protein, 10 aa, Artificial sequence
  Protein classification predicting sequence
STPRDGHPLF

SEQ ID NO: 69581 - protein, 11 aa, Artificial sequence
  Protein classification predicting sequence
ILEARGLKVTM

SEQ ID NO: 69582 - protein, 16 aa, Artificial sequence
  Protein classification predicting sequence
DVALVEIGGTVGDIES

SEQ ID NO: 69583 - protein, 13 aa, Artificial sequence
  Protein classification predicting sequence
LVEIGGTVGDIES

SEQ ID NO: 69584 - protein, 6 aa, Artificial sequence
  Protein classification predicting sequence
GFVKAA

SEQ ID NO: 69585 - protein, 16 aa, Artificial sequence
  Protein classification predicting sequence
MKLDPYINVDPGTMSP

SEQ ID NO: 69586 - protein, 15 aa, Artificial sequence
  Protein classification predicting sequence
KLDPYINVDPGTMSP

SEQ ID NO: 69587 - protein, 12 aa, Artificial sequence
  Protein classification predicting sequence
RRNNFTTGRIYS

SEQ ID NO: 69588 - protein, 8 aa, Artificial sequence
  Protein classification predicting sequence
QVIPHITN

SEQ ID NO: 69589 - protein, 8 aa, Artificial sequence
  Protein classification predicting sequence
MHLTLVPY

SEQ ID NO: 69590 - protein, 35 aa, Artificial sequence
  Protein classification predicting sequence
MHLTLVPYLAAAGEVKTKPTQHSVKELLSIGIQPD

SEQ ID NO: 69591 - protein, 24 aa, Artificial sequence
  Protein classification predicting sequence
AGEVKTKPTQHSVKELLSIGIQPD

SEQ ID NO: 69592 - protein, 6 aa, Artificial sequence
  Protein classification predicting sequence
CPEANL

SEQ ID NO: 69593 - protein, 21 aa, Artificial sequence
  Protein classification predicting sequence
ELPDAYKSVIEALKHGGLKNR

SEQ ID NO: 69594 - protein, 15 aa, Artificial sequence
  Protein classification predicting sequence
VNIKLIDSQDVETRG

SEQ ID NO: 69595 - protein, 6 aa, Artificial sequence
  Protein classification predicting sequence
RGVEGK

SEQ ID NO: 69596 - protein, 6 aa, Artificial sequence
  Protein classification predicting sequence
EFARNV

SEQ ID NO: 69597 - protein, 9 aa, Artificial sequence
  Protein classification predicting sequence
AGLRVAGRS

SEQ ID NO: 69598 - protein, 7 aa, Artificial sequence
  Protein classification predicting sequence
PFAAAAI

SEQ ID NO: 69599 - protein, 10 aa, Artificial sequence
  Protein classification predicting sequence
GIGGDPFNGT

SEQ ID NO: 69600 - protein, 10 aa, Artificial sequence
  Protein classification predicting sequence
VSMSPAQLGT

SEQ ID NO: 69601 - protein, 6 aa, Artificial sequence
  Protein classification predicting sequence
VVKAQI

SEQ ID NO: 69602 - protein, 6 aa, Artificial sequence
  Protein classification predicting sequence
KEYYVG

SEQ ID NO: 69603 - protein, 10 aa, Artificial sequence
  Protein classification predicting sequence
SFLLDRANRT

SEQ ID NO: 69604 - protein, 11 aa, Artificial sequence
  Protein classification predicting sequence
KPLVVRLDGNN

SEQ ID NO: 69605 - protein, 9 aa, Artificial sequence
  Protein classification predicting sequence
EEAVEKAKE

SEQ ID NO: 69606 - protein, 8 aa, Artificial sequence
  Protein classification predicting sequence
LNYVKLDG

SEQ ID NO: 69607 - protein, 7 aa, Artificial sequence
  Protein classification predicting sequence
IGNGAGL

SEQ ID NO: 69608 - protein, 16 aa, Artificial sequence
  Protein classification predicting sequence
AGKQVNRLYIEDGADI

SEQ ID NO: 69609 - protein, 16 aa, Artificial sequence
  Protein classification predicting sequence
AFVVSTEGGMDIEAVA

SEQ ID NO: 69610 - protein, 9 aa, Artificial sequence
  Protein classification predicting sequence
LFPILYKAF

SEQ ID NO: 69611 - protein, 7 aa, Artificial sequence
  Protein classification predicting sequence
KEIEASK

SEQ ID NO: 69612 - protein, 32 aa, Artificial sequence
  Protein classification predicting sequence
DLAYVALDGNIGCMVNGAGLAMATMDIIKLYG

SEQ ID NO: 69613 - protein, 6 aa, Artificial sequence
  Protein classification predicting sequence
AVVDRS

SEQ ID NO: 69614 - protein, 7 aa, Artificial sequence
  Protein classification predicting sequence
EAFKIIL

SEQ ID NO: 69615 - protein, 12 aa, Artificial sequence
  Protein classification predicting sequence
LVTHQTGPEGKE

SEQ ID NO: 69616 - protein, 8 aa, Artificial sequence
  Protein classification predicting sequence
IQKEYYVG

SEQ ID NO: 69617 - protein, 14 aa, Artificial sequence
  Protein classification predicting sequence
MASEEGGTEIEEVA

SEQ ID NO: 69618 - protein, 7 aa, Artificial sequence
  Protein classification predicting sequence
IDPVVGL

SEQ ID NO: 69619 - protein, 9 aa, Artificial sequence
  Protein classification predicting sequence
AFNINIPKE

SEQ ID NO: 69620 - protein, 8 aa, Artificial sequence
  Protein classification predicting sequence
EINPLVTT

SEQ ID NO: 69621 - protein, 17 aa, Artificial sequence
  Protein classification predicting sequence
EEDPKEIEASKYDLSYI

SEQ ID NO: 69622 - protein, 16 aa, Artificial sequence
  Protein classification predicting sequence
VNIFGGIMKCDVIAEG

SEQ ID NO: 69623 - protein, 10 aa, Artificial sequence
  Protein classification predicting sequence
VAFTAEEAVE

SEQ ID NO: 69624 - protein, 15 aa, Artificial sequence
  Protein classification predicting sequence
DGNIGCMVNGAGLAM

SEQ ID NO: 69625 - protein, 16 aa, Artificial sequence
  Protein classification predicting sequence
VVKSQIHAGGRGKGKF

SEQ ID NO: 69626 - protein, 8 aa, Artificial sequence
  Protein classification predicting sequence
LVTHQTGP

SEQ ID NO: 69627 - protein, 7 aa, Artificial sequence
  Protein classification predicting sequence
RLYIEEG

SEQ ID NO: 69628 - protein, 8 aa, Artificial sequence
  Protein classification predicting sequence
KIVAAVKG

SEQ ID NO: 69629 - protein, 7 aa, Artificial sequence
  Protein classification predicting sequence
HAGGRGK

SEQ ID NO: 69630 - protein, 9 aa, Artificial sequence
  Protein classification predicting sequence
QVHAGGRGK

SEQ ID NO: 69631 - protein, 10 aa, Artificial sequence
  Protein classification predicting sequence
EIEKVAEETP

SEQ ID NO: 69632 - protein, 20 aa, Artificial sequence
  Protein classification predicting sequence
LDGNVGCMVNGAGLAMGTMD

SEQ ID NO: 69633 - protein, 15 aa, Artificial sequence
  Protein classification predicting sequence
GCMVNGAGLAMGTMD

SEQ ID NO: 69634 - protein, 7 aa, Artificial sequence
  Protein classification predicting sequence
DIAEEYY

SEQ ID NO: 69635 - protein, 14 aa, Artificial sequence
  Protein classification predicting sequence
YLAMCSVEGGMEIE

SEQ ID NO: 69636 - protein, 7 aa, Artificial sequence
  Protein classification predicting sequence
LVTYQTD

SEQ ID NO: 69637 - protein, 7 aa, Artificial sequence
  Protein classification predicting sequence
ELYLGAV

SEQ ID NO: 69638 - protein, 6 aa, Artificial sequence
  Protein classification predicting sequence
QWELNY

SEQ ID NO: 69639 - protein, 8 aa, Artificial sequence
  Protein classification predicting sequence
VTEAFKII

SEQ ID NO: 69640 - protein, 10 aa, Artificial sequence
  Protein classification predicting sequence
LGAKKLADSG

SEQ ID NO: 69641 - protein, 16 aa, Artificial sequence
  Protein classification predicting sequence
VKAVLVNIFGGIVRCD

SEQ ID NO: 69642 - protein, 7 aa, Artificial sequence
  Protein classification predicting sequence
GQPVNQI

SEQ ID NO: 69643 - protein, 12 aa, Artificial sequence
  Protein classification predicting sequence
PANFLDVGGGAT

SEQ ID NO: 69644 - protein, 11 aa, Artificial sequence
  Protein classification predicting sequence
ERVAEAFKIIL

SEQ ID NO: 69645 - protein, 7 aa, Artificial sequence
  Protein classification predicting sequence
IHEYQAK

SEQ ID NO: 69646 - protein, 11 aa, Artificial sequence
  Protein classification predicting sequence
IHEYQAKEILR

SEQ ID NO: 69647 - protein, 8 aa, Artificial sequence
  Protein classification predicting sequence
FLDIGGGA

SEQ ID NO: 69648 - protein, 6 aa, Artificial sequence
  Protein classification predicting sequence
NVKGIF

SEQ ID NO: 69649 - protein, 15 aa, Artificial sequence
  Protein classification predicting sequence
FMASTEGGVEIEKVA

SEQ ID NO: 69650 - protein, 9 aa, Artificial sequence
  Protein classification predicting sequence
IEEVAEKTP

SEQ ID NO: 69651 - protein, 7 aa, Artificial sequence
  Protein classification predicting sequence
GDQIKQF

SEQ ID NO: 69652 - protein, 8 aa, Artificial sequence
  Protein classification predicting sequence
EGNLLCLD

SEQ ID NO: 69653 - protein, 8 aa, Artificial sequence
  Protein classification predicting sequence
SQEDPREA

SEQ ID NO: 69654 - protein, 16 aa, Artificial sequence
  Protein classification predicting sequence
PANFLDVGGGATKERV

SEQ ID NO: 69655 - protein, 8 aa, Artificial sequence
  Protein classification predicting sequence
WELNYVAL

SEQ ID NO: 69656 - protein, 39 aa, Artificial sequence
  Protein classification predicting sequence
GCMVNGAGLAMGTMDIVNLHGGKPANFLDVGGGATKERV

SEQ ID NO: 69657 - protein, 32 aa, Artificial sequence
  Protein classification predicting sequence
NVKAVLVNIFGGIVRCDMIAEGIIGAVKEVGV

SEQ ID NO: 69658 - protein, 7 aa, Artificial sequence
  Protein classification predicting sequence
AVKEVGV

SEQ ID NO: 69659 - protein, 17 aa, Artificial sequence
  Protein classification predicting sequence
VPVVVRLEGNNAELGAK

SEQ ID NO: 69660 - protein, 8 aa, Artificial sequence
  Protein classification predicting sequence
KVLAESGL

SEQ ID NO: 69661 - protein, 8 aa, Artificial sequence
  Protein classification predicting sequence
SGLNIIAA

SEQ ID NO: 69662 - protein, 7 aa, Artificial sequence
  Protein classification predicting sequence
GRGKAGG

SEQ ID NO: 69663 - protein, 6 aa, Artificial sequence
  Protein classification predicting sequence
EIEASK

SEQ ID NO: 69664 - protein, 9 aa, Artificial sequence
  Protein classification predicting sequence
AAQKVVAAA

SEQ ID NO: 69665 - protein, 25 aa, Artificial sequence
  Protein classification predicting sequence
LPGPLYVVKSQIHAGGRGKGKFKEL

SEQ ID NO: 69666 - protein, 12 aa, Artificial sequence
  Protein classification predicting sequence
HAGGRGKAGGVK

SEQ ID NO: 69667 - protein, 7 aa, Artificial sequence
  Protein classification predicting sequence
VNRLYIE

SEQ ID NO: 69668 - protein, 19 aa, Artificial sequence
  Protein classification predicting sequence
DGNIGCMVNGAGLAMATMD

SEQ ID NO: 69669 - protein, 8 aa, Artificial sequence
  Protein classification predicting sequence
IAEGIIAA

SEQ ID NO: 69670 - protein, 26 aa, Artificial sequence
  Protein classification predicting sequence
DGNIGCMVNGAGLAMATMDIIKLYGA

SEQ ID NO: 69671 - protein, 20 aa, Artificial sequence
  Protein classification predicting sequence
VYVVKAQIHAGGRGKAGGVK

SEQ ID NO: 69672 - protein, 12 aa, Artificial sequence
  Protein classification predicting sequence
WLGKNLVTYQTD

SEQ ID NO: 69673 - protein, 10 aa, Artificial sequence
  Protein classification predicting sequence
ELYLGAVVDR

SEQ ID NO: 69674 - protein, 23 aa, Artificial sequence
  Protein classification predicting sequence
RRVVFMASTEGGVEIEKVAEETP

SEQ ID NO: 69675 - protein, 11 aa, Artificial sequence
  Protein classification predicting sequence
QFTKIFMGLAT

SEQ ID NO: 69676 - protein, 8 aa, Artificial sequence
  Protein classification predicting sequence
EINPLVIT

SEQ ID NO: 69677 - protein, 10 aa, Artificial sequence
  Protein classification predicting sequence
ELNYVALDGN

SEQ ID NO: 69678 - protein, 36 aa, Artificial sequence
  Protein classification predicting sequence
IRAFAENWLGKRLVTYQTDANGQPVNQILVEAATDI

SEQ ID NO: 69679 - protein, 9 aa, Artificial sequence
  Protein classification predicting sequence
KRLYIEEGC

SEQ ID NO: 69680 - protein, 16 aa, Artificial sequence
  Protein classification predicting sequence
IQKEYYVGFVIDRATD

SEQ ID NO: 69681 - protein, 13 aa, Artificial sequence
  Protein classification predicting sequence
TPEKIFKETIDPV

SEQ ID NO: 69682 - protein, 26 aa, Artificial sequence
  Protein classification predicting sequence
KFLLALYNVFIEKDCSIVEINPLVTT

SEQ ID NO: 69683 - protein, 17 aa, Artificial sequence
  Protein classification predicting sequence
ELRDLEEEDPKEIEASK

SEQ ID NO: 69684 - protein, 11 aa, Artificial sequence
  Protein classification predicting sequence
EEDPKEIEASK

SEQ ID NO: 69685 - protein, 15 aa, Artificial sequence
  Protein classification predicting sequence
QARRIAFNINIPKES

SEQ ID NO: 69686 - protein, 7 aa, Artificial sequence
  Protein classification predicting sequence
NKAAKFL

SEQ ID NO: 69687 - protein, 21 aa, Artificial sequence
  Protein classification predicting sequence
LYNVFIEKDCSIVEINPLVTT

SEQ ID NO: 69688 - protein, 40 aa, Artificial sequence
  Protein classification predicting sequence
DLSYIALDGDIGCMVNGAGLAMATMDTINHFGGNPANFLD

SEQ ID NO: 69689 - protein, 6 aa, Artificial sequence
  Protein classification predicting sequence
NALFRH

SEQ ID NO: 69690 - protein, 7 aa, Artificial sequence
  Protein classification predicting sequence
GTAEEEA

SEQ ID NO: 69691 - protein, 11 aa, Artificial sequence
  Protein classification predicting sequence
HAGGRGKAGGV

SEQ ID NO: 69692 - protein, 22 aa, Artificial sequence
  Protein classification predicting sequence
FAQKWLGKNLVTYQTDANGQPV

SEQ ID NO: 69693 - protein, 22 aa, Artificial sequence
  Protein classification predicting sequence
KILVEEASNIANELYLGAVVDR

SEQ ID NO: 69694 - protein, 20 aa, Artificial sequence
  Protein classification predicting sequence
VFMASTEGGVEIEKVAEETP

SEQ ID NO: 69695 - protein, 9 aa, Artificial sequence
  Protein classification predicting sequence
EAFKIILSD

SEQ ID NO: 69696 - protein, 12 aa, Artificial sequence
  Protein classification predicting sequence
YQGRELAFKLGL

SEQ ID NO: 69697 - protein, 15 aa, Artificial sequence
  Protein classification predicting sequence
GDQIKQFVKIFMGLG

SEQ ID NO: 69698 - protein, 18 aa, Artificial sequence
  Protein classification predicting sequence
VNIFGGIVRCDMIAEGII

SEQ ID NO: 69699 - protein, 12 aa, Artificial sequence
  Protein classification predicting sequence
VNSKEDIRAFAE

SEQ ID NO: 69700 - protein, 13 aa, Artificial sequence
  Protein classification predicting sequence
LVTYQTDANGQPV

SEQ ID NO: 69701 - protein, 10 aa, Artificial sequence
  Protein classification predicting sequence
QILVEAATDI

SEQ ID NO: 69702 - protein, 8 aa, Artificial sequence
  Protein classification predicting sequence
ALDPLTGP

SEQ ID NO: 69703 - protein, 7 aa, Artificial sequence
  Protein classification predicting sequence
FLERDLA

SEQ ID NO: 69704 - protein, 14 aa, Artificial sequence
  Protein classification predicting sequence
AAQWELNYVALDGN

SEQ ID NO: 69705 - protein, 40 aa, Artificial sequence
  Protein classification predicting sequence
GYACTTPREAEEAASKIGAGPWVVKCQVHAGGRGKAGGVK

SEQ ID NO: 69706 - protein, 24 aa, Artificial sequence
  Protein classification predicting sequence
TKQGDLICLDGKLGADGNALFRQP

SEQ ID NO: 69707 - protein, 9 aa, Artificial sequence
  Protein classification predicting sequence
GPNCPGVIT

SEQ ID NO: 69708 - protein, 17 aa, Artificial sequence
  Protein classification predicting sequence
VQGITGSTALFHTKQML

SEQ ID NO: 69709 - protein, 34 aa, Artificial sequence
  Protein classification predicting sequence
ECKIGIMPGYIHKKGHVGVVSRSGTLTYEAVHQL

SEQ ID NO: 69710 - protein, 25 aa, Artificial sequence
  Protein classification predicting sequence
TAVGIGGDPVNGTNFIDVLKAFNED

SEQ ID NO: 69711 - protein, 14 aa, Artificial sequence
  Protein classification predicting sequence
KANMTKPVVGFIGG

SEQ ID NO: 69712 - protein, 11 aa, Artificial sequence
  Protein classification predicting sequence
VGIGGDPVNGT

SEQ ID NO: 69713 - protein, 19 aa, Artificial sequence
  Protein classification predicting sequence
IVAGVTPGKGGQVVEGVPV

SEQ ID NO: 69714 - protein, 12 aa, Artificial sequence
  Protein classification predicting sequence
NTVEEAKNETGA

SEQ ID NO: 69715 - protein, 19 aa, Artificial sequence
  Protein classification predicting sequence
EAADADLDMVICITEHIPV

SEQ ID NO: 69716 - protein, 28 aa, Artificial sequence
  Protein classification predicting sequence
GFIGGQTAPPGKRMGHAGAIISGGKGTA

SEQ ID NO: 69717 - protein, 9 aa, Artificial sequence
  Protein classification predicting sequence
KPVVGFIGG

SEQ ID NO: 69718 - protein, 6 aa, Artificial sequence
  Protein classification predicting sequence
DPTLLF

SEQ ID NO: 69719 - protein, 6 aa, Artificial sequence
  Protein classification predicting sequence
NAGMNQ

SEQ ID NO: 69720 - protein, 8 aa, Artificial sequence
  Protein classification predicting sequence
ERLVSVLQ

SEQ ID NO: 69721 - protein, 6 aa, Artificial sequence
  Protein classification predicting sequence
QKGSLV

SEQ ID NO: 69722 - protein, 6 aa, Artificial sequence
  Protein classification predicting sequence
CGGTHV

SEQ ID NO: 69723 - protein, 6 aa, Artificial sequence
  Protein classification predicting sequence
PNAKAI

SEQ ID NO: 69724 - protein, 7 aa, Artificial sequence
  Protein classification predicting sequence
RIGDNKG

SEQ ID NO: 69725 - protein, 7 aa, Artificial sequence
  Protein classification predicting sequence
PEEDGDR

SEQ ID NO: 69726 - protein, 13 aa, Artificial sequence
  Protein classification predicting sequence
IEIWNNVFMQFNR

SEQ ID NO: 69727 - protein, 11 aa, Artificial sequence
  Protein classification predicting sequence
PSVDTGMGLER

SEQ ID NO: 69728 - protein, 16 aa, Artificial sequence
  Protein classification predicting sequence
RGYVLRRIIRRAVRHG

SEQ ID NO: 69729 - protein, 8 aa, Artificial sequence
  Protein classification predicting sequence
MGDAYPEL

SEQ ID NO: 69730 - protein, 14 aa, Artificial sequence
  Protein classification predicting sequence
GETVFKLYDTYGFP

SEQ ID NO: 69731 - protein, 10 aa, Artificial sequence
  Protein classification predicting sequence
FKLYDTYGFP

SEQ ID NO: 69732 - protein, 7 aa, Artificial sequence
  Protein classification predicting sequence
NHSATHL

SEQ ID NO: 69733 - protein, 7 aa, Artificial sequence
  Protein classification predicting sequence
AKAKGAM

SEQ ID NO: 69734 - protein, 6 aa, Artificial sequence
  Protein classification predicting sequence
GGGKPD

SEQ ID NO: 69735 - protein, 7 aa, Artificial sequence
  Protein classification predicting sequence
PVVARWR

SEQ ID NO: 69736 - protein, 7 aa, Artificial sequence
  Protein classification predicting sequence
GGGNAGP

SEQ ID NO: 69737 - protein, 9 aa, Artificial sequence
  Protein classification predicting sequence
LKIVDTGYG

SEQ ID NO: 69738 - protein, 10 aa, Artificial sequence
  Protein classification predicting sequence
VPSNSGEGYL

SEQ ID NO: 69739 - protein, 7 aa, Artificial sequence
  Protein classification predicting sequence
EIFYDHG

SEQ ID NO: 69740 - protein, 10 aa, Artificial sequence
  Protein classification predicting sequence
SIDTGMGLER

SEQ ID NO: 69741 - protein, 7 aa, Artificial sequence
  Protein classification predicting sequence
NYDTDLF

SEQ ID NO: 69742 - protein, 9 aa, Artificial sequence
  Protein classification predicting sequence
EGRGYVLRR

SEQ ID NO: 69743 - protein, 18 aa, Artificial sequence
  Protein classification predicting sequence
EGRGYVLRRIMRRAMRHA

SEQ ID NO: 69744 - protein, 7 aa, Artificial sequence
  Protein classification predicting sequence
LDGETAF

SEQ ID NO: 69745 - protein, 9 aa, Artificial sequence
  Protein classification predicting sequence
SVELCGGTH

SEQ ID NO: 69746 - protein, 6 aa, Artificial sequence
  Protein classification predicting sequence
FKIISE

SEQ ID NO: 69747 - protein, 14 aa, Artificial sequence
  Protein classification predicting sequence
QKCLRVSGKHNDLE

SEQ ID NO: 69748 - protein, 6 aa, Artificial sequence
  Protein classification predicting sequence
GKHNDL

SEQ ID NO: 69749 - protein, 10 aa, Artificial sequence
  Protein classification predicting sequence
GPCGPSSEIY

SEQ ID NO: 69750 - protein, 6 aa, Artificial sequence
  Protein classification predicting sequence
RVIADH

SEQ ID NO: 69751 - protein, 7 aa, Artificial sequence
  Protein classification predicting sequence
YDTYGFP

SEQ ID NO: 69752 - protein, 7 aa, Artificial sequence
  Protein classification predicting sequence
QAGSLVA

SEQ ID NO: 69753 - protein, 9 aa, Artificial sequence
  Protein classification predicting sequence
EKYGERVRV

SEQ ID NO: 69754 - protein, 6 aa, Artificial sequence
  Protein classification predicting sequence
EPFLYK

SEQ ID NO: 69755 - protein, 6 aa, Artificial sequence
  Protein classification predicting sequence
GGQIGD

SEQ ID NO: 69756 - protein, 10 aa, Artificial sequence
  Protein classification predicting sequence
PWAGGGNAGP

SEQ ID NO: 69757 - protein, 7 aa, Artificial sequence
  Protein classification predicting sequence
DGLVPSN

SEQ ID NO: 69758 - protein, 9 aa, Artificial sequence
  Protein classification predicting sequence
GFRLYQGGV

SEQ ID NO: 69759 - protein, 5 aa, Artificial sequence
  Protein classification predicting sequence
CGGTH

SEQ ID NO: 69760 - protein, 7 aa, Artificial sequence
  Protein classification predicting sequence
RFFEEWK

SEQ ID NO: 69761 - protein, 22 aa, Artificial sequence
  Protein classification predicting sequence
NAQKSIRTNDIENVGKTARHHT

SEQ ID NO: 69762 - protein, 7 aa, Artificial sequence
  Protein classification predicting sequence
YPEVLEK

SEQ ID NO: 69763 - protein, 23 aa, Artificial sequence
  Protein classification predicting sequence
LLADGVKVLVKDVQKAPNGQNLH

SEQ ID NO: 69764 - protein, 15 aa, Artificial sequence
  Protein classification predicting sequence
AKEMGAMALFGEKYG

SEQ ID NO: 69765 - protein, 8 aa, Artificial sequence
  Protein classification predicting sequence
RRIEAVTG

SEQ ID NO: 69766 - protein, 10 aa, Artificial sequence
  Protein classification predicting sequence
HHTMFEMLGN

SEQ ID NO: 69767 - protein, 6 aa, Artificial sequence
  Protein classification predicting sequence
FEMLGN

SEQ ID NO: 69768 - protein, 7 aa, Artificial sequence
  Protein classification predicting sequence
VIADHIR

SEQ ID NO: 69769 - protein, 6 aa, Artificial sequence
  Protein classification predicting sequence
GYVIRR

SEQ ID NO: 69770 - protein, 7 aa, Artificial sequence
  Protein classification predicting sequence
GFPLDLT

SEQ ID NO: 69771 - protein, 13 aa, Artificial sequence
  Protein classification predicting sequence
TPFYAESGGQVGD

SEQ ID NO: 69772 - protein, 9 aa, Artificial sequence
  Protein classification predicting sequence
GDYFKEEAI

SEQ ID NO: 69773 - protein, 6 aa, Artificial sequence
  Protein classification predicting sequence
YPGGEN

SEQ ID NO: 69774 - protein, 10 aa, Artificial sequence
  Protein classification predicting sequence
RYLEVWNLVF

SEQ ID NO: 69775 - protein, 38 aa, Artificial sequence
  Protein classification predicting sequence
RYLEVWNLVFSQFNHNPDGSYTPLPKKNIDTGMGLERM

SEQ ID NO: 69776 - protein, 18 aa, Artificial sequence
  Protein classification predicting sequence
YTPLPKKNIDTGMGLERM

SEQ ID NO: 69777 - protein, 9 aa, Artificial sequence
  Protein classification predicting sequence
FKVIADHIR

SEQ ID NO: 69778 - protein, 14 aa, Artificial sequence
  Protein classification predicting sequence
FKVIADHIRTVTFA

SEQ ID NO: 69779 - protein, 15 aa, Artificial sequence
  Protein classification predicting sequence
KNHTATHLLHRALKD

SEQ ID NO: 69780 - protein, 7 aa, Artificial sequence
  Protein classification predicting sequence
SIELCGG

SEQ ID NO: 69781 - protein, 7 aa, Artificial sequence
  Protein classification predicting sequence
IGLFKIV

SEQ ID NO: 69782 - protein, 9 aa, Artificial sequence
  Protein classification predicting sequence
KEVATRCGG

SEQ ID NO: 69783 - protein, 6 aa, Artificial sequence
  Protein classification predicting sequence
PENPRI

SEQ ID NO: 69784 - protein, 6 aa, Artificial sequence
  Protein classification predicting sequence
KWIGFD

SEQ ID NO: 69785 - protein, 17 aa, Artificial sequence
  Protein classification predicting sequence
FAVGDGALPSNEGRGYV

SEQ ID NO: 69786 - protein, 9 aa, Artificial sequence
  Protein classification predicting sequence
PSNEGRGYV

SEQ ID NO: 69787 - protein, 7 aa, Artificial sequence
  Protein classification predicting sequence
NEGRGYV

SEQ ID NO: 69788 - protein, 7 aa, Artificial sequence
  Protein classification predicting sequence
NINRPFM

SEQ ID NO: 69789 - protein, 8 aa, Artificial sequence
  Protein classification predicting sequence
VKEKADFI

SEQ ID NO: 69790 - protein, 7 aa, Artificial sequence
  Protein classification predicting sequence
VDHEGFE

SEQ ID NO: 69791 - protein, 6 aa, Artificial sequence
  Protein classification predicting sequence
VNEKIW

SEQ ID NO: 69792 - protein, 10 aa, Artificial sequence
  Protein classification predicting sequence
VRVVQVGDYS

SEQ ID NO: 69793 - protein, 7 aa, Artificial sequence
  Protein classification predicting sequence
VNAKDMN

SEQ ID NO: 69794 - protein, 9 aa, Artificial sequence
  Protein classification predicting sequence
LSVTVHPED

SEQ ID NO: 69795 - protein, 23 aa, Artificial sequence
  Protein classification predicting sequence
PEERIIRLEGNFWDIGEGPSGPN

SEQ ID NO: 69796 - protein, 15 aa, Artificial sequence
  Protein classification predicting sequence
DPELYPGGENERYLE

SEQ ID NO: 69797 - protein, 11 aa, Artificial sequence
  Protein classification predicting sequence
WNLVFSQFNHN

SEQ ID NO: 69798 - protein, 17 aa, Artificial sequence
  Protein classification predicting sequence
NEGRGYVLRRLLRRAVR

SEQ ID NO: 69799 - protein, 6 aa, Artificial sequence
  Protein classification predicting sequence
QRQRAR

SEQ ID NO: 69800 - protein, 6 aa, Artificial sequence
  Protein classification predicting sequence
ELQQIE

SEQ ID NO: 69801 - protein, 14 aa, Artificial sequence
  Protein classification predicting sequence
VGDYSLELCGGCHV

SEQ ID NO: 69802 - protein, 8 aa, Artificial sequence
  Protein classification predicting sequence
ELCGGCHV

SEQ ID NO: 69803 - protein, 13 aa, Artificial sequence
  Protein classification predicting sequence
QKAIRTNDIENVG

SEQ ID NO: 69804 - protein, 10 aa, Artificial sequence
  Protein classification predicting sequence
IRTNDIENVG

SEQ ID NO: 69805 - protein, 16 aa, Artificial sequence
  Protein classification predicting sequence
RYLEVWNLVFSEFNHN

SEQ ID NO: 69806 - protein, 6 aa, Artificial sequence
  Protein classification predicting sequence
STFVGY

SEQ ID NO: 69807 - protein, 29 aa, Artificial sequence
  Protein classification predicting sequence
KNHTATHLLHQALKDVLGTHVNQAGSLVT

SEQ ID NO: 69808 - protein, 12 aa, Artificial sequence
  Protein classification predicting sequence
GAMALFGEKYGD

SEQ ID NO: 69809 - protein, 12 aa, Artificial sequence
  Protein classification predicting sequence
VDGVNVLAAKVN

SEQ ID NO: 69810 - protein, 7 aa, Artificial sequence
  Protein classification predicting sequence
FFESKGH

SEQ ID NO: 69811 - protein, 20 aa, Artificial sequence
  Protein classification predicting sequence
SSPLVPRNDPTLMFTNAGMV

SEQ ID NO: 69812 - protein, 7 aa, Artificial sequence
  Protein classification predicting sequence
FTNAGMV

SEQ ID NO: 69813 - protein, 7 aa, Artificial sequence
  Protein classification predicting sequence
FKNVFTG

SEQ ID NO: 69814 - protein, 16 aa, Artificial sequence
  Protein classification predicting sequence
TARHHTFFEMLGNFSF

SEQ ID NO: 69815 - protein, 7 aa, Artificial sequence
  Protein classification predicting sequence
YFKEEAI

SEQ ID NO: 69816 - protein, 7 aa, Artificial sequence
  Protein classification predicting sequence
LLVTVYH

SEQ ID NO: 69817 - protein, 11 aa, Artificial sequence
  Protein classification predicting sequence
PSIDTGMGLER

SEQ ID NO: 69818 - protein, 11 aa, Artificial sequence
  Protein classification predicting sequence
NYDIDLFRTLI

SEQ ID NO: 69819 - protein, 20 aa, Artificial sequence
  Protein classification predicting sequence
ASHRVIADHLRSSAFLIADG

SEQ ID NO: 69820 - protein, 22 aa, Artificial sequence
  Protein classification predicting sequence
DDAIAEGAMALFGEKYGDEVRV

SEQ ID NO: 69821 - protein, 16 aa, Artificial sequence
  Protein classification predicting sequence
GAMALFGEKYGDEVRV

SEQ ID NO: 69822 - protein, 8 aa, Artificial sequence
  Protein classification predicting sequence
EIFYDHGD

SEQ ID NO: 69823 - protein, 7 aa, Artificial sequence
  Protein classification predicting sequence
ALRQVLG

SEQ ID NO: 69824 - protein, 6 aa, Artificial sequence
  Protein classification predicting sequence
VTTRLM

SEQ ID NO: 69825 - protein, 7 aa, Artificial sequence
  Protein classification predicting sequence
FLIADGV

SEQ ID NO: 69826 - protein, 9 aa, Artificial sequence
  Protein classification predicting sequence
EMGQAYPEL

SEQ ID NO: 69827 - protein, 10 aa, Artificial sequence
  Protein classification predicting sequence
TARHHTFFEM

SEQ ID NO: 69828 - protein, 10 aa, Artificial sequence
  Protein classification predicting sequence
GAMALFGEKY

SEQ ID NO: 69829 - protein, 7 aa, Artificial sequence
  Protein classification predicting sequence
LFKIVSE

SEQ ID NO: 69830 - protein, 6 aa, Artificial sequence
  Protein classification predicting sequence
MLGNFS

SEQ ID NO: 69831 - protein, 6 aa, Artificial sequence
  Protein classification predicting sequence
RYIEIW

SEQ ID NO: 69832 - protein, 7 aa, Artificial sequence
  Protein classification predicting sequence
NKNIDTG

SEQ ID NO: 69833 - protein, 6 aa, Artificial sequence
  Protein classification predicting sequence
DTYGFP

SEQ ID NO: 69834 - protein, 10 aa, Artificial sequence
  Protein classification predicting sequence
DTYGFPIELT

SEQ ID NO: 69835 - protein, 6 aa, Artificial sequence
  Protein classification predicting sequence
TPFYAE

SEQ ID NO: 69836 - protein, 8 aa, Artificial sequence
  Protein classification predicting sequence
SIGSGVRR

SEQ ID NO: 69837 - protein, 5 aa, Artificial sequence
  Protein classification predicting sequence
QKCIR

SEQ ID NO: 69838 - protein, 7 aa, Artificial sequence
  Protein classification predicting sequence
HHTFFEM

SEQ ID NO: 69839 - protein, 6 aa, Artificial sequence
  Protein classification predicting sequence
AWELLT

SEQ ID NO: 69840 - protein, 8 aa, Artificial sequence
  Protein classification predicting sequence
GRGYVLRR

SEQ ID NO: 69841 - protein, 10 aa, Artificial sequence
  Protein classification predicting sequence
VRAGGKHNDL

SEQ ID NO: 69842 - protein, 9 aa, Artificial sequence
  Protein classification predicting sequence
VDTGMGLER

SEQ ID NO: 69843 - protein, 14 aa, Artificial sequence
  Protein classification predicting sequence
RNHSATHLMHKALR

SEQ ID NO: 69844 - protein, 6 aa, Artificial sequence
  Protein classification predicting sequence
DIDEVG

SEQ ID NO: 69845 - protein, 6 aa, Artificial sequence
  Protein classification predicting sequence
GPDTEI

SEQ ID NO: 69846 - protein, 6 aa, Artificial sequence
  Protein classification predicting sequence
GYVLRR

SEQ ID NO: 69847 - protein, 11 aa, Artificial sequence
  Protein classification predicting sequence
KGAMALFGEKY

SEQ ID NO: 69848 - protein, 8 aa, Artificial sequence
  Protein classification predicting sequence
IWGGPPGS

SEQ ID NO: 69849 - protein, 28 aa, Artificial sequence
  Protein classification predicting sequence
SSPLVPRNDPTLMFTNAGMVQFKNVFTG

SEQ ID NO: 69850 - protein, 14 aa, Artificial sequence
  Protein classification predicting sequence
MGDTGPCGPCSEIF

SEQ ID NO: 69851 - protein, 6 aa, Artificial sequence
  Protein classification predicting sequence
FETDLF

SEQ ID NO: 69852 - protein, 8 aa, Artificial sequence
  Protein classification predicting sequence
RVIADHLR

SEQ ID NO: 69853 - protein, 17 aa, Artificial sequence
  Protein classification predicting sequence
DGVLPSNEGRGYVLRRI

SEQ ID NO: 69854 - protein, 6 aa, Artificial sequence
  Protein classification predicting sequence
FTLYDT

SEQ ID NO: 69855 - protein, 12 aa, Artificial sequence
  Protein classification predicting sequence
LYDTYGFPLDLT

SEQ ID NO: 69856 - protein, 7 aa, Artificial sequence
  Protein classification predicting sequence
FFKEKGH

SEQ ID NO: 69857 - protein, 7 aa, Artificial sequence
  Protein classification predicting sequence
RRALRHG

SEQ ID NO: 69858 - protein, 7 aa, Artificial sequence
  Protein classification predicting sequence
IGHIGKL

SEQ ID NO: 69859 - protein, 7 aa, Artificial sequence
  Protein classification predicting sequence
RIEAVTG

SEQ ID NO: 69860 - protein, 7 aa, Artificial sequence
  Protein classification predicting sequence
EIRQSFL

SEQ ID NO: 69861 - protein, 6 aa, Artificial sequence
  Protein classification predicting sequence
IGLFKI

SEQ ID NO: 69862 - protein, 8 aa, Artificial sequence
  Protein classification predicting sequence
IKGINLLI

SEQ ID NO: 69863 - protein, 6 aa, Artificial sequence
  Protein classification predicting sequence
ENVGYT

SEQ ID NO: 69864 - protein, 5 aa, Artificial sequence
  Protein classification predicting sequence
TFFQM

SEQ ID NO: 69865 - protein, 7 aa, Artificial sequence
  Protein classification predicting sequence
GFPIDLT

SEQ ID NO: 69866 - protein, 6 aa, Artificial sequence
  Protein classification predicting sequence
GRGGGK

SEQ ID NO: 69867 - protein, 6 aa, Artificial sequence
  Protein classification predicting sequence
FLKFFE

SEQ ID NO: 69868 - protein, 9 aa, Artificial sequence
  Protein classification predicting sequence
YASDNFWQM

SEQ ID NO: 69869 - protein, 11 aa, Artificial sequence
  Protein classification predicting sequence
EDGDRYIEIWN

SEQ ID NO: 69870 - protein, 7 aa, Artificial sequence
  Protein classification predicting sequence
VFMQFNR

SEQ ID NO: 69871 - protein, 9 aa, Artificial sequence
  Protein classification predicting sequence
VIADHIRAC

SEQ ID NO: 69872 - protein, 15 aa, Artificial sequence
  Protein classification predicting sequence
NEGRGYVLRRIVRRA

SEQ ID NO: 69873 - protein, 10 aa, Artificial sequence
  Protein classification predicting sequence
DLTADVCRER

SEQ ID NO: 69874 - protein, 13 aa, Artificial sequence
  Protein classification predicting sequence
RQREQARAAGKFK

SEQ ID NO: 69875 - protein, 9 aa, Artificial sequence
  Protein classification predicting sequence
GKVSLIAGV

SEQ ID NO: 69876 - protein, 38 aa, Artificial sequence
  Protein classification predicting sequence
DDEAYDIWAKEVGVPAERIIRIGDNKGARYASDNFWQM

SEQ ID NO: 69877 - protein, 33 aa, Artificial sequence
  Protein classification predicting sequence
RLPKPCVDTGMGLERIAAVLQHVHSNYEIDLFQ

SEQ ID NO: 69878 - protein, 9 aa, Artificial sequence
  Protein classification predicting sequence
RAGGKHNDL

SEQ ID NO: 69879 - protein, 14 aa, Artificial sequence
  Protein classification predicting sequence
DDRIIRIPTSDNFW

SEQ ID NO: 69880 - protein, 18 aa, Artificial sequence
  Protein classification predicting sequence
PSIDTGMGLERIAAVLQG

SEQ ID NO: 69881 - protein, 7 aa, Artificial sequence
  Protein classification predicting sequence
TGVKAEG

SEQ ID NO: 69882 - protein, 6 aa, Artificial sequence
  Protein classification predicting sequence
RFDFSH

SEQ ID NO: 69883 - protein, 19 aa, Artificial sequence
  Protein classification predicting sequence
RHLTFFEMLGNFSFGDYFK

SEQ ID NO: 69884 - protein, 15 aa, Artificial sequence
  Protein classification predicting sequence
RIFRLTDKDNFWSMA

SEQ ID NO: 69885 - protein, 18 aa, Artificial sequence
  Protein classification predicting sequence
GERFLEYWNLVFMEFNRT

SEQ ID NO: 69886 - protein, 9 aa, Artificial sequence
  Protein classification predicting sequence
TVFEADVLR

SEQ ID NO: 69887 - protein, 7 aa, Artificial sequence
  Protein classification predicting sequence
RSLSFAI

SEQ ID NO: 69888 - protein, 9 aa, Artificial sequence
  Protein classification predicting sequence
EAKERSRKN

SEQ ID NO: 69889 - protein, 7 aa, Artificial sequence
  Protein classification predicting sequence
AVTAQVN

SEQ ID NO: 69890 - protein, 9 aa, Artificial sequence
  Protein classification predicting sequence
LVNEKIREN

SEQ ID NO: 69891 - protein, 6 aa, Artificial sequence
  Protein classification predicting sequence
YTRATT

SEQ ID NO: 69892 - protein, 10 aa, Artificial sequence
  Protein classification predicting sequence
TFFEMLGNFS

SEQ ID NO: 69893 - protein, 16 aa, Artificial sequence
  Protein classification predicting sequence
TFFEMLGNFSFGDYFK

SEQ ID NO: 69894 - protein, 6 aa, Artificial sequence
  Protein classification predicting sequence
DTGPCG

SEQ ID NO: 69895 - protein, 6 aa, Artificial sequence
  Protein classification predicting sequence
SEFVGY

SEQ ID NO: 69896 - protein, 6 aa, Artificial sequence
  Protein classification predicting sequence
GGQVGD

SEQ ID NO: 69897 - protein, 17 aa, Artificial sequence
  Protein classification predicting sequence
IYATVHEKDDEAFALWE

SEQ ID NO: 69898 - protein, 14 aa, Artificial sequence
  Protein classification predicting sequence
ISGEDAFKLKDTYG

SEQ ID NO: 69899 - protein, 9 aa, Artificial sequence
  Protein classification predicting sequence
CHLLHKALE

SEQ ID NO: 69900 - protein, 16 aa, Artificial sequence
  Protein classification predicting sequence
DPTLLFTNAGMNQFKD

SEQ ID NO: 69901 - protein, 7 aa, Artificial sequence
  Protein classification predicting sequence
GKHNDLE

SEQ ID NO: 69902 - protein, 6 aa, Artificial sequence
  Protein classification predicting sequence
TVYHDD

SEQ ID NO: 69903 - protein, 7 aa, Artificial sequence
  Protein classification predicting sequence
AFKLYDT

SEQ ID NO: 69904 - protein, 9 aa, Artificial sequence
  Protein classification predicting sequence
ATHLLHAAL

SEQ ID NO: 69905 - protein, 6 aa, Artificial sequence
  Protein classification predicting sequence
KIVSES

SEQ ID NO: 69906 - protein, 8 aa, Artificial sequence
  Protein classification predicting sequence
AAARETGV

SEQ ID NO: 69907 - protein, 7 aa, Artificial sequence
  Protein classification predicting sequence
RHGYKLG

SEQ ID NO: 69908 - protein, 7 aa, Artificial sequence
  Protein classification predicting sequence
IFKLYDT

SEQ ID NO: 69909 - protein, 7 aa, Artificial sequence
  Protein classification predicting sequence
KAGELVN

SEQ ID NO: 69910 - protein, 6 aa, Artificial sequence
  Protein classification predicting sequence
RVTTCQ

SEQ ID NO: 69911 - protein, 8 aa, Artificial sequence
  Protein classification predicting sequence
GPCGPCSE

SEQ ID NO: 69912 - protein, 6 aa, Artificial sequence
  Protein classification predicting sequence
GAMALF

SEQ ID NO: 69913 - protein, 13 aa, Artificial sequence
  Protein classification predicting sequence
GGGRPDMAQAGGK

SEQ ID NO: 69914 - protein, 7 aa, Artificial sequence
  Protein classification predicting sequence
GEAYPEL

SEQ ID NO: 69915 - protein, 8 aa, Artificial sequence
  Protein classification predicting sequence
VLGDHVNQ

SEQ ID NO: 69916 - protein, 9 aa, Artificial sequence
  Protein classification predicting sequence
NHSATHLLH

SEQ ID NO: 69917 - protein, 9 aa, Artificial sequence
  Protein classification predicting sequence
LLFVNAGMV

SEQ ID NO: 69918 - protein, 6 aa, Artificial sequence
  Protein classification predicting sequence
GNFSFG

SEQ ID NO: 69919 - protein, 6 aa, Artificial sequence
  Protein classification predicting sequence
LWVTVY

SEQ ID NO: 69920 - protein, 7 aa, Artificial sequence
  Protein classification predicting sequence
GVPAERI

SEQ ID NO: 69921 - protein, 7 aa, Artificial sequence
  Protein classification predicting sequence
PAERIQR

SEQ ID NO: 69922 - protein, 7 aa, Artificial sequence
  Protein classification predicting sequence
YAESGGQ

SEQ ID NO: 69923 - protein, 8 aa, Artificial sequence
  Protein classification predicting sequence
GAMALFGE

SEQ ID NO: 69924 - protein, 7 aa, Artificial sequence
  Protein classification predicting sequence
IWLKEMK

SEQ ID NO: 69925 - protein, 7 aa, Artificial sequence
  Protein classification predicting sequence
GEKDNFW

SEQ ID NO: 69926 - protein, 6 aa, Artificial sequence
  Protein classification predicting sequence
DNFWQM

SEQ ID NO: 69927 - protein, 8 aa, Artificial sequence
  Protein classification predicting sequence
DTGPCGPC

SEQ ID NO: 69928 - protein, 6 aa, Artificial sequence
  Protein classification predicting sequence
GGPPGS

SEQ ID NO: 69929 - protein, 8 aa, Artificial sequence
  Protein classification predicting sequence
EMPIAEAK

SEQ ID NO: 69930 - protein, 7 aa, Artificial sequence
  Protein classification predicting sequence
ALFGEKY

SEQ ID NO: 69931 - protein, 7 aa, Artificial sequence
  Protein classification predicting sequence
VRVVSMG

SEQ ID NO: 69932 - protein, 9 aa, Artificial sequence
  Protein classification predicting sequence
GGGRPDMAQ

SEQ ID NO: 69933 - protein, 8 aa, Artificial sequence
  Protein classification predicting sequence
RATTSQKC

SEQ ID NO: 69934 - protein, 21 aa, Artificial sequence
  Protein classification predicting sequence
TARHHTFFEMLGNFSFGDYFK

SEQ ID NO: 69935 - protein, 8 aa, Artificial sequence
  Protein classification predicting sequence
CDCDRFLE

SEQ ID NO: 69936 - protein, 8 aa, Artificial sequence
  Protein classification predicting sequence
THLLHAAL

SEQ ID NO: 69937 - protein, 12 aa, Artificial sequence
  Protein classification predicting sequence
RGYVLRRIIRRA

SEQ ID NO: 69938 - protein, 6 aa, Artificial sequence
  Protein classification predicting sequence
TARHHT

SEQ ID NO: 69939 - protein, 13 aa, Artificial sequence
  Protein classification predicting sequence
FEMLGNFSIGDYF

SEQ ID NO: 69940 - protein, 8 aa, Artificial sequence
  Protein classification predicting sequence
FEMLGNFS

SEQ ID NO: 69941 - protein, 13 aa, Artificial sequence
  Protein classification predicting sequence
IGAGPSGPDTEIF

SEQ ID NO: 69942 - protein, 11 aa, Artificial sequence
  Protein classification predicting sequence
YPGGENERYLE

SEQ ID NO: 69943 - protein, 10 aa, Artificial sequence
  Protein classification predicting sequence
WNLVFSEFNH

SEQ ID NO: 69944 - protein, 20 aa, Artificial sequence
  Protein classification predicting sequence
VSIIQDAPTNFETDLFMPII

SEQ ID NO: 69945 - protein, 12 aa, Artificial sequence
  Protein classification predicting sequence
TNFETDLFMPII

SEQ ID NO: 69946 - protein, 10 aa, Artificial sequence
  Protein classification predicting sequence
SFKVIADHIR

SEQ ID NO: 69947 - protein, 9 aa, Artificial sequence
  Protein classification predicting sequence
FAIGDGALP

SEQ ID NO: 69948 - protein, 16 aa, Artificial sequence
  Protein classification predicting sequence
NEGRGYVLRRLLRRAV

SEQ ID NO: 69949 - protein, 8 aa, Artificial sequence
  Protein classification predicting sequence
EEERFHET

SEQ ID NO: 69950 - protein, 9 aa, Artificial sequence
  Protein classification predicting sequence
GFPVELTEE

SEQ ID NO: 69951 - protein, 10 aa, Artificial sequence
  Protein classification predicting sequence
GLKVDHAGFE

SEQ ID NO: 69952 - protein, 6 aa, Artificial sequence
  Protein classification predicting sequence
KAPNGQ

SEQ ID NO: 69953 - protein, 9 aa, Artificial sequence
  Protein classification predicting sequence
AGDIFKDVK

SEQ ID NO: 69954 - protein, 6 aa, Artificial sequence
  Protein classification predicting sequence
RATTSQ

SEQ ID NO: 69955 - protein, 12 aa, Artificial sequence
  Protein classification predicting sequence
NLPKEKLWVTVY

SEQ ID NO: 69956 - protein, 7 aa, Artificial sequence
  Protein classification predicting sequence
TGPCGPC

SEQ ID NO: 69957 - protein, 6 aa, Artificial sequence
  Protein classification predicting sequence
DHGEHI

SEQ ID NO: 69958 - protein, 14 aa, Artificial sequence
  Protein classification predicting sequence
AGGPPGSPDEDGDR

SEQ ID NO: 69959 - protein, 19 aa, Artificial sequence
  Protein classification predicting sequence
PSVDTGMGLERVSAVLQHV

SEQ ID NO: 69960 - protein, 8 aa, Artificial sequence
  Protein classification predicting sequence
DGVMPSNE

SEQ ID NO: 69961 - protein, 10 aa, Artificial sequence
  Protein classification predicting sequence
VRVLSMGDFS

SEQ ID NO: 69962 - protein, 7 aa, Artificial sequence
  Protein classification predicting sequence
ELCGGTH

SEQ ID NO: 69963 - protein, 17 aa, Artificial sequence
  Protein classification predicting sequence
ELCGGTHASRTGDIGLF

SEQ ID NO: 69964 - protein, 7 aa, Artificial sequence
  Protein classification predicting sequence
NDLENVG

SEQ ID NO: 69965 - protein, 7 aa, Artificial sequence
  Protein classification predicting sequence
YFKKEAI

SEQ ID NO: 69966 - protein, 7 aa, Artificial sequence
  Protein classification predicting sequence
RFIEIWN

SEQ ID NO: 69967 - protein, 8 aa, Artificial sequence
  Protein classification predicting sequence
PSNEGRGY

SEQ ID NO: 69968 - protein, 7 aa, Artificial sequence
  Protein classification predicting sequence
RRAVRHG

SEQ ID NO: 69969 - protein, 7 aa, Artificial sequence
  Protein classification predicting sequence
GAMMLFG

SEQ ID NO: 69970 - protein, 9 aa, Artificial sequence
  Protein classification predicting sequence
KYGDVVRVV

SEQ ID NO: 69971 - protein, 8 aa, Artificial sequence
  Protein classification predicting sequence
NAGMNQFK

SEQ ID NO: 69972 - protein, 13 aa, Artificial sequence
  Protein classification predicting sequence
NAGMNQFKDCFLG

SEQ ID NO: 69973 - protein, 7 aa, Artificial sequence
  Protein classification predicting sequence
VEKLSGK

SEQ ID NO: 69974 - protein, 11 aa, Artificial sequence
  Protein classification predicting sequence
AEEERFAETLD

SEQ ID NO: 69975 - protein, 7 aa, Artificial sequence
  Protein classification predicting sequence
RQREQAR

SEQ ID NO: 69976 - protein, 7 aa, Artificial sequence
  Protein classification predicting sequence
PSASLVP

SEQ ID NO: 69977 - protein, 6 aa, Artificial sequence
  Protein classification predicting sequence
TTSQKC

SEQ ID NO: 69978 - protein, 5 aa, Artificial sequence
  Protein classification predicting sequence
QKCVR

SEQ ID NO: 69979 - protein, 9 aa, Artificial sequence
  Protein classification predicting sequence
RTNDIENVG

SEQ ID NO: 69980 - protein, 6 aa, Artificial sequence
  Protein classification predicting sequence
NLVFMQ

SEQ ID NO: 69981 - protein, 6 aa, Artificial sequence
  Protein classification predicting sequence
KNIDTG

SEQ ID NO: 69982 - protein, 6 aa, Artificial sequence
  Protein classification predicting sequence
FGEKYG

SEQ ID NO: 69983 - protein, 9 aa, Artificial sequence
  Protein classification predicting sequence
NTAEIGLFK

SEQ ID NO: 69984 - protein, 15 aa, Artificial sequence
  Protein classification predicting sequence
GGGGGGRPNLAQAGG

SEQ ID NO: 69985 - protein, 10 aa, Artificial sequence
  Protein classification predicting sequence
GNFSFGDYFK

SEQ ID NO: 69986 - protein, 14 aa, Artificial sequence
  Protein classification predicting sequence
GNFSFGDYFKHDAI

SEQ ID NO: 69987 - protein, 8 aa, Artificial sequence
  Protein classification predicting sequence
PYASDNFW

SEQ ID NO: 69988 - protein, 7 aa, Artificial sequence
  Protein classification predicting sequence
QHVNSNY

SEQ ID NO: 69989 - protein, 7 aa, Artificial sequence
  Protein classification predicting sequence
VAAGIRR

SEQ ID NO: 69990 - protein, 11 aa, Artificial sequence
  Protein classification predicting sequence
ERIIRIGDNKG

SEQ ID NO: 69991 - protein, 6 aa, Artificial sequence
  Protein classification predicting sequence
ADGTME

SEQ ID NO: 69992 - protein, 7 aa, Artificial sequence
  Protein classification predicting sequence
ELCGGIH

SEQ ID NO: 69993 - protein, 10 aa, Artificial sequence
  Protein classification predicting sequence
FEMMAHHAFN

SEQ ID NO: 69994 - protein, 7 aa, Artificial sequence
  Protein classification predicting sequence
IYAIADH

SEQ ID NO: 69995 - protein, 6 aa, Artificial sequence
  Protein classification predicting sequence
HHTATH

SEQ ID NO: 69996 - protein, 6 aa, Artificial sequence
  Protein classification predicting sequence
VDTGYG

SEQ ID NO: 69997 - protein, 8 aa, Artificial sequence
  Protein classification predicting sequence
LLFTNAGM

SEQ ID NO: 69998 - protein, 9 aa, Artificial sequence
  Protein classification predicting sequence
EIWNLVFMQ

SEQ ID NO: 69999 - protein, 7 aa, Artificial sequence
  Protein classification predicting sequence
EIWNLVF

SEQ ID NO: 70000 - protein, 6 aa, Artificial sequence
  Protein classification predicting sequence
QAGSLV

SEQ ID NO: 70001 - protein, 8 aa, Artificial sequence
  Protein classification predicting sequence
RLRFDFSH

SEQ ID NO: 70002 - protein, 8 aa, Artificial sequence
  Protein classification predicting sequence
KKYFDGSV

SEQ ID NO: 70003 - protein, 11 aa, Artificial sequence
  Protein classification predicting sequence
DPDKLYVTVYP

SEQ ID NO: 70004 - protein, 6 aa, Artificial sequence
  Protein classification predicting sequence
NFWDIG

SEQ ID NO: 70005 - protein, 7 aa, Artificial sequence
  Protein classification predicting sequence
DGALPSN

SEQ ID NO: 70006 - protein, 7 aa, Artificial sequence
  Protein classification predicting sequence
VNEKIWE

SEQ ID NO: 70007 - protein, 7 aa, Artificial sequence
  Protein classification predicting sequence
KAGDLIK

SEQ ID NO: 70008 - protein, 26 aa, Artificial sequence
  Protein classification predicting sequence
LLAEDIENDRYIEIWNIVLSQFNADP

SEQ ID NO: 70009 - protein, 8 aa, Artificial sequence
  Protein classification predicting sequence
DRYIEIWN

SEQ ID NO: 70010 - protein, 12 aa, Artificial sequence
  Protein classification predicting sequence
NMSFKVIADHIR

SEQ ID NO: 70011 - protein, 18 aa, Artificial sequence
  Protein classification predicting sequence
LYDTYGFPVELTEELAED

SEQ ID NO: 70012 - protein, 8 aa, Artificial sequence
  Protein classification predicting sequence
KIDHEGFK

SEQ ID NO: 70013 - protein, 10 aa, Artificial sequence
  Protein classification predicting sequence
KNHTATHLLH

SEQ ID NO: 70014 - protein, 15 aa, Artificial sequence
  Protein classification predicting sequence
KNHTATHLLHAALHN

SEQ ID NO: 70015 - protein, 10 aa, Artificial sequence
  Protein classification predicting sequence
EFLRFDFTHF

SEQ ID NO: 70016 - protein, 8 aa, Artificial sequence
  Protein classification predicting sequence
LRFDFTHF

SEQ ID NO: 70017 - protein, 17 aa, Artificial sequence
  Protein classification predicting sequence
TAKEMGAMALFGEKYGK

SEQ ID NO: 70018 - protein, 11 aa, Artificial sequence
  Protein classification predicting sequence
GAMALFGEKYG

SEQ ID NO: 70019 - protein, 10 aa, Artificial sequence
  Protein classification predicting sequence
TSEIGLFKIV

SEQ ID NO: 70020 - protein, 7 aa, Artificial sequence
  Protein classification predicting sequence
IGSGVRR

SEQ ID NO: 70021 - protein, 7 aa, Artificial sequence
  Protein classification predicting sequence
EIFYDRG

SEQ ID NO: 70022 - protein, 8 aa, Artificial sequence
  Protein classification predicting sequence
TNFETDLF

SEQ ID NO: 70023 - protein, 7 aa, Artificial sequence
  Protein classification predicting sequence
FKVIADH

SEQ ID NO: 70024 - protein, 7 aa, Artificial sequence
  Protein classification predicting sequence
RRLIRRA

SEQ ID NO: 70025 - protein, 8 aa, Artificial sequence
  Protein classification predicting sequence
GLFKIVSE

SEQ ID NO: 70026 - protein, 13 aa, Artificial sequence
  Protein classification predicting sequence
GIGAGTRRIEAVT

SEQ ID NO: 70027 - protein, 7 aa, Artificial sequence
  Protein classification predicting sequence
YSDVLVL

SEQ ID NO: 70028 - protein, 7 aa, Artificial sequence
  Protein classification predicting sequence
EIRQAFL

SEQ ID NO: 70029 - protein, 6 aa, Artificial sequence
  Protein classification predicting sequence
AWEFLT

SEQ ID NO: 70030 - protein, 8 aa, Artificial sequence
  Protein classification predicting sequence
VHSNYEID

SEQ ID NO: 70031 - protein, 21 aa, Artificial sequence
  Protein classification predicting sequence
DGVLPSNEGRGYVLRRIIRRA

SEQ ID NO: 70032 - protein, 12 aa, Artificial sequence
  Protein classification predicting sequence
PSNEGRGYVLRR

SEQ ID NO: 70033 - protein, 13 aa, Artificial sequence
  Protein classification predicting sequence
PSNEGRGYVLRRI

SEQ ID NO: 70034 - protein, 17 aa, Artificial sequence
  Protein classification predicting sequence
PSNEGRGYVLRRIIRRA

SEQ ID NO: 70035 - protein, 11 aa, Artificial sequence
  Protein classification predicting sequence
AFKLYDTYGFP

SEQ ID NO: 70036 - protein, 6 aa, Artificial sequence
  Protein classification predicting sequence
GIRRIE

SEQ ID NO: 70037 - protein, 6 aa, Artificial sequence
  Protein classification predicting sequence
GKGGGR

SEQ ID NO: 70038 - protein, 9 aa, Artificial sequence
  Protein classification predicting sequence
RTLDIEEVG

SEQ ID NO: 70039 - protein, 9 aa, Artificial sequence
  Protein classification predicting sequence
LPKKNIDTG

SEQ ID NO: 70040 - protein, 9 aa, Artificial sequence
  Protein classification predicting sequence
HAALRQVLG

SEQ ID NO: 70041 - protein, 10 aa, Artificial sequence
  Protein classification predicting sequence
GGGKADLAQG

SEQ ID NO: 70042 - protein, 7 aa, Artificial sequence
  Protein classification predicting sequence
DPTLLFT

SEQ ID NO: 70043 - protein, 5 aa, Artificial sequence
  Protein classification predicting sequence
WVTVY

SEQ ID NO: 70044 - protein, 8 aa, Artificial sequence
  Protein classification predicting sequence
DRFLEFWN

SEQ ID NO: 70045 - protein, 5 aa, Artificial sequence
  Protein classification predicting sequence
WNIVF

SEQ ID NO: 70046 - protein, 7 aa, Artificial sequence
  Protein classification predicting sequence
LRFDFSH

SEQ ID NO: 70047 - protein, 9 aa, Artificial sequence
  Protein classification predicting sequence
LWINSGVAT

SEQ ID NO: 70048 - protein, 10 aa, Artificial sequence
  Protein classification predicting sequence
NIDTGMGLER

SEQ ID NO: 70049 - protein, 6 aa, Artificial sequence
  Protein classification predicting sequence
RLRFDF

SEQ ID NO: 70050 - protein, 7 aa, Artificial sequence
  Protein classification predicting sequence
GYHAGKL

SEQ ID NO: 70051 - protein, 12 aa, Artificial sequence
  Protein classification predicting sequence
LDFFHSKGHQVV

SEQ ID NO: 70052 - protein, 17 aa, Artificial sequence
  Protein classification predicting sequence
QRCVRAGGKHNDLENVG

SEQ ID NO: 70053 - protein, 7 aa, Artificial sequence
  Protein classification predicting sequence
KEVGVPA

SEQ ID NO: 70054 - protein, 14 aa, Artificial sequence
  Protein classification predicting sequence
LPKPSVDTGMGLER

SEQ ID NO: 70055 - protein, 12 aa, Artificial sequence
  Protein classification predicting sequence
LGAKETFFYKLV

SEQ ID NO: 70056 - protein, 6 aa, Artificial sequence
  Protein classification predicting sequence
FFYKLV

SEQ ID NO: 70057 - protein, 8 aa, Artificial sequence
  Protein classification predicting sequence
EKELQQLK

SEQ ID NO: 70058 - protein, 7 aa, Artificial sequence
  Protein classification predicting sequence
LDFFKEK

SEQ ID NO: 70059 - protein, 10 aa, Artificial sequence
  Protein classification predicting sequence
DRYIEIWNIV

SEQ ID NO: 70060 - protein, 6 aa, Artificial sequence
  Protein classification predicting sequence
VFSQFN

SEQ ID NO: 70061 - protein, 6 aa, Artificial sequence
  Protein classification predicting sequence
TNFETD

SEQ ID NO: 70062 - protein, 7 aa, Artificial sequence
  Protein classification predicting sequence
SFAIADG

SEQ ID NO: 70063 - protein, 7 aa, Artificial sequence
  Protein classification predicting sequence
DGIIPSN

SEQ ID NO: 70064 - protein, 7 aa, Artificial sequence
  Protein classification predicting sequence
AMGGGTD

SEQ ID NO: 70065 - protein, 10 aa, Artificial sequence
  Protein classification predicting sequence
LVPVNDPTLL

SEQ ID NO: 70066 - protein, 8 aa, Artificial sequence
  Protein classification predicting sequence
GLERLAAV

SEQ ID NO: 70067 - protein, 7 aa, Artificial sequence
  Protein classification predicting sequence
RRAIRHG

SEQ ID NO: 70068 - protein, 6 aa, Artificial sequence
  Protein classification predicting sequence
VLGEHV

SEQ ID NO: 70069 - protein, 8 aa, Artificial sequence
  Protein classification predicting sequence
TCGDAPCD

SEQ ID NO: 70070 - protein, 9 aa, Artificial sequence
  Protein classification predicting sequence
DVQACGGTH

SEQ ID NO: 70071 - protein, 6 aa, Artificial sequence
  Protein classification predicting sequence
LVFMQY

SEQ ID NO: 70072 - protein, 8 aa, Artificial sequence
  Protein classification predicting sequence
FYPEGGGQ

SEQ ID NO: 70073 - protein, 6 aa, Artificial sequence
  Protein classification predicting sequence
AHHAFN

SEQ ID NO: 70074 - protein, 8 aa, Artificial sequence
  Protein classification predicting sequence
ATLVFMQY

SEQ ID NO: 70075 - protein, 9 aa, Artificial sequence
  Protein classification predicting sequence
RVLGKHVWQ

SEQ ID NO: 70076 - protein, 7 aa, Artificial sequence
  Protein classification predicting sequence
ELATLVF

SEQ ID NO: 70077 - protein, 7 aa, Artificial sequence
  Protein classification predicting sequence
IVDTGYG

SEQ ID NO: 70078 - protein, 6 aa, Artificial sequence
  Protein classification predicting sequence
SQGTPT

SEQ ID NO: 70079 - protein, 7 aa, Artificial sequence
  Protein classification predicting sequence
DGVIPSN

SEQ ID NO: 70080 - protein, 7 aa, Artificial sequence
  Protein classification predicting sequence
NAGMVQF

SEQ ID NO: 70081 - protein, 12 aa, Artificial sequence
  Protein classification predicting sequence
LGESSIGSGVRR

SEQ ID NO: 70082 - protein, 15 aa, Artificial sequence
  Protein classification predicting sequence
DPSLLWINSGVATLK

SEQ ID NO: 70083 - protein, 7 aa, Artificial sequence
  Protein classification predicting sequence
NDIENVG

SEQ ID NO: 70084 - protein, 7 aa, Artificial sequence
  Protein classification predicting sequence
EIYYDRG

SEQ ID NO: 70085 - protein, 7 aa, Artificial sequence
  Protein classification predicting sequence
PTNFDTD

SEQ ID NO: 70086 - protein, 7 aa, Artificial sequence
  Protein classification predicting sequence
HLLHAAL

SEQ ID NO: 70087 - protein, 15 aa, Artificial sequence
  Protein classification predicting sequence
TATSIQKCIRTPDID

SEQ ID NO: 70088 - protein, 7 aa, Artificial sequence
  Protein classification predicting sequence
LRRLLRR

SEQ ID NO: 70089 - protein, 12 aa, Artificial sequence
  Protein classification predicting sequence
LRRLLRRIIRSA

SEQ ID NO: 70090 - protein, 14 aa, Artificial sequence
  Protein classification predicting sequence
RIAVAEETAFNRTL

SEQ ID NO: 70091 - protein, 8 aa, Artificial sequence
  Protein classification predicting sequence
LTLEMAAE

SEQ ID NO: 70092 - protein, 9 aa, Artificial sequence
  Protein classification predicting sequence
TEFTGFDEL

SEQ ID NO: 70093 - protein, 21 aa, Artificial sequence
  Protein classification predicting sequence
RVELVLDRTPLYAESGGQIAD

SEQ ID NO: 70094 - protein, 10 aa, Artificial sequence
  Protein classification predicting sequence
YAESGGQIAD

SEQ ID NO: 70095 - protein, 14 aa, Artificial sequence
  Protein classification predicting sequence
RAAVTDVQKIAKTL

SEQ ID NO: 70096 - protein, 11 aa, Artificial sequence
  Protein classification predicting sequence
ESGEFVEGDTV

SEQ ID NO: 70097 - protein, 7 aa, Artificial sequence
  Protein classification predicting sequence
QGHSGTH

SEQ ID NO: 70098 - protein, 6 aa, Artificial sequence
  Protein classification predicting sequence
EAYNIW

SEQ ID NO: 70099 - protein, 6 aa, Artificial sequence
  Protein classification predicting sequence
RRLIRR

SEQ ID NO: 70100 - protein, 11 aa, Artificial sequence
  Protein classification predicting sequence
GNFSFGDYFKR

SEQ ID NO: 70101 - protein, 7 aa, Artificial sequence
  Protein classification predicting sequence
DGVTPGN

SEQ ID NO: 70102 - protein, 6 aa, Artificial sequence
  Protein classification predicting sequence
LTLEMA

SEQ ID NO: 70103 - protein, 11 aa, Artificial sequence
  Protein classification predicting sequence
VRVVEIGGPFS

SEQ ID NO: 70104 - protein, 13 aa, Artificial sequence
  Protein classification predicting sequence
AQIGPVTILGESS

SEQ ID NO: 70105 - protein, 7 aa, Artificial sequence
  Protein classification predicting sequence
QDAPTNF

SEQ ID NO: 70106 - protein, 8 aa, Artificial sequence
  Protein classification predicting sequence
RIGDNKGA

SEQ ID NO: 70107 - protein, 13 aa, Artificial sequence
  Protein classification predicting sequence
QHVHSNYEIDLFQ

SEQ ID NO: 70108 - protein, 9 aa, Artificial sequence
  Protein classification predicting sequence
GGKGGGRPD

SEQ ID NO: 70109 - protein, 8 aa, Artificial sequence
  Protein classification predicting sequence
SNYEIDLF

SEQ ID NO: 70110 - protein, 9 aa, Artificial sequence
  Protein classification predicting sequence
GFPVDLTAD

SEQ ID NO: 70111 - protein, 10 aa, Artificial sequence
  Protein classification predicting sequence
TPFYAESGGQ

SEQ ID NO: 70112 - protein, 8 aa, Artificial sequence
  Protein classification predicting sequence
RRIEALTG

SEQ ID NO: 70113 - protein, 10 aa, Artificial sequence
  Protein classification predicting sequence
NVYETDLLRP

SEQ ID NO: 70114 - protein, 9 aa, Artificial sequence
  Protein classification predicting sequence
LHDTYGFPI

SEQ ID NO: 70115 - protein, 6 aa, Artificial sequence
  Protein classification predicting sequence
LMAEQR

SEQ ID NO: 70116 - protein, 10 aa, Artificial sequence
  Protein classification predicting sequence
LMAEQRRRAK

SEQ ID NO: 70117 - protein, 7 aa, Artificial sequence
  Protein classification predicting sequence
KKLWVHK

SEQ ID NO: 70118 - protein, 34 aa, Artificial sequence
  Protein classification predicting sequence
WRRGATQGHSGTHMVHAALRQVLGPNAVQAGSLN

SEQ ID NO: 70119 - protein, 6 aa, Artificial sequence
  Protein classification predicting sequence
QAGSLN

SEQ ID NO: 70120 - protein, 7 aa, Artificial sequence
  Protein classification predicting sequence
YGDEVRV

SEQ ID NO: 70121 - protein, 7 aa, Artificial sequence
  Protein classification predicting sequence
HSSQIGP

SEQ ID NO: 70122 - protein, 15 aa, Artificial sequence
  Protein classification predicting sequence
ASSLKVPSEEVPARV

SEQ ID NO: 70123 - protein, 7 aa, Artificial sequence
  Protein classification predicting sequence
GRGGGKP

SEQ ID NO: 70124 - protein, 17 aa, Artificial sequence
  Protein classification predicting sequence
LLWINSGVATLKKYFDG

SEQ ID NO: 70125 - protein, 22 aa, Artificial sequence
  Protein classification predicting sequence
NFWDIGEGPSGPNTEIFYDRGE

SEQ ID NO: 70126 - protein, 11 aa, Artificial sequence
  Protein classification predicting sequence
KNIDTGMGLER

SEQ ID NO: 70127 - protein, 6 aa, Artificial sequence
  Protein classification predicting sequence
NEPFMY

SEQ ID NO: 70128 - protein, 6 aa, Artificial sequence
  Protein classification predicting sequence
LVPVVG

SEQ ID NO: 70129 - protein, 7 aa, Artificial sequence
  Protein classification predicting sequence
KDMNQLR

SEQ ID NO: 70130 - protein, 5 aa, Artificial sequence
  Protein classification predicting sequence
HIWGG

SEQ ID NO: 70131 - protein, 7 aa, Artificial sequence
  Protein classification predicting sequence
REMEAQR

SEQ ID NO: 70132 - protein, 14 aa, Artificial sequence
  Protein classification predicting sequence
AKAKGAMALFGEKY

SEQ ID NO: 70133 - protein, 8 aa, Artificial sequence
  Protein classification predicting sequence
VDDLKNQL

SEQ ID NO: 70134 - protein, 14 aa, Artificial sequence
  Protein classification predicting sequence
WFNLPKEKLWVTVY

SEQ ID NO: 70135 - protein, 8 aa, Artificial sequence
  Protein classification predicting sequence
EKLWVTVY

SEQ ID NO: 70136 - protein, 18 aa, Artificial sequence
  Protein classification predicting sequence
MGDTGPCGPCTEIFYDHG

SEQ ID NO: 70137 - protein, 7 aa, Artificial sequence
  Protein classification predicting sequence
AVLQHVN

SEQ ID NO: 70138 - protein, 10 aa, Artificial sequence
  Protein classification predicting sequence
AGEELKRQQA

SEQ ID NO: 70139 - protein, 7 aa, Artificial sequence
  Protein classification predicting sequence
QRRRARE

SEQ ID NO: 70140 - protein, 6 aa, Artificial sequence
  Protein classification predicting sequence
FGTDYN

SEQ ID NO: 70141 - protein, 8 aa, Artificial sequence
  Protein classification predicting sequence
FYAESGGQ

SEQ ID NO: 70142 - protein, 11 aa, Artificial sequence
  Protein classification predicting sequence
DTQKYGQAIGH

SEQ ID NO: 70143 - protein, 8 aa, Artificial sequence
  Protein classification predicting sequence
ELCGGTHA

SEQ ID NO: 70144 - protein, 9 aa, Artificial sequence
  Protein classification predicting sequence
AAGIRRIEA

SEQ ID NO: 70145 - protein, 9 aa, Artificial sequence
  Protein classification predicting sequence
LEKELQQLK

SEQ ID NO: 70146 - protein, 7 aa, Artificial sequence
  Protein classification predicting sequence
GVKLLVS

SEQ ID NO: 70147 - protein, 7 aa, Artificial sequence
  Protein classification predicting sequence
YETDDEA

SEQ ID NO: 70148 - protein, 7 aa, Artificial sequence
  Protein classification predicting sequence
YASDNFW

SEQ ID NO: 70149 - protein, 10 aa, Artificial sequence
  Protein classification predicting sequence
MGDTGPCGPC

SEQ ID NO: 70150 - protein, 18 aa, Artificial sequence
  Protein classification predicting sequence
ADGTMEPLPKPSVDTGMG

SEQ ID NO: 70151 - protein, 9 aa, Artificial sequence
  Protein classification predicting sequence
QRQRAREAG

SEQ ID NO: 70152 - protein, 6 aa, Artificial sequence
  Protein classification predicting sequence
IRLNHS

SEQ ID NO: 70153 - protein, 8 aa, Artificial sequence
  Protein classification predicting sequence
ELCGGIHA

SEQ ID NO: 70154 - protein, 12 aa, Artificial sequence
  Protein classification predicting sequence
AAGIRRIEAVTG

SEQ ID NO: 70155 - protein, 31 aa, Artificial sequence
  Protein classification predicting sequence
MVAQQVGGKGGGRPDMAQAGGTDAAALPAAL

SEQ ID NO: 70156 - protein, 12 aa, Artificial sequence
  Protein classification predicting sequence
LLFVNAGMVPFK

SEQ ID NO: 70157 - protein, 7 aa, Artificial sequence
  Protein classification predicting sequence
AGMVPFK

SEQ ID NO: 70158 - protein, 7 aa, Artificial sequence
  Protein classification predicting sequence
ATSIQKC

SEQ ID NO: 70159 - protein, 7 aa, Artificial sequence
  Protein classification predicting sequence
DRGPAYG

SEQ ID NO: 70160 - protein, 6 aa, Artificial sequence
  Protein classification predicting sequence
ATQAGS

SEQ ID NO: 70161 - protein, 7 aa, Artificial sequence
  Protein classification predicting sequence
AIEWAWE

SEQ ID NO: 70162 - protein, 10 aa, Artificial sequence
  Protein classification predicting sequence
NLVFMQYNRD

SEQ ID NO: 70163 - protein, 9 aa, Artificial sequence
  Protein classification predicting sequence
CGGGGGGRP

SEQ ID NO: 70164 - protein, 8 aa, Artificial sequence
  Protein classification predicting sequence
ELCGGTHV

SEQ ID NO: 70165 - protein, 14 aa, Artificial sequence
  Protein classification predicting sequence
MGDTGPCGPCTEIF

SEQ ID NO: 70166 - protein, 11 aa, Artificial sequence
  Protein classification predicting sequence
ADHIRSCSFLI

SEQ ID NO: 70167 - protein, 8 aa, Artificial sequence
  Protein classification predicting sequence
LYDTYGFP

SEQ ID NO: 70168 - protein, 7 aa, Artificial sequence
  Protein classification predicting sequence
VRVLSMG

SEQ ID NO: 70169 - protein, 17 aa, Artificial sequence
  Protein classification predicting sequence
NDPTLLFTNAGMNQFKD

SEQ ID NO: 70170 - protein, 7 aa, Artificial sequence
  Protein classification predicting sequence
ADHIRSC

SEQ ID NO: 70171 - protein, 10 aa, Artificial sequence
  Protein classification predicting sequence
DLTADIARER

SEQ ID NO: 70172 - protein, 7 aa, Artificial sequence
  Protein classification predicting sequence
LFKIISE

SEQ ID NO: 70173 - protein, 6 aa, Artificial sequence
  Protein classification predicting sequence
VPSSSL

SEQ ID NO: 70174 - protein, 8 aa, Artificial sequence
  Protein classification predicting sequence
EKRAYTRA

SEQ ID NO: 70175 - protein, 8 aa, Artificial sequence
  Protein classification predicting sequence
ASIYDFQP

SEQ ID NO: 70176 - protein, 5 aa, Artificial sequence
  Protein classification predicting sequence
FQPWV

SEQ ID NO: 70177 - protein, 7 aa, Artificial sequence
  Protein classification predicting sequence
EFFTKEL

SEQ ID NO: 70178 - protein, 6 aa, Artificial sequence
  Protein classification predicting sequence
VVLDQT

SEQ ID NO: 70179 - protein, 6 aa, Artificial sequence
  Protein classification predicting sequence
PPANPL

SEQ ID NO: 70180 - protein, 11 aa, Artificial sequence
  Protein classification predicting sequence
PPANPLTISQP

SEQ ID NO: 70181 - protein, 10 aa, Artificial sequence
  Protein classification predicting sequence
GLEVATLVFM

SEQ ID NO: 70182 - protein, 8 aa, Artificial sequence
  Protein classification predicting sequence
TDWARLDI

SEQ ID NO: 70183 - protein, 12 aa, Artificial sequence
  Protein classification predicting sequence
KYTLDEMREKFL

SEQ ID NO: 70184 - protein, 16 aa, Artificial sequence
  Protein classification predicting sequence
ILMENSRLAGMFDIED

SEQ ID NO: 70185 - protein, 24 aa, Artificial sequence
  Protein classification predicting sequence
RRIQHMRHHTGTHVLMGALVRVLG

SEQ ID NO: 70186 - protein, 15 aa, Artificial sequence
  Protein classification predicting sequence
VVDTGYGLERLVWMS

SEQ ID NO: 70187 - protein, 7 aa, Artificial sequence
  Protein classification predicting sequence
SFGDYFK

SEQ ID NO: 70188 - protein, 11 aa, Artificial sequence
  Protein classification predicting sequence
ERLAAILQHVH

SEQ ID NO: 70189 - protein, 10 aa, Artificial sequence
  Protein classification predicting sequence
DTYGFPLDLT

SEQ ID NO: 70190 - protein, 9 aa, Artificial sequence
  Protein classification predicting sequence
VDAVRRART

SEQ ID NO: 70191 - protein, 23 aa, Artificial sequence
  Protein classification predicting sequence
RNHSATHLMHKALREVLGAHVQQ

SEQ ID NO: 70192 - protein, 6 aa, Artificial sequence
  Protein classification predicting sequence
TSDNFW

SEQ ID NO: 70193 - protein, 9 aa, Artificial sequence
  Protein classification predicting sequence
IDTGMGLER

SEQ ID NO: 70194 - protein, 6 aa, Artificial sequence
  Protein classification predicting sequence
EEDGDR

SEQ ID NO: 70195 - protein, 9 aa, Artificial sequence
  Protein classification predicting sequence
CGPCSEIYY

SEQ ID NO: 70196 - protein, 6 aa, Artificial sequence
  Protein classification predicting sequence
LFGEKY

SEQ ID NO: 70197 - protein, 8 aa, Artificial sequence
  Protein classification predicting sequence
GSGEAATE

SEQ ID NO: 70198 - protein, 8 aa, Artificial sequence
  Protein classification predicting sequence
NSGMVQFK

SEQ ID NO: 70199 - protein, 6 aa, Artificial sequence
  Protein classification predicting sequence
GMVQFK

SEQ ID NO: 70200 - protein, 6 aa, Artificial sequence
  Protein classification predicting sequence
PKDKLY

SEQ ID NO: 70201 - protein, 7 aa, Artificial sequence
  Protein classification predicting sequence
NYDIDLF

SEQ ID NO: 70202 - protein, 6 aa, Artificial sequence
  Protein classification predicting sequence
FKITSE

SEQ ID NO: 70203 - protein, 9 aa, Artificial sequence
  Protein classification predicting sequence
VTVYETDDE

SEQ ID NO: 70204 - protein, 8 aa, Artificial sequence
  Protein classification predicting sequence
DGVLPSNE

SEQ ID NO: 70205 - protein, 21 aa, Artificial sequence
  Protein classification predicting sequence
NDPTLLFTNAGMNQFKDVFLG

SEQ ID NO: 70206 - protein, 13 aa, Artificial sequence
  Protein classification predicting sequence
QRCVRAGGKHNDL

SEQ ID NO: 70207 - protein, 11 aa, Artificial sequence
  Protein classification predicting sequence
CVRAGGKHNDL

SEQ ID NO: 70208 - protein, 12 aa, Artificial sequence
  Protein classification predicting sequence
PLPKPSVDTGMG

SEQ ID NO: 70209 - protein, 17 aa, Artificial sequence
  Protein classification predicting sequence
NKSLRVIADHIRSCAFL

SEQ ID NO: 70210 - protein, 8 aa, Artificial sequence
  Protein classification predicting sequence
GDTLDGET

SEQ ID NO: 70211 - protein, 6 aa, Artificial sequence
  Protein classification predicting sequence
VLGTHV

SEQ ID NO: 70212 - protein, 9 aa, Artificial sequence
  Protein classification predicting sequence
AAGVRRIEA

SEQ ID NO: 70213 - protein, 8 aa, Artificial sequence
  Protein classification predicting sequence
QQLKDKLA

SEQ ID NO: 70214 - protein, 10 aa, Artificial sequence
  Protein classification predicting sequence
NEGRGYVLRR

SEQ ID NO: 70215 - protein, 7 aa, Artificial sequence
  Protein classification predicting sequence
SGGQVAD

SEQ ID NO: 70216 - protein, 9 aa, Artificial sequence
  Protein classification predicting sequence
KVKSDDQVV

SEQ ID NO: 70217 - protein, 19 aa, Artificial sequence
  Protein classification predicting sequence
KASEIRQKYLDFFVEKGHM

SEQ ID NO: 70218 - protein, 8 aa, Artificial sequence
  Protein classification predicting sequence
EPSAPLVP

SEQ ID NO: 70219 - protein, 12 aa, Artificial sequence
  Protein classification predicting sequence
EPSAPLVPIDDD

SEQ ID NO: 70220 - protein, 18 aa, Artificial sequence
  Protein classification predicting sequence
LLWINSGVATLKKYFDGR

SEQ ID NO: 70221 - protein, 20 aa, Artificial sequence
  Protein classification predicting sequence
EAIEFAWEFLTSDKWMGMEP

SEQ ID NO: 70222 - protein, 7 aa, Artificial sequence
  Protein classification predicting sequence
VTIHPED

SEQ ID NO: 70223 - protein, 12 aa, Artificial sequence
  Protein classification predicting sequence
KNIDTGMGLERM

SEQ ID NO: 70224 - protein, 16 aa, Artificial sequence
  Protein classification predicting sequence
SQNVRTNYETDLFMPI

SEQ ID NO: 70225 - protein, 18 aa, Artificial sequence
  Protein classification predicting sequence
FIKRVIKSEEERFHETLE

SEQ ID NO: 70226 - protein, 14 aa, Artificial sequence
  Protein classification predicting sequence
LYDTYGFPIELTEE

SEQ ID NO: 70227 - protein, 7 aa, Artificial sequence
  Protein classification predicting sequence
IYNGEEV

SEQ ID NO: 70228 - protein, 6 aa, Artificial sequence
  Protein classification predicting sequence
ETPFYA

SEQ ID NO: 70229 - protein, 13 aa, Artificial sequence
  Protein classification predicting sequence
VTKAPNGQNLHKG

SEQ ID NO: 70230 - protein, 16 aa, Artificial sequence
  Protein classification predicting sequence
IQKNHSATHLLHAALK

SEQ ID NO: 70231 - protein, 7 aa, Artificial sequence
  Protein classification predicting sequence
QAGSLVE

SEQ ID NO: 70232 - protein, 13 aa, Artificial sequence
  Protein classification predicting sequence
RLRFDFSHFGPMT

SEQ ID NO: 70233 - protein, 6 aa, Artificial sequence
  Protein classification predicting sequence
VNEEIW

SEQ ID NO: 70234 - protein, 19 aa, Artificial sequence
  Protein classification predicting sequence
VRVVNMAPFSIELCGGIHV

SEQ ID NO: 70235 - protein, 12 aa, Artificial sequence
  Protein classification predicting sequence
EIGLFKIVSESG

SEQ ID NO: 70236 - protein, 8 aa, Artificial sequence
  Protein classification predicting sequence
LLKQLEQR

SEQ ID NO: 70237 - protein, 12 aa, Artificial sequence
  Protein classification predicting sequence
KEITSLKMGNIE

SEQ ID NO: 70238 - protein, 19 aa, Artificial sequence
  Protein classification predicting sequence
KAIRSTMDDFKSKLQDTII

SEQ ID NO: 70239 - protein, 9 aa, Artificial sequence
  Protein classification predicting sequence
ATVPKSLTN

SEQ ID NO: 70240 - protein, 21 aa, Artificial sequence
  Protein classification predicting sequence
TARHHTFFEMLGNFSIGDYFK

SEQ ID NO: 70241 - protein, 35 aa, Artificial sequence
  Protein classification predicting sequence
DIGLEESRIIRIEGNFWDIGEGPSGPNTEIFYDRG

SEQ ID NO: 70242 - protein, 32 aa, Artificial sequence
  Protein classification predicting sequence
DDPAEEMYPGGENERYLEVWNLVFSEFNHNKD

SEQ ID NO: 70243 - protein, 26 aa, Artificial sequence
  Protein classification predicting sequence
DGALPANEGRGYVLRRLLRRAVRFSQ

SEQ ID NO: 70244 - protein, 27 aa, Artificial sequence
  Protein classification predicting sequence
LGINEPFMYKLVDIVADIMEPYYPNVK

SEQ ID NO: 70245 - protein, 29 aa, Artificial sequence
  Protein classification predicting sequence
EMQQQRDRARQARQNSQSMQVQSEVLKNI

SEQ ID NO: 70246 - protein, 26 aa, Artificial sequence
  Protein classification predicting sequence
EIGLFKIVSESGTGAGVRRIEALTGK

SEQ ID NO: 70247 - protein, 113 aa, Artificial sequence
  Protein classification predicting sequence
IKNDKGDTVAEVVDVQKAPNGQPLHTVNVLASLSVGTNYTLEINKERRLAVEKNHTATHLLHAALHNVIGEHATQAGSLNEEEFLRFDFTHFEAVSNEELRHIEQEVNEQIWN

SEQ ID NO: 70248 - protein, 65 aa, Artificial sequence
  Protein classification predicting sequence
QEAKGVRFIASQVDVADAGALRTFADNWKQKDYSDVLVLVAAIGEKVNVLVASKTKDVHAGNMIK

SEQ ID NO: 70249 - protein, 35 aa, Artificial sequence
  Protein classification predicting sequence
LAPIVAGRGGGKPDMAMAGGSDASKIAELLAAVAE

SEQ ID NO: 70250 - protein, 7 aa, Artificial sequence
  Protein classification predicting sequence
DNYWSMG

SEQ ID NO: 70251 - protein, 8 aa, Artificial sequence
  Protein classification predicting sequence
YDRGPEFG

SEQ ID NO: 70252 - protein, 8 aa, Artificial sequence
  Protein classification predicting sequence
PGNEGRGY

SEQ ID NO: 70253 - protein, 44 aa, Artificial sequence
  Protein classification predicting sequence
EPSANLVPVNDPTLLWINSGVATLKKYFDGSVIPENPRITNAQK

SEQ ID NO: 70254 - protein, 26 aa, Artificial sequence
  Protein classification predicting sequence
IRTNDIENVGKTARHHTMFEMLGNFS

SEQ ID NO: 70255 - protein, 22 aa, Artificial sequence
  Protein classification predicting sequence
DFIEKIVKREEETFARTIDAGS

SEQ ID NO: 70256 - protein, 10 aa, Artificial sequence
  Protein classification predicting sequence
KDTLEGKDIF

SEQ ID NO: 70257 - protein, 10 aa, Artificial sequence
  Protein classification predicting sequence
SSLSVIIADN

SEQ ID NO: 70258 - protein, 6 aa, Artificial sequence
  Protein classification predicting sequence
NTSEIG

SEQ ID NO: 70259 - protein, 9 aa, Artificial sequence
  Protein classification predicting sequence
KVNVLVASK

SEQ ID NO: 70260 - protein, 8 aa, Artificial sequence
  Protein classification predicting sequence
RQMWLDFW

SEQ ID NO: 70261 - protein, 18 aa, Artificial sequence
  Protein classification predicting sequence
KLYMTYYPDDKDSYNRWI

SEQ ID NO: 70262 - protein, 26 aa, Artificial sequence
  Protein classification predicting sequence
PIEDNFWEIGAGPSGPDTEIFFDRGE

SEQ ID NO: 70263 - protein, 25 aa, Artificial sequence
  Protein classification predicting sequence
QGAKTNFETDLFMPIIREVEKLSGK

SEQ ID NO: 70264 - protein, 15 aa, Artificial sequence
  Protein classification predicting sequence
NEGRGYVLRRLLRRA

SEQ ID NO: 70265 - protein, 9 aa, Artificial sequence
  Protein classification predicting sequence
AEEAGMTVD

SEQ ID NO: 70266 - protein, 13 aa, Artificial sequence
  Protein classification predicting sequence
VKGGSMGMQNETL

SEQ ID NO: 70267 - protein, 9 aa, Artificial sequence
  Protein classification predicting sequence
SEIGLFKIV

SEQ ID NO: 70268 - protein, 8 aa, Artificial sequence
  Protein classification predicting sequence
LVLVAAIG

SEQ ID NO: 70269 - protein, 9 aa, Artificial sequence
  Protein classification predicting sequence
DFQPFVTSG

SEQ ID NO: 70270 - protein, 6 aa, Artificial sequence
  Protein classification predicting sequence
CGGTHL

SEQ ID NO: 70271 - protein, 7 aa, Artificial sequence
  Protein classification predicting sequence
LDHTKTI

SEQ ID NO: 70272 - protein, 7 aa, Artificial sequence
  Protein classification predicting sequence
HIWQAGA

SEQ ID NO: 70273 - protein, 7 aa, Artificial sequence
  Protein classification predicting sequence
FLGLEKR

SEQ ID NO: 70274 - protein, 9 aa, Artificial sequence
  Protein classification predicting sequence
KVGVPADRI

SEQ ID NO: 70275 - protein, 7 aa, Artificial sequence
  Protein classification predicting sequence
ALREVLG

SEQ ID NO: 70276 - protein, 8 aa, Artificial sequence
  Protein classification predicting sequence
DDEAYDIW

SEQ ID NO: 70277 - protein, 16 aa, Artificial sequence
  Protein classification predicting sequence
GPTGPCGPCSEIYYDF

SEQ ID NO: 70278 - protein, 7 aa, Artificial sequence
  Protein classification predicting sequence
NFDTDLF

SEQ ID NO: 70279 - protein, 6 aa, Artificial sequence
  Protein classification predicting sequence
LYDTYG

SEQ ID NO: 70280 - protein, 7 aa, Artificial sequence
  Protein classification predicting sequence
LRFDFTH

SEQ ID NO: 70281 - protein, 9 aa, Artificial sequence
  Protein classification predicting sequence
IGLFKIISE

SEQ ID NO: 70282 - protein, 7 aa, Artificial sequence
  Protein classification predicting sequence
CIRTPDI

SEQ ID NO: 70283 - protein, 7 aa, Artificial sequence
  Protein classification predicting sequence
FKDVFLG

SEQ ID NO: 70284 - protein, 7 aa, Artificial sequence
  Protein classification predicting sequence
GGPPGSP

SEQ ID NO: 70285 - protein, 11 aa, Artificial sequence
  Protein classification predicting sequence
IEIWNLVFMQF

SEQ ID NO: 70286 - protein, 6 aa, Artificial sequence
  Protein classification predicting sequence
GDFSTE

SEQ ID NO: 70287 - protein, 8 aa, Artificial sequence
  Protein classification predicting sequence
TIAGMLPF

SEQ ID NO: 70288 - protein, 6 aa, Artificial sequence
  Protein classification predicting sequence
GFPIDL

SEQ ID NO: 70289 - protein, 7 aa, Artificial sequence
  Protein classification predicting sequence
RLLVTVY

SEQ ID NO: 70290 - protein, 15 aa, Artificial sequence
  Protein classification predicting sequence
PADRIIRIGDKKGGK

SEQ ID NO: 70291 - protein, 7 aa, Artificial sequence
  Protein classification predicting sequence
RIIRIGD

SEQ ID NO: 70292 - protein, 13 aa, Artificial sequence
  Protein classification predicting sequence
PEEDGDRFIEIWN

SEQ ID NO: 70293 - protein, 61 aa, Artificial sequence
  Protein classification predicting sequence
PEEDGDRFIEIWNNVFMQFNRHADGTMEPLPKPSVDTGMGIERISAIMQGVHSNYEIDVFQ

SEQ ID NO: 70294 - protein, 16 aa, Artificial sequence
  Protein classification predicting sequence
VEKVLRIEEENFGRTL

SEQ ID NO: 70295 - protein, 20 aa, Artificial sequence
  Protein classification predicting sequence
AMEEQRQRAREAGQFGTDYN

SEQ ID NO: 70296 - protein, 16 aa, Artificial sequence
  Protein classification predicting sequence
VEDTQKLGNAIAHHGV

SEQ ID NO: 70297 - protein, 20 aa, Artificial sequence
  Protein classification predicting sequence
RRAAISLNHSATHLLHAALR

SEQ ID NO: 70298 - protein, 16 aa, Artificial sequence
  Protein classification predicting sequence
VRVLSMGDFSTELCGG

SEQ ID NO: 70299 - protein, 30 aa, Artificial sequence
  Protein classification predicting sequence
VRVLSMGDFSTELCGGIHASNTGDIGLFKI

SEQ ID NO: 70300 - protein, 9 aa, Artificial sequence
  Protein classification predicting sequence
TGDIGLFKI

SEQ ID NO: 70301 - protein, 16 aa, Artificial sequence
  Protein classification predicting sequence
RIGDNKGAPYASDNFW

SEQ ID NO: 70302 - protein, 25 aa, Artificial sequence
  Protein classification predicting sequence
GFEKAMEEQRQRAREAGQFGTDYNA

SEQ ID NO: 70303 - protein, 6 aa, Artificial sequence
  Protein classification predicting sequence
TLLFTN

SEQ ID NO: 70304 - protein, 5 aa, Artificial sequence
  Protein classification predicting sequence
SDNFW

SEQ ID NO: 70305 - protein, 8 aa, Artificial sequence
  Protein classification predicting sequence
AIEFAWEF

SEQ ID NO: 70306 - protein, 6 aa, Artificial sequence
  Protein classification predicting sequence
PGNEGR

SEQ ID NO: 70307 - protein, 6 aa, Artificial sequence
  Protein classification predicting sequence
RATSCQ

SEQ ID NO: 70308 - protein, 6 aa, Artificial sequence
  Protein classification predicting sequence
IGSFYI

SEQ ID NO: 70309 - protein, 8 aa, Artificial sequence
  Protein classification predicting sequence
GVRRIEAV

SEQ ID NO: 70310 - protein, 7 aa, Artificial sequence
  Protein classification predicting sequence
EIFFDHG

SEQ ID NO: 70311 - protein, 6 aa, Artificial sequence
  Protein classification predicting sequence
DHGDHI

SEQ ID NO: 70312 - protein, 8 aa, Artificial sequence
  Protein classification predicting sequence
NYEIDVFQ

SEQ ID NO: 70313 - protein, 6 aa, Artificial sequence
  Protein classification predicting sequence
ASDNFW

SEQ ID NO: 70314 - protein, 8 aa, Artificial sequence
  Protein classification predicting sequence
ASDNFWQM

SEQ ID NO: 70315 - protein, 9 aa, Artificial sequence
  Protein classification predicting sequence
NDPTLLFTN

SEQ ID NO: 70316 - protein, 11 aa, Artificial sequence
  Protein classification predicting sequence
EDGDRFIEIWN

SEQ ID NO: 70317 - protein, 10 aa, Artificial sequence
  Protein classification predicting sequence
AVLQHVNSNY

SEQ ID NO: 70318 - protein, 24 aa, Artificial sequence
  Protein classification predicting sequence
VEQVLKTEEEQFARTLERGLALLD

SEQ ID NO: 70319 - protein, 7 aa, Artificial sequence
  Protein classification predicting sequence
IRVDSAS

SEQ ID NO: 70320 - protein, 8 aa, Artificial sequence
  Protein classification predicting sequence
ESGGQVGD

SEQ ID NO: 70321 - protein, 5 aa, Artificial sequence
  Protein classification predicting sequence
MGDFS

SEQ ID NO: 70322 - protein, 11 aa, Artificial sequence
  Protein classification predicting sequence
RRIEAVTGEGA

SEQ ID NO: 70323 - protein, 19 aa, Artificial sequence
  Protein classification predicting sequence
NEGRGYVLRRIMRRAMRHA

SEQ ID NO: 70324 - protein, 7 aa, Artificial sequence
  Protein classification predicting sequence
GAKEPLM

SEQ ID NO: 70325 - protein, 7 aa, Artificial sequence
  Protein classification predicting sequence
GRPWWEW

SEQ ID NO: 70326 - protein, 6 aa, Artificial sequence
  Protein classification predicting sequence
DFALWK

SEQ ID NO: 70327 - protein, 6 aa, Artificial sequence
  Protein classification predicting sequence
GRPGWH

SEQ ID NO: 70328 - protein, 8 aa, Artificial sequence
  Protein classification predicting sequence
FEEAMNDD

SEQ ID NO: 70329 - protein, 8 aa, Artificial sequence
  Protein classification predicting sequence
FARYWMHN

SEQ ID NO: 70330 - protein, 10 aa, Artificial sequence
  Protein classification predicting sequence
VAFDILRRWL

SEQ ID NO: 70331 - protein, 8 aa, Artificial sequence
  Protein classification predicting sequence
LGEQFDIH

SEQ ID NO: 70332 - protein, 10 aa, Artificial sequence
  Protein classification predicting sequence
DVYFDVLSYP

SEQ ID NO: 70333 - protein, 24 aa, Artificial sequence
  Protein classification predicting sequence
AAYDALDVLPPSAEPRATGHITQM

SEQ ID NO: 70334 - protein, 9 aa, Artificial sequence
  Protein classification predicting sequence
GRPGWHTEC

SEQ ID NO: 70335 - protein, 13 aa, Artificial sequence
  Protein classification predicting sequence
IRAMMGILGCDPL

SEQ ID NO: 70336 - protein, 15 aa, Artificial sequence
  Protein classification predicting sequence
RDETSAALAAVDVLV

SEQ ID NO: 70337 - protein, 11 aa, Artificial sequence
  Protein classification predicting sequence
AGRPWWEWAAT

SEQ ID NO: 70338 - protein, 15 aa, Artificial sequence
  Protein classification predicting sequence
PPSAEPRATGHITQM

SEQ ID NO: 70339 - protein, 7 aa, Artificial sequence
  Protein classification predicting sequence
DDVHQGE

SEQ ID NO: 70340 - protein, 14 aa, Artificial sequence
  Protein classification predicting sequence
DLVFPHHENEIAQS

SEQ ID NO: 70341 - protein, 33 aa, Artificial sequence
  Protein classification predicting sequence
GMYVCGVTIYDLCHIGHGRTFVSFDVVSRYLRY

SEQ ID NO: 70342 - protein, 6 aa, Artificial sequence
  Protein classification predicting sequence
NGDVMF

SEQ ID NO: 70343 - protein, 6 aa, Artificial sequence
  Protein classification predicting sequence
DFVLWK

SEQ ID NO: 70344 - protein, 8 aa, Artificial sequence
  Protein classification predicting sequence
HFDIHGGG

SEQ ID NO: 70345 - protein, 14 aa, Artificial sequence
  Protein classification predicting sequence
FPHHENEIAQSCCA

SEQ ID NO: 70346 - protein, 10 aa, Artificial sequence
  Protein classification predicting sequence
WMHSGMVMVD

SEQ ID NO: 70347 - protein, 12 aa, Artificial sequence
  Protein classification predicting sequence
EKMSKSLGNFFT

SEQ ID NO: 70348 - protein, 18 aa, Artificial sequence
  Protein classification predicting sequence
VRYFLMSGHYRSQLNYSE

SEQ ID NO: 70349 - protein, 6 aa, Artificial sequence
  Protein classification predicting sequence
LERLYT

SEQ ID NO: 70350 - protein, 20 aa, Artificial sequence
  Protein classification predicting sequence
MNDDFNTPEAYSVLFDMARE

SEQ ID NO: 70351 - protein, 7 aa, Artificial sequence
  Protein classification predicting sequence
QQRLDAR

SEQ ID NO: 70352 - protein, 7 aa, Artificial sequence
  Protein classification predicting sequence
VRSFPEY

SEQ ID NO: 70353 - protein, 8 aa, Artificial sequence
  Protein classification predicting sequence
KPGEPTWE

SEQ ID NO: 70354 - protein, 7 aa, Artificial sequence
  Protein classification predicting sequence
TDIDDKI

SEQ ID NO: 70355 - protein, 7 aa, Artificial sequence
  Protein classification predicting sequence
FPHHENE

SEQ ID NO: 70356 - protein, 7 aa, Artificial sequence
  Protein classification predicting sequence
GHARVMV

SEQ ID NO: 70357 - protein, 14 aa, Artificial sequence
  Protein classification predicting sequence
RNITDIDDKIIKRA

SEQ ID NO: 70358 - protein, 6 aa, Artificial sequence
  Protein classification predicting sequence
WESPWG

SEQ ID NO: 70359 - protein, 6 aa, Artificial sequence
  Protein classification predicting sequence
DIHGGG

SEQ ID NO: 70360 - protein, 7 aa, Artificial sequence
  Protein classification predicting sequence
YARNITD

SEQ ID NO: 70361 - protein, 7 aa, Artificial sequence
  Protein classification predicting sequence
TDVDDKI

SEQ ID NO: 70362 - protein, 6 aa, Artificial sequence
  Protein classification predicting sequence
WPSPWG

SEQ ID NO: 70363 - protein, 5 aa, Artificial sequence
  Protein classification predicting sequence
QSCCA

SEQ ID NO: 70364 - protein, 7 aa, Artificial sequence
  Protein classification predicting sequence
CGVTVYD

SEQ ID NO: 70365 - protein, 6 aa, Artificial sequence
  Protein classification predicting sequence
YVRNIT

SEQ ID NO: 70366 - protein, 8 aa, Artificial sequence
  Protein classification predicting sequence
TDIDDKII

SEQ ID NO: 70367 - protein, 6 aa, Artificial sequence
  Protein classification predicting sequence
RLYTAL

SEQ ID NO: 70368 - protein, 10 aa, Artificial sequence
  Protein classification predicting sequence
NTLTRQKEEF

SEQ ID NO: 70369 - protein, 200 aa, Artificial sequence
  Protein classification predicting sequence
TKEFEGYGKLSHQPIADLRHGARIEVGEKKQDPLDFALWKAAKEGEIFWESPWGQGRPGWHIECSAMARKYLGDTIDIHAGGQDLAFPHHENEIAQSEALTGKTFARYWMHNGYININNEKMSKSLGNFILVHDIIKQYDPQLIRFFMLSVHYRHPINFSEELLQSTNNGLERIKTAYGNLKHRMESSTDLTDHNEKWLA

SEQ ID NO: 70370 - protein, 41 aa, Artificial sequence
  Protein classification predicting sequence
EKFQTAFEEAMNDDFNTANAITELYNVANHANQYLLEEHTS

SEQ ID NO: 70371 - protein, 25 aa, Artificial sequence
  Protein classification predicting sequence
LIQKRIEARKNRDFALSDQIRDDLK

SEQ ID NO: 70372 - protein, 5 aa, Artificial sequence
  Protein classification predicting sequence
YWMHN

SEQ ID NO: 70373 - protein, 22 aa, Artificial sequence
  Protein classification predicting sequence
KVKMYVCGPTVYNYIHIGNARP

SEQ ID NO: 70374 - protein, 11 aa, Artificial sequence
  Protein classification predicting sequence
GGDVYFRTRKF

SEQ ID NO: 70375 - protein, 6 aa, Artificial sequence
  Protein classification predicting sequence
RFFMLS

SEQ ID NO: 70376 - protein, 6 aa, Artificial sequence
  Protein classification predicting sequence
MDDDFN

SEQ ID NO: 70377 - protein, 23 aa, Artificial sequence
  Protein classification predicting sequence
VQYVSNFTDVDDKLIKAANELGE

SEQ ID NO: 70378 - protein, 9 aa, Artificial sequence
  Protein classification predicting sequence
AYEADGDVY

SEQ ID NO: 70379 - protein, 6 aa, Artificial sequence
  Protein classification predicting sequence
DFTLWK

SEQ ID NO: 70380 - protein, 6 aa, Artificial sequence
  Protein classification predicting sequence
LWKAAK

SEQ ID NO: 70381 - protein, 7 aa, Artificial sequence
  Protein classification predicting sequence
EISWDSP

SEQ ID NO: 70382 - protein, 19 aa, Artificial sequence
  Protein classification predicting sequence
GRPGWHIECSAMARKYLGD

SEQ ID NO: 70383 - protein, 10 aa, Artificial sequence
  Protein classification predicting sequence
IDIHAGGQDL

SEQ ID NO: 70384 - protein, 7 aa, Artificial sequence
  Protein classification predicting sequence
HNGYINI

SEQ ID NO: 70385 - protein, 12 aa, Artificial sequence
  Protein classification predicting sequence
DNEKMSKSLGNF

SEQ ID NO: 70386 - protein, 14 aa, Artificial sequence
  Protein classification predicting sequence
RFFMLSVHYRHPIN

SEQ ID NO: 70387 - protein, 9 aa, Artificial sequence
  Protein classification predicting sequence
DDFNTANAI

SEQ ID NO: 70388 - protein, 15 aa, Artificial sequence
  Protein classification predicting sequence
CGPTVYNYIHIGNAR

SEQ ID NO: 70389 - protein, 7 aa, Artificial sequence
  Protein classification predicting sequence
AANELGE

SEQ ID NO: 70390 - protein, 7 aa, Artificial sequence
  Protein classification predicting sequence
AEIEALI

SEQ ID NO: 70391 - protein, 9 aa, Artificial sequence
  Protein classification predicting sequence
FARADEIRD

SEQ ID NO: 70392 - protein, 7 aa, Artificial sequence
  Protein classification predicting sequence
KEDALDF

SEQ ID NO: 70393 - protein, 7 aa, Artificial sequence
  Protein classification predicting sequence
LDFALWK

SEQ ID NO: 70394 - protein, 7 aa, Artificial sequence
  Protein classification predicting sequence
LVHDIIK

SEQ ID NO: 70395 - protein, 12 aa, Artificial sequence
  Protein classification predicting sequence
NRDFALSDQIRD

SEQ ID NO: 70396 - protein, 6 aa, Artificial sequence
  Protein classification predicting sequence
YNTLTR

SEQ ID NO: 70397 - protein, 13 aa, Artificial sequence
  Protein classification predicting sequence
AHIGNARPVIVFD

SEQ ID NO: 70398 - protein, 8 aa, Artificial sequence
  Protein classification predicting sequence
YDYAHIGN

SEQ ID NO: 70399 - protein, 7 aa, Artificial sequence
  Protein classification predicting sequence
SWPSPWG

SEQ ID NO: 70400 - protein, 6 aa, Artificial sequence
  Protein classification predicting sequence
YVCGIT

SEQ ID NO: 70401 - protein, 15 aa, Artificial sequence
  Protein classification predicting sequence
FPHHENEIAQSTCAH

SEQ ID NO: 70402 - protein, 8 aa, Artificial sequence
  Protein classification predicting sequence
CGPTVYNY

SEQ ID NO: 70403 - protein, 6 aa, Artificial sequence
  Protein classification predicting sequence
YAHIGN

SEQ ID NO: 70404 - protein, 5 aa, Artificial sequence
  Protein classification predicting sequence
DFVLW

SEQ ID NO: 70405 - protein, 5 aa, Artificial sequence
  Protein classification predicting sequence
WHLEC

SEQ ID NO: 70406 - protein, 7 aa, Artificial sequence
  Protein classification predicting sequence
YVRNITD

SEQ ID NO: 70407 - protein, 7 aa, Artificial sequence
  Protein classification predicting sequence
AGARVDV

SEQ ID NO: 70408 - protein, 11 aa, Artificial sequence
  Protein classification predicting sequence
AGARVDVAPYK

SEQ ID NO: 70409 - protein, 6 aa, Artificial sequence
  Protein classification predicting sequence
WMHNGF

SEQ ID NO: 70410 - protein, 10 aa, Artificial sequence
  Protein classification predicting sequence
WMHNGFLQVE

SEQ ID NO: 70411 - protein, 6 aa, Artificial sequence
  Protein classification predicting sequence
YVCGVT

SEQ ID NO: 70412 - protein, 7 aa, Artificial sequence
  Protein classification predicting sequence
EMHKDFD

SEQ ID NO: 70413 - protein, 11 aa, Artificial sequence
  Protein classification predicting sequence
KMSKSLGNSFF

SEQ ID NO: 70414 - protein, 13 aa, Artificial sequence
  Protein classification predicting sequence
YVRNITDIDDKII

SEQ ID NO: 70415 - protein, 10 aa, Artificial sequence
  Protein classification predicting sequence
NITDIDDKII

SEQ ID NO: 70416 - protein, 14 aa, Artificial sequence
  Protein classification predicting sequence
EKMSKSLGNFFTIR

SEQ ID NO: 70417 - protein, 6 aa, Artificial sequence
  Protein classification predicting sequence
TDVDDK

SEQ ID NO: 70418 - protein, 12 aa, Artificial sequence
  Protein classification predicting sequence
YPHATHYIPQMI

SEQ ID NO: 70419 - protein, 12 aa, Artificial sequence
  Protein classification predicting sequence
FPHHENEIAQSE

SEQ ID NO: 70420 - protein, 8 aa, Artificial sequence
  Protein classification predicting sequence
NITDVGHL

SEQ ID NO: 70421 - protein, 8 aa, Artificial sequence
  Protein classification predicting sequence
LGDTIDIH

SEQ ID NO: 70422 - protein, 11 aa, Artificial sequence
  Protein classification predicting sequence
EIAQSEAATGK

SEQ ID NO: 70423 - protein, 10 aa, Artificial sequence
  Protein classification predicting sequence
YAHIGNFRTY

SEQ ID NO: 70424 - protein, 7 aa, Artificial sequence
  Protein classification predicting sequence
DKIIKRA

SEQ ID NO: 70425 - protein, 7 aa, Artificial sequence
  Protein classification predicting sequence
EPRATHH

SEQ ID NO: 70426 - protein, 8 aa, Artificial sequence
  Protein classification predicting sequence
FEGYGKLS

SEQ ID NO: 70427 - protein, 7 aa, Artificial sequence
  Protein classification predicting sequence
DRIRDEL

SEQ ID NO: 70428 - protein, 6 aa, Artificial sequence
  Protein classification predicting sequence
TDIDDK

SEQ ID NO: 70429 - protein, 7 aa, Artificial sequence
  Protein classification predicting sequence
KPGEPSW

SEQ ID NO: 70430 - protein, 11 aa, Artificial sequence
  Protein classification predicting sequence
NINNEKMSKSL

SEQ ID NO: 70431 - protein, 10 aa, Artificial sequence
  Protein classification predicting sequence
FPHHENEIAQ

SEQ ID NO: 70432 - protein, 13 aa, Artificial sequence
  Protein classification predicting sequence
FPHHENEIAQSEA

SEQ ID NO: 70433 - protein, 7 aa, Artificial sequence
  Protein classification predicting sequence
CGPTVYN

SEQ ID NO: 70434 - protein, 9 aa, Artificial sequence
  Protein classification predicting sequence
NFSEELLQS

SEQ ID NO: 70435 - protein, 7 aa, Artificial sequence
  Protein classification predicting sequence
AFDVIRR

SEQ ID NO: 70436 - protein, 8 aa, Artificial sequence
  Protein classification predicting sequence
DADEGEDK

SEQ ID NO: 70437 - protein, 5 aa, Artificial sequence
  Protein classification predicting sequence
WDSPW

SEQ ID NO: 70438 - protein, 10 aa, Artificial sequence
  Protein classification predicting sequence
FDIHGGGLDL

SEQ ID NO: 70439 - protein, 8 aa, Artificial sequence
  Protein classification predicting sequence
DLQFPHHE

SEQ ID NO: 70440 - protein, 5 aa, Artificial sequence
  Protein classification predicting sequence
YDYCH

SEQ ID NO: 70441 - protein, 8 aa, Artificial sequence
  Protein classification predicting sequence
DDKIIKRA

SEQ ID NO: 70442 - protein, 23 aa, Artificial sequence
  Protein classification predicting sequence
DDFNTPEAYSVLFDMAREVNRLK

SEQ ID NO: 70443 - protein, 11 aa, Artificial sequence
  Protein classification predicting sequence
AFDTIRRYFEY

SEQ ID NO: 70444 - protein, 9 aa, Artificial sequence
  Protein classification predicting sequence
SNFTDVDDK

SEQ ID NO: 70445 - protein, 8 aa, Artificial sequence
  Protein classification predicting sequence
PLDFALWK

SEQ ID NO: 70446 - protein, 7 aa, Artificial sequence
  Protein classification predicting sequence
VGMYVCG

SEQ ID NO: 70447 - protein, 11 aa, Artificial sequence
  Protein classification predicting sequence
DFDALNILRPD

SEQ ID NO: 70448 - protein, 18 aa, Artificial sequence
  Protein classification predicting sequence
GRPGWHIECSAMNCKQLG

SEQ ID NO: 70449 - protein, 11 aa, Artificial sequence
  Protein classification predicting sequence
FPHHENEIAQS

SEQ ID NO: 70450 - protein, 8 aa, Artificial sequence
  Protein classification predicting sequence
AMDDDFNT

SEQ ID NO: 70451 - protein, 7 aa, Artificial sequence
  Protein classification predicting sequence
VLGLLEQ

SEQ ID NO: 70452 - protein, 9 aa, Artificial sequence
  Protein classification predicting sequence
EIEALIQQR

SEQ ID NO: 70453 - protein, 19 aa, Artificial sequence
  Protein classification predicting sequence
ARDRLNEMGIVLEDGPQGT

SEQ ID NO: 70454 - protein, 15 aa, Artificial sequence
  Protein classification predicting sequence
VRNITDIDDKIIKRA

SEQ ID NO: 70455 - protein, 21 aa, Artificial sequence
  Protein classification predicting sequence
VRNITDIDDKIIKRANENGES

SEQ ID NO: 70456 - protein, 6 aa, Artificial sequence
  Protein classification predicting sequence
DIHAGG

SEQ ID NO: 70457 - protein, 7 aa, Artificial sequence
  Protein classification predicting sequence
DFNTPEA

SEQ ID NO: 70458 - protein, 8 aa, Artificial sequence
  Protein classification predicting sequence
NFTDVDDK

SEQ ID NO: 70459 - protein, 10 aa, Artificial sequence
  Protein classification predicting sequence
DLIFPHHENE

SEQ ID NO: 70460 - protein, 14 aa, Artificial sequence
  Protein classification predicting sequence
ELLDEEIEALIQKR

SEQ ID NO: 70461 - protein, 7 aa, Artificial sequence
  Protein classification predicting sequence
RNEARKN

SEQ ID NO: 70462 - protein, 10 aa, Artificial sequence
  Protein classification predicting sequence
EARKNRDFAL

SEQ ID NO: 70463 - protein, 6 aa, Artificial sequence
  Protein classification predicting sequence
VTYVRN

SEQ ID NO: 70464 - protein, 10 aa, Artificial sequence
  Protein classification predicting sequence
GARIEVGEKK

SEQ ID NO: 70465 - protein, 7 aa, Artificial sequence
  Protein classification predicting sequence
YWIHNGF

SEQ ID NO: 70466 - protein, 10 aa, Artificial sequence
  Protein classification predicting sequence
TVYDYCHLGH

SEQ ID NO: 70467 - protein, 6 aa, Artificial sequence
  Protein classification predicting sequence
GHAYVA

SEQ ID NO: 70468 - protein, 7 aa, Artificial sequence
  Protein classification predicting sequence
KEEFKPI

SEQ ID NO: 70469 - protein, 7 aa, Artificial sequence
  Protein classification predicting sequence
TVYDLCH

SEQ ID NO: 70470 - protein, 8 aa, Artificial sequence
  Protein classification predicting sequence
YVRNITDV

SEQ ID NO: 70471 - protein, 12 aa, Artificial sequence
  Protein classification predicting sequence
GRPGWHIECSAM

SEQ ID NO: 70472 - protein, 15 aa, Artificial sequence
  Protein classification predicting sequence
FPHHENEIAQSCCAH

SEQ ID NO: 70473 - protein, 7 aa, Artificial sequence
  Protein classification predicting sequence
QLQAGAR

SEQ ID NO: 70474 - protein, 7 aa, Artificial sequence
  Protein classification predicting sequence
FDIHGGG

SEQ ID NO: 70475 - protein, 10 aa, Artificial sequence
  Protein classification predicting sequence
FDIHGGGSDL

SEQ ID NO: 70476 - protein, 13 aa, Artificial sequence
  Protein classification predicting sequence
HYRSQLNYSEENL

SEQ ID NO: 70477 - protein, 7 aa, Artificial sequence
  Protein classification predicting sequence
IDIHVGG

SEQ ID NO: 70478 - protein, 5 aa, Artificial sequence
  Protein classification predicting sequence
FANYW

SEQ ID NO: 70479 - protein, 8 aa, Artificial sequence
  Protein classification predicting sequence
GKGRPGWH

SEQ ID NO: 70480 - protein, 7 aa, Artificial sequence
  Protein classification predicting sequence
IAKRQEA

SEQ ID NO: 70481 - protein, 10 aa, Artificial sequence
  Protein classification predicting sequence
DLLFPHHENE

SEQ ID NO: 70482 - protein, 7 aa, Artificial sequence
  Protein classification predicting sequence
GHARSYI

SEQ ID NO: 70483 - protein, 6 aa, Artificial sequence
  Protein classification predicting sequence
GEPSWP

SEQ ID NO: 70484 - protein, 9 aa, Artificial sequence
  Protein classification predicting sequence
DPLDFVLWK

SEQ ID NO: 70485 - protein, 7 aa, Artificial sequence
  Protein classification predicting sequence
WMHSGMV

SEQ ID NO: 70486 - protein, 10 aa, Artificial sequence
  Protein classification predicting sequence
EKMSKSLGNF

SEQ ID NO: 70487 - protein, 11 aa, Artificial sequence
  Protein classification predicting sequence
RYFLLSSHYRS

SEQ ID NO: 70488 - protein, 8 aa, Artificial sequence
  Protein classification predicting sequence
IEALIAKR

SEQ ID NO: 70489 - protein, 6 aa, Artificial sequence
  Protein classification predicting sequence
KEEFKP

SEQ ID NO: 70490 - protein, 9 aa, Artificial sequence
  Protein classification predicting sequence
NYWMHNGFV

SEQ ID NO: 70491 - protein, 6 aa, Artificial sequence
  Protein classification predicting sequence
EDTPQG

SEQ ID NO: 70492 - protein, 8 aa, Artificial sequence
  Protein classification predicting sequence
TDVDDKII

SEQ ID NO: 70493 - protein, 8 aa, Artificial sequence
  Protein classification predicting sequence
IEFIQELV

SEQ ID NO: 70494 - protein, 7 aa, Artificial sequence
  Protein classification predicting sequence
GASGRTD

SEQ ID NO: 70495 - protein, 28 aa, Artificial sequence
  Protein classification predicting sequence
TIDIHGGGADLEFPHHTNEIAQSEAKTG

SEQ ID NO: 70496 - protein, 8 aa, Artificial sequence
  Protein classification predicting sequence
DTKDGVRW

SEQ ID NO: 70497 - protein, 6 aa, Artificial sequence
  Protein classification predicting sequence
ATVHPR

SEQ ID NO: 70498 - protein, 15 aa, Artificial sequence
  Protein classification predicting sequence
LIEKGYAYESAGDVY

SEQ ID NO: 70499 - protein, 10 aa, Artificial sequence
  Protein classification predicting sequence
GRPGWHIECS

SEQ ID NO: 70500 - protein, 6 aa, Artificial sequence
  Protein classification predicting sequence
VHDIIK

SEQ ID NO: 70501 - protein, 9 aa, Artificial sequence
  Protein classification predicting sequence
HYRSPLNYS

SEQ ID NO: 70502 - protein, 8 aa, Artificial sequence
  Protein classification predicting sequence
PRVTENMD

SEQ ID NO: 70503 - protein, 11 aa, Artificial sequence
  Protein classification predicting sequence
IILEDTAQGTR

SEQ ID NO: 70504 - protein, 11 aa, Artificial sequence
  Protein classification predicting sequence
RPGWHIECSVM

SEQ ID NO: 70505 - protein, 6 aa, Artificial sequence
  Protein classification predicting sequence
LTRQKE

SEQ ID NO: 70506 - protein, 7 aa, Artificial sequence
  Protein classification predicting sequence
VRMYVCG

SEQ ID NO: 70507 - protein, 7 aa, Artificial sequence
  Protein classification predicting sequence
ARFIEAM

SEQ ID NO: 70508 - protein, 10 aa, Artificial sequence
  Protein classification predicting sequence
LKVKPADIYP

SEQ ID NO: 70509 - protein, 6 aa, Artificial sequence
  Protein classification predicting sequence
GIILED

SEQ ID NO: 70510 - protein, 8 aa, Artificial sequence
  Protein classification predicting sequence
IHGGGIDL

SEQ ID NO: 70511 - protein, 6 aa, Artificial sequence
  Protein classification predicting sequence
DLIFPH

SEQ ID NO: 70512 - protein, 14 aa, Artificial sequence
  Protein classification predicting sequence
GEGRPGWHIECSVM

SEQ ID NO: 70513 - protein, 6 aa, Artificial sequence
  Protein classification predicting sequence
LSTHYR

SEQ ID NO: 70514 - protein, 9 aa, Artificial sequence
  Protein classification predicting sequence
AYVASNGDV

SEQ ID NO: 70515 - protein, 13 aa, Artificial sequence
  Protein classification predicting sequence
FPHHENEIAQSEG

SEQ ID NO: 70516 - protein, 15 aa, Artificial sequence
  Protein classification predicting sequence
RAHYRSPLNYSDAHL

SEQ ID NO: 70517 - protein, 9 aa, Artificial sequence
  Protein classification predicting sequence
LASEANRTG

SEQ ID NO: 70518 - protein, 6 aa, Artificial sequence
  Protein classification predicting sequence
YWMHNG

SEQ ID NO: 70519 - protein, 6 aa, Artificial sequence
  Protein classification predicting sequence
YFRVSK

SEQ ID NO: 70520 - protein, 7 aa, Artificial sequence
  Protein classification predicting sequence
YRKPINF

SEQ ID NO: 70521 - protein, 6 aa, Artificial sequence
  Protein classification predicting sequence
FKPIHA

SEQ ID NO: 70522 - protein, 7 aa, Artificial sequence
  Protein classification predicting sequence
GHGRTFV

SEQ ID NO: 70523 - protein, 5 aa, Artificial sequence
  Protein classification predicting sequence
YVNYW

SEQ ID NO: 70524 - protein, 11 aa, Artificial sequence
  Protein classification predicting sequence
KMSKSLGNFFT

SEQ ID NO: 70525 - protein, 6 aa, Artificial sequence
  Protein classification predicting sequence
AISVLF

SEQ ID NO: 70526 - protein, 10 aa, Artificial sequence
  Protein classification predicting sequence
RQKEEFKPIH

SEQ ID NO: 70527 - protein, 9 aa, Artificial sequence
  Protein classification predicting sequence
FDVVARYLR

SEQ ID NO: 70528 - protein, 20 aa, Artificial sequence
  Protein classification predicting sequence
DLMFPHHENEIAQSTCAHDG

SEQ ID NO: 70529 - protein, 8 aa, Artificial sequence
  Protein classification predicting sequence
YTALRGTD

SEQ ID NO: 70530 - protein, 8 aa, Artificial sequence
  Protein classification predicting sequence
LEDGPQGT

SEQ ID NO: 70531 - protein, 8 aa, Artificial sequence
  Protein classification predicting sequence
DLVFPHHE

SEQ ID NO: 70532 - protein, 8 aa, Artificial sequence
  Protein classification predicting sequence
ATADAIRD

SEQ ID NO: 70533 - protein, 8 aa, Artificial sequence
  Protein classification predicting sequence
AKAARDFA

SEQ ID NO: 70534 - protein, 18 aa, Artificial sequence
  Protein classification predicting sequence
VRMYVCGMTVYDYCHLGH

SEQ ID NO: 70535 - protein, 7 aa, Artificial sequence
  Protein classification predicting sequence
RANENGE

SEQ ID NO: 70536 - protein, 15 aa, Artificial sequence
  Protein classification predicting sequence
SPWGEGRPGWHIECS

SEQ ID NO: 70537 - protein, 12 aa, Artificial sequence
  Protein classification predicting sequence
GRPGWHIECSVM

SEQ ID NO: 70538 - protein, 13 aa, Artificial sequence
  Protein classification predicting sequence
GRPGWHIECSVMS

SEQ ID NO: 70539 - protein, 8 aa, Artificial sequence
  Protein classification predicting sequence
SFDIHGGG

SEQ ID NO: 70540 - protein, 8 aa, Artificial sequence
  Protein classification predicting sequence
HYRSPINY

SEQ ID NO: 70541 - protein, 7 aa, Artificial sequence
  Protein classification predicting sequence
NYSEENL

SEQ ID NO: 70542 - protein, 7 aa, Artificial sequence
  Protein classification predicting sequence
AREVNRL

SEQ ID NO: 70543 - protein, 7 aa, Artificial sequence
  Protein classification predicting sequence
EPEAFLQ

SEQ ID NO: 70544 - protein, 7 aa, Artificial sequence
  Protein classification predicting sequence
LNILPPD

SEQ ID NO: 70545 - protein, 6 aa, Artificial sequence
  Protein classification predicting sequence
PRVTEN

SEQ ID NO: 70546 - protein, 7 aa, Artificial sequence
  Protein classification predicting sequence
YGVLSRQ

SEQ ID NO: 70547 - protein, 14 aa, Artificial sequence
  Protein classification predicting sequence
ALKVKPADIYPRVT

SEQ ID NO: 70548 - protein, 15 aa, Artificial sequence
  Protein classification predicting sequence
VLMVMNFTDIDDKII

SEQ ID NO: 70549 - protein, 10 aa, Artificial sequence
  Protein classification predicting sequence
NFTDIDDKII

SEQ ID NO: 70550 - protein, 7 aa, Artificial sequence
  Protein classification predicting sequence
LEDTPQG

SEQ ID NO: 70551 - protein, 7 aa, Artificial sequence
  Protein classification predicting sequence
TVYDYCH

SEQ ID NO: 70552 - protein, 12 aa, Artificial sequence
  Protein classification predicting sequence
AAKAARDFARAD

SEQ ID NO: 70553 - protein, 7 aa, Artificial sequence
  Protein classification predicting sequence
CGPTVYD

SEQ ID NO: 70554 - protein, 8 aa, Artificial sequence
  Protein classification predicting sequence
AKNYAEAD

SEQ ID NO: 70555 - protein, 6 aa, Artificial sequence
  Protein classification predicting sequence
CGPTVY

SEQ ID NO: 70556 - protein, 8 aa, Artificial sequence
  Protein classification predicting sequence
TDVDDKLI

SEQ ID NO: 70557 - protein, 5 aa, Artificial sequence
  Protein classification predicting sequence
AQSTC

SEQ ID NO: 70558 - protein, 6 aa, Artificial sequence
  Protein classification predicting sequence
YNTLSR

SEQ ID NO: 70559 - protein, 6 aa, Artificial sequence
  Protein classification predicting sequence
NEIAQS

SEQ ID NO: 70560 - protein, 10 aa, Artificial sequence
  Protein classification predicting sequence
GEPSWPSPWG

SEQ ID NO: 70561 - protein, 12 aa, Artificial sequence
  Protein classification predicting sequence
APAGGEAFEARF

SEQ ID NO: 70562 - protein, 11 aa, Artificial sequence
  Protein classification predicting sequence
AANAMASHLRK

SEQ ID NO: 70563 - protein, 10 aa, Artificial sequence
  Protein classification predicting sequence
FLQSGAQADD

SEQ ID NO: 70564 - protein, 23 aa, Artificial sequence
  Protein classification predicting sequence
KGHAYVADNGDVMFDVPTDPTYG

SEQ ID NO: 70565 - protein, 65 aa, Artificial sequence
  Protein classification predicting sequence
YVNYWMHSGMVMVDREKMSKSLGNFFTVRDVLKYYDAETVRYFLMSGHYRSQLNYSEENLKQARA

SEQ ID NO: 70566 - protein, 31 aa, Artificial sequence
  Protein classification predicting sequence
EVAEIEALIQQRLDARKAKDWAAADAARDRL

SEQ ID NO: 70567 - protein, 11 aa, Artificial sequence
  Protein classification predicting sequence
DFDALNMKRPD

SEQ ID NO: 70568 - protein, 9 aa, Artificial sequence
  Protein classification predicting sequence
DFVLWKMSK

SEQ ID NO: 70569 - protein, 13 aa, Artificial sequence
  Protein classification predicting sequence
DFVLWKMSKPGEP

SEQ ID NO: 70570 - protein, 11 aa, Artificial sequence
  Protein classification predicting sequence
HFDIHGGGSDL

SEQ ID NO: 70571 - protein, 10 aa, Artificial sequence
  Protein classification predicting sequence
YDAETVRYFL

SEQ ID NO: 70572 - protein, 12 aa, Artificial sequence
  Protein classification predicting sequence
NYSEENLKQARA

SEQ ID NO: 70573 - protein, 7 aa, Artificial sequence
  Protein classification predicting sequence
LERLYTA

SEQ ID NO: 70574 - protein, 9 aa, Artificial sequence
  Protein classification predicting sequence
EVAEIEALI

SEQ ID NO: 70575 - protein, 10 aa, Artificial sequence
  Protein classification predicting sequence
MDFVLWKMSK

SEQ ID NO: 70576 - protein, 6 aa, Artificial sequence
  Protein classification predicting sequence
RRYFEY

SEQ ID NO: 70577 - protein, 9 aa, Artificial sequence
  Protein classification predicting sequence
LWKKAKPGE

SEQ ID NO: 70578 - protein, 7 aa, Artificial sequence
  Protein classification predicting sequence
MNDDFNT

SEQ ID NO: 70579 - protein, 73 aa, Artificial sequence
  Protein classification predicting sequence
TIDIHAGGSDLQFPHHENEIAQSEAHNHAPFANYWMHNGFINIDNEKMSKSLGNFILVHDIIKEVDPDVLRFF

SEQ ID NO: 70580 - protein, 9 aa, Artificial sequence
  Protein classification predicting sequence
KATSNPRVM

SEQ ID NO: 70581 - protein, 20 aa, Artificial sequence
  Protein classification predicting sequence
KEDALDFTLWKKAKPGEISW

SEQ ID NO: 70582 - protein, 12 aa, Artificial sequence
  Protein classification predicting sequence
ARSGLERIRNSY

SEQ ID NO: 70583 - protein, 13 aa, Artificial sequence
  Protein classification predicting sequence
IFSDVLGVPLKSK

SEQ ID NO: 70584 - protein, 40 aa, Artificial sequence
  Protein classification predicting sequence
PIEPGKVKMYVCGPTVYNYIHIGNARPAINYDVVRRYFEY

SEQ ID NO: 70585 - protein, 21 aa, Artificial sequence
  Protein classification predicting sequence
TAWYDLAKLANKYVLENTTST

SEQ ID NO: 70586 - protein, 25 aa, Artificial sequence
  Protein classification predicting sequence
LIEERNEARKNKDFARADEIRDMLK

SEQ ID NO: 70587 - protein, 9 aa, Artificial sequence
  Protein classification predicting sequence
YAKLANKTL

SEQ ID NO: 70588 - protein, 12 aa, Artificial sequence
  Protein classification predicting sequence
RFFLATQQYRKP

SEQ ID NO: 70589 - protein, 13 aa, Artificial sequence
  Protein classification predicting sequence
MYVCGPTVYNYIH

SEQ ID NO: 70590 - protein, 7 aa, Artificial sequence
  Protein classification predicting sequence
AWDSPWG

SEQ ID NO: 70591 - protein, 8 aa, Artificial sequence
  Protein classification predicting sequence
YVCGPTVY

SEQ ID NO: 70592 - protein, 17 aa, Artificial sequence
  Protein classification predicting sequence
YVCGPTVYNYIHIGNAR

SEQ ID NO: 70593 - protein, 14 aa, Artificial sequence
  Protein classification predicting sequence
QGIKLLDTKDGVRW

SEQ ID NO: 70594 - protein, 10 aa, Artificial sequence
  Protein classification predicting sequence
NFTDVDDKII

SEQ ID NO: 70595 - protein, 8 aa, Artificial sequence
  Protein classification predicting sequence
ALGVKPAT

SEQ ID NO: 70596 - protein, 10 aa, Artificial sequence
  Protein classification predicting sequence
GDVYFRVEKS

SEQ ID NO: 70597 - protein, 7 aa, Artificial sequence
  Protein classification predicting sequence
KPGEISW

SEQ ID NO: 70598 - protein, 8 aa, Artificial sequence
  Protein classification predicting sequence
NLKYLKNT

SEQ ID NO: 70599 - protein, 9 aa, Artificial sequence
  Protein classification predicting sequence
KPATQNPRV

SEQ ID NO: 70600 - protein, 10 aa, Artificial sequence
  Protein classification predicting sequence
GASGRTDAET

SEQ ID NO: 70601 - protein, 31 aa, Artificial sequence
  Protein classification predicting sequence
TVDGQVLRFFLATQQYRKPINFTEKAIHDAE

SEQ ID NO: 70602 - protein, 9 aa, Artificial sequence
  Protein classification predicting sequence
QGIKLLDTK

SEQ ID NO: 70603 - protein, 7 aa, Artificial sequence
  Protein classification predicting sequence
NFTDIDD

SEQ ID NO: 70604 - protein, 6 aa, Artificial sequence
  Protein classification predicting sequence
GDVYFR

SEQ ID NO: 70605 - protein, 7 aa, Artificial sequence
  Protein classification predicting sequence
GDVYYAV

SEQ ID NO: 70606 - protein, 6 aa, Artificial sequence
  Protein classification predicting sequence
WDSPWG

SEQ ID NO: 70607 - protein, 6 aa, Artificial sequence
  Protein classification predicting sequence
KPGEPS

SEQ ID NO: 70608 - protein, 5 aa, Artificial sequence
  Protein classification predicting sequence
WMHNG

SEQ ID NO: 70609 - protein, 7 aa, Artificial sequence
  Protein classification predicting sequence
CGITVYD

SEQ ID NO: 70610 - protein, 16 aa, Artificial sequence
  Protein classification predicting sequence
DLIFPHHENEIAQSEA

SEQ ID NO: 70611 - protein, 6 aa, Artificial sequence
  Protein classification predicting sequence
YWLHNG

SEQ ID NO: 70612 - protein, 6 aa, Artificial sequence
  Protein classification predicting sequence
VCGPTV

SEQ ID NO: 70613 - protein, 8 aa, Artificial sequence
  Protein classification predicting sequence
LGESFDIH

SEQ ID NO: 70614 - protein, 8 aa, Artificial sequence
  Protein classification predicting sequence
GRPGWHIE

SEQ ID NO: 70615 - protein, 5 aa, Artificial sequence
  Protein classification predicting sequence
YWLHN

SEQ ID NO: 70616 - protein, 5 aa, Artificial sequence
  Protein classification predicting sequence
PGWHI

SEQ ID NO: 70617 - protein, 11 aa, Artificial sequence
  Protein classification predicting sequence
AYVADNGDVMF

SEQ ID NO: 70618 - protein, 6 aa, Artificial sequence
  Protein classification predicting sequence
EYGKLS

SEQ ID NO: 70619 - protein, 18 aa, Artificial sequence
  Protein classification predicting sequence
GRPGWHIECSAMNSSILG

SEQ ID NO: 70620 - protein, 10 aa, Artificial sequence
  Protein classification predicting sequence
QARASLERLY

SEQ ID NO: 70621 - protein, 13 aa, Artificial sequence
  Protein classification predicting sequence
IEALIKLRNDSRA

SEQ ID NO: 70622 - protein, 8 aa, Artificial sequence
  Protein classification predicting sequence
LTRQKEEF

SEQ ID NO: 70623 - protein, 6 aa, Artificial sequence
  Protein classification predicting sequence
LSRQDL

SEQ ID NO: 70624 - protein, 23 aa, Artificial sequence
  Protein classification predicting sequence
ETVRYFLMSGHYRSQLNYSEENL

SEQ ID NO: 70625 - protein, 8 aa, Artificial sequence
  Protein classification predicting sequence
VAEIEALI

SEQ ID NO: 70626 - protein, 7 aa, Artificial sequence
  Protein classification predicting sequence
IVLEDGP

SEQ ID NO: 70627 - protein, 17 aa, Artificial sequence
  Protein classification predicting sequence
EKMSKSLGNFFTIRDVL

SEQ ID NO: 70628 - protein, 23 aa, Artificial sequence
  Protein classification predicting sequence
YDAETVRYFLMSGHYRSQLNYSE

SEQ ID NO: 70629 - protein, 21 aa, Artificial sequence
  Protein classification predicting sequence
AMNDDFNTPEAYSVLFDMARE

SEQ ID NO: 70630 - protein, 7 aa, Artificial sequence
  Protein classification predicting sequence
RAAKDWA

SEQ ID NO: 70631 - protein, 6 aa, Artificial sequence
  Protein classification predicting sequence
KIFNTL

SEQ ID NO: 70632 - protein, 8 aa, Artificial sequence
  Protein classification predicting sequence
FARADEIR

SEQ ID NO: 70633 - protein, 8 aa, Artificial sequence
  Protein classification predicting sequence
TIDIHAGG

SEQ ID NO: 70634 - protein, 6 aa, Artificial sequence
  Protein classification predicting sequence
LGLLQQ

SEQ ID NO: 70635 - protein, 7 aa, Artificial sequence
  Protein classification predicting sequence
GIVLEDT

SEQ ID NO: 70636 - protein, 16 aa, Artificial sequence
  Protein classification predicting sequence
FPHHENEIAQSRCAHG

SEQ ID NO: 70637 - protein, 13 aa, Artificial sequence
  Protein classification predicting sequence
YDLCHIGHGRTFV

SEQ ID NO: 70638 - protein, 8 aa, Artificial sequence
  Protein classification predicting sequence
WMHSGMVM

SEQ ID NO: 70639 - protein, 12 aa, Artificial sequence
  Protein classification predicting sequence
LERLYTALRGTD

SEQ ID NO: 70640 - protein, 14 aa, Artificial sequence
  Protein classification predicting sequence
DDFNTPEAYSVLFD

SEQ ID NO: 70641 - protein, 11 aa, Artificial sequence
  Protein classification predicting sequence
LTKSTPEGARD

SEQ ID NO: 70642 - protein, 17 aa, Artificial sequence
  Protein classification predicting sequence
CFRDEDLRGDRQPEFTQ

SEQ ID NO: 70643 - protein, 7 aa, Artificial sequence
  Protein classification predicting sequence
DGDMIFF

SEQ ID NO: 70644 - protein, 7 aa, Artificial sequence
  Protein classification predicting sequence
GGGSLRI

SEQ ID NO: 70645 - protein, 9 aa, Artificial sequence
  Protein classification predicting sequence
QANDNLPTG

SEQ ID NO: 70646 - protein, 6 aa, Artificial sequence
  Protein classification predicting sequence
PFEIKD

SEQ ID NO: 70647 - protein, 18 aa, Artificial sequence
  Protein classification predicting sequence
DDTRLRYRYLDLRRPEML

SEQ ID NO: 70648 - protein, 10 aa, Artificial sequence
  Protein classification predicting sequence
NFKLRAKVTH

SEQ ID NO: 70649 - protein, 8 aa, Artificial sequence
  Protein classification predicting sequence
IRNYLDDL

SEQ ID NO: 70650 - protein, 14 aa, Artificial sequence
  Protein classification predicting sequence
AMNNYGSDKPDTRF

SEQ ID NO: 70651 - protein, 7 aa, Artificial sequence
  Protein classification predicting sequence
YGSDKPD

SEQ ID NO: 70652 - protein, 10 aa, Artificial sequence
  Protein classification predicting sequence
YGSDKPDTRF

SEQ ID NO: 70653 - protein, 8 aa, Artificial sequence
  Protein classification predicting sequence
APAVKAIV

SEQ ID NO: 70654 - protein, 15 aa, Artificial sequence
  Protein classification predicting sequence
AYDIVLNGYELGGGS

SEQ ID NO: 70655 - protein, 20 aa, Artificial sequence
  Protein classification predicting sequence
AYDIVLNGYELGGGSLRINQ

SEQ ID NO: 70656 - protein, 12 aa, Artificial sequence
  Protein classification predicting sequence
GLDRFVMLLAGK

SEQ ID NO: 70657 - protein, 6 aa, Artificial sequence
  Protein classification predicting sequence
LAQSPQ

SEQ ID NO: 70658 - protein, 16 aa, Artificial sequence
  Protein classification predicting sequence
FMRGEEILSGAQRIHD

SEQ ID NO: 70659 - protein, 5 aa, Artificial sequence
  Protein classification predicting sequence
PPHAG

SEQ ID NO: 70660 - protein, 13 aa, Artificial sequence
  Protein classification predicting sequence
PPHAGGGIGLERV

SEQ ID NO: 70661 - protein, 8 aa, Artificial sequence
  Protein classification predicting sequence
FPRDPKRL

SEQ ID NO: 70662 - protein, 6 aa, Artificial sequence
  Protein classification predicting sequence
DKPDLR

SEQ ID NO: 70663 - protein, 8 aa, Artificial sequence
  Protein classification predicting sequence
RIHDPRLQ

SEQ ID NO: 70664 - protein, 10 aa, Artificial sequence
  Protein classification predicting sequence
SIRDVIAFPK

SEQ ID NO: 70665 - protein, 7 aa, Artificial sequence
  Protein classification predicting sequence
DDHGFLD

SEQ ID NO: 70666 - protein, 6 aa, Artificial sequence
  Protein classification predicting sequence
DRYYQI

SEQ ID NO: 70667 - protein, 10 aa, Artificial sequence
  Protein classification predicting sequence
SDKPDLRIPL

SEQ ID NO: 70668 - protein, 13 aa, Artificial sequence
  Protein classification predicting sequence
IYGAKGLAYIKVN

SEQ ID NO: 70669 - protein, 7 aa, Artificial sequence
  Protein classification predicting sequence
DAMGALR

SEQ ID NO: 70670 - protein, 6 aa, Artificial sequence
  Protein classification predicting sequence
RPFYTM

SEQ ID NO: 70671 - protein, 14 aa, Artificial sequence
  Protein classification predicting sequence
ALPQAPQQYKQLLM

SEQ ID NO: 70672 - protein, 7 aa, Artificial sequence
  Protein classification predicting sequence
FFVAGDP

SEQ ID NO: 70673 - protein, 7 aa, Artificial sequence
  Protein classification predicting sequence
GAPPHGG

SEQ ID NO: 70674 - protein, 11 aa, Artificial sequence
  Protein classification predicting sequence
ALPQSPQLFKQ

SEQ ID NO: 70675 - protein, 8 aa, Artificial sequence
  Protein classification predicting sequence
GLDRLVML

SEQ ID NO: 70676 - protein, 7 aa, Artificial sequence
  Protein classification predicting sequence
IAFPKTQ

SEQ ID NO: 70677 - protein, 6 aa, Artificial sequence
  Protein classification predicting sequence
HGGVIF

SEQ ID NO: 70678 - protein, 8 aa, Artificial sequence
  Protein classification predicting sequence
GKFYALPQ

SEQ ID NO: 70679 - protein, 10 aa, Artificial sequence
  Protein classification predicting sequence
RRRDHGGVIF

SEQ ID NO: 70680 - protein, 13 aa, Artificial sequence
  Protein classification predicting sequence
TPPFQLDDDNLSE

SEQ ID NO: 70681 - protein, 18 aa, Artificial sequence
  Protein classification predicting sequence
LTKSTPEGARDYLVPSRV

SEQ ID NO: 70682 - protein, 14 aa, Artificial sequence
  Protein classification predicting sequence
TPEGARDYLVPSRV

SEQ ID NO: 70683 - protein, 9 aa, Artificial sequence
  Protein classification predicting sequence
KCFRDEDLR

SEQ ID NO: 70684 - protein, 18 aa, Artificial sequence
  Protein classification predicting sequence
KCFRDEDLRADRQPEFTQ

SEQ ID NO: 70685 - protein, 17 aa, Artificial sequence
  Protein classification predicting sequence
CFRDEDLRADRQPEFTQ

SEQ ID NO: 70686 - protein, 6 aa, Artificial sequence
  Protein classification predicting sequence
DIETSF

SEQ ID NO: 70687 - protein, 8 aa, Artificial sequence
  Protein classification predicting sequence
FKVFSGPA

SEQ ID NO: 70688 - protein, 7 aa, Artificial sequence
  Protein classification predicting sequence
FVGIYGA

SEQ ID NO: 70689 - protein, 8 aa, Artificial sequence
  Protein classification predicting sequence
GLAYIKVN

SEQ ID NO: 70690 - protein, 6 aa, Artificial sequence
  Protein classification predicting sequence
IFFGAD

SEQ ID NO: 70691 - protein, 9 aa, Artificial sequence
  Protein classification predicting sequence
WVVDFPMFE

SEQ ID NO: 70692 - protein, 7 aa, Artificial sequence
  Protein classification predicting sequence
HHPFTAP

SEQ ID NO: 70693 - protein, 8 aa, Artificial sequence
  Protein classification predicting sequence
QSKVFRAL

SEQ ID NO: 70694 - protein, 38 aa, Artificial sequence
  Protein classification predicting sequence
LTKSTPEGARDYLVPSRVHDGEFYALPQSPQLFKQLLM

SEQ ID NO: 70695 - protein, 16 aa, Artificial sequence
  Protein classification predicting sequence
FYALPQSPQLFKQLLM

SEQ ID NO: 70696 - protein, 15 aa, Artificial sequence
  Protein classification predicting sequence
RYGSDKPDTRFEMEL

SEQ ID NO: 70697 - protein, 17 aa, Artificial sequence
  Protein classification predicting sequence
NFLWVTDWPLLEYDEDA

SEQ ID NO: 70698 - protein, 21 aa, Artificial sequence
  Protein classification predicting sequence
EILDMMERMMTKVMKDAKGVE

SEQ ID NO: 70699 - protein, 42 aa, Artificial sequence
  Protein classification predicting sequence
TLEATAGDLLLFVADKKSVVADSLGALRLRLGKELELIDESK

SEQ ID NO: 70700 - protein, 5 aa, Artificial sequence
  Protein classification predicting sequence
NFLWV

SEQ ID NO: 70701 - protein, 13 aa, Artificial sequence
  Protein classification predicting sequence
FEMELTDLSEFAA

SEQ ID NO: 70702 - protein, 7 aa, Artificial sequence
  Protein classification predicting sequence
FVDLRDR

SEQ ID NO: 70703 - protein, 7 aa, Artificial sequence
  Protein classification predicting sequence
DALTEFV

SEQ ID NO: 70704 - protein, 9 aa, Artificial sequence
  Protein classification predicting sequence
FEWSEEEGR

SEQ ID NO: 70705 - protein, 8 aa, Artificial sequence
  Protein classification predicting sequence
AQEQFGFL

SEQ ID NO: 70706 - protein, 6 aa, Artificial sequence
  Protein classification predicting sequence
RRRDLG

SEQ ID NO: 70707 - protein, 8 aa, Artificial sequence
  Protein classification predicting sequence
EDIRLKYR

SEQ ID NO: 70708 - protein, 9 aa, Artificial sequence
  Protein classification predicting sequence
FYALPQSPQ

SEQ ID NO: 70709 - protein, 8 aa, Artificial sequence
  Protein classification predicting sequence
RYGSDKPD

SEQ ID NO: 70710 - protein, 8 aa, Artificial sequence
  Protein classification predicting sequence
AYDLVLNG

SEQ ID NO: 70711 - protein, 14 aa, Artificial sequence
  Protein classification predicting sequence
NLRDTIAFPKTASA

SEQ ID NO: 70712 - protein, 6 aa, Artificial sequence
  Protein classification predicting sequence
EDIRLK

SEQ ID NO: 70713 - protein, 20 aa, Artificial sequence
  Protein classification predicting sequence
VRRFLDDNGFLDIETPVLTK

SEQ ID NO: 70714 - protein, 7 aa, Artificial sequence
  Protein classification predicting sequence
FLDIETP

SEQ ID NO: 70715 - protein, 7 aa, Artificial sequence
  Protein classification predicting sequence
NDKLATG

SEQ ID NO: 70716 - protein, 6 aa, Artificial sequence
  Protein classification predicting sequence
YGTPPH

SEQ ID NO: 70717 - protein, 6 aa, Artificial sequence
  Protein classification predicting sequence
EDVRLK

SEQ ID NO: 70718 - protein, 17 aa, Artificial sequence
  Protein classification predicting sequence
PPHGGIALGLDRLVMLL

SEQ ID NO: 70719 - protein, 7 aa, Artificial sequence
  Protein classification predicting sequence
IQITGTV

SEQ ID NO: 70720 - protein, 9 aa, Artificial sequence
  Protein classification predicting sequence
EMSFVEQED

SEQ ID NO: 70721 - protein, 14 aa, Artificial sequence
  Protein classification predicting sequence
RLSGWVHRVRDHGG

SEQ ID NO: 70722 - protein, 16 aa, Artificial sequence
  Protein classification predicting sequence
GFDRYFQIAPCFRDED

SEQ ID NO: 70723 - protein, 10 aa, Artificial sequence
  Protein classification predicting sequence
KYGSDKPDLR

SEQ ID NO: 70724 - protein, 13 aa, Artificial sequence
  Protein classification predicting sequence
KYGSDKPDLRNPI

SEQ ID NO: 70725 - protein, 6 aa, Artificial sequence
  Protein classification predicting sequence
WIVDFP

SEQ ID NO: 70726 - protein, 8 aa, Artificial sequence
  Protein classification predicting sequence
NGYEIASG

SEQ ID NO: 70727 - protein, 8 aa, Artificial sequence
  Protein classification predicting sequence
YGAPPHGG

SEQ ID NO: 70728 - protein, 8 aa, Artificial sequence
  Protein classification predicting sequence
QLRDLGIR

SEQ ID NO: 70729 - protein, 8 aa, Artificial sequence
  Protein classification predicting sequence
RRRDHGGV

SEQ ID NO: 70730 - protein, 13 aa, Artificial sequence
  Protein classification predicting sequence
FRVFQAPYVGAVV

SEQ ID NO: 70731 - protein, 6 aa, Artificial sequence
  Protein classification predicting sequence
WVVDFP

SEQ ID NO: 70732 - protein, 7 aa, Artificial sequence
  Protein classification predicting sequence
YDIVCNG

SEQ ID NO: 70733 - protein, 8 aa, Artificial sequence
  Protein classification predicting sequence
DRQPEFTQ

SEQ ID NO: 70734 - protein, 10 aa, Artificial sequence
  Protein classification predicting sequence
DRQPEFTQID

SEQ ID NO: 70735 - protein, 6 aa, Artificial sequence
  Protein classification predicting sequence
PDLRNP

SEQ ID NO: 70736 - protein, 6 aa, Artificial sequence
  Protein classification predicting sequence
GSVRIH

SEQ ID NO: 70737 - protein, 8 aa, Artificial sequence
  Protein classification predicting sequence
GWVNRRRD

SEQ ID NO: 70738 - protein, 7 aa, Artificial sequence
  Protein classification predicting sequence
DVDFKVF

SEQ ID NO: 70739 - protein, 11 aa, Artificial sequence
  Protein classification predicting sequence
FVGIYGAKGLA

SEQ ID NO: 70740 - protein, 14 aa, Artificial sequence
  Protein classification predicting sequence
HKGSFYALPQSPQL

SEQ ID NO: 70741 - protein, 10 aa, Artificial sequence
  Protein classification predicting sequence
FYALPQSPQL

SEQ ID NO: 70742 - protein, 8 aa, Artificial sequence
  Protein classification predicting sequence
ALPQSPQL

SEQ ID NO: 70743 - protein, 7 aa, Artificial sequence
  Protein classification predicting sequence
PLFEYDE

SEQ ID NO: 70744 - protein, 7 aa, Artificial sequence
  Protein classification predicting sequence
YDLVLNG

SEQ ID NO: 70745 - protein, 7 aa, Artificial sequence
  Protein classification predicting sequence
LPLPVFG

SEQ ID NO: 70746 - protein, 11 aa, Artificial sequence
  Protein classification predicting sequence
GDAAFFVAGDP

SEQ ID NO: 70747 - protein, 8 aa, Artificial sequence
  Protein classification predicting sequence
TGEVEIFA

SEQ ID NO: 70748 - protein, 30 aa, Artificial sequence
  Protein classification predicting sequence
GFDRYFQIAPCFRDEDPRADRLPGEFYQLD

SEQ ID NO: 70749 - protein, 8 aa, Artificial sequence
  Protein classification predicting sequence
EMSFVTQE

SEQ ID NO: 70750 - protein, 8 aa, Artificial sequence
  Protein classification predicting sequence
GIALGLDR

SEQ ID NO: 70751 - protein, 7 aa, Artificial sequence
  Protein classification predicting sequence
DRIVMLL

SEQ ID NO: 70752 - protein, 17 aa, Artificial sequence
  Protein classification predicting sequence
LTKSTPEGARDYLVPSR

SEQ ID NO: 70753 - protein, 14 aa, Artificial sequence
  Protein classification predicting sequence
YYQIVKCFRDEDLR

SEQ ID NO: 70754 - protein, 12 aa, Artificial sequence
  Protein classification predicting sequence
LTKSTPEGARDY

SEQ ID NO: 70755 - protein, 12 aa, Artificial sequence
  Protein classification predicting sequence
QIAKCFRDEDLR

SEQ ID NO: 70756 - protein, 7 aa, Artificial sequence
  Protein classification predicting sequence
MPYSEAM

SEQ ID NO: 70757 - protein, 9 aa, Artificial sequence
  Protein classification predicting sequence
IKVNERAKG

SEQ ID NO: 70758 - protein, 8 aa, Artificial sequence
  Protein classification predicting sequence
GLQSPIVK

SEQ ID NO: 70759 - protein, 12 aa, Artificial sequence
  Protein classification predicting sequence
AILERTGAQDGD

SEQ ID NO: 70760 - protein, 9 aa, Artificial sequence
  Protein classification predicting sequence
ADRAKVVND

SEQ ID NO: 70761 - protein, 9 aa, Artificial sequence
  Protein classification predicting sequence
KIGHSEFGK

SEQ ID NO: 70762 - protein, 10 aa, Artificial sequence
  Protein classification predicting sequence
AAHHPFTSPK

SEQ ID NO: 70763 - protein, 12 aa, Artificial sequence
  Protein classification predicting sequence
SIRDVIAFPKTQ

SEQ ID NO: 70764 - protein, 7 aa, Artificial sequence
  Protein classification predicting sequence
CFLVLRQ

SEQ ID NO: 70765 - protein, 8 aa, Artificial sequence
  Protein classification predicting sequence
SEGGANVF

SEQ ID NO: 70766 - protein, 22 aa, Artificial sequence
  Protein classification predicting sequence
SNSYDMFMRGEEILSGAQRIHD

SEQ ID NO: 70767 - protein, 22 aa, Artificial sequence
  Protein classification predicting sequence
PPHAGGGIGLERVTMLFLGLHN

SEQ ID NO: 70768 - protein, 7 aa, Artificial sequence
  Protein classification predicting sequence
NPKLKTG

SEQ ID NO: 70769 - protein, 10 aa, Artificial sequence
  Protein classification predicting sequence
YGSDKPDLRF

SEQ ID NO: 70770 - protein, 14 aa, Artificial sequence
  Protein classification predicting sequence
ELPLPVFGEPDYPE

SEQ ID NO: 70771 - protein, 7 aa, Artificial sequence
  Protein classification predicting sequence
KFYALPQ

SEQ ID NO: 70772 - protein, 6 aa, Artificial sequence
  Protein classification predicting sequence
EFYQLD

SEQ ID NO: 70773 - protein, 6 aa, Artificial sequence
  Protein classification predicting sequence
FKFCWI

SEQ ID NO: 70774 - protein, 10 aa, Artificial sequence
  Protein classification predicting sequence
AYQYDIVCNG

SEQ ID NO: 70775 - protein, 12 aa, Artificial sequence
  Protein classification predicting sequence
SGAIRNHKPEIM

SEQ ID NO: 70776 - protein, 8 aa, Artificial sequence
  Protein classification predicting sequence
DRIVMLLA

SEQ ID NO: 70777 - protein, 8 aa, Artificial sequence
  Protein classification predicting sequence
IAFPLNQQ

SEQ ID NO: 70778 - protein, 7 aa, Artificial sequence
  Protein classification predicting sequence
VNEELRL

SEQ ID NO: 70779 - protein, 13 aa, Artificial sequence
  Protein classification predicting sequence
FYALPQSPQLFKQ

SEQ ID NO: 70780 - protein, 7 aa, Artificial sequence
  Protein classification predicting sequence
HHPFTSP

SEQ ID NO: 70781 - protein, 6 aa, Artificial sequence
  Protein classification predicting sequence
VLNGYE

SEQ ID NO: 70782 - protein, 15 aa, Artificial sequence
  Protein classification predicting sequence
CFRDEDLRADRQPEF

SEQ ID NO: 70783 - protein, 13 aa, Artificial sequence
  Protein classification predicting sequence
QYNFVWITDFPLF

SEQ ID NO: 70784 - protein, 6 aa, Artificial sequence
  Protein classification predicting sequence
PGEFYQ

SEQ ID NO: 70785 - protein, 7 aa, Artificial sequence
  Protein classification predicting sequence
VDFPMFE

SEQ ID NO: 70786 - protein, 9 aa, Artificial sequence
  Protein classification predicting sequence
HNPFSMPQG

SEQ ID NO: 70787 - protein, 9 aa, Artificial sequence
  Protein classification predicting sequence
FSIFLDQLA

SEQ ID NO: 70788 - protein, 8 aa, Artificial sequence
  Protein classification predicting sequence
QTVTVKGW

SEQ ID NO: 70789 - protein, 8 aa, Artificial sequence
  Protein classification predicting sequence
IYGAKGLA

SEQ ID NO: 70790 - protein, 6 aa, Artificial sequence
  Protein classification predicting sequence
WRPLWV

SEQ ID NO: 70791 - protein, 8 aa, Artificial sequence
  Protein classification predicting sequence
AYDMVLNG

SEQ ID NO: 70792 - protein, 7 aa, Artificial sequence
  Protein classification predicting sequence
RQPEFTQ

SEQ ID NO: 70793 - protein, 7 aa, Artificial sequence
  Protein classification predicting sequence
DPGRVRA

SEQ ID NO: 70794 - protein, 13 aa, Artificial sequence
  Protein classification predicting sequence
QIVKCFRDEDLRA

SEQ ID NO: 70795 - protein, 7 aa, Artificial sequence
  Protein classification predicting sequence
CGFKVFT

SEQ ID NO: 70796 - protein, 6 aa, Artificial sequence
  Protein classification predicting sequence
SPIAKF

SEQ ID NO: 70797 - protein, 6 aa, Artificial sequence
  Protein classification predicting sequence
EEEGRY

SEQ ID NO: 70798 - protein, 7 aa, Artificial sequence
  Protein classification predicting sequence
PPHGGLA

SEQ ID NO: 70799 - protein, 11 aa, Artificial sequence
  Protein classification predicting sequence
RLKYRYLDLRR

SEQ ID NO: 70800 - protein, 10 aa, Artificial sequence
  Protein classification predicting sequence
HDFVEIETPT

SEQ ID NO: 70801 - protein, 10 aa, Artificial sequence
  Protein classification predicting sequence
TRSTPEGARD

SEQ ID NO: 70802 - protein, 8 aa, Artificial sequence
  Protein classification predicting sequence
YALPQSPQ

SEQ ID NO: 70803 - protein, 7 aa, Artificial sequence
  Protein classification predicting sequence
YVGAVVM

SEQ ID NO: 70804 - protein, 10 aa, Artificial sequence
  Protein classification predicting sequence
EIGGGSIRIH

SEQ ID NO: 70805 - protein, 17 aa, Artificial sequence
  Protein classification predicting sequence
TRSTPEGARDFLVPARL

SEQ ID NO: 70806 - protein, 11 aa, Artificial sequence
  Protein classification predicting sequence
AMRRYGSDKPD

SEQ ID NO: 70807 - protein, 7 aa, Artificial sequence
  Protein classification predicting sequence
RRRDHGG

SEQ ID NO: 70808 - protein, 10 aa, Artificial sequence
  Protein classification predicting sequence
IFIDLRDREG

SEQ ID NO: 70809 - protein, 7 aa, Artificial sequence
  Protein classification predicting sequence
TPEGARD

SEQ ID NO: 70810 - protein, 13 aa, Artificial sequence
  Protein classification predicting sequence
TPEGARDYLVPSR

SEQ ID NO: 70811 - protein, 7 aa, Artificial sequence
  Protein classification predicting sequence
ALPQSPQ

SEQ ID NO: 70812 - protein, 10 aa, Artificial sequence
  Protein classification predicting sequence
ALPQSPQIFK

SEQ ID NO: 70813 - protein, 9 aa, Artificial sequence
  Protein classification predicting sequence
LMVAGFDRY

SEQ ID NO: 70814 - protein, 8 aa, Artificial sequence
  Protein classification predicting sequence
GFDRYYQI

SEQ ID NO: 70815 - protein, 6 aa, Artificial sequence
  Protein classification predicting sequence
VEFKVF

SEQ ID NO: 70816 - protein, 10 aa, Artificial sequence
  Protein classification predicting sequence
RRRDLGGLIF

SEQ ID NO: 70817 - protein, 6 aa, Artificial sequence
  Protein classification predicting sequence
PDSPAF

SEQ ID NO: 70818 - protein, 9 aa, Artificial sequence
  Protein classification predicting sequence
KSTPEGARD

SEQ ID NO: 70819 - protein, 7 aa, Artificial sequence
  Protein classification predicting sequence
GFDRYYQ

SEQ ID NO: 70820 - protein, 15 aa, Artificial sequence
  Protein classification predicting sequence
ARCFRDEDLRADRQP

SEQ ID NO: 70821 - protein, 6 aa, Artificial sequence
  Protein classification predicting sequence
RKQIDE

SEQ ID NO: 70822 - protein, 7 aa, Artificial sequence
  Protein classification predicting sequence
PPHGGIA

SEQ ID NO: 70823 - protein, 9 aa, Artificial sequence
  Protein classification predicting sequence
IREVIAFPK

SEQ ID NO: 70824 - protein, 18 aa, Artificial sequence
  Protein classification predicting sequence
LTRSTPEGARDYLVPSRV

SEQ ID NO: 70825 - protein, 6 aa, Artificial sequence
  Protein classification predicting sequence
WVTDFP

SEQ ID NO: 70826 - protein, 7 aa, Artificial sequence
  Protein classification predicting sequence
CLLTEAP

SEQ ID NO: 70827 - protein, 11 aa, Artificial sequence
  Protein classification predicting sequence
LTKATPEGARD

SEQ ID NO: 70828 - protein, 6 aa, Artificial sequence
  Protein classification predicting sequence
CFRDED

SEQ ID NO: 70829 - protein, 6 aa, Artificial sequence
  Protein classification predicting sequence
EFTQID

SEQ ID NO: 70830 - protein, 7 aa, Artificial sequence
  Protein classification predicting sequence
FVKIYGA

SEQ ID NO: 70831 - protein, 8 aa, Artificial sequence
  Protein classification predicting sequence
VIAFPKTQ

SEQ ID NO: 70832 - protein, 21 aa, Artificial sequence
  Protein classification predicting sequence
SVEFAVFAGPANDPKGRVAAL

SEQ ID NO: 70833 - protein, 7 aa, Artificial sequence
  Protein classification predicting sequence
KRTTYCG

SEQ ID NO: 70834 - protein, 11 aa, Artificial sequence
  Protein classification predicting sequence
TILNTAKTTPF

SEQ ID NO: 70835 - protein, 6 aa, Artificial sequence
  Protein classification predicting sequence
VTKTIR

SEQ ID NO: 70836 - protein, 12 aa, Artificial sequence
  Protein classification predicting sequence
DRQPEFTQIDIE

SEQ ID NO: 70837 - protein, 7 aa, Artificial sequence
  Protein classification predicting sequence
ADKYSRK

SEQ ID NO: 70838 - protein, 22 aa, Artificial sequence
  Protein classification predicting sequence
GAKGLAWLKVEEDGLKGPIAKF

SEQ ID NO: 70839 - protein, 11 aa, Artificial sequence
  Protein classification predicting sequence
LIDESKFNFLW

SEQ ID NO: 70840 - protein, 8 aa, Artificial sequence
  Protein classification predicting sequence
AYDVVLNG

SEQ ID NO: 70841 - protein, 11 aa, Artificial sequence
  Protein classification predicting sequence
LIFIDMRDREG

SEQ ID NO: 70842 - protein, 8 aa, Artificial sequence
  Protein classification predicting sequence
NTEEARLK

SEQ ID NO: 70843 - protein, 7 aa, Artificial sequence
  Protein classification predicting sequence
RYLDLRR

SEQ ID NO: 70844 - protein, 10 aa, Artificial sequence
  Protein classification predicting sequence
RYLDLRRPEM

SEQ ID NO: 70845 - protein, 18 aa, Artificial sequence
  Protein classification predicting sequence
RYLDLRRPEMAQRLKTRA

SEQ ID NO: 70846 - protein, 10 aa, Artificial sequence
  Protein classification predicting sequence
LDRTAAQDGD

SEQ ID NO: 70847 - protein, 11 aa, Artificial sequence
  Protein classification predicting sequence
PLWVVDFPMFE

SEQ ID NO: 70848 - protein, 9 aa, Artificial sequence
  Protein classification predicting sequence
AMHHPFTAP

SEQ ID NO: 70849 - protein, 8 aa, Artificial sequence
  Protein classification predicting sequence
GGGSVRIH

SEQ ID NO: 70850 - protein, 15 aa, Artificial sequence
  Protein classification predicting sequence
GTPPHAGLAFGLDRL

SEQ ID NO: 70851 - protein, 9 aa, Artificial sequence
  Protein classification predicting sequence
GLAFGLDRL

SEQ ID NO: 70852 - protein, 7 aa, Artificial sequence
  Protein classification predicting sequence
DLRRPEM

SEQ ID NO: 70853 - protein, 6 aa, Artificial sequence
  Protein classification predicting sequence
SGFDRY

SEQ ID NO: 70854 - protein, 9 aa, Artificial sequence
  Protein classification predicting sequence
SGFDRYYQI

SEQ ID NO: 70855 - protein, 6 aa, Artificial sequence
  Protein classification predicting sequence
EVGGGS

SEQ ID NO: 70856 - protein, 10 aa, Artificial sequence
  Protein classification predicting sequence
IRDVIAFPKT

SEQ ID NO: 70857 - protein, 15 aa, Artificial sequence
  Protein classification predicting sequence
IRDVIAFPKTQTASC

SEQ ID NO: 70858 - protein, 11 aa, Artificial sequence
  Protein classification predicting sequence
AFKYGAPPHGG

SEQ ID NO: 70859 - protein, 7 aa, Artificial sequence
  Protein classification predicting sequence
CLMTEAP

SEQ ID NO: 70860 - protein, 29 aa, Artificial sequence
  Protein classification predicting sequence
LKGWVQKRRDLGGLIFIDLRDRTGIVQVV

SEQ ID NO: 70861 - protein, 18 aa, Artificial sequence
  Protein classification predicting sequence
EDVRLKYRYLDLRRPVMF

SEQ ID NO: 70862 - protein, 11 aa, Artificial sequence
  Protein classification predicting sequence
GEFYALPQSPQ

SEQ ID NO: 70863 - protein, 13 aa, Artificial sequence
  Protein classification predicting sequence
GGQVKAINAKGAA

SEQ ID NO: 70864 - protein, 9 aa, Artificial sequence
  Protein classification predicting sequence
FLWVTDWPL

SEQ ID NO: 70865 - protein, 7 aa, Artificial sequence
  Protein classification predicting sequence
DIPLLET

SEQ ID NO: 70866 - protein, 7 aa, Artificial sequence
  Protein classification predicting sequence
MFRALGF

SEQ ID NO: 70867 - protein, 56 aa, Artificial sequence
  Protein classification predicting sequence
QFGFLLEAFEYGTPPHGGIALGLDRLVMLLAGRTNLRDTIAFPKTASASCLLTEAP

SEQ ID NO: 70868 - protein, 9 aa, Artificial sequence
  Protein classification predicting sequence
VSDKQLEEL

SEQ ID NO: 70869 - protein, 9 aa, Artificial sequence
  Protein classification predicting sequence
GLAQIVFDP

SEQ ID NO: 70870 - protein, 13 aa, Artificial sequence
  Protein classification predicting sequence
FYALPQSPQIFKQ

SEQ ID NO: 70871 - protein, 19 aa, Artificial sequence
  Protein classification predicting sequence
CFRDEDLRADRQPEFTQID

SEQ ID NO: 70872 - protein, 6 aa, Artificial sequence
  Protein classification predicting sequence
PIAKFF

SEQ ID NO: 70873 - protein, 9 aa, Artificial sequence
  Protein classification predicting sequence
FVWITDFPL

SEQ ID NO: 70874 - protein, 8 aa, Artificial sequence
  Protein classification predicting sequence
RDHGGVIF

SEQ ID NO: 70875 - protein, 9 aa, Artificial sequence
  Protein classification predicting sequence
QIARCFRDE

SEQ ID NO: 70876 - protein, 10 aa, Artificial sequence
  Protein classification predicting sequence
PEGARDFLVP

SEQ ID NO: 70877 - protein, 8 aa, Artificial sequence
  Protein classification predicting sequence
MVAGFDRY

SEQ ID NO: 70878 - protein, 5 aa, Artificial sequence
  Protein classification predicting sequence
CFRDE

SEQ ID NO: 70879 - protein, 7 aa, Artificial sequence
  Protein classification predicting sequence
AFEIAGY

SEQ ID NO: 70880 - protein, 14 aa, Artificial sequence
  Protein classification predicting sequence
EEQRLKYRYLDLRR

SEQ ID NO: 70881 - protein, 7 aa, Artificial sequence
  Protein classification predicting sequence
SPVAKFL

SEQ ID NO: 70882 - protein, 11 aa, Artificial sequence
  Protein classification predicting sequence
PLWVIDFPMFE

SEQ ID NO: 70883 - protein, 6 aa, Artificial sequence
  Protein classification predicting sequence
MQQTVF

SEQ ID NO: 70884 - protein, 8 aa, Artificial sequence
  Protein classification predicting sequence
GWVHRRRD

SEQ ID NO: 70885 - protein, 7 aa, Artificial sequence
  Protein classification predicting sequence
LRNEFCI

SEQ ID NO: 70886 - protein, 14 aa, Artificial sequence
  Protein classification predicting sequence
RLKYRYLDLRRPEM

SEQ ID NO: 70887 - protein, 8 aa, Artificial sequence
  Protein classification predicting sequence
GFLDIETP

SEQ ID NO: 70888 - protein, 9 aa, Artificial sequence
  Protein classification predicting sequence
GRVAVIRVP

SEQ ID NO: 70889 - protein, 8 aa, Artificial sequence
  Protein classification predicting sequence
GALRLKLG

SEQ ID NO: 70890 - protein, 19 aa, Artificial sequence
  Protein classification predicting sequence
NIRDVIAFPKTTAAACLMT

SEQ ID NO: 70891 - protein, 9 aa, Artificial sequence
  Protein classification predicting sequence
RESVISVTG

SEQ ID NO: 70892 - protein, 6 aa, Artificial sequence
  Protein classification predicting sequence
TRLDNR

SEQ ID NO: 70893 - protein, 10 aa, Artificial sequence
  Protein classification predicting sequence
RHLNEATSID

SEQ ID NO: 70894 - protein, 7 aa, Artificial sequence
  Protein classification predicting sequence
QVVFDPD

SEQ ID NO: 70895 - protein, 8 aa, Artificial sequence
  Protein classification predicting sequence
RPESQVNK

SEQ ID NO: 70896 - protein, 14 aa, Artificial sequence
  Protein classification predicting sequence
ALPQSPQLFKQLLM

SEQ ID NO: 70897 - protein, 45 aa, Artificial sequence
  Protein classification predicting sequence
ALPQSPQLFKQLLMMSGFDRYYQIVKCFRDEDLRADRQPEFTQID

SEQ ID NO: 70898 - protein, 8 aa, Artificial sequence
  Protein classification predicting sequence
EELKANPA

SEQ ID NO: 70899 - protein, 12 aa, Artificial sequence
  Protein classification predicting sequence
PEGARDYLVPSR

SEQ ID NO: 70900 - protein, 16 aa, Artificial sequence
  Protein classification predicting sequence
PEGARDYLVPSRIYPG

SEQ ID NO: 70901 - protein, 7 aa, Artificial sequence
  Protein classification predicting sequence
GFDKYYQ

SEQ ID NO: 70902 - protein, 9 aa, Artificial sequence
  Protein classification predicting sequence
RCFRDEDLR

SEQ ID NO: 70903 - protein, 7 aa, Artificial sequence
  Protein classification predicting sequence
MFKALGF

SEQ ID NO: 70904 - protein, 8 aa, Artificial sequence
  Protein classification predicting sequence
LAGKDNIR

SEQ ID NO: 70905 - protein, 9 aa, Artificial sequence
  Protein classification predicting sequence
KTTPFEIKD

SEQ ID NO: 70906 - protein, 13 aa, Artificial sequence
  Protein classification predicting sequence
KTTPFEIKDDVEV

SEQ ID NO: 70907 - protein, 9 aa, Artificial sequence
  Protein classification predicting sequence
YRYLDLRRP

SEQ ID NO: 70908 - protein, 16 aa, Artificial sequence
  Protein classification predicting sequence
DRYYQIVKCFRDEDLR

SEQ ID NO: 70909 - protein, 7 aa, Artificial sequence
  Protein classification predicting sequence
VKAIVVK

SEQ ID NO: 70910 - protein, 11 aa, Artificial sequence
  Protein classification predicting sequence
DYGFPPHGGLA

SEQ ID NO: 70911 - protein, 10 aa, Artificial sequence
  Protein classification predicting sequence
GWVQKRRDLG

SEQ ID NO: 70912 - protein, 20 aa, Artificial sequence
  Protein classification predicting sequence
NVSDELRLKYRYLDLRRPEM

SEQ ID NO: 70913 - protein, 8 aa, Artificial sequence
  Protein classification predicting sequence
EAMDRFGS

SEQ ID NO: 70914 - protein, 5 aa, Artificial sequence
  Protein classification predicting sequence
QEKMF

SEQ ID NO: 70915 - protein, 9 aa, Artificial sequence
  Protein classification predicting sequence
GFPPHGGLA

SEQ ID NO: 70916 - protein, 15 aa, Artificial sequence
  Protein classification predicting sequence
GFPPHGGLAIGLDRF

SEQ ID NO: 70917 - protein, 7 aa, Artificial sequence
  Protein classification predicting sequence
VIAFPKN

SEQ ID NO: 70918 - protein, 19 aa, Artificial sequence
  Protein classification predicting sequence
LTKATPEGARDYLVPSRVH

SEQ ID NO: 70919 - protein, 8 aa, Artificial sequence
  Protein classification predicting sequence
GSDKPDLR

SEQ ID NO: 70920 - protein, 10 aa, Artificial sequence
  Protein classification predicting sequence
GSDKPDLRNP

SEQ ID NO: 70921 - protein, 6 aa, Artificial sequence
  Protein classification predicting sequence
GLQSPI

SEQ ID NO: 70922 - protein, 7 aa, Artificial sequence
  Protein classification predicting sequence
LKYRYLD

SEQ ID NO: 70923 - protein, 5 aa, Artificial sequence
  Protein classification predicting sequence
RYFQI

SEQ ID NO: 70924 - protein, 6 aa, Artificial sequence
  Protein classification predicting sequence
EFTQLD

SEQ ID NO: 70925 - protein, 6 aa, Artificial sequence
  Protein classification predicting sequence
FPRMTY

SEQ ID NO: 70926 - protein, 8 aa, Artificial sequence
  Protein classification predicting sequence
RFGSDKPD

SEQ ID NO: 70927 - protein, 7 aa, Artificial sequence
  Protein classification predicting sequence
VKAINAK

SEQ ID NO: 70928 - protein, 6 aa, Artificial sequence
  Protein classification predicting sequence
EQFGFL

SEQ ID NO: 70929 - protein, 7 aa, Artificial sequence
  Protein classification predicting sequence
WTEAMQR

SEQ ID NO: 70930 - protein, 6 aa, Artificial sequence
  Protein classification predicting sequence
PIAKFL

SEQ ID NO: 70931 - protein, 22 aa, Artificial sequence
  Protein classification predicting sequence
AVANAYDMVINGYEVGGGSVRI

SEQ ID NO: 70932 - protein, 6 aa, Artificial sequence
  Protein classification predicting sequence
GITQIV

SEQ ID NO: 70933 - protein, 6 aa, Artificial sequence
  Protein classification predicting sequence
RYVAAH

SEQ ID NO: 70934 - protein, 7 aa, Artificial sequence
  Protein classification predicting sequence
LFPITYF

SEQ ID NO: 70935 - protein, 8 aa, Artificial sequence
  Protein classification predicting sequence
QSPQLFKQ

SEQ ID NO: 70936 - protein, 7 aa, Artificial sequence
  Protein classification predicting sequence
DLRDREG

SEQ ID NO: 70937 - protein, 6 aa, Artificial sequence
  Protein classification predicting sequence
EAMRRY

SEQ ID NO: 70938 - protein, 7 aa, Artificial sequence
  Protein classification predicting sequence
AELDTRL

SEQ ID NO: 70939 - protein, 7 aa, Artificial sequence
  Protein classification predicting sequence
RFLDLRR

SEQ ID NO: 70940 - protein, 9 aa, Artificial sequence
  Protein classification predicting sequence
LPLDPTGKV

SEQ ID NO: 70941 - protein, 6 aa, Artificial sequence
  Protein classification predicting sequence
LDTRLD

SEQ ID NO: 70942 - protein, 6 aa, Artificial sequence
  Protein classification predicting sequence
DIEMSF

SEQ ID NO: 70943 - protein, 6 aa, Artificial sequence
  Protein classification predicting sequence
LFPRDR

SEQ ID NO: 70944 - protein, 5 aa, Artificial sequence
  Protein classification predicting sequence
EMSFV

SEQ ID NO: 70945 - protein, 8 aa, Artificial sequence
  Protein classification predicting sequence
PIFRAEEH

SEQ ID NO: 70946 - protein, 7 aa, Artificial sequence
  Protein classification predicting sequence
IDIEASF

SEQ ID NO: 70947 - protein, 6 aa, Artificial sequence
  Protein classification predicting sequence
DLVLNG

SEQ ID NO: 70948 - protein, 6 aa, Artificial sequence
  Protein classification predicting sequence
RYYQIA

SEQ ID NO: 70949 - protein, 19 aa, Artificial sequence
  Protein classification predicting sequence
CYRDEDFRADRQPEFTQLD

SEQ ID NO: 70950 - protein, 7 aa, Artificial sequence
  Protein classification predicting sequence
QPRRTLD

SEQ ID NO: 70951 - protein, 14 aa, Artificial sequence
  Protein classification predicting sequence
AWAFVWVVDPPLFE

SEQ ID NO: 70952 - protein, 9 aa, Artificial sequence
  Protein classification predicting sequence
WTAVHHAFT

SEQ ID NO: 70953 - protein, 14 aa, Artificial sequence
  Protein classification predicting sequence
RRDIQERVFAVMGL

SEQ ID NO: 70954 - protein, 15 aa, Artificial sequence
  Protein classification predicting sequence
WQEWAKQRGAKGLAY

SEQ ID NO: 70955 - protein, 8 aa, Artificial sequence
  Protein classification predicting sequence
AYDIVCNG

SEQ ID NO: 70956 - protein, 27 aa, Artificial sequence
  Protein classification predicting sequence
DSIREVIAFPKTGGGVDPLTDAPAPIT

SEQ ID NO: 70957 - protein, 7 aa, Artificial sequence
  Protein classification predicting sequence
DLETSFL

SEQ ID NO: 70958 - protein, 7 aa, Artificial sequence
  Protein classification predicting sequence
VDLGDFP

SEQ ID NO: 70959 - protein, 22 aa, Artificial sequence
  Protein classification predicting sequence
ETPMLTKSTPEGARDYLVPSRV

SEQ ID NO: 70960 - protein, 6 aa, Artificial sequence
  Protein classification predicting sequence
GALRVK

SEQ ID NO: 70961 - protein, 9 aa, Artificial sequence
  Protein classification predicting sequence
KFGFLLDAL

SEQ ID NO: 70962 - protein, 8 aa, Artificial sequence
  Protein classification predicting sequence
QAHRLRAE

SEQ ID NO: 70963 - protein, 6 aa, Artificial sequence
  Protein classification predicting sequence
RYFQIA

SEQ ID NO: 70964 - protein, 8 aa, Artificial sequence
  Protein classification predicting sequence
GGASQPRR

SEQ ID NO: 70965 - protein, 27 aa, Artificial sequence
  Protein classification predicting sequence
GGASQPRRQLDAWQEWAKQRGAKGLAY

SEQ ID NO: 70966 - protein, 7 aa, Artificial sequence
  Protein classification predicting sequence
GAKGLAY

SEQ ID NO: 70967 - protein, 8 aa, Artificial sequence
  Protein classification predicting sequence
RALLGAAR

SEQ ID NO: 70968 - protein, 9 aa, Artificial sequence
  Protein classification predicting sequence
GAPPHGGIA

SEQ ID NO: 70969 - protein, 11 aa, Artificial sequence
  Protein classification predicting sequence
GAPPHGGIAFG

SEQ ID NO: 70970 - protein, 7 aa, Artificial sequence
  Protein classification predicting sequence
YSRKDID

SEQ ID NO: 70971 - protein, 10 aa, Artificial sequence
  Protein classification predicting sequence
RYFAAHHPFT

SEQ ID NO: 70972 - protein, 7 aa, Artificial sequence
  Protein classification predicting sequence
AAHHPFT

SEQ ID NO: 70973 - protein, 6 aa, Artificial sequence
  Protein classification predicting sequence
NLRDTI

SEQ ID NO: 70974 - protein, 7 aa, Artificial sequence
  Protein classification predicting sequence
FPKTASA

SEQ ID NO: 70975 - protein, 6 aa, Artificial sequence
  Protein classification predicting sequence
DRQPEF

SEQ ID NO: 70976 - protein, 15 aa, Artificial sequence
  Protein classification predicting sequence
KSTPEGARDYLVPSR

SEQ ID NO: 70977 - protein, 30 aa, Artificial sequence
  Protein classification predicting sequence
KSTPEGARDYLVPSRVYPGNFYALPQSPQI

SEQ ID NO: 70978 - protein, 10 aa, Artificial sequence
  Protein classification predicting sequence
FYALPQSPQI

SEQ ID NO: 70979 - protein, 7 aa, Artificial sequence
  Protein classification predicting sequence
VIAFPKT

SEQ ID NO: 70980 - protein, 7 aa, Artificial sequence
  Protein classification predicting sequence
LPLDFNQ

SEQ ID NO: 70981 - protein, 7 aa, Artificial sequence
  Protein classification predicting sequence
TGTVRAR

SEQ ID NO: 70982 - protein, 6 aa, Artificial sequence
  Protein classification predicting sequence
RLKYRY

SEQ ID NO: 70983 - protein, 8 aa, Artificial sequence
  Protein classification predicting sequence
FPVMTFAE

SEQ ID NO: 70984 - protein, 8 aa, Artificial sequence
  Protein classification predicting sequence
GDILFFGA

SEQ ID NO: 70985 - protein, 9 aa, Artificial sequence
  Protein classification predicting sequence
YCGHLNKSL

SEQ ID NO: 70986 - protein, 39 aa, Artificial sequence
  Protein classification predicting sequence
GQTVELCGWVNRRRDLGGLIFIDMRDREGIVQVVVDPDM

SEQ ID NO: 70987 - protein, 8 aa, Artificial sequence
  Protein classification predicting sequence
NSEEQRLK

SEQ ID NO: 70988 - protein, 29 aa, Artificial sequence
  Protein classification predicting sequence
RYLDLRRPEMSDRIKLRAKASSFVRRFLD

SEQ ID NO: 70989 - protein, 16 aa, Artificial sequence
  Protein classification predicting sequence
EGNLHAMHHPFTSPLG

SEQ ID NO: 70990 - protein, 6 aa, Artificial sequence
  Protein classification predicting sequence
NAYDMV

SEQ ID NO: 70991 - protein, 5 aa, Artificial sequence
  Protein classification predicting sequence
FPRMT

SEQ ID NO: 70992 - protein, 6 aa, Artificial sequence
  Protein classification predicting sequence
TGEIEV

SEQ ID NO: 70993 - protein, 23 aa, Artificial sequence
  Protein classification predicting sequence
IETPTLTRSTPEGARDFLVPARL

SEQ ID NO: 70994 - protein, 8 aa, Artificial sequence
  Protein classification predicting sequence
GGGSIRIH

SEQ ID NO: 70995 - protein, 7 aa, Artificial sequence
  Protein classification predicting sequence
FGFLLDA

SEQ ID NO: 70996 - protein, 10 aa, Artificial sequence
  Protein classification predicting sequence
DRQPEFTQLD

SEQ ID NO: 70997 - protein, 8 aa, Artificial sequence
  Protein classification predicting sequence
RIHNPDLQ

SEQ ID NO: 70998 - protein, 7 aa, Artificial sequence
  Protein classification predicting sequence
FGFLLEA

SEQ ID NO: 70999 - protein, 5 aa, Artificial sequence
  Protein classification predicting sequence
GPAND

SEQ ID NO: 71000 - protein, 8 aa, Artificial sequence
  Protein classification predicting sequence
KDVDFKVF

SEQ ID NO: 71001 - protein, 10 aa, Artificial sequence
  Protein classification predicting sequence
PIFRAEEHNT

SEQ ID NO: 71002 - protein, 23 aa, Artificial sequence
  Protein classification predicting sequence
TPLPLDPTGKVKAELDTRLDNRF

SEQ ID NO: 71003 - protein, 6 aa, Artificial sequence
  Protein classification predicting sequence
YGMPPH

SEQ ID NO: 71004 - protein, 7 aa, Artificial sequence
  Protein classification predicting sequence
FKLIPKL

SEQ ID NO: 71005 - protein, 6 aa, Artificial sequence
  Protein classification predicting sequence
DLRRPE

SEQ ID NO: 71006 - protein, 23 aa, Artificial sequence
  Protein classification predicting sequence
GFIEIHTPKIIATATEGGTELFP

SEQ ID NO: 71007 - protein, 17 aa, Artificial sequence
  Protein classification predicting sequence
DLGKEIPWGEDIDTEGE

SEQ ID NO: 71008 - protein, 11 aa, Artificial sequence
  Protein classification predicting sequence
HRRRDHGGVIF

SEQ ID NO: 71009 - protein, 29 aa, Artificial sequence
  Protein classification predicting sequence
HRRRDHGGVIFIDLRDREGLVQVVCDPDR

SEQ ID NO: 71010 - protein, 7 aa, Artificial sequence
  Protein classification predicting sequence
NPNLASG

SEQ ID NO: 71011 - protein, 53 aa, Artificial sequence
  Protein classification predicting sequence
FFALPQSPQLFKQMLMVSGFDRYYQITKCFRDEDLRADRQPEFTQIDCETSFL

SEQ ID NO: 71012 - protein, 8 aa, Artificial sequence
  Protein classification predicting sequence
ALRVPGGA

SEQ ID NO: 71013 - protein, 20 aa, Artificial sequence
  Protein classification predicting sequence
AKAYDMVLNGWEIGGGSVRI

SEQ ID NO: 71014 - protein, 9 aa, Artificial sequence
  Protein classification predicting sequence
EIGGGSVRI

SEQ ID NO: 71015 - protein, 9 aa, Artificial sequence
  Protein classification predicting sequence
QLDLEMSFV

SEQ ID NO: 71016 - protein, 16 aa, Artificial sequence
  Protein classification predicting sequence
IPAKTGGSRAFCDRMN

SEQ ID NO: 71017 - protein, 14 aa, Artificial sequence
  Protein classification predicting sequence
ARTRAGEELNLVDR

SEQ ID NO: 71018 - protein, 10 aa, Artificial sequence
  Protein classification predicting sequence
HNPFSMPQGG

SEQ ID NO: 71019 - protein, 10 aa, Artificial sequence
  Protein classification predicting sequence
VCNGFEIASG

SEQ ID NO: 71020 - protein, 10 aa, Artificial sequence
  Protein classification predicting sequence
EIASGGIRNH

SEQ ID NO: 71021 - protein, 5 aa, Artificial sequence
  Protein classification predicting sequence
PRMTY

SEQ ID NO: 71022 - protein, 8 aa, Artificial sequence
  Protein classification predicting sequence
DEEAGRYV

SEQ ID NO: 71023 - protein, 10 aa, Artificial sequence
  Protein classification predicting sequence
VADPDSPAFK

SEQ ID NO: 71024 - protein, 7 aa, Artificial sequence
  Protein classification predicting sequence
LPTGAVE

SEQ ID NO: 71025 - protein, 9 aa, Artificial sequence
  Protein classification predicting sequence
ELPLPVFGE

SEQ ID NO: 71026 - protein, 7 aa, Artificial sequence
  Protein classification predicting sequence
EMSFVTQ

SEQ ID NO: 71027 - protein, 8 aa, Artificial sequence
  Protein classification predicting sequence
DKPDLRNP

SEQ ID NO: 71028 - protein, 12 aa, Artificial sequence
  Protein classification predicting sequence
DKPDLRNPIEMQ

SEQ ID NO: 71029 - protein, 12 aa, Artificial sequence
  Protein classification predicting sequence
NLREISLFPMNQ

SEQ ID NO: 71030 - protein, 9 aa, Artificial sequence
  Protein classification predicting sequence
FIDLRDHYG

SEQ ID NO: 71031 - protein, 14 aa, Artificial sequence
  Protein classification predicting sequence
HPGKFYALPQAPQQ

SEQ ID NO: 71032 - protein, 6 aa, Artificial sequence
  Protein classification predicting sequence
PVAKFL

SEQ ID NO: 71033 - protein, 7 aa, Artificial sequence
  Protein classification predicting sequence
AMHHPFT

SEQ ID NO: 71034 - protein, 20 aa, Artificial sequence
  Protein classification predicting sequence
EQREKFGFLLDALKYGTPPH

SEQ ID NO: 71035 - protein, 9 aa, Artificial sequence
  Protein classification predicting sequence
ALKYGTPPH

SEQ ID NO: 71036 - protein, 21 aa, Artificial sequence
  Protein classification predicting sequence
DMATGEIEVLASSLTIINRAD

SEQ ID NO: 71037 - protein, 29 aa, Artificial sequence
  Protein classification predicting sequence
KWAPLWVIDFPMFEDDGEGGLTAMHHPFT

SEQ ID NO: 71038 - protein, 8 aa, Artificial sequence
  Protein classification predicting sequence
VRARPDSQ

SEQ ID NO: 71039 - protein, 6 aa, Artificial sequence
  Protein classification predicting sequence
ETSFMT

SEQ ID NO: 71040 - protein, 7 aa, Artificial sequence
  Protein classification predicting sequence
LSRKQID

SEQ ID NO: 71041 - protein, 5 aa, Artificial sequence
  Protein classification predicting sequence
AFPKT

SEQ ID NO: 71042 - protein, 8 aa, Artificial sequence
  Protein classification predicting sequence
YRYLDLRR

SEQ ID NO: 71043 - protein, 6 aa, Artificial sequence
  Protein classification predicting sequence
FCDRMN

SEQ ID NO: 71044 - protein, 6 aa, Artificial sequence
  Protein classification predicting sequence
GYIFWR

SEQ ID NO: 71045 - protein, 10 aa, Artificial sequence
  Protein classification predicting sequence
DLRDREGIVQ

SEQ ID NO: 71046 - protein, 8 aa, Artificial sequence
  Protein classification predicting sequence
RDREGIVQ

SEQ ID NO: 71047 - protein, 13 aa, Artificial sequence
  Protein classification predicting sequence
NPKIKTGQVEVQV

SEQ ID NO: 71048 - protein, 9 aa, Artificial sequence
  Protein classification predicting sequence
TRSIRQYLD

SEQ ID NO: 71049 - protein, 19 aa, Artificial sequence
  Protein classification predicting sequence
LTKSTPEGARDYLVPSRVH

SEQ ID NO: 71050 - protein, 18 aa, Artificial sequence
  Protein classification predicting sequence
GEFYALPQSPQLFKQLLM

SEQ ID NO: 71051 - protein, 9 aa, Artificial sequence
  Protein classification predicting sequence
GEIKAIVAK

SEQ ID NO: 71052 - protein, 8 aa, Artificial sequence
  Protein classification predicting sequence
HHPFTSPK

SEQ ID NO: 71053 - protein, 9 aa, Artificial sequence
  Protein classification predicting sequence
KMFEVLGFT

SEQ ID NO: 71054 - protein, 21 aa, Artificial sequence
  Protein classification predicting sequence
NRRDLGGLIFVDLRDREGIVQ

SEQ ID NO: 71055 - protein, 45 aa, Artificial sequence
  Protein classification predicting sequence
INKSETPPFSINEENVNVDENIRLKYRYLDLRRQELAQTFKMRHQ

SEQ ID NO: 71056 - protein, 59 aa, Artificial sequence
  Protein classification predicting sequence
GEFYALPQSPQLFKQLLMISGFDKYYQIVKCFRDEDLRADRQPEFTQVDIEMSFVDQED

SEQ ID NO: 71057 - protein, 27 aa, Artificial sequence
  Protein classification predicting sequence
YTRKDMDALTEFVNIYGAKGLAWVKVV

SEQ ID NO: 71058 - protein, 22 aa, Artificial sequence
  Protein classification predicting sequence
GDLVMFVADKPNVVAQSLGALR

SEQ ID NO: 71059 - protein, 33 aa, Artificial sequence
  Protein classification predicting sequence
KLNFLWVTDWPLLEYDEDAKRYVAAHHPFTSPK

SEQ ID NO: 71060 - protein, 26 aa, Artificial sequence
  Protein classification predicting sequence
ANAYDIVLNGYELGGGSIRIHDGELQ

SEQ ID NO: 71061 - protein, 58 aa, Artificial sequence
  Protein classification predicting sequence
EQAQEQFGFLLDAFKYGAPPHGGIALGLDRLVMLLTNRTNLRDTIAFPKTASATCLLT

SEQ ID NO: 71062 - protein, 16 aa, Artificial sequence
  Protein classification predicting sequence
QEIQDIVEGMIAKVMK

SEQ ID NO: 71063 - protein, 7 aa, Artificial sequence
  Protein classification predicting sequence
KELELID

SEQ ID NO: 71064 - protein, 13 aa, Artificial sequence
  Protein classification predicting sequence
AHELEGDLAKVRA

SEQ ID NO: 71065 - protein, 8 aa, Artificial sequence
  Protein classification predicting sequence
QFGFLLEA

SEQ ID NO: 71066 - protein, 7 aa, Artificial sequence
  Protein classification predicting sequence
YGITQLV

SEQ ID NO: 71067 - protein, 6 aa, Artificial sequence
  Protein classification predicting sequence
FKQLLM

SEQ ID NO: 71068 - protein, 13 aa, Artificial sequence
  Protein classification predicting sequence
DFSHNPFSMPQGG

SEQ ID NO: 71069 - protein, 6 aa, Artificial sequence
  Protein classification predicting sequence
IRNYLD

SEQ ID NO: 71070 - protein, 8 aa, Artificial sequence
  Protein classification predicting sequence
MQLVINPE

SEQ ID NO: 71071 - protein, 7 aa, Artificial sequence
  Protein classification predicting sequence
FIDVETP

SEQ ID NO: 71072 - protein, 55 aa, Artificial sequence
  Protein classification predicting sequence
GHFYALPQSPQITKQLLMNAGFDRYYQIVKCFRDEDLRGDRQPEFTQVDLETSFL

SEQ ID NO: 71073 - protein, 7 aa, Artificial sequence
  Protein classification predicting sequence
EQEIQDI

SEQ ID NO: 71074 - protein, 8 aa, Artificial sequence
  Protein classification predicting sequence
DFKVFSEA

SEQ ID NO: 71075 - protein, 7 aa, Artificial sequence
  Protein classification predicting sequence
YGAKGLA

SEQ ID NO: 71076 - protein, 21 aa, Artificial sequence
  Protein classification predicting sequence
AYDIVLNGYELGGGSLRINQK

SEQ ID NO: 71077 - protein, 8 aa, Artificial sequence
  Protein classification predicting sequence
DPMTQAPS

SEQ ID NO: 71078 - protein, 17 aa, Artificial sequence
  Protein classification predicting sequence
EHIGTTITLKGWVSRRR

SEQ ID NO: 71079 - protein, 15 aa, Artificial sequence
  Protein classification predicting sequence
EAPAVKAIVVKGNAD

SEQ ID NO: 71080 - protein, 10 aa, Artificial sequence
  Protein classification predicting sequence
ANNTLGALRN

SEQ ID NO: 71081 - protein, 7 aa, Artificial sequence
  Protein classification predicting sequence
QSPQLYK

SEQ ID NO: 71082 - protein, 6 aa, Artificial sequence
  Protein classification predicting sequence
RRRDHG

SEQ ID NO: 71083 - protein, 14 aa, Artificial sequence
  Protein classification predicting sequence
GWVDRRRDHGGVIF

SEQ ID NO: 71084 - protein, 8 aa, Artificial sequence
  Protein classification predicting sequence
STPEGARD

SEQ ID NO: 71085 - protein, 15 aa, Artificial sequence
  Protein classification predicting sequence
STPEGARDYLVPSRV

SEQ ID NO: 71086 - protein, 8 aa, Artificial sequence
  Protein classification predicting sequence
RIHQPELQ

SEQ ID NO: 71087 - protein, 7 aa, Artificial sequence
  Protein classification predicting sequence
VTLYGWV

SEQ ID NO: 71088 - protein, 8 aa, Artificial sequence
  Protein classification predicting sequence
RDIQERVF

SEQ ID NO: 71089 - protein, 10 aa, Artificial sequence
  Protein classification predicting sequence
SNVRIKPGGD

SEQ ID NO: 71090 - protein, 6 aa, Artificial sequence
  Protein classification predicting sequence
WITDFP

SEQ ID NO: 71091 - protein, 8 aa, Artificial sequence
  Protein classification predicting sequence
FRAEEHNT

SEQ ID NO: 71092 - protein, 7 aa, Artificial sequence
  Protein classification predicting sequence
DRYFQIA

SEQ ID NO: 71093 - protein, 6 aa, Artificial sequence
  Protein classification predicting sequence
RDEDLR

SEQ ID NO: 71094 - protein, 7 aa, Artificial sequence
  Protein classification predicting sequence
PLLEYDE

SEQ ID NO: 71095 - protein, 7 aa, Artificial sequence
  Protein classification predicting sequence
LMVSGFD

SEQ ID NO: 71096 - protein, 10 aa, Artificial sequence
  Protein classification predicting sequence
RLKYRYLDLR

SEQ ID NO: 71097 - protein, 7 aa, Artificial sequence
  Protein classification predicting sequence
GFDRYFQ

SEQ ID NO: 71098 - protein, 8 aa, Artificial sequence
  Protein classification predicting sequence
ARCYRDED

SEQ ID NO: 71099 - protein, 8 aa, Artificial sequence
  Protein classification predicting sequence
DLLLFVAD

SEQ ID NO: 71100 - protein, 6 aa, Artificial sequence
  Protein classification predicting sequence
EKFGFL

SEQ ID NO: 71101 - protein, 7 aa, Artificial sequence
  Protein classification predicting sequence
GGGSVRI

SEQ ID NO: 71102 - protein, 11 aa, Artificial sequence
  Protein classification predicting sequence
EFCIKLTGEVR

SEQ ID NO: 71103 - protein, 13 aa, Artificial sequence
  Protein classification predicting sequence
GPANDPKGRVAAL

SEQ ID NO: 71104 - protein, 14 aa, Artificial sequence
  Protein classification predicting sequence
IYGAKGLAWLKVND

SEQ ID NO: 71105 - protein, 26 aa, Artificial sequence
  Protein classification predicting sequence
SNAYDMVLNGYEVGGGSVRIHNAEMQ

SEQ ID NO: 71106 - protein, 8 aa, Artificial sequence
  Protein classification predicting sequence
AVFDILGI

SEQ ID NO: 71107 - protein, 6 aa, Artificial sequence
  Protein classification predicting sequence
EEQRLK

SEQ ID NO: 71108 - protein, 13 aa, Artificial sequence
  Protein classification predicting sequence
ANPAALEELAIAV

SEQ ID NO: 71109 - protein, 7 aa, Artificial sequence
  Protein classification predicting sequence
ETSFMTA

SEQ ID NO: 71110 - protein, 10 aa, Artificial sequence
  Protein classification predicting sequence
FKVFSGPAND

SEQ ID NO: 71111 - protein, 52 aa, Artificial sequence
  Protein classification predicting sequence
LKFGFLLDALKFGTPPHAGLAFGLDRLVMLLCGTENIRDVIAFPKTTAAACL

SEQ ID NO: 71112 - protein, 9 aa, Artificial sequence
  Protein classification predicting sequence
IYGAKGLAW

SEQ ID NO: 71113 - protein, 7 aa, Artificial sequence
  Protein classification predicting sequence
PRSFFDK

SEQ ID NO: 71114 - protein, 7 aa, Artificial sequence
  Protein classification predicting sequence
KGPIAKF

SEQ ID NO: 71115 - protein, 7 aa, Artificial sequence
  Protein classification predicting sequence
HNPFSMP

SEQ ID NO: 71116 - protein, 7 aa, Artificial sequence
  Protein classification predicting sequence
GLENPKL

SEQ ID NO: 71117 - protein, 29 aa, Artificial sequence
  Protein classification predicting sequence
MGFLEVETPILTKATPEGARDYLVPSRVH

SEQ ID NO: 71118 - protein, 15 aa, Artificial sequence
  Protein classification predicting sequence
TPEGARDYLVPSRVH

SEQ ID NO: 71119 - protein, 8 aa, Artificial sequence
  Protein classification predicting sequence
DYMGRLRL

SEQ ID NO: 71120 - protein, 10 aa, Artificial sequence
  Protein classification predicting sequence
ELGGGSIRIH

SEQ ID NO: 71121 - protein, 9 aa, Artificial sequence
  Protein classification predicting sequence
CPLTSAPSP

SEQ ID NO: 71122 - protein, 18 aa, Artificial sequence
  Protein classification predicting sequence
ILNKAAPLPFHAHENPGE

SEQ ID NO: 71123 - protein, 12 aa, Artificial sequence
  Protein classification predicting sequence
RLKYRYLDLRRP

SEQ ID NO: 71124 - protein, 7 aa, Artificial sequence
  Protein classification predicting sequence
LELVDVA

SEQ ID NO: 71125 - protein, 7 aa, Artificial sequence
  Protein classification predicting sequence
RKQIDEY

SEQ ID NO: 71126 - protein, 15 aa, Artificial sequence
  Protein classification predicting sequence
KVSDFMGALRLKAGK

SEQ ID NO: 71127 - protein, 6 aa, Artificial sequence
  Protein classification predicting sequence
WAPLWV

SEQ ID NO: 71128 - protein, 7 aa, Artificial sequence
  Protein classification predicting sequence
YDMVLNG

SEQ ID NO: 71129 - protein, 6 aa, Artificial sequence
  Protein classification predicting sequence
RPEMQR

SEQ ID NO: 71130 - protein, 11 aa, Artificial sequence
  Protein classification predicting sequence
ASELRNEFCIQ

SEQ ID NO: 71131 - protein, 7 aa, Artificial sequence
  Protein classification predicting sequence
QVREVME

SEQ ID NO: 71132 - protein, 16 aa, Artificial sequence
  Protein classification predicting sequence
KGVDLGDFPVMTFAEA

SEQ ID NO: 71133 - protein, 8 aa, Artificial sequence
  Protein classification predicting sequence
KVNDRAAG

SEQ ID NO: 71134 - protein, 9 aa, Artificial sequence
  Protein classification predicting sequence
DAMGALRLK

SEQ ID NO: 71135 - protein, 12 aa, Artificial sequence
  Protein classification predicting sequence
EGGLTAMHHPFT

SEQ ID NO: 71136 - protein, 11 aa, Artificial sequence
  Protein classification predicting sequence
MQQTVFGILGI

SEQ ID NO: 71137 - protein, 10 aa, Artificial sequence
  Protein classification predicting sequence
KFGFLLDALK

SEQ ID NO: 71138 - protein, 26 aa, Artificial sequence
  Protein classification predicting sequence
MLLTGTDNIRDVIAFPKTTAAACLMT

SEQ ID NO: 71139 - protein, 7 aa, Artificial sequence
  Protein classification predicting sequence
DLRDHYG

SEQ ID NO: 71140 - protein, 8 aa, Artificial sequence
  Protein classification predicting sequence
PGEFYQLD

SEQ ID NO: 71141 - protein, 7 aa, Artificial sequence
  Protein classification predicting sequence
DTDLERS

SEQ ID NO: 71142 - protein, 6 aa, Artificial sequence
  Protein classification predicting sequence
RIEDTD

SEQ ID NO: 71143 - protein, 9 aa, Artificial sequence
  Protein classification predicting sequence
AVVVDDHDM

SEQ ID NO: 71144 - protein, 8 aa, Artificial sequence
  Protein classification predicting sequence
ALFNWLYA

SEQ ID NO: 71145 - protein, 7 aa, Artificial sequence
  Protein classification predicting sequence
VVDDIDM

SEQ ID NO: 71146 - protein, 7 aa, Artificial sequence
  Protein classification predicting sequence
TNTGVQI

SEQ ID NO: 71147 - protein, 7 aa, Artificial sequence
  Protein classification predicting sequence
WLGLDWD

SEQ ID NO: 71148 - protein, 22 aa, Artificial sequence
  Protein classification predicting sequence
PTYMHAVVVDDHDMGVTHIIRG

SEQ ID NO: 71149 - protein, 16 aa, Artificial sequence
  Protein classification predicting sequence
DDFIIARSDGTPTYNF

SEQ ID NO: 71150 - protein, 8 aa, Artificial sequence
  Protein classification predicting sequence
DGTPTYNF

SEQ ID NO: 71151 - protein, 5 aa, Artificial sequence
  Protein classification predicting sequence
PTYNF

SEQ ID NO: 71152 - protein, 9 aa, Artificial sequence
  Protein classification predicting sequence
SDVIRGDDH

SEQ ID NO: 71153 - protein, 8 aa, Artificial sequence
  Protein classification predicting sequence
DVIRGDDH

SEQ ID NO: 71154 - protein, 7 aa, Artificial sequence
  Protein classification predicting sequence
TEEELEA

SEQ ID NO: 71155 - protein, 7 aa, Artificial sequence
  Protein classification predicting sequence
IIARSDG

SEQ ID NO: 71156 - protein, 25 aa, Artificial sequence
  Protein classification predicting sequence
DDWDMKITHVIRGDDHINNTPRQIN

SEQ ID NO: 71157 - protein, 6 aa, Artificial sequence
  Protein classification predicting sequence
MKITHV

SEQ ID NO: 71158 - protein, 16 aa, Artificial sequence
  Protein classification predicting sequence
DGKRLSKRHGAVSVLQ

SEQ ID NO: 71159 - protein, 10 aa, Artificial sequence
  Protein classification predicting sequence
LSKRHGAVSV

SEQ ID NO: 71160 - protein, 8 aa, Artificial sequence
  Protein classification predicting sequence
RLGWAHGD

SEQ ID NO: 71161 - protein, 7 aa, Artificial sequence
  Protein classification predicting sequence
KTLKEMA

SEQ ID NO: 71162 - protein, 6 aa, Artificial sequence
  Protein classification predicting sequence
RGEDHI

SEQ ID NO: 71163 - protein, 8 aa, Artificial sequence
  Protein classification predicting sequence
LFARHHGG

SEQ ID NO: 71164 - protein, 8 aa, Artificial sequence
  Protein classification predicting sequence
PRYDGTWR

SEQ ID NO: 71165 - protein, 10 aa, Artificial sequence
  Protein classification predicting sequence
WRDRDPSEAP

SEQ ID NO: 71166 - protein, 8 aa, Artificial sequence
  Protein classification predicting sequence
PLIHGPDG

SEQ ID NO: 71167 - protein, 8 aa, Artificial sequence
  Protein classification predicting sequence
RLGWGHGD

SEQ ID NO: 71168 - protein, 6 aa, Artificial sequence
  Protein classification predicting sequence
SPSRMD

SEQ ID NO: 71169 - protein, 6 aa, Artificial sequence
  Protein classification predicting sequence
GYLPEA

SEQ ID NO: 71170 - protein, 7 aa, Artificial sequence
  Protein classification predicting sequence
LVRLGWS

SEQ ID NO: 71171 - protein, 18 aa, Artificial sequence
  Protein classification predicting sequence
VRFPNKDLDDFIILRSDG

SEQ ID NO: 71172 - protein, 9 aa, Artificial sequence
  Protein classification predicting sequence
AYRAMGYLP

SEQ ID NO: 71173 - protein, 6 aa, Artificial sequence
  Protein classification predicting sequence
GQFILR

SEQ ID NO: 71174 - protein, 7 aa, Artificial sequence
  Protein classification predicting sequence
LRFDDTD

SEQ ID NO: 71175 - protein, 7 aa, Artificial sequence
  Protein classification predicting sequence
ERSKQEY

SEQ ID NO: 71176 - protein, 7 aa, Artificial sequence
  Protein classification predicting sequence
PLRLALT

SEQ ID NO: 71177 - protein, 8 aa, Artificial sequence
  Protein classification predicting sequence
EELELKRK

SEQ ID NO: 71178 - protein, 5 aa, Artificial sequence
  Protein classification predicting sequence
FILRI

SEQ ID NO: 71179 - protein, 6 aa, Artificial sequence
  Protein classification predicting sequence
DHVTNT

SEQ ID NO: 71180 - protein, 11 aa, Artificial sequence
  Protein classification predicting sequence
VRVRFAPSPTG

SEQ ID NO: 71181 - protein, 6 aa, Artificial sequence
  Protein classification predicting sequence
KLKWMN

SEQ ID NO: 71182 - protein, 5 aa, Artificial sequence
  Protein classification predicting sequence
AHVSM

SEQ ID NO: 71183 - protein, 10 aa, Artificial sequence
  Protein classification predicting sequence
RSTQEAIDAI

SEQ ID NO: 71184 - protein, 7 aa, Artificial sequence
  Protein classification predicting sequence
KLSKRDG

SEQ ID NO: 71185 - protein, 6 aa, Artificial sequence
  Protein classification predicting sequence
YACYET

SEQ ID NO: 71186 - protein, 7 aa, Artificial sequence
  Protein classification predicting sequence
LRLALTG

SEQ ID NO: 71187 - protein, 6 aa, Artificial sequence
  Protein classification predicting sequence
GQFLLR

SEQ ID NO: 71188 - protein, 5 aa, Artificial sequence
  Protein classification predicting sequence
AYYCY

SEQ ID NO: 71189 - protein, 6 aa, Artificial sequence
  Protein classification predicting sequence
HIPLIH

SEQ ID NO: 71190 - protein, 7 aa, Artificial sequence
  Protein classification predicting sequence
ARTALFN

SEQ ID NO: 71191 - protein, 18 aa, Artificial sequence
  Protein classification predicting sequence
GGKMLLRIEDTDRERSTE

SEQ ID NO: 71192 - protein, 6 aa, Artificial sequence
  Protein classification predicting sequence
LSKRHG

SEQ ID NO: 71193 - protein, 7 aa, Artificial sequence
  Protein classification predicting sequence
NYLARLG

SEQ ID NO: 71194 - protein, 6 aa, Artificial sequence
  Protein classification predicting sequence
DMGITH

SEQ ID NO: 71195 - protein, 5 aa, Artificial sequence
  Protein classification predicting sequence
GWSHG

SEQ ID NO: 71196 - protein, 11 aa, Artificial sequence
  Protein classification predicting sequence
RFAPSPTGYLH

SEQ ID NO: 71197 - protein, 6 aa, Artificial sequence
  Protein classification predicting sequence
CYCSKE

SEQ ID NO: 71198 - protein, 9 aa, Artificial sequence
  Protein classification predicting sequence
RGEDHVSNT

SEQ ID NO: 71199 - protein, 6 aa, Artificial sequence
  Protein classification predicting sequence
NTPRQI

SEQ ID NO: 71200 - protein, 7 aa, Artificial sequence
  Protein classification predicting sequence
RTALFSW

SEQ ID NO: 71201 - protein, 7 aa, Artificial sequence
  Protein classification predicting sequence
EKPRYDG

SEQ ID NO: 71202 - protein, 10 aa, Artificial sequence
  Protein classification predicting sequence
NNTPRQINIL

SEQ ID NO: 71203 - protein, 7 aa, Artificial sequence
  Protein classification predicting sequence
DDMVLLR

SEQ ID NO: 71204 - protein, 10 aa, Artificial sequence
  Protein classification predicting sequence
AVVVDDHDMG

SEQ ID NO: 71205 - protein, 10 aa, Artificial sequence
  Protein classification predicting sequence
KLSKRHGALG

SEQ ID NO: 71206 - protein, 9 aa, Artificial sequence
  Protein classification predicting sequence
THIIRGDDH

SEQ ID NO: 71207 - protein, 8 aa, Artificial sequence
  Protein classification predicting sequence
KLSKRHGA

SEQ ID NO: 71208 - protein, 9 aa, Artificial sequence
  Protein classification predicting sequence
FLLRIEDTD

SEQ ID NO: 71209 - protein, 8 aa, Artificial sequence
  Protein classification predicting sequence
GPYRQSER

SEQ ID NO: 71210 - protein, 7 aa, Artificial sequence
  Protein classification predicting sequence
RKPVIRF

SEQ ID NO: 71211 - protein, 10 aa, Artificial sequence
  Protein classification predicting sequence
DDALMKITHV

SEQ ID NO: 71212 - protein, 7 aa, Artificial sequence
  Protein classification predicting sequence
ITHVIRG

SEQ ID NO: 71213 - protein, 11 aa, Artificial sequence
  Protein classification predicting sequence
GNLRAAIFNYI

SEQ ID NO: 71214 - protein, 8 aa, Artificial sequence
  Protein classification predicting sequence
QFERAPRH

SEQ ID NO: 71215 - protein, 7 aa, Artificial sequence
  Protein classification predicting sequence
AYKCFAT

SEQ ID NO: 71216 - protein, 11 aa, Artificial sequence
  Protein classification predicting sequence
AVVVDDHDMGV

SEQ ID NO: 71217 - protein, 8 aa, Artificial sequence
  Protein classification predicting sequence
HVIRGDDH

SEQ ID NO: 71218 - protein, 6 aa, Artificial sequence
  Protein classification predicting sequence
MGITHV

SEQ ID NO: 71219 - protein, 7 aa, Artificial sequence
  Protein classification predicting sequence
PHVGTAY

SEQ ID NO: 71220 - protein, 6 aa, Artificial sequence
  Protein classification predicting sequence
WLGLNW

SEQ ID NO: 71221 - protein, 7 aa, Artificial sequence
  Protein classification predicting sequence
ITHVLRG

SEQ ID NO: 71222 - protein, 16 aa, Artificial sequence
  Protein classification predicting sequence
ITHVLRGEEWLPSAPK

SEQ ID NO: 71223 - protein, 6 aa, Artificial sequence
  Protein classification predicting sequence
KLNWLN

SEQ ID NO: 71224 - protein, 6 aa, Artificial sequence
  Protein classification predicting sequence
RFAPNP

SEQ ID NO: 71225 - protein, 7 aa, Artificial sequence
  Protein classification predicting sequence
EGEAVVR

SEQ ID NO: 71226 - protein, 11 aa, Artificial sequence
  Protein classification predicting sequence
VRVRIAPSPTG

SEQ ID NO: 71227 - protein, 9 aa, Artificial sequence
  Protein classification predicting sequence
FILRIEDTD

SEQ ID NO: 71228 - protein, 6 aa, Artificial sequence
  Protein classification predicting sequence
GPYRQS

SEQ ID NO: 71229 - protein, 6 aa, Artificial sequence
  Protein classification predicting sequence
RGEEWL

SEQ ID NO: 71230 - protein, 6 aa, Artificial sequence
  Protein classification predicting sequence
ARHHGG

SEQ ID NO: 71231 - protein, 5 aa, Artificial sequence
  Protein classification predicting sequence
AYRCY

SEQ ID NO: 71232 - protein, 7 aa, Artificial sequence
  Protein classification predicting sequence
WNDLVRG

SEQ ID NO: 71233 - protein, 6 aa, Artificial sequence
  Protein classification predicting sequence
DHIANT

SEQ ID NO: 71234 - protein, 6 aa, Artificial sequence
  Protein classification predicting sequence
GNARTA

SEQ ID NO: 71235 - protein, 6 aa, Artificial sequence
  Protein classification predicting sequence
YRQSER

SEQ ID NO: 71236 - protein, 6 aa, Artificial sequence
  Protein classification predicting sequence
YEYFGW

SEQ ID NO: 71237 - protein, 7 aa, Artificial sequence
  Protein classification predicting sequence
MILGDDG

SEQ ID NO: 71238 - protein, 6 aa, Artificial sequence
  Protein classification predicting sequence
EIFTRE

SEQ ID NO: 71239 - protein, 5 aa, Artificial sequence
  Protein classification predicting sequence
GPYRQ

SEQ ID NO: 71240 - protein, 6 aa, Artificial sequence
  Protein classification predicting sequence
NNQYMK

SEQ ID NO: 71241 - protein, 6 aa, Artificial sequence
  Protein classification predicting sequence
LFMPIR

SEQ ID NO: 71242 - protein, 7 aa, Artificial sequence
  Protein classification predicting sequence
LGKEKVL

SEQ ID NO: 71243 - protein, 97 aa, Artificial sequence
  Protein classification predicting sequence
DGKFIIRIEDTDVKRNVAGGEESQLKYLKWLGMDWDEGVDVGGEFGPYRQTERLDIYKKLYEDLLERGLAYKCYMTEEELEAEREGQIARGETPRYA

SEQ ID NO: 71244 - protein, 20 aa, Artificial sequence
  Protein classification predicting sequence
QVKEFEAEGRIPSIRFRVPA

SEQ ID NO: 71245 - protein, 52 aa, Artificial sequence
  Protein classification predicting sequence
EFIKMFDAARLSKSPALFDSQKLKWMNNQYMKKQDLDTVVELSLPHLVKAGR

SEQ ID NO: 71246 - protein, 43 aa, Artificial sequence
  Protein classification predicting sequence
QAWIRDVIALYHEQMSFGAEIVELSEMFFKDHVDYEEEGQEVL

SEQ ID NO: 71247 - protein, 14 aa, Artificial sequence
  Protein classification predicting sequence
GEQVPEVLRAFAGQ

SEQ ID NO: 71248 - protein, 7 aa, Artificial sequence
  Protein classification predicting sequence
PTYHLAN

SEQ ID NO: 71249 - protein, 8 aa, Artificial sequence
  Protein classification predicting sequence
ALLGWNPG

SEQ ID NO: 71250 - protein, 8 aa, Artificial sequence
  Protein classification predicting sequence
ERLDIYKK

SEQ ID NO: 71251 - protein, 10 aa, Artificial sequence
  Protein classification predicting sequence
SKRDESIIQF

SEQ ID NO: 71252 - protein, 6 aa, Artificial sequence
  Protein classification predicting sequence
WMNNQY

SEQ ID NO: 71253 - protein, 6 aa, Artificial sequence
  Protein classification predicting sequence
LALPHL

SEQ ID NO: 71254 - protein, 8 aa, Artificial sequence
  Protein classification predicting sequence
LFMPIRVA

SEQ ID NO: 71255 - protein, 7 aa, Artificial sequence
  Protein classification predicting sequence
DWDESVD

SEQ ID NO: 71256 - protein, 29 aa, Artificial sequence
  Protein classification predicting sequence
FGHMTLIVNESRKKLSKRDESIIQFIEQY

SEQ ID NO: 71257 - protein, 7 aa, Artificial sequence
  Protein classification predicting sequence
LGYLPEA

SEQ ID NO: 71258 - protein, 9 aa, Artificial sequence
  Protein classification predicting sequence
IKAVQKETG

SEQ ID NO: 71259 - protein, 7 aa, Artificial sequence
  Protein classification predicting sequence
QILLYEA

SEQ ID NO: 71260 - protein, 8 aa, Artificial sequence
  Protein classification predicting sequence
GQTHGPEL

SEQ ID NO: 71261 - protein, 7 aa, Artificial sequence
  Protein classification predicting sequence
DESVDKD

SEQ ID NO: 71262 - protein, 6 aa, Artificial sequence
  Protein classification predicting sequence
YSGKCR

SEQ ID NO: 71263 - protein, 9 aa, Artificial sequence
  Protein classification predicting sequence
PYTIRLKVP

SEQ ID NO: 71264 - protein, 6 aa, Artificial sequence
  Protein classification predicting sequence
FGWEPP

SEQ ID NO: 71265 - protein, 6 aa, Artificial sequence
  Protein classification predicting sequence
RLSKSP

SEQ ID NO: 71266 - protein, 9 aa, Artificial sequence
  Protein classification predicting sequence
LPHLVKAGR

SEQ ID NO: 71267 - protein, 14 aa, Artificial sequence
  Protein classification predicting sequence
EQMSYGAEIVPLSE

SEQ ID NO: 71268 - protein, 10 aa, Artificial sequence
  Protein classification predicting sequence
TGQTHGPELP

SEQ ID NO: 71269 - protein, 8 aa, Artificial sequence
  Protein classification predicting sequence
PSIRFRVP

SEQ ID NO: 71270 - protein, 7 aa, Artificial sequence
  Protein classification predicting sequence
PTYNFAV

SEQ ID NO: 71271 - protein, 12 aa, Artificial sequence
  Protein classification predicting sequence
LGYLPEALFNFI

SEQ ID NO: 71272 - protein, 8 aa, Artificial sequence
  Protein classification predicting sequence
RFAPSPTG

SEQ ID NO: 71273 - protein, 12 aa, Artificial sequence
  Protein classification predicting sequence
RAEEHLPNTLRQ

SEQ ID NO: 71274 - protein, 7 aa, Artificial sequence
  Protein classification predicting sequence
QLMIYEA

SEQ ID NO: 71275 - protein, 8 aa, Artificial sequence
  Protein classification predicting sequence
NFIALLGW

SEQ ID NO: 71276 - protein, 16 aa, Artificial sequence
  Protein classification predicting sequence
VRVRFCPSPTGTPHVG

SEQ ID NO: 71277 - protein, 6 aa, Artificial sequence
  Protein classification predicting sequence
RTALFN

SEQ ID NO: 71278 - protein, 7 aa, Artificial sequence
  Protein classification predicting sequence
RDSEESY

SEQ ID NO: 71279 - protein, 6 aa, Artificial sequence
  Protein classification predicting sequence
NPVDDA

SEQ ID NO: 71280 - protein, 8 aa, Artificial sequence
  Protein classification predicting sequence
VLRGEDLL

SEQ ID NO: 71281 - protein, 9 aa, Artificial sequence
  Protein classification predicting sequence
VSPPLFESM

SEQ ID NO: 71282 - protein, 8 aa, Artificial sequence
  Protein classification predicting sequence
FVLRIEDT

SEQ ID NO: 71283 - protein, 6 aa, Artificial sequence
  Protein classification predicting sequence
LRIEDT

SEQ ID NO: 71284 - protein, 6 aa, Artificial sequence
  Protein classification predicting sequence
YDGRCR

SEQ ID NO: 71285 - protein, 8 aa, Artificial sequence
  Protein classification predicting sequence
MLEAGTAY

SEQ ID NO: 71286 - protein, 14 aa, Artificial sequence
  Protein classification predicting sequence
PTYNFCVVVDDWDM

SEQ ID NO: 71287 - protein, 8 aa, Artificial sequence
  Protein classification predicting sequence
PLRVAVTG

SEQ ID NO: 71288 - protein, 5 aa, Artificial sequence
  Protein classification predicting sequence
NWLYA

SEQ ID NO: 71289 - protein, 6 aa, Artificial sequence
  Protein classification predicting sequence
WRDRDP

SEQ ID NO: 71290 - protein, 12 aa, Artificial sequence
  Protein classification predicting sequence
NYLVRLGWSHGD

SEQ ID NO: 71291 - protein, 6 aa, Artificial sequence
  Protein classification predicting sequence
NGHYIR

SEQ ID NO: 71292 - protein, 8 aa, Artificial sequence
  Protein classification predicting sequence
RTALYSWL

SEQ ID NO: 71293 - protein, 6 aa, Artificial sequence
  Protein classification predicting sequence
YAHVSM

SEQ ID NO: 71294 - protein, 8 aa, Artificial sequence
  Protein classification predicting sequence
EMIKYFTL

SEQ ID NO: 71295 - protein, 6 aa, Artificial sequence
  Protein classification predicting sequence
SKRHGA

SEQ ID NO: 71296 - protein, 9 aa, Artificial sequence
  Protein classification predicting sequence
EDTDRERST

SEQ ID NO: 71297 - protein, 9 aa, Artificial sequence
  Protein classification predicting sequence
YNLAVVVDD

SEQ ID NO: 71298 - protein, 7 aa, Artificial sequence
  Protein classification predicting sequence
LAVVVDD

SEQ ID NO: 71299 - protein, 7 aa, Artificial sequence
  Protein classification predicting sequence
AFGWEPP

SEQ ID NO: 71300 - protein, 10 aa, Artificial sequence
  Protein classification predicting sequence
DDHLMGITHV

SEQ ID NO: 71301 - protein, 35 aa, Artificial sequence
  Protein classification predicting sequence
DDHLMGITHVLRGEEWLSSTPKHLLLYEAFGWEPP

SEQ ID NO: 71302 - protein, 17 aa, Artificial sequence
  Protein classification predicting sequence
KLDWMNKHYLNHEGSPE

SEQ ID NO: 71303 - protein, 8 aa, Artificial sequence
  Protein classification predicting sequence
RTALYNYL

SEQ ID NO: 71304 - protein, 8 aa, Artificial sequence
  Protein classification predicting sequence
PIRIAVSG

SEQ ID NO: 71305 - protein, 15 aa, Artificial sequence
  Protein classification predicting sequence
TRFAPSPTGYLHIGG

SEQ ID NO: 71306 - protein, 14 aa, Artificial sequence
  Protein classification predicting sequence
FVLRIEDTDLERST

SEQ ID NO: 71307 - protein, 5 aa, Artificial sequence
  Protein classification predicting sequence
RFDRY

SEQ ID NO: 71308 - protein, 7 aa, Artificial sequence
  Protein classification predicting sequence
GRIEISN

SEQ ID NO: 71309 - protein, 7 aa, Artificial sequence
  Protein classification predicting sequence
ELDDLII

SEQ ID NO: 71310 - protein, 10 aa, Artificial sequence
  Protein classification predicting sequence
YGHLPMILNE

SEQ ID NO: 71311 - protein, 7 aa, Artificial sequence
  Protein classification predicting sequence
EQFVEWF

SEQ ID NO: 71312 - protein, 6 aa, Artificial sequence
  Protein classification predicting sequence
GMPLRV

SEQ ID NO: 71313 - protein, 6 aa, Artificial sequence
  Protein classification predicting sequence
NSELDD

SEQ ID NO: 71314 - protein, 6 aa, Artificial sequence
  Protein classification predicting sequence
PTYNFA

SEQ ID NO: 71315 - protein, 14 aa, Artificial sequence
  Protein classification predicting sequence
ANVVDDHLMGITHV

SEQ ID NO: 71316 - protein, 6 aa, Artificial sequence
  Protein classification predicting sequence
YEAFGW

SEQ ID NO: 71317 - protein, 6 aa, Artificial sequence
  Protein classification predicting sequence
FEAEGR

SEQ ID NO: 71318 - protein, 9 aa, Artificial sequence
  Protein classification predicting sequence
STPRQIALY

SEQ ID NO: 71319 - protein, 7 aa, Artificial sequence
  Protein classification predicting sequence
PKLGYDN

SEQ ID NO: 71320 - protein, 10 aa, Artificial sequence
  Protein classification predicting sequence
THVLRGEDLL

SEQ ID NO: 71321 - protein, 8 aa, Artificial sequence
  Protein classification predicting sequence
PSPTGYLH

SEQ ID NO: 71322 - protein, 6 aa, Artificial sequence
  Protein classification predicting sequence
GGARTA

SEQ ID NO: 71323 - protein, 8 aa, Artificial sequence
  Protein classification predicting sequence
LEWDEGPY

SEQ ID NO: 71324 - protein, 6 aa, Artificial sequence
  Protein classification predicting sequence
WDEGPY

SEQ ID NO: 71325 - protein, 13 aa, Artificial sequence
  Protein classification predicting sequence
GDQEIFTREEMIK

SEQ ID NO: 71326 - protein, 10 aa, Artificial sequence
  Protein classification predicting sequence
IYQPLIDQLL

SEQ ID NO: 71327 - protein, 20 aa, Artificial sequence
  Protein classification predicting sequence
IGGDFVIQKRDGMPTYNFAV

SEQ ID NO: 71328 - protein, 7 aa, Artificial sequence
  Protein classification predicting sequence
NTPKQLM

SEQ ID NO: 71329 - protein, 6 aa, Artificial sequence
  Protein classification predicting sequence
MIYEAF

SEQ ID NO: 71330 - protein, 11 aa, Artificial sequence
  Protein classification predicting sequence
FNFIALLGWSP

SEQ ID NO: 71331 - protein, 10 aa, Artificial sequence
  Protein classification predicting sequence
RLSKSPAAFD

SEQ ID NO: 71332 - protein, 9 aa, Artificial sequence
  Protein classification predicting sequence
AIMDGMNWL

SEQ ID NO: 71333 - protein, 7 aa, Artificial sequence
  Protein classification predicting sequence
SHEHHAD

SEQ ID NO: 71334 - protein, 7 aa, Artificial sequence
  Protein classification predicting sequence
NPQEGSV

SEQ ID NO: 71335 - protein, 8 aa, Artificial sequence
  Protein classification predicting sequence
PTYNFCVV

SEQ ID NO: 71336 - protein, 19 aa, Artificial sequence
  Protein classification predicting sequence
RGEDHINNTPRQINILKAL

SEQ ID NO: 71337 - protein, 14 aa, Artificial sequence
  Protein classification predicting sequence
GDDGKKLSKRHGAV

SEQ ID NO: 71338 - protein, 8 aa, Artificial sequence
  Protein classification predicting sequence
WLNHHYIN

SEQ ID NO: 71339 - protein, 7 aa, Artificial sequence
  Protein classification predicting sequence
EYVATHL

SEQ ID NO: 71340 - protein, 8 aa, Artificial sequence
  Protein classification predicting sequence
DVTVHAIG

SEQ ID NO: 71341 - protein, 12 aa, Artificial sequence
  Protein classification predicting sequence
TRFAPSPTGFLH

SEQ ID NO: 71342 - protein, 27 aa, Artificial sequence
  Protein classification predicting sequence
TRFAPSPTGFLHVGGVRTALFSWLYAK

SEQ ID NO: 71343 - protein, 11 aa, Artificial sequence
  Protein classification predicting sequence
LRIEDTDLERS

SEQ ID NO: 71344 - protein, 8 aa, Artificial sequence
  Protein classification predicting sequence
QTKRFDRY

SEQ ID NO: 71345 - protein, 6 aa, Artificial sequence
  Protein classification predicting sequence
GKAYYC

SEQ ID NO: 71346 - protein, 6 aa, Artificial sequence
  Protein classification predicting sequence
HVPMIL

SEQ ID NO: 71347 - protein, 11 aa, Artificial sequence
  Protein classification predicting sequence
DGAKLSKRHGA

SEQ ID NO: 71348 - protein, 5 aa, Artificial sequence
  Protein classification predicting sequence
VMQYR

SEQ ID NO: 71349 - protein, 14 aa, Artificial sequence
  Protein classification predicting sequence
APSPTGDPHVGTAY

SEQ ID NO: 71350 - protein, 7 aa, Artificial sequence
  Protein classification predicting sequence
EGPDVGG

SEQ ID NO: 71351 - protein, 6 aa, Artificial sequence
  Protein classification predicting sequence
DGYPTY

SEQ ID NO: 71352 - protein, 6 aa, Artificial sequence
  Protein classification predicting sequence
ITHVIR

SEQ ID NO: 71353 - protein, 6 aa, Artificial sequence
  Protein classification predicting sequence
SKRKNP

SEQ ID NO: 71354 - protein, 7 aa, Artificial sequence
  Protein classification predicting sequence
GDWVIVK

SEQ ID NO: 71355 - protein, 7 aa, Artificial sequence
  Protein classification predicting sequence
GGARTAL

SEQ ID NO: 71356 - protein, 7 aa, Artificial sequence
  Protein classification predicting sequence
DEGPFYQ

SEQ ID NO: 71357 - protein, 8 aa, Artificial sequence
  Protein classification predicting sequence
LLAEGKAY

SEQ ID NO: 71358 - protein, 7 aa, Artificial sequence
  Protein classification predicting sequence
VIRGDDH

SEQ ID NO: 71359 - protein, 10 aa, Artificial sequence
  Protein classification predicting sequence
LSKRHGATSV

SEQ ID NO: 71360 - protein, 6 aa, Artificial sequence
  Protein classification predicting sequence
CFCTPE

SEQ ID NO: 71361 - protein, 8 aa, Artificial sequence
  Protein classification predicting sequence
SRRKLSKR

SEQ ID NO: 71362 - protein, 12 aa, Artificial sequence
  Protein classification predicting sequence
TRFAPSPTGYLH

SEQ ID NO: 71363 - protein, 24 aa, Artificial sequence
  Protein classification predicting sequence
TRFAPSPTGYLHVGGARTALYSWL

SEQ ID NO: 71364 - protein, 9 aa, Artificial sequence
  Protein classification predicting sequence
QTKRFDRYN

SEQ ID NO: 71365 - protein, 12 aa, Artificial sequence
  Protein classification predicting sequence
YAHVSMINGDDG

SEQ ID NO: 71366 - protein, 7 aa, Artificial sequence
  Protein classification predicting sequence
GYLPEAL

SEQ ID NO: 71367 - protein, 7 aa, Artificial sequence
  Protein classification predicting sequence
SASAFNT

SEQ ID NO: 71368 - protein, 6 aa, Artificial sequence
  Protein classification predicting sequence
WLNQHY

SEQ ID NO: 71369 - protein, 8 aa, Artificial sequence
  Protein classification predicting sequence
GMGKVGMP

SEQ ID NO: 71370 - protein, 6 aa, Artificial sequence
  Protein classification predicting sequence
AYRCYC

SEQ ID NO: 71371 - protein, 6 aa, Artificial sequence
  Protein classification predicting sequence
ISHVIR

SEQ ID NO: 71372 - protein, 9 aa, Artificial sequence
  Protein classification predicting sequence
TRFAPSPTG

SEQ ID NO: 71373 - protein, 9 aa, Artificial sequence
  Protein classification predicting sequence
FVLRIEDTD

SEQ ID NO: 71374 - protein, 7 aa, Artificial sequence
  Protein classification predicting sequence
LRIEDTD

SEQ ID NO: 71375 - protein, 5 aa, Artificial sequence
  Protein classification predicting sequence
AYKCY

SEQ ID NO: 71376 - protein, 7 aa, Artificial sequence
  Protein classification predicting sequence
GSVVFDD

SEQ ID NO: 71377 - protein, 6 aa, Artificial sequence
  Protein classification predicting sequence
ASAFNT

SEQ ID NO: 71378 - protein, 12 aa, Artificial sequence
  Protein classification predicting sequence
KIRVRYAPSPTG

SEQ ID NO: 71379 - protein, 9 aa, Artificial sequence
  Protein classification predicting sequence
YQKYIDQLL

SEQ ID NO: 71380 - protein, 7 aa, Artificial sequence
  Protein classification predicting sequence
KKLSKRD

SEQ ID NO: 71381 - protein, 8 aa, Artificial sequence
  Protein classification predicting sequence
ARAKGLKP

SEQ ID NO: 71382 - protein, 13 aa, Artificial sequence
  Protein classification predicting sequence
RLSKSPAAFDQKK

SEQ ID NO: 71383 - protein, 6 aa, Artificial sequence
  Protein classification predicting sequence
ETGIKG

SEQ ID NO: 71384 - protein, 7 aa, Artificial sequence
  Protein classification predicting sequence
DDHLMEI

SEQ ID NO: 71385 - protein, 6 aa, Artificial sequence
  Protein classification predicting sequence
NTPKQL

SEQ ID NO: 71386 - protein, 7 aa, Artificial sequence
  Protein classification predicting sequence
RLSKSPA

SEQ ID NO: 71387 - protein, 7 aa, Artificial sequence
  Protein classification predicting sequence
NNQYVKK

SEQ ID NO: 71388 - protein, 8 aa, Artificial sequence
  Protein classification predicting sequence
WLGMDWDE

SEQ ID NO: 71389 - protein, 9 aa, Artificial sequence
  Protein classification predicting sequence
EKAAYIAER

SEQ ID NO: 71390 - protein, 7 aa, Artificial sequence
  Protein classification predicting sequence
IEPVVRI

SEQ ID NO: 71391 - protein, 9 aa, Artificial sequence
  Protein classification predicting sequence
VKGDIEFEG

SEQ ID NO: 71392 - protein, 10 aa, Artificial sequence
  Protein classification predicting sequence
NIGGDWVIQK

SEQ ID NO: 71393 - protein, 14 aa, Artificial sequence
  Protein classification predicting sequence
FNFIALLGWNPGGE

SEQ ID NO: 71394 - protein, 34 aa, Artificial sequence
  Protein classification predicting sequence
KIRVRYAPSPTGHLHIGNARTALFNYLFARHNKG

SEQ ID NO: 71395 - protein, 7 aa, Artificial sequence
  Protein classification predicting sequence
FGHMSLI

SEQ ID NO: 71396 - protein, 6 aa, Artificial sequence
  Protein classification predicting sequence
WVNNQY

SEQ ID NO: 71397 - protein, 7 aa, Artificial sequence
  Protein classification predicting sequence
KKHLRPV

SEQ ID NO: 71398 - protein, 15 aa, Artificial sequence
  Protein classification predicting sequence
RTALFNWAYARHTGG

SEQ ID NO: 71399 - protein, 9 aa, Artificial sequence
  Protein classification predicting sequence
VNPVDDALM

SEQ ID NO: 71400 - protein, 11 aa, Artificial sequence
  Protein classification predicting sequence
HRDRGFIPEGL

SEQ ID NO: 71401 - protein, 9 aa, Artificial sequence
  Protein classification predicting sequence
ARTALFNYL

SEQ ID NO: 71402 - protein, 6 aa, Artificial sequence
  Protein classification predicting sequence
KSDGFP

SEQ ID NO: 71403 - protein, 6 aa, Artificial sequence
  Protein classification predicting sequence
HLSNTP

SEQ ID NO: 71404 - protein, 10 aa, Artificial sequence
  Protein classification predicting sequence
LKWLGMDWDE

SEQ ID NO: 71405 - protein, 13 aa, Artificial sequence
  Protein classification predicting sequence
KKDGIPTYNFAVA

SEQ ID NO: 71406 - protein, 12 aa, Artificial sequence
  Protein classification predicting sequence
RGDDHISNTPKQ

SEQ ID NO: 71407 - protein, 12 aa, Artificial sequence
  Protein classification predicting sequence
FGHMTLIVNESR

SEQ ID NO: 71408 - protein, 19 aa, Artificial sequence
  Protein classification predicting sequence
LGWSPEGEEEIFSKEEFIK

SEQ ID NO: 71409 - protein, 9 aa, Artificial sequence
  Protein classification predicting sequence
VVELSLPHL

SEQ ID NO: 71410 - protein, 6 aa, Artificial sequence
  Protein classification predicting sequence
VQKETG

SEQ ID NO: 71411 - protein, 6 aa, Artificial sequence
  Protein classification predicting sequence
LAYKCY

SEQ ID NO: 71412 - protein, 6 aa, Artificial sequence
  Protein classification predicting sequence
RFDRYN

SEQ ID NO: 71413 - protein, 6 aa, Artificial sequence
  Protein classification predicting sequence
EGSVVF

SEQ ID NO: 71414 - protein, 17 aa, Artificial sequence
  Protein classification predicting sequence
DGSPTYNFCVVVDDWDM

SEQ ID NO: 71415 - protein, 8 aa, Artificial sequence
  Protein classification predicting sequence
NYLVRLGW

SEQ ID NO: 71416 - protein, 7 aa, Artificial sequence
  Protein classification predicting sequence
EEMIKLF

SEQ ID NO: 71417 - protein, 6 aa, Artificial sequence
  Protein classification predicting sequence
AAKKHL

SEQ ID NO: 71418 - protein, 6 aa, Artificial sequence
  Protein classification predicting sequence
HISNTP

SEQ ID NO: 71419 - protein, 6 aa, Artificial sequence
  Protein classification predicting sequence
THIIRG

SEQ ID NO: 71420 - protein, 8 aa, Artificial sequence
  Protein classification predicting sequence
GKANPKAV

SEQ ID NO: 71421 - protein, 6 aa, Artificial sequence
  Protein classification predicting sequence
THVLRG

SEQ ID NO: 71422 - protein, 6 aa, Artificial sequence
  Protein classification predicting sequence
GKFILR

SEQ ID NO: 71423 - protein, 5 aa, Artificial sequence
  Protein classification predicting sequence
GWEPP

SEQ ID NO: 71424 - protein, 8 aa, Artificial sequence
  Protein classification predicting sequence
PLHPDHPE

SEQ ID NO: 71425 - protein, 7 aa, Artificial sequence
  Protein classification predicting sequence
RIEDTDA

SEQ ID NO: 71426 - protein, 8 aa, Artificial sequence
  Protein classification predicting sequence
PLYTLVNP

SEQ ID NO: 71427 - protein, 5 aa, Artificial sequence
  Protein classification predicting sequence
DDHDM

SEQ ID NO: 71428 - protein, 9 aa, Artificial sequence
  Protein classification predicting sequence
APSPTGYLH

SEQ ID NO: 71429 - protein, 6 aa, Artificial sequence
  Protein classification predicting sequence
SQFDNL

SEQ ID NO: 71430 - protein, 8 aa, Artificial sequence
  Protein classification predicting sequence
RYAPSPTG

SEQ ID NO: 71431 - protein, 19 aa, Artificial sequence
  Protein classification predicting sequence
RDSEESYLALLDALRWLGL

SEQ ID NO: 71432 - protein, 19 aa, Artificial sequence
  Protein classification predicting sequence
WDEGPEVGGPYGPYRQSQR

SEQ ID NO: 71433 - protein, 7 aa, Artificial sequence
  Protein classification predicting sequence
PYRQSQR

SEQ ID NO: 71434 - protein, 15 aa, Artificial sequence
  Protein classification predicting sequence
AAGRNPKLGYDNFDR

SEQ ID NO: 71435 - protein, 13 aa, Artificial sequence
  Protein classification predicting sequence
MKITHVLRGEDLL

SEQ ID NO: 71436 - protein, 12 aa, Artificial sequence
  Protein classification predicting sequence
VLGEGTKKLSKR

SEQ ID NO: 71437 - protein, 8 aa, Artificial sequence
  Protein classification predicting sequence
NYLALLGW

SEQ ID NO: 71438 - protein, 11 aa, Artificial sequence
  Protein classification predicting sequence
RNVAGGEESQL

SEQ ID NO: 71439 - protein, 6 aa, Artificial sequence
  Protein classification predicting sequence
AKHYNG

SEQ ID NO: 71440 - protein, 6 aa, Artificial sequence
  Protein classification predicting sequence
LLGWSP

SEQ ID NO: 71441 - protein, 7 aa, Artificial sequence
  Protein classification predicting sequence
SPPLFES

SEQ ID NO: 71442 - protein, 7 aa, Artificial sequence
  Protein classification predicting sequence
GKKLSKR

SEQ ID NO: 71443 - protein, 6 aa, Artificial sequence
  Protein classification predicting sequence
NAHYIK

SEQ ID NO: 71444 - protein, 9 aa, Artificial sequence
  Protein classification predicting sequence
FIIRIEDTD

SEQ ID NO: 71445 - protein, 13 aa, Artificial sequence
  Protein classification predicting sequence
FIIRIEDTDVKRN

SEQ ID NO: 71446 - protein, 12 aa, Artificial sequence
  Protein classification predicting sequence
ALRRRGILPEAI

SEQ ID NO: 71447 - protein, 6 aa, Artificial sequence
  Protein classification predicting sequence
LDDLII

SEQ ID NO: 71448 - protein, 7 aa, Artificial sequence
  Protein classification predicting sequence
QINILKA

SEQ ID NO: 71449 - protein, 14 aa, Artificial sequence
  Protein classification predicting sequence
SVQAILDGMAWLGL

SEQ ID NO: 71450 - protein, 7 aa, Artificial sequence
  Protein classification predicting sequence
GMAWLGL

SEQ ID NO: 71451 - protein, 6 aa, Artificial sequence
  Protein classification predicting sequence
KPRYDG

SEQ ID NO: 71452 - protein, 12 aa, Artificial sequence
  Protein classification predicting sequence
NYLARLGWSHGD

SEQ ID NO: 71453 - protein, 8 aa, Artificial sequence
  Protein classification predicting sequence
RLGWSHGD

SEQ ID NO: 71454 - protein, 9 aa, Artificial sequence
  Protein classification predicting sequence
REQLVEWFD

SEQ ID NO: 71455 - protein, 10 aa, Artificial sequence
  Protein classification predicting sequence
DAVLELLGKE

SEQ ID NO: 71456 - protein, 7 aa, Artificial sequence
  Protein classification predicting sequence
TPEAIEA

SEQ ID NO: 71457 - protein, 7 aa, Artificial sequence
  Protein classification predicting sequence
EMVAAFD

SEQ ID NO: 71458 - protein, 8 aa, Artificial sequence
  Protein classification predicting sequence
ESLELLGR

SEQ ID NO: 71459 - protein, 14 aa, Artificial sequence
  Protein classification predicting sequence
LHIGNARTALFNYL

SEQ ID NO: 71460 - protein, 14 aa, Artificial sequence
  Protein classification predicting sequence
GGEESQLKYLKWLG

SEQ ID NO: 71461 - protein, 7 aa, Artificial sequence
  Protein classification predicting sequence
ELEAERE

SEQ ID NO: 71462 - protein, 16 aa, Artificial sequence
  Protein classification predicting sequence
QFEAEGRQPSIRFRVP

SEQ ID NO: 71463 - protein, 9 aa, Artificial sequence
  Protein classification predicting sequence
VRYAPSPTG

SEQ ID NO: 71464 - protein, 16 aa, Artificial sequence
  Protein classification predicting sequence
LHIGNARTALFNYLFA

SEQ ID NO: 71465 - protein, 11 aa, Artificial sequence
  Protein classification predicting sequence
ARTALFNYLFA

SEQ ID NO: 71466 - protein, 5 aa, Artificial sequence
  Protein classification predicting sequence
MQISH

SEQ ID NO: 71467 - protein, 6 aa, Artificial sequence
  Protein classification predicting sequence
QFIEQY

SEQ ID NO: 71468 - protein, 8 aa, Artificial sequence
  Protein classification predicting sequence
RIAPSPTG

SEQ ID NO: 71469 - protein, 10 aa, Artificial sequence
  Protein classification predicting sequence
NFLTLMGYSM

SEQ ID NO: 71470 - protein, 9 aa, Artificial sequence
  Protein classification predicting sequence
KPRYDRHCL

SEQ ID NO: 71471 - protein, 6 aa, Artificial sequence
  Protein classification predicting sequence
RNGPQL

SEQ ID NO: 71472 - protein, 7 aa, Artificial sequence
  Protein classification predicting sequence
SCRYFYE

SEQ ID NO: 71473 - protein, 8 aa, Artificial sequence
  Protein classification predicting sequence
ENVHHAIQ

SEQ ID NO: 71474 - protein, 7 aa, Artificial sequence
  Protein classification predicting sequence
TGAGQSP

SEQ ID NO: 71475 - protein, 21 aa, Artificial sequence
  Protein classification predicting sequence
ELDDLIIRRTDGSPTYNFCVV

SEQ ID NO: 71476 - protein, 23 aa, Artificial sequence
  Protein classification predicting sequence
ISKSASAFNTDKLLWLNNHYIKT

SEQ ID NO: 71477 - protein, 9 aa, Artificial sequence
  Protein classification predicting sequence
LVGERCNTL

SEQ ID NO: 71478 - protein, 8 aa, Artificial sequence
  Protein classification predicting sequence
GQSPSVDA

SEQ ID NO: 71479 - protein, 9 aa, Artificial sequence
  Protein classification predicting sequence
KTDLNHPNP

SEQ ID NO: 71480 - protein, 7 aa, Artificial sequence
  Protein classification predicting sequence
VAIDDHY

SEQ ID NO: 71481 - protein, 6 aa, Artificial sequence
  Protein classification predicting sequence
THVIRG

SEQ ID NO: 71482 - protein, 7 aa, Artificial sequence
  Protein classification predicting sequence
KAGAKFD

SEQ ID NO: 71483 - protein, 7 aa, Artificial sequence
  Protein classification predicting sequence
VSPPLFE

SEQ ID NO: 71484 - protein, 9 aa, Artificial sequence
  Protein classification predicting sequence
HVIRGEDHI

SEQ ID NO: 71485 - protein, 15 aa, Artificial sequence
  Protein classification predicting sequence
HVIRGEDHIANTAKQ

SEQ ID NO: 71486 - protein, 6 aa, Artificial sequence
  Protein classification predicting sequence
KLQWLN

SEQ ID NO: 71487 - protein, 9 aa, Artificial sequence
  Protein classification predicting sequence
APRYDNRHR

SEQ ID NO: 71488 - protein, 7 aa, Artificial sequence
  Protein classification predicting sequence
NTAKQIL

SEQ ID NO: 71489 - protein, 8 aa, Artificial sequence
  Protein classification predicting sequence
VNKAGAKF

SEQ ID NO: 71490 - protein, 6 aa, Artificial sequence
  Protein classification predicting sequence
DGLPTY

SEQ ID NO: 71491 - protein, 6 aa, Artificial sequence
  Protein classification predicting sequence
GETPRY

SEQ ID NO: 71492 - protein, 10 aa, Artificial sequence
  Protein classification predicting sequence
HHGRLSIEGV

SEQ ID NO: 71493 - protein, 26 aa, Artificial sequence
  Protein classification predicting sequence
GKVVTRFAPNPDGAFHLGNARAAILS

SEQ ID NO: 71494 - protein, 11 aa, Artificial sequence
  Protein classification predicting sequence
PTYNFCVVVDD

SEQ ID NO: 71495 - protein, 8 aa, Artificial sequence
  Protein classification predicting sequence
WLNNHYIK

SEQ ID NO: 71496 - protein, 8 aa, Artificial sequence
  Protein classification predicting sequence
ELAAQHLT

SEQ ID NO: 71497 - protein, 7 aa, Artificial sequence
  Protein classification predicting sequence
EGPDIGG

SEQ ID NO: 71498 - protein, 5 aa, Artificial sequence
  Protein classification predicting sequence
GPYFQ

SEQ ID NO: 71499 - protein, 7 aa, Artificial sequence
  Protein classification predicting sequence
RIEDTDR

SEQ ID NO: 71500 - protein, 7 aa, Artificial sequence
  Protein classification predicting sequence
WLGIDWD

SEQ ID NO: 71501 - protein, 30 aa, Artificial sequence
  Protein classification predicting sequence
RYNAVIDEMLEAGTAYKCYCSKERLEQLRE

SEQ ID NO: 71502 - protein, 14 aa, Artificial sequence
  Protein classification predicting sequence
GTAYKCYCSKERLE

SEQ ID NO: 71503 - protein, 13 aa, Artificial sequence
  Protein classification predicting sequence
DDEPCVVRFANPQ

SEQ ID NO: 71504 - protein, 9 aa, Artificial sequence
  Protein classification predicting sequence
NYLVRLGWS

SEQ ID NO: 71505 - protein, 6 aa, Artificial sequence
  Protein classification predicting sequence
GDQEIF

SEQ ID NO: 71506 - protein, 26 aa, Artificial sequence
  Protein classification predicting sequence
LVKLLGERCKTLKEMAQSCRYFYEDF

SEQ ID NO: 71507 - protein, 10 aa, Artificial sequence
  Protein classification predicting sequence
QSCRYFYEDF

SEQ ID NO: 71508 - protein, 32 aa, Artificial sequence
  Protein classification predicting sequence
HGGEFVLRIEDTDLERSTPEAIEAIMDGMNWL

SEQ ID NO: 71509 - protein, 26 aa, Artificial sequence
  Protein classification predicting sequence
PEYVATHLQWHIEQENIDTRNGPQLA

SEQ ID NO: 71510 - protein, 59 aa, Artificial sequence
  Protein classification predicting sequence
AENVHHAIQATADELEVGMGKVGMPLRVAVTGAGQSPALDVTVHAIGKTRSIERINKAL

SEQ ID NO: 71511 - protein, 20 aa, Artificial sequence
  Protein classification predicting sequence
QVPELMTHLFSKLEALEPFE

SEQ ID NO: 71512 - protein, 8 aa, Artificial sequence
  Protein classification predicting sequence
KRNLEDGE

SEQ ID NO: 71513 - protein, 20 aa, Artificial sequence
  Protein classification predicting sequence
SQFDNLKWLGLDWDESVDKD

SEQ ID NO: 71514 - protein, 8 aa, Artificial sequence
  Protein classification predicting sequence
EDKAYKCY

SEQ ID NO: 71515 - protein, 7 aa, Artificial sequence
  Protein classification predicting sequence
TFNDMVK

SEQ ID NO: 71516 - protein, 16 aa, Artificial sequence
  Protein classification predicting sequence
DDHYMQISDVIRGDDH

SEQ ID NO: 71517 - protein, 7 aa, Artificial sequence
  Protein classification predicting sequence
KDTETVF

SEQ ID NO: 71518 - protein, 14 aa, Artificial sequence
  Protein classification predicting sequence
LALPHLIKANLIPE

SEQ ID NO: 71519 - protein, 27 aa, Artificial sequence
  Protein classification predicting sequence
RIRVRYAPSPTGYLHIGNARTALFNYL

SEQ ID NO: 71520 - protein, 44 aa, Artificial sequence
  Protein classification predicting sequence
EDKAYKCYMTEEELEAEREAQIARGEMPRYGGQHAHLTEEQRQQ

SEQ ID NO: 71521 - protein, 45 aa, Artificial sequence
  Protein classification predicting sequence
PRFGHMSLIVNEERKKLSKRDGQILQFIEQYRDLGYLPEALFNFI

SEQ ID NO: 71522 - protein, 32 aa, Artificial sequence
  Protein classification predicting sequence
LLGWSPEGEEEIFSKEEFIKIFDEKRLSKSPA

SEQ ID NO: 71523 - protein, 27 aa, Artificial sequence
  Protein classification predicting sequence
WGRKLIALYQKEMSYAGEIVPLSEMFF

SEQ ID NO: 71524 - protein, 41 aa, Artificial sequence
  Protein classification predicting sequence
IKEVQKETGIKGKQLFMPIRVAVTGQMHGPELPNTIEVLGK

SEQ ID NO: 71525 - protein, 11 aa, Artificial sequence
  Protein classification predicting sequence
IRVRYAPSPTG

SEQ ID NO: 71526 - protein, 7 aa, Artificial sequence
  Protein classification predicting sequence
IRIEDTD

SEQ ID NO: 71527 - protein, 29 aa, Artificial sequence
  Protein classification predicting sequence
YIDQLLAEGKAYKSYVTEEELAAERERQE

SEQ ID NO: 71528 - protein, 15 aa, Artificial sequence
  Protein classification predicting sequence
AGETPRYINEFIGMS

SEQ ID NO: 71529 - protein, 11 aa, Artificial sequence
  Protein classification predicting sequence
DMVKGDIEFEG

SEQ ID NO: 71530 - protein, 11 aa, Artificial sequence
  Protein classification predicting sequence
DGYPTYNFAVV

SEQ ID NO: 71531 - protein, 8 aa, Artificial sequence
  Protein classification predicting sequence
PTYNFAVV

SEQ ID NO: 71532 - protein, 17 aa, Artificial sequence
  Protein classification predicting sequence
EAVFNFIALLGWNPGGE

SEQ ID NO: 71533 - protein, 27 aa, Artificial sequence
  Protein classification predicting sequence
EAVFNFIALLGWNPGGEEEIFSREQLI

SEQ ID NO: 71534 - protein, 7 aa, Artificial sequence
  Protein classification predicting sequence
GEEEIFS

SEQ ID NO: 71535 - protein, 5 aa, Artificial sequence
  Protein classification predicting sequence
DWMSN

SEQ ID NO: 71536 - protein, 12 aa, Artificial sequence
  Protein classification predicting sequence
KAEKLVELYKPQ

SEQ ID NO: 71537 - protein, 9 aa, Artificial sequence
  Protein classification predicting sequence
PQLKSADEI

SEQ ID NO: 71538 - protein, 14 aa, Artificial sequence
  Protein classification predicting sequence
PHVGLVRTALFNWA

SEQ ID NO: 71539 - protein, 11 aa, Artificial sequence
  Protein classification predicting sequence
EAINADHIRLL

SEQ ID NO: 71540 - protein, 22 aa, Artificial sequence
  Protein classification predicting sequence
WLGMDWDESPETHENYRQSERL

SEQ ID NO: 71541 - protein, 10 aa, Artificial sequence
  Protein classification predicting sequence
AAGIVPTVRL

SEQ ID NO: 71542 - protein, 18 aa, Artificial sequence
  Protein classification predicting sequence
LFDENRLSKSPAAFDQKK

SEQ ID NO: 71543 - protein, 18 aa, Artificial sequence
  Protein classification predicting sequence
VLQAFKAKLEAMSDEDFK

SEQ ID NO: 71544 - protein, 7 aa, Artificial sequence
  Protein classification predicting sequence
MHGPELP

SEQ ID NO: 71545 - protein, 15 aa, Artificial sequence
  Protein classification predicting sequence
PTVRLAVNESGIYKW

SEQ ID NO: 71546 - protein, 10 aa, Artificial sequence
  Protein classification predicting sequence
AGETPRYINE

SEQ ID NO: 71547 - protein, 7 aa, Artificial sequence
  Protein classification predicting sequence
EIFSREE

SEQ ID NO: 71548 - protein, 21 aa, Artificial sequence
  Protein classification predicting sequence
DEIIPLTDLFFSDFPELTEAE

SEQ ID NO: 71549 - protein, 9 aa, Artificial sequence
  Protein classification predicting sequence
AFKAKLEAM

SEQ ID NO: 71550 - protein, 7 aa, Artificial sequence
  Protein classification predicting sequence
FGHMTLI

SEQ ID NO: 71551 - protein, 27 aa, Artificial sequence
  Protein classification predicting sequence
NSETGKKLSKRDTNTLQFIEDYRKKGY

SEQ ID NO: 71552 - protein, 11 aa, Artificial sequence
  Protein classification predicting sequence
AEKEVMAGETV

SEQ ID NO: 71553 - protein, 34 aa, Artificial sequence
  Protein classification predicting sequence
QIKAVQKETGIKGKNLFMPIRIAVSGEMHGPELP

SEQ ID NO: 71554 - protein, 6 aa, Artificial sequence
  Protein classification predicting sequence
VTRFAP

SEQ ID NO: 71555 - protein, 9 aa, Artificial sequence
  Protein classification predicting sequence
LGVTHIFRG

SEQ ID NO: 71556 - protein, 17 aa, Artificial sequence
  Protein classification predicting sequence
GKFILRFDDTDPKVKRP

SEQ ID NO: 71557 - protein, 11 aa, Artificial sequence
  Protein classification predicting sequence
VRVRLAPSPTG

SEQ ID NO: 71558 - protein, 7 aa, Artificial sequence
  Protein classification predicting sequence
LRAALTG

SEQ ID NO: 71559 - protein, 14 aa, Artificial sequence
  Protein classification predicting sequence
LHIGTARTAVFNWL

SEQ ID NO: 71560 - protein, 8 aa, Artificial sequence
  Protein classification predicting sequence
ARHTGGTF

SEQ ID NO: 71561 - protein, 9 aa, Artificial sequence
  Protein classification predicting sequence
FAHTPLILN

SEQ ID NO: 71562 - protein, 13 aa, Artificial sequence
  Protein classification predicting sequence
YRQSERLPLYQKY

SEQ ID NO: 71563 - protein, 8 aa, Artificial sequence
  Protein classification predicting sequence
RTALFNYL

SEQ ID NO: 71564 - protein, 10 aa, Artificial sequence
  Protein classification predicting sequence
RVRYAPSPTG

SEQ ID NO: 71565 - protein, 7 aa, Artificial sequence
  Protein classification predicting sequence
LFTREQL

SEQ ID NO: 71566 - protein, 6 aa, Artificial sequence
  Protein classification predicting sequence
MPIRVA

SEQ ID NO: 71567 - protein, 7 aa, Artificial sequence
  Protein classification predicting sequence
RTALFNW

SEQ ID NO: 71568 - protein, 6 aa, Artificial sequence
  Protein classification predicting sequence
DWDEGP

SEQ ID NO: 71569 - protein, 9 aa, Artificial sequence
  Protein classification predicting sequence
YNFAVVIDD

SEQ ID NO: 71570 - protein, 12 aa, Artificial sequence
  Protein classification predicting sequence
IDQLLAEGKAYK

SEQ ID NO: 71571 - protein, 9 aa, Artificial sequence
  Protein classification predicting sequence
DQIRGRIEI

SEQ ID NO: 71572 - protein, 16 aa, Artificial sequence
  Protein classification predicting sequence
KLSKRHGAVSVMQYRD

SEQ ID NO: 71573 - protein, 7 aa, Artificial sequence
  Protein classification predicting sequence
ARIKMAL

SEQ ID NO: 71574 - protein, 29 aa, Artificial sequence
  Protein classification predicting sequence
FAHCAMILGDDGAKLSKRHGAVSVMQYRD

SEQ ID NO: 71575 - protein, 30 aa, Artificial sequence
  Protein classification predicting sequence
ALNNYLVRLGWSHGDQEIFSQEEMINLFSL

SEQ ID NO: 71576 - protein, 16 aa, Artificial sequence
  Protein classification predicting sequence
SKSASAFNTDKLLWLN

SEQ ID NO: 71577 - protein, 7 aa, Artificial sequence
  Protein classification predicting sequence
AAKKHLR

SEQ ID NO: 71578 - protein, 11 aa, Artificial sequence
  Protein classification predicting sequence
LLAEDKAYKCY

SEQ ID NO: 71579 - protein, 15 aa, Artificial sequence
  Protein classification predicting sequence
RGEDHINNTPRQINI

SEQ ID NO: 71580 - protein, 5 aa, Artificial sequence
  Protein classification predicting sequence
MGYLP

SEQ ID NO: 71581 - protein, 7 aa, Artificial sequence
  Protein classification predicting sequence
RYFYEDF

SEQ ID NO: 71582 - protein, 11 aa, Artificial sequence
  Protein classification predicting sequence
FDADAAKKHLR

SEQ ID NO: 71583 - protein, 6 aa, Artificial sequence
  Protein classification predicting sequence
LGLNWD

SEQ ID NO: 71584 - protein, 16 aa, Artificial sequence
  Protein classification predicting sequence
LPYRDDPNRVIRFKNP

SEQ ID NO: 71585 - protein, 7 aa, Artificial sequence
  Protein classification predicting sequence
ALGAPVP

SEQ ID NO: 71586 - protein, 19 aa, Artificial sequence
  Protein classification predicting sequence
ITEVIRGDDHINNTPRQIN

SEQ ID NO: 71587 - protein, 6 aa, Artificial sequence
  Protein classification predicting sequence
VMQYRD

SEQ ID NO: 71588 - protein, 6 aa, Artificial sequence
  Protein classification predicting sequence
DAGYLP

SEQ ID NO: 71589 - protein, 28 aa, Artificial sequence
  Protein classification predicting sequence
DVNSKAARLDMAKLGWVNQHYLKTDDPA

SEQ ID NO: 71590 - protein, 22 aa, Artificial sequence
  Protein classification predicting sequence
GMGKVAQPLRVAITGTQVSPDI

SEQ ID NO: 71591 - protein, 16 aa, Artificial sequence
  Protein classification predicting sequence
QTKRFDRYNAVIDQML

SEQ ID NO: 71592 - protein, 11 aa, Artificial sequence
  Protein classification predicting sequence
CSKERLEALRE

SEQ ID NO: 71593 - protein, 6 aa, Artificial sequence
  Protein classification predicting sequence
ARQPLE

SEQ ID NO: 71594 - protein, 31 aa, Artificial sequence
  Protein classification predicting sequence
IRGPIEFSNQELDDLIIRRTDGSPTYNFCVV

SEQ ID NO: 71595 - protein, 30 aa, Artificial sequence
  Protein classification predicting sequence
DDWDMEITHVIRGEDHINNTPRQINILKAL

SEQ ID NO: 71596 - protein, 6 aa, Artificial sequence
  Protein classification predicting sequence
VATGPE

SEQ ID NO: 71597 - protein, 6 aa, Artificial sequence
  Protein classification predicting sequence
PGRVYR

SEQ ID NO: 71598 - protein, 5 aa, Artificial sequence
  Protein classification predicting sequence
PMFHQ

SEQ ID NO: 71599 - protein, 7 aa, Artificial sequence
  Protein classification predicting sequence
GFAFGLG

SEQ ID NO: 71600 - protein, 10 aa, Artificial sequence
  Protein classification predicting sequence
GFAFGLGVER

SEQ ID NO: 71601 - protein, 7 aa, Artificial sequence
  Protein classification predicting sequence
EFHQLDG

SEQ ID NO: 71602 - protein, 8 aa, Artificial sequence
  Protein classification predicting sequence
WVLEEFCK

SEQ ID NO: 71603 - protein, 8 aa, Artificial sequence
  Protein classification predicting sequence
YYNFEALN

SEQ ID NO: 71604 - protein, 7 aa, Artificial sequence
  Protein classification predicting sequence
LAIDEGL

SEQ ID NO: 71605 - protein, 7 aa, Artificial sequence
  Protein classification predicting sequence
GCGMVDP

SEQ ID NO: 71606 - protein, 7 aa, Artificial sequence
  Protein classification predicting sequence
GVERFAM

SEQ ID NO: 71607 - protein, 6 aa, Artificial sequence
  Protein classification predicting sequence
VQIRTM

SEQ ID NO: 71608 - protein, 6 aa, Artificial sequence
  Protein classification predicting sequence
GCRVCK

SEQ ID NO: 71609 - protein, 6 aa, Artificial sequence
  Protein classification predicting sequence
TGWLEV

SEQ ID NO: 71610 - protein, 7 aa, Artificial sequence
  Protein classification predicting sequence
GCGMVHP

SEQ ID NO: 71611 - protein, 13 aa, Artificial sequence
  Protein classification predicting sequence
NLPKDHPARDMQD

SEQ ID NO: 71612 - protein, 9 aa, Artificial sequence
  Protein classification predicting sequence
DDATHSHQF

SEQ ID NO: 71613 - protein, 5 aa, Artificial sequence
  Protein classification predicting sequence
FHQVE

SEQ ID NO: 71614 - protein, 11 aa, Artificial sequence
  Protein classification predicting sequence
RPSYFPFTEPS

SEQ ID NO: 71615 - protein, 6 aa, Artificial sequence
  Protein classification predicting sequence
EMDISC

SEQ ID NO: 71616 - protein, 6 aa, Artificial sequence
  Protein classification predicting sequence
CKHTGW

SEQ ID NO: 71617 - protein, 9 aa, Artificial sequence
  Protein classification predicting sequence
RVKYLGKKG

SEQ ID NO: 71618 - protein, 8 aa, Artificial sequence
  Protein classification predicting sequence
VKYLGKKG

SEQ ID NO: 71619 - protein, 9 aa, Artificial sequence
  Protein classification predicting sequence
DYYNFEALN

SEQ ID NO: 71620 - protein, 12 aa, Artificial sequence
  Protein classification predicting sequence
KGPIKIICPGKV

SEQ ID NO: 71621 - protein, 6 aa, Artificial sequence
  Protein classification predicting sequence
MSDLKG

SEQ ID NO: 71622 - protein, 6 aa, Artificial sequence
  Protein classification predicting sequence
IRLRPS

SEQ ID NO: 71623 - protein, 7 aa, Artificial sequence
  Protein classification predicting sequence
VCKQTGW

SEQ ID NO: 71624 - protein, 5 aa, Artificial sequence
  Protein classification predicting sequence
GMVHP

SEQ ID NO: 71625 - protein, 10 aa, Artificial sequence
  Protein classification predicting sequence
MGKLSAEERP

SEQ ID NO: 71626 - protein, 6 aa, Artificial sequence
  Protein classification predicting sequence
EGPEVE

SEQ ID NO: 71627 - protein, 8 aa, Artificial sequence
  Protein classification predicting sequence
HPARDMQD

SEQ ID NO: 71628 - protein, 10 aa, Artificial sequence
  Protein classification predicting sequence
ICPGKVYRRD

SEQ ID NO: 71629 - protein, 9 aa, Artificial sequence
  Protein classification predicting sequence
FPFTEPSVE

SEQ ID NO: 71630 - protein, 6 aa, Artificial sequence
  Protein classification predicting sequence
CFKCGG

SEQ ID NO: 71631 - protein, 8 aa, Artificial sequence
  Protein classification predicting sequence
TGWIEILG

SEQ ID NO: 71632 - protein, 11 aa, Artificial sequence
  Protein classification predicting sequence
KEYQGFAFGMG

SEQ ID NO: 71633 - protein, 6 aa, Artificial sequence
  Protein classification predicting sequence
VQYLGK

SEQ ID NO: 71634 - protein, 5 aa, Artificial sequence
  Protein classification predicting sequence
FHQIE

SEQ ID NO: 71635 - protein, 6 aa, Artificial sequence
  Protein classification predicting sequence
CKGKGC

SEQ ID NO: 71636 - protein, 6 aa, Artificial sequence
  Protein classification predicting sequence
RFLRQF

SEQ ID NO: 71637 - protein, 6 aa, Artificial sequence
  Protein classification predicting sequence
PGRVFR

SEQ ID NO: 71638 - protein, 7 aa, Artificial sequence
  Protein classification predicting sequence
VEGDVRF

SEQ ID NO: 71639 - protein, 7 aa, Artificial sequence
  Protein classification predicting sequence
HTPMFHQ

SEQ ID NO: 71640 - protein, 15 aa, Artificial sequence
  Protein classification predicting sequence
RFRASYFPFTEPSAE

SEQ ID NO: 71641 - protein, 7 aa, Artificial sequence
  Protein classification predicting sequence
FPFTEPS

SEQ ID NO: 71642 - protein, 6 aa, Artificial sequence
  Protein classification predicting sequence
MLRYGV

SEQ ID NO: 71643 - protein, 13 aa, Artificial sequence
  Protein classification predicting sequence
ATHSPMFHQVEGL

SEQ ID NO: 71644 - protein, 8 aa, Artificial sequence
  Protein classification predicting sequence
ETIDVTLP

SEQ ID NO: 71645 - protein, 18 aa, Artificial sequence
  Protein classification predicting sequence
LNFPEGHPAREMHDTFFF

SEQ ID NO: 71646 - protein, 6 aa, Artificial sequence
  Protein classification predicting sequence
PGRTYR

SEQ ID NO: 71647 - protein, 9 aa, Artificial sequence
  Protein classification predicting sequence
EFCKAFFEV

SEQ ID NO: 71648 - protein, 6 aa, Artificial sequence
  Protein classification predicting sequence
EVDIQC

SEQ ID NO: 71649 - protein, 7 aa, Artificial sequence
  Protein classification predicting sequence
EGLVVDK

SEQ ID NO: 71650 - protein, 8 aa, Artificial sequence
  Protein classification predicting sequence
HYGFRPLD

SEQ ID NO: 71651 - protein, 6 aa, Artificial sequence
  Protein classification predicting sequence
PGKVYR

SEQ ID NO: 71652 - protein, 7 aa, Artificial sequence
  Protein classification predicting sequence
VYRNDYD

SEQ ID NO: 71653 - protein, 8 aa, Artificial sequence
  Protein classification predicting sequence
IDVSLPGR

SEQ ID NO: 71654 - protein, 8 aa, Artificial sequence
  Protein classification predicting sequence
THTPMFHQ

SEQ ID NO: 71655 - protein, 6 aa, Artificial sequence
  Protein classification predicting sequence
FLRNFF

SEQ ID NO: 71656 - protein, 8 aa, Artificial sequence
  Protein classification predicting sequence
RPSYFPFT

SEQ ID NO: 71657 - protein, 14 aa, Artificial sequence
  Protein classification predicting sequence
IFRSIGFDVADGPE

SEQ ID NO: 71658 - protein, 10 aa, Artificial sequence
  Protein classification predicting sequence
DSDATHSPMF

SEQ ID NO: 71659 - protein, 9 aa, Artificial sequence
  Protein classification predicting sequence
FPFTEPSAE

SEQ ID NO: 71660 - protein, 14 aa, Artificial sequence
  Protein classification predicting sequence
FPFTEPSAEIDMMF

SEQ ID NO: 71661 - protein, 9 aa, Artificial sequence
  Protein classification predicting sequence
FFENDLRFL

SEQ ID NO: 71662 - protein, 6 aa, Artificial sequence
  Protein classification predicting sequence
NFEALN

SEQ ID NO: 71663 - protein, 11 aa, Artificial sequence
  Protein classification predicting sequence
SFFPFTEPSAE

SEQ ID NO: 71664 - protein, 12 aa, Artificial sequence
  Protein classification predicting sequence
HPAREMHDTFFF

SEQ ID NO: 71665 - protein, 10 aa, Artificial sequence
  Protein classification predicting sequence
DATHTPVFHQ

SEQ ID NO: 71666 - protein, 6 aa, Artificial sequence
  Protein classification predicting sequence
EYQGFA

SEQ ID NO: 71667 - protein, 11 aa, Artificial sequence
  Protein classification predicting sequence
TVLRTHTSNVQ

SEQ ID NO: 71668 - protein, 6 aa, Artificial sequence
  Protein classification predicting sequence
EVDVSC

SEQ ID NO: 71669 - protein, 12 aa, Artificial sequence
  Protein classification predicting sequence
YSGYALGMGIER

SEQ ID NO: 71670 - protein, 7 aa, Artificial sequence
  Protein classification predicting sequence
DPEIYSG

SEQ ID NO: 71671 - protein, 10 aa, Artificial sequence
  Protein classification predicting sequence
HPARDMQDTF

SEQ ID NO: 71672 - protein, 9 aa, Artificial sequence
  Protein classification predicting sequence
PPVRIVAPG

SEQ ID NO: 71673 - protein, 6 aa, Artificial sequence
  Protein classification predicting sequence
AMLRYG

SEQ ID NO: 71674 - protein, 9 aa, Artificial sequence
  Protein classification predicting sequence
YLGKKGELT

SEQ ID NO: 71675 - protein, 6 aa, Artificial sequence
  Protein classification predicting sequence
DATHSP

SEQ ID NO: 71676 - protein, 7 aa, Artificial sequence
  Protein classification predicting sequence
EGLVIDK

SEQ ID NO: 71677 - protein, 7 aa, Artificial sequence
  Protein classification predicting sequence
GWIEILG

SEQ ID NO: 71678 - protein, 7 aa, Artificial sequence
  Protein classification predicting sequence
YSGFAFG

SEQ ID NO: 71679 - protein, 7 aa, Artificial sequence
  Protein classification predicting sequence
FHQVEGL

SEQ ID NO: 71680 - protein, 9 aa, Artificial sequence
  Protein classification predicting sequence
LRTHTSPVQ

SEQ ID NO: 71681 - protein, 7 aa, Artificial sequence
  Protein classification predicting sequence
YTGFAFG

SEQ ID NO: 71682 - protein, 16 aa, Artificial sequence
  Protein classification predicting sequence
KWLEVLGCGMVHPNVL

SEQ ID NO: 71683 - protein, 9 aa, Artificial sequence
  Protein classification predicting sequence
YGIPDIRYF

SEQ ID NO: 71684 - protein, 6 aa, Artificial sequence
  Protein classification predicting sequence
HPARDM

SEQ ID NO: 71685 - protein, 7 aa, Artificial sequence
  Protein classification predicting sequence
LLRTHTS

SEQ ID NO: 71686 - protein, 7 aa, Artificial sequence
  Protein classification predicting sequence
PPLRMIA

SEQ ID NO: 71687 - protein, 7 aa, Artificial sequence
  Protein classification predicting sequence
VCKKTGW

SEQ ID NO: 71688 - protein, 6 aa, Artificial sequence
  Protein classification predicting sequence
RTHTSP

SEQ ID NO: 71689 - protein, 8 aa, Artificial sequence
  Protein classification predicting sequence
PGKVYRRD

SEQ ID NO: 71690 - protein, 11 aa, Artificial sequence
  Protein classification predicting sequence
TGWVEILGCGM

SEQ ID NO: 71691 - protein, 14 aa, Artificial sequence
  Protein classification predicting sequence
LGKKGPITEVLRGM

SEQ ID NO: 71692 - protein, 23 aa, Artificial sequence
  Protein classification predicting sequence
YNFERMNLPKDHPARDMQDTFYI

SEQ ID NO: 71693 - protein, 17 aa, Artificial sequence
  Protein classification predicting sequence
NLPKDHPARDMQDTFYI

SEQ ID NO: 71694 - protein, 10 aa, Artificial sequence
  Protein classification predicting sequence
TSPVQARTME

SEQ ID NO: 71695 - protein, 7 aa, Artificial sequence
  Protein classification predicting sequence
QIEGLVV

SEQ ID NO: 71696 - protein, 14 aa, Artificial sequence
  Protein classification predicting sequence
TGWIEILGAGMVHP

SEQ ID NO: 71697 - protein, 7 aa, Artificial sequence
  Protein classification predicting sequence
HLAELVA

SEQ ID NO: 71698 - protein, 11 aa, Artificial sequence
  Protein classification predicting sequence
EERPAAGAVIN

SEQ ID NO: 71699 - protein, 17 aa, Artificial sequence
  Protein classification predicting sequence
IENGGLHPVTRTIDRIE

SEQ ID NO: 71700 - protein, 7 aa, Artificial sequence
  Protein classification predicting sequence
LLRTQTS

SEQ ID NO: 71701 - protein, 9 aa, Artificial sequence
  Protein classification predicting sequence
TSGVQIRTM

SEQ ID NO: 71702 - protein, 23 aa, Artificial sequence
  Protein classification predicting sequence
ISFTNLKGTLHDFLRNFFEEDLQ

SEQ ID NO: 71703 - protein, 24 aa, Artificial sequence
  Protein classification predicting sequence
YSGFAFGMGMERLTMLRYGVTDLR

SEQ ID NO: 71704 - protein, 6 aa, Artificial sequence
  Protein classification predicting sequence
DYYNFE

SEQ ID NO: 71705 - protein, 6 aa, Artificial sequence
  Protein classification predicting sequence
LRTHTS

SEQ ID NO: 71706 - protein, 7 aa, Artificial sequence
  Protein classification predicting sequence
LPPEERP

SEQ ID NO: 71707 - protein, 8 aa, Artificial sequence
  Protein classification predicting sequence
NEVREAIQ

SEQ ID NO: 71708 - protein, 13 aa, Artificial sequence
  Protein classification predicting sequence
LAAEAIDVTLPGR

SEQ ID NO: 71709 - protein, 8 aa, Artificial sequence
  Protein classification predicting sequence
IDVTLPGR

SEQ ID NO: 71710 - protein, 8 aa, Artificial sequence
  Protein classification predicting sequence
LLRTHTSP

SEQ ID NO: 71711 - protein, 6 aa, Artificial sequence
  Protein classification predicting sequence
QARTME

SEQ ID NO: 71712 - protein, 8 aa, Artificial sequence
  Protein classification predicting sequence
MSDLKGTL

SEQ ID NO: 71713 - protein, 21 aa, Artificial sequence
  Protein classification predicting sequence
TGWIEILGAGMVHPNVLEMAG

SEQ ID NO: 71714 - protein, 24 aa, Artificial sequence
  Protein classification predicting sequence
TGWIEILGAGMVHPNVLEMAGFDS

SEQ ID NO: 71715 - protein, 6 aa, Artificial sequence
  Protein classification predicting sequence
DIRHFY

SEQ ID NO: 71716 - protein, 7 aa, Artificial sequence
  Protein classification predicting sequence
EERPRMG

SEQ ID NO: 71717 - protein, 7 aa, Artificial sequence
  Protein classification predicting sequence
DVTLPGR

SEQ ID NO: 71718 - protein, 7 aa, Artificial sequence
  Protein classification predicting sequence
AEGPEVE

SEQ ID NO: 71719 - protein, 9 aa, Artificial sequence
  Protein classification predicting sequence
DLRLFFDND

SEQ ID NO: 71720 - protein, 6 aa, Artificial sequence
  Protein classification predicting sequence
LRTQTS

SEQ ID NO: 71721 - protein, 8 aa, Artificial sequence
  Protein classification predicting sequence
NFDALNIP

SEQ ID NO: 71722 - protein, 7 aa, Artificial sequence
  Protein classification predicting sequence
FFEEDLQ

SEQ ID NO: 71723 - protein, 9 aa, Artificial sequence
  Protein classification predicting sequence
DLQVRFRPS

SEQ ID NO: 71724 - protein, 11 aa, Artificial sequence
  Protein classification predicting sequence
FPFTEPSAEVD

SEQ ID NO: 71725 - protein, 16 aa, Artificial sequence
  Protein classification predicting sequence
DLRAFFENDLRFLKQF

SEQ ID NO: 71726 - protein, 12 aa, Artificial sequence
  Protein classification predicting sequence
FFENDLRFLKQF

SEQ ID NO: 71727 - protein, 6 aa, Artificial sequence
  Protein classification predicting sequence
LRAFFE

SEQ ID NO: 71728 - protein, 8 aa, Artificial sequence
  Protein classification predicting sequence
NFEALNLP

SEQ ID NO: 71729 - protein, 7 aa, Artificial sequence
  Protein classification predicting sequence
DLRSFFE

SEQ ID NO: 71730 - protein, 7 aa, Artificial sequence
  Protein classification predicting sequence
EDDFHNF

SEQ ID NO: 71731 - protein, 11 aa, Artificial sequence
  Protein classification predicting sequence
FWNFDALFQPQ

SEQ ID NO: 71732 - protein, 6 aa, Artificial sequence
  Protein classification predicting sequence
FHQIEG

SEQ ID NO: 71733 - protein, 7 aa, Artificial sequence
  Protein classification predicting sequence
ERREAGQ

SEQ ID NO: 71734 - protein, 7 aa, Artificial sequence
  Protein classification predicting sequence
NFDALNI

SEQ ID NO: 71735 - protein, 10 aa, Artificial sequence
  Protein classification predicting sequence
HPARADHDTF

SEQ ID NO: 71736 - protein, 8 aa, Artificial sequence
  Protein classification predicting sequence
GMVHPNVL

SEQ ID NO: 71737 - protein, 7 aa, Artificial sequence
  Protein classification predicting sequence
GFAFGMG

SEQ ID NO: 71738 - protein, 12 aa, Artificial sequence
  Protein classification predicting sequence
NLPKDHPARDMQ

SEQ ID NO: 71739 - protein, 7 aa, Artificial sequence
  Protein classification predicting sequence
EERPVIG

SEQ ID NO: 71740 - protein, 6 aa, Artificial sequence
  Protein classification predicting sequence
HDFSKG

SEQ ID NO: 71741 - protein, 10 aa, Artificial sequence
  Protein classification predicting sequence
SCFKCGGKGC

SEQ ID NO: 71742 - protein, 19 aa, Artificial sequence
  Protein classification predicting sequence
TGWIEILGAGMVHPNVLEM

SEQ ID NO: 71743 - protein, 10 aa, Artificial sequence
  Protein classification predicting sequence
GMVHPNVLEM

SEQ ID NO: 71744 - protein, 5 aa, Artificial sequence
  Protein classification predicting sequence
TGWIE

SEQ ID NO: 71745 - protein, 11 aa, Artificial sequence
  Protein classification predicting sequence
AMLKYGVDDIR

SEQ ID NO: 71746 - protein, 6 aa, Artificial sequence
  Protein classification predicting sequence
NDVRFL

SEQ ID NO: 71747 - protein, 6 aa, Artificial sequence
  Protein classification predicting sequence
NFDALN

SEQ ID NO: 71748 - protein, 5 aa, Artificial sequence
  Protein classification predicting sequence
MQDTF

SEQ ID NO: 71749 - protein, 17 aa, Artificial sequence
  Protein classification predicting sequence
AVDKGLTMAHLRGTLDH

SEQ ID NO: 71750 - protein, 8 aa, Artificial sequence
  Protein classification predicting sequence
YFPFVEPG

SEQ ID NO: 71751 - protein, 8 aa, Artificial sequence
  Protein classification predicting sequence
REIRLRPS

SEQ ID NO: 71752 - protein, 11 aa, Artificial sequence
  Protein classification predicting sequence
CKGTGWIEILG

SEQ ID NO: 71753 - protein, 21 aa, Artificial sequence
  Protein classification predicting sequence
VYRNDYDQTHTPMFHQIELLY

SEQ ID NO: 71754 - protein, 12 aa, Artificial sequence
  Protein classification predicting sequence
GMGVERLTMLRY

SEQ ID NO: 71755 - protein, 9 aa, Artificial sequence
  Protein classification predicting sequence
GWLEILGAG

SEQ ID NO: 71756 - protein, 6 aa, Artificial sequence
  Protein classification predicting sequence
EILGAG

SEQ ID NO: 71757 - protein, 7 aa, Artificial sequence
  Protein classification predicting sequence
GSRGWGY

SEQ ID NO: 71758 - protein, 7 aa, Artificial sequence
  Protein classification predicting sequence
LFQPQDH

SEQ ID NO: 71759 - protein, 6 aa, Artificial sequence
  Protein classification predicting sequence
FHQVEG

SEQ ID NO: 71760 - protein, 9 aa, Artificial sequence
  Protein classification predicting sequence
MAHLRGTLD

SEQ ID NO: 71761 - protein, 5 aa, Artificial sequence
  Protein classification predicting sequence
VYRND

SEQ ID NO: 71762 - protein, 9 aa, Artificial sequence
  Protein classification predicting sequence
YSGFAFGMG

SEQ ID NO: 71763 - protein, 11 aa, Artificial sequence
  Protein classification predicting sequence
MRDMVEGDVRF

SEQ ID NO: 71764 - protein, 7 aa, Artificial sequence
  Protein classification predicting sequence
RIAMLKY

SEQ ID NO: 71765 - protein, 12 aa, Artificial sequence
  Protein classification predicting sequence
VNDLRLFFDNDL

SEQ ID NO: 71766 - protein, 6 aa, Artificial sequence
  Protein classification predicting sequence
HPVTRT

SEQ ID NO: 71767 - protein, 6 aa, Artificial sequence
  Protein classification predicting sequence
DLRLFF

SEQ ID NO: 71768 - protein, 7 aa, Artificial sequence
  Protein classification predicting sequence
EEIEDLF

SEQ ID NO: 71769 - protein, 9 aa, Artificial sequence
  Protein classification predicting sequence
DIRHFYTND

SEQ ID NO: 71770 - protein, 16 aa, Artificial sequence
  Protein classification predicting sequence
VRVEYLGKKGHLTLQM

SEQ ID NO: 71771 - protein, 7 aa, Artificial sequence
  Protein classification predicting sequence
GPEIEDD

SEQ ID NO: 71772 - protein, 6 aa, Artificial sequence
  Protein classification predicting sequence
VQVRTM

SEQ ID NO: 71773 - protein, 39 aa, Artificial sequence
  Protein classification predicting sequence
RFRPSYFPFTEPSAEVDVMGKNGKWLEVLGCGMVHPNVL

SEQ ID NO: 71774 - protein, 10 aa, Artificial sequence
  Protein classification predicting sequence
ERLTMLRYGV

SEQ ID NO: 71775 - protein, 7 aa, Artificial sequence
  Protein classification predicting sequence
APGRVYR

SEQ ID NO: 71776 - protein, 19 aa, Artificial sequence
  Protein classification predicting sequence
APGRVYRRDAVDATHSPVF

SEQ ID NO: 71777 - protein, 8 aa, Artificial sequence
  Protein classification predicting sequence
FSHLRGTV

SEQ ID NO: 71778 - protein, 16 aa, Artificial sequence
  Protein classification predicting sequence
GFAAGLGVERFCMVRH

SEQ ID NO: 71779 - protein, 8 aa, Artificial sequence
  Protein classification predicting sequence
QGFAFGMG

SEQ ID NO: 71780 - protein, 11 aa, Artificial sequence
  Protein classification predicting sequence
ALNIPGHHPAR

SEQ ID NO: 71781 - protein, 11 aa, Artificial sequence
  Protein classification predicting sequence
LFQAQDHPARE

SEQ ID NO: 71782 - protein, 33 aa, Artificial sequence
  Protein classification predicting sequence
EIPGKYFTIQRVFRPDVLDRTHLIEFNQIDGFV

SEQ ID NO: 71783 - protein, 10 aa, Artificial sequence
  Protein classification predicting sequence
EIAGAKKVKF

SEQ ID NO: 71784 - protein, 12 aa, Artificial sequence
  Protein classification predicting sequence
PDYYPFTEPSVQ

SEQ ID NO: 71785 - protein, 10 aa, Artificial sequence
  Protein classification predicting sequence
LLKGLGKLDP

SEQ ID NO: 71786 - protein, 7 aa, Artificial sequence
  Protein classification predicting sequence
NARLAAE

SEQ ID NO: 71787 - protein, 6 aa, Artificial sequence
  Protein classification predicting sequence
NFTALN

SEQ ID NO: 71788 - protein, 6 aa, Artificial sequence
  Protein classification predicting sequence
MQDTFY

SEQ ID NO: 71789 - protein, 15 aa, Artificial sequence
  Protein classification predicting sequence
ISFADLKGVYTDFLR

SEQ ID NO: 71790 - protein, 9 aa, Artificial sequence
  Protein classification predicting sequence
ERLTMLRYG

SEQ ID NO: 71791 - protein, 34 aa, Artificial sequence
  Protein classification predicting sequence
IAEGPDIETDYYNFTALNFPEGHPAREMHDTFFF

SEQ ID NO: 71792 - protein, 8 aa, Artificial sequence
  Protein classification predicting sequence
ASDAAALE

SEQ ID NO: 71793 - protein, 6 aa, Artificial sequence
  Protein classification predicting sequence
RSFFEN

SEQ ID NO: 71794 - protein, 30 aa, Artificial sequence
  Protein classification predicting sequence
QASDVAALDNVRVEYLGKKGHLTLQMTTLR

SEQ ID NO: 71795 - protein, 31 aa, Artificial sequence
  Protein classification predicting sequence
AKEQVQQALNARKAELESAALNARLAAETID

SEQ ID NO: 71796 - protein, 9 aa, Artificial sequence
  Protein classification predicting sequence
GGLHPVTRT

SEQ ID NO: 71797 - protein, 8 aa, Artificial sequence
  Protein classification predicting sequence
PMFHQVEG

SEQ ID NO: 71798 - protein, 14 aa, Artificial sequence
  Protein classification predicting sequence
LHDFLRNFFEEDLQ

SEQ ID NO: 71799 - protein, 24 aa, Artificial sequence
  Protein classification predicting sequence
IRLRPSYFPFTEPSVEVDVSCFKC

SEQ ID NO: 71800 - protein, 15 aa, Artificial sequence
  Protein classification predicting sequence
MSELKQQALVDINEA

SEQ ID NO: 71801 - protein, 7 aa, Artificial sequence
  Protein classification predicting sequence
MKDLPNE

SEQ ID NO: 71802 - protein, 12 aa, Artificial sequence
  Protein classification predicting sequence
GQKVNELRQTIQ

SEQ ID NO: 71803 - protein, 14 aa, Artificial sequence
  Protein classification predicting sequence
RHIEIGSKHPLTRT

SEQ ID NO: 71804 - protein, 15 aa, Artificial sequence
  Protein classification predicting sequence
EEIEDLFLGLGYEIV

SEQ ID NO: 71805 - protein, 7 aa, Artificial sequence
  Protein classification predicting sequence
GYEVEQD

SEQ ID NO: 71806 - protein, 13 aa, Artificial sequence
  Protein classification predicting sequence
HPARDMQDSFYIT

SEQ ID NO: 71807 - protein, 37 aa, Artificial sequence
  Protein classification predicting sequence
GQGPVKIICPGKVYRRDSDDATHSHQFTQIEGLVVDK

SEQ ID NO: 71808 - protein, 8 aa, Artificial sequence
  Protein classification predicting sequence
EYSGFAFG

SEQ ID NO: 71809 - protein, 17 aa, Artificial sequence
  Protein classification predicting sequence
ALQEVKVKYLGKKGSVS

SEQ ID NO: 71810 - protein, 11 aa, Artificial sequence
  Protein classification predicting sequence
MKDLPNEEKPA

SEQ ID NO: 71811 - protein, 36 aa, Artificial sequence
  Protein classification predicting sequence
AKKLFGADREIRLRPSYFPFTEPSVEVDVSCFKCKG

SEQ ID NO: 71812 - protein, 45 aa, Artificial sequence
  Protein classification predicting sequence
EYSGFAFGMGPDRIAMLKYGIEDIRHFYTNDVRFLDQFKAVEDRG

SEQ ID NO: 71813 - protein, 13 aa, Artificial sequence
  Protein classification predicting sequence
TGNHTKELQDLRV

SEQ ID NO: 71814 - protein, 10 aa, Artificial sequence
  Protein classification predicting sequence
VEAAKIQAQL

SEQ ID NO: 71815 - protein, 8 aa, Artificial sequence
  Protein classification predicting sequence
TSPVQART

SEQ ID NO: 71816 - protein, 10 aa, Artificial sequence
  Protein classification predicting sequence
HDFSKGPLKM

SEQ ID NO: 71817 - protein, 28 aa, Artificial sequence
  Protein classification predicting sequence
SPGRVFRRDTDDATHSHQFHQIEGLVVG

SEQ ID NO: 71818 - protein, 8 aa, Artificial sequence
  Protein classification predicting sequence
QIEGLVVG

SEQ ID NO: 71819 - protein, 35 aa, Artificial sequence
  Protein classification predicting sequence
VLGKKGSLTELLKGLKDLSNDLRPVVGKQVNEVRD

SEQ ID NO: 71820 - protein, 34 aa, Artificial sequence
  Protein classification predicting sequence
DVTLPGRQMTLGHRHVLTQTSEEIEDIFLGMGFQ

SEQ ID NO: 71821 - protein, 15 aa, Artificial sequence
  Protein classification predicting sequence
EILLRTHTSPVQART

SEQ ID NO: 71822 - protein, 12 aa, Artificial sequence
  Protein classification predicting sequence
MGYEIAEGPEVE

SEQ ID NO: 71823 - protein, 6 aa, Artificial sequence
  Protein classification predicting sequence
GGCGMV

SEQ ID NO: 71824 - protein, 8 aa, Artificial sequence
  Protein classification predicting sequence
KELQDLRV

SEQ ID NO: 71825 - protein, 18 aa, Artificial sequence
  Protein classification predicting sequence
VLGKKGSLTELLKGLKDL

SEQ ID NO: 71826 - protein, 14 aa, Artificial sequence
  Protein classification predicting sequence
LRPVVGKQVNEVRD

SEQ ID NO: 71827 - protein, 17 aa, Artificial sequence
  Protein classification predicting sequence
AMLRYGINDIRGFYQGD

SEQ ID NO: 71828 - protein, 10 aa, Artificial sequence
  Protein classification predicting sequence
VLGKKGSLTE

SEQ ID NO: 71829 - protein, 17 aa, Artificial sequence
  Protein classification predicting sequence
GHRHVLTQTSEEIEDIF

SEQ ID NO: 71830 - protein, 33 aa, Artificial sequence
  Protein classification predicting sequence
SPGRVFRRDTDDATHSHQFHQIEGLVVGKNISM

SEQ ID NO: 71831 - protein, 6 aa, Artificial sequence
  Protein classification predicting sequence
GCNVCK

SEQ ID NO: 71832 - protein, 20 aa, Artificial sequence
  Protein classification predicting sequence
AMLRYGINDIRGFYQGDVRF

SEQ ID NO: 71833 - protein, 6 aa, Artificial sequence
  Protein classification predicting sequence
QDHPAR

SEQ ID NO: 71834 - protein, 14 aa, Artificial sequence
  Protein classification predicting sequence
IRLRPSYFPFTEPS

SEQ ID NO: 71835 - protein, 8 aa, Artificial sequence
  Protein classification predicting sequence
DLFLGLGY

SEQ ID NO: 71836 - protein, 8 aa, Artificial sequence
  Protein classification predicting sequence
LPPEERPA

SEQ ID NO: 71837 - protein, 14 aa, Artificial sequence
  Protein classification predicting sequence
LLLRTHTSPMQVRY

SEQ ID NO: 71838 - protein, 12 aa, Artificial sequence
  Protein classification predicting sequence
IDPEKYTGFAFG

SEQ ID NO: 71839 - protein, 6 aa, Artificial sequence
  Protein classification predicting sequence
EWGGCG

SEQ ID NO: 71840 - protein, 14 aa, Artificial sequence
  Protein classification predicting sequence
QLQSLGKLPPEERR

SEQ ID NO: 71841 - protein, 13 aa, Artificial sequence
  Protein classification predicting sequence
RIESFFGELGFTV

SEQ ID NO: 71842 - protein, 26 aa, Artificial sequence
  Protein classification predicting sequence
FHNFDALNIAADHPARTDHDTFFFNP

SEQ ID NO: 71843 - protein, 8 aa, Artificial sequence
  Protein classification predicting sequence
TSGVQIRT

SEQ ID NO: 71844 - protein, 52 aa, Artificial sequence
  Protein classification predicting sequence
RFIAPGRVYRNDYDQTHTPMFHQVEGMLVDENVNFAQLKGILHDFLCNFFEE

SEQ ID NO: 71845 - protein, 7 aa, Artificial sequence
  Protein classification predicting sequence
NFFEEDL

SEQ ID NO: 71846 - protein, 17 aa, Artificial sequence
  Protein classification predicting sequence
LPGRRIENGGLHPVTRT

SEQ ID NO: 71847 - protein, 7 aa, Artificial sequence
  Protein classification predicting sequence
FFGELGF

SEQ ID NO: 71848 - protein, 6 aa, Artificial sequence
  Protein classification predicting sequence
WIEILG

SEQ ID NO: 71849 - protein, 7 aa, Artificial sequence
  Protein classification predicting sequence
LRFLKQF

SEQ ID NO: 71850 - protein, 9 aa, Artificial sequence
  Protein classification predicting sequence
SFFPFTEPS

SEQ ID NO: 71851 - protein, 12 aa, Artificial sequence
  Protein classification predicting sequence
AFGLGVERFAML

SEQ ID NO: 71852 - protein, 6 aa, Artificial sequence
  Protein classification predicting sequence
HHPARA

SEQ ID NO: 71853 - protein, 8 aa, Artificial sequence
  Protein classification predicting sequence
THSPMFHQ

SEQ ID NO: 71854 - protein, 10 aa, Artificial sequence
  Protein classification predicting sequence
MLRYGVNDLR

SEQ ID NO: 71855 - protein, 9 aa, Artificial sequence
  Protein classification predicting sequence
DLRAFFEND

SEQ ID NO: 71856 - protein, 15 aa, Artificial sequence
  Protein classification predicting sequence
WLEVLGCGMVHPNVL

SEQ ID NO: 71857 - protein, 8 aa, Artificial sequence
  Protein classification predicting sequence
GLHPVTRT

SEQ ID NO: 71858 - protein, 8 aa, Artificial sequence
  Protein classification predicting sequence
SNELELSA

SEQ ID NO: 71859 - protein, 31 aa, Artificial sequence
  Protein classification predicting sequence
HHPARADHDTFWFDATRLLRTQTSGVQIRTM

SEQ ID NO: 71860 - protein, 19 aa, Artificial sequence
  Protein classification predicting sequence
PGRVYRNDYDQTHTPMFHQ

SEQ ID NO: 71861 - protein, 7 aa, Artificial sequence
  Protein classification predicting sequence
GVVVGEV

SEQ ID NO: 71862 - protein, 7 aa, Artificial sequence
  Protein classification predicting sequence
DCFSIRG

SEQ ID NO: 71863 - protein, 6 aa, Artificial sequence
  Protein classification predicting sequence
PRYLGR

SEQ ID NO: 71864 - protein, 7 aa, Artificial sequence
  Protein classification predicting sequence
RFERGVD

SEQ ID NO: 71865 - protein, 8 aa, Artificial sequence
  Protein classification predicting sequence
QHNLNRQQ

SEQ ID NO: 71866 - protein, 6 aa, Artificial sequence
  Protein classification predicting sequence
DFFDLK

SEQ ID NO: 71867 - protein, 8 aa, Artificial sequence
  Protein classification predicting sequence
WQHPSRTL

SEQ ID NO: 71868 - protein, 10 aa, Artificial sequence
  Protein classification predicting sequence
ELIQFQEKLH

SEQ ID NO: 71869 - protein, 7 aa, Artificial sequence
  Protein classification predicting sequence
HPEADRL

SEQ ID NO: 71870 - protein, 9 aa, Artificial sequence
  Protein classification predicting sequence
ISDDHDGII

SEQ ID NO: 71871 - protein, 8 aa, Artificial sequence
  Protein classification predicting sequence
GIARDLAA

SEQ ID NO: 71872 - protein, 6 aa, Artificial sequence
  Protein classification predicting sequence
VDITNY

SEQ ID NO: 71873 - protein, 7 aa, Artificial sequence
  Protein classification predicting sequence
PMHVFDA

SEQ ID NO: 71874 - protein, 7 aa, Artificial sequence
  Protein classification predicting sequence
MGGEHSG

SEQ ID NO: 71875 - protein, 8 aa, Artificial sequence
  Protein classification predicting sequence
RFERGVDP

SEQ ID NO: 71876 - protein, 7 aa, Artificial sequence
  Protein classification predicting sequence
AAQRNAD

SEQ ID NO: 71877 - protein, 10 aa, Artificial sequence
  Protein classification predicting sequence
KPHPSADKLK

SEQ ID NO: 71878 - protein, 6 aa, Artificial sequence
  Protein classification predicting sequence
TPNRGD

SEQ ID NO: 71879 - protein, 8 aa, Artificial sequence
  Protein classification predicting sequence
AREVAALT

SEQ ID NO: 71880 - protein, 6 aa, Artificial sequence
  Protein classification predicting sequence
NYVLLE

SEQ ID NO: 71881 - protein, 6 aa, Artificial sequence
  Protein classification predicting sequence
INNVVD

SEQ ID NO: 71882 - protein, 8 aa, Artificial sequence
  Protein classification predicting sequence
GQPLHAFD

SEQ ID NO: 71883 - protein, 8 aa, Artificial sequence
  Protein classification predicting sequence
LTMAGLEV

SEQ ID NO: 71884 - protein, 6 aa, Artificial sequence
  Protein classification predicting sequence
GMLCSA

SEQ ID NO: 71885 - protein, 9 aa, Artificial sequence
  Protein classification predicting sequence
AREVAALTG

SEQ ID NO: 71886 - protein, 9 aa, Artificial sequence
  Protein classification predicting sequence
TPDWMKQRL

SEQ ID NO: 71887 - protein, 7 aa, Artificial sequence
  Protein classification predicting sequence
AIAGRAR

SEQ ID NO: 71888 - protein, 8 aa, Artificial sequence
  Protein classification predicting sequence
DLIEEVAR

SEQ ID NO: 71889 - protein, 8 aa, Artificial sequence
  Protein classification predicting sequence
SVMRSSLI

SEQ ID NO: 71890 - protein, 7 aa, Artificial sequence
  Protein classification predicting sequence
EVAAIYG

SEQ ID NO: 71891 - protein, 209 aa, Artificial sequence
  Protein classification predicting sequence
DYISVSVEAKEENPLYIAKMVKNVKIGPSPMWMQTRLMAAGIRPISNVVDITNYILMEYGQPLHAFDYDKLGSKEIVVRLAKEGEKIETLDDQERTLQSHHLVITNGTKALAVAGVMGGADSEVTNETVNVLIESAYFAGQTVRRTSKDLGLRSESSARFEKGIDPTRTFEAIQHAAALMAKYAGGEALEGVVEADNLQVQERTVSVTA

SEQ ID NO: 71892 - protein, 78 aa, Artificial sequence
  Protein classification predicting sequence
KVNRVLGTNISASEMGTMFTNLKFPFTEVEGTFHVNVPARRPDITISEDLVEEVGRLYGYDHIPVTLPSGTMTRGKLT

SEQ ID NO: 71893 - protein, 27 aa, Artificial sequence
  Protein classification predicting sequence
AQTKRRKVRRFLEGAGLYEAITYSLTS

SEQ ID NO: 71894 - protein, 16 aa, Artificial sequence
  Protein classification predicting sequence
DKAKQYMVEPNEKAPV

SEQ ID NO: 71895 - protein, 59 aa, Artificial sequence
  Protein classification predicting sequence
NQITYAPAKREGMHPGRTADIVLDGEVIGFIGQLHPEAEKQLDVKNTFVFELSLVKVFG

SEQ ID NO: 71896 - protein, 7 aa, Artificial sequence
  Protein classification predicting sequence
DAEETYY

SEQ ID NO: 71897 - protein, 62 aa, Artificial sequence
  Protein classification predicting sequence
AIPRFPSMTRDMAVVVTKETKAGEMKQVIAEAGGELLKDVTLFDLYEGEKMEEGKKSLAFSM

SEQ ID NO: 71898 - protein, 18 aa, Artificial sequence
  Protein classification predicting sequence
ERTLTDEEVTEAHNRVLT

SEQ ID NO: 71899 - protein, 8 aa, Artificial sequence
  Protein classification predicting sequence
KEISKFPA

SEQ ID NO: 71900 - protein, 8 aa, Artificial sequence
  Protein classification predicting sequence
RLAKEGEK

SEQ ID NO: 71901 - protein, 7 aa, Artificial sequence
  Protein classification predicting sequence
YGYDNIP

SEQ ID NO: 71902 - protein, 6 aa, Artificial sequence
  Protein classification predicting sequence
TYSLTS

SEQ ID NO: 71903 - protein, 7 aa, Artificial sequence
  Protein classification predicting sequence
PMSEERS

SEQ ID NO: 71904 - protein, 6 aa, Artificial sequence
  Protein classification predicting sequence
WQGEKK

SEQ ID NO: 71905 - protein, 8 aa, Artificial sequence
  Protein classification predicting sequence
VDFFVVKG

SEQ ID NO: 71906 - protein, 8 aa, Artificial sequence
  Protein classification predicting sequence
DLKETYVF

SEQ ID NO: 71907 - protein, 48 aa, Artificial sequence
  Protein classification predicting sequence
LALPMSEERSQLRLSLVPQLLEAVSYNVARKNDSVALYEVGSIFLPTE

SEQ ID NO: 71908 - protein, 11 aa, Artificial sequence
  Protein classification predicting sequence
VAKVGARLPGG

SEQ ID NO: 71909 - protein, 7 aa, Artificial sequence
  Protein classification predicting sequence
VKIGPSP

SEQ ID NO: 71910 - protein, 6 aa, Artificial sequence
  Protein classification predicting sequence
HPGRTA

SEQ ID NO: 71911 - protein, 6 aa, Artificial sequence
  Protein classification predicting sequence
GIEVEG

SEQ ID NO: 71912 - protein, 8 aa, Artificial sequence
  Protein classification predicting sequence
PVQIICGA

SEQ ID NO: 71913 - protein, 12 aa, Artificial sequence
  Protein classification predicting sequence
NMLGVAYEVAAI

SEQ ID NO: 71914 - protein, 7 aa, Artificial sequence
  Protein classification predicting sequence
TLDDQER

SEQ ID NO: 71915 - protein, 7 aa, Artificial sequence
  Protein classification predicting sequence
AGVMGGA

SEQ ID NO: 71916 - protein, 11 aa, Artificial sequence
  Protein classification predicting sequence
AGVMGGAESEV

SEQ ID NO: 71917 - protein, 11 aa, Artificial sequence
  Protein classification predicting sequence
SKDLGLRSESS

SEQ ID NO: 71918 - protein, 6 aa, Artificial sequence
  Protein classification predicting sequence
LRSESS

SEQ ID NO: 71919 - protein, 6 aa, Artificial sequence
  Protein classification predicting sequence
IPSTLP

SEQ ID NO: 71920 - protein, 14 aa, Artificial sequence
  Protein classification predicting sequence
KRRKVRRFLEGAGL

SEQ ID NO: 71921 - protein, 6 aa, Artificial sequence
  Protein classification predicting sequence
AITYSL

SEQ ID NO: 71922 - protein, 10 aa, Artificial sequence
  Protein classification predicting sequence
DSVALYEVGS

SEQ ID NO: 71923 - protein, 5 aa, Artificial sequence
  Protein classification predicting sequence
CGAPN

SEQ ID NO: 71924 - protein, 8 aa, Artificial sequence
  Protein classification predicting sequence
ESFGMMCS

SEQ ID NO: 71925 - protein, 6 aa, Artificial sequence
  Protein classification predicting sequence
WMQQRL

SEQ ID NO: 71926 - protein, 12 aa, Artificial sequence
  Protein classification predicting sequence
DARYRFERGVDP

SEQ ID NO: 71927 - protein, 8 aa, Artificial sequence
  Protein classification predicting sequence
WYHPGRSG

SEQ ID NO: 71928 - protein, 7 aa, Artificial sequence
  Protein classification predicting sequence
ERTLTDE

SEQ ID NO: 71929 - protein, 8 aa, Artificial sequence
  Protein classification predicting sequence
NPIAADMS

SEQ ID NO: 71930 - protein, 10 aa, Artificial sequence
  Protein classification predicting sequence
FDLYEGEKME

SEQ ID NO: 71931 - protein, 7 aa, Artificial sequence
  Protein classification predicting sequence
TPNRADC

SEQ ID NO: 71932 - protein, 7 aa, Artificial sequence
  Protein classification predicting sequence
VDISNYV

SEQ ID NO: 71933 - protein, 8 aa, Artificial sequence
  Protein classification predicting sequence
LIQFQEKL

SEQ ID NO: 71934 - protein, 6 aa, Artificial sequence
  Protein classification predicting sequence
VCGAPN

SEQ ID NO: 71935 - protein, 8 aa, Artificial sequence
  Protein classification predicting sequence
RPLHVFDA

SEQ ID NO: 71936 - protein, 5 aa, Artificial sequence
  Protein classification predicting sequence
WLREW

SEQ ID NO: 71937 - protein, 7 aa, Artificial sequence
  Protein classification predicting sequence
CGASNCR

SEQ ID NO: 71938 - protein, 6 aa, Artificial sequence
  Protein classification predicting sequence
YNQNRQ

SEQ ID NO: 71939 - protein, 6 aa, Artificial sequence
  Protein classification predicting sequence
QIVCGA

SEQ ID NO: 71940 - protein, 21 aa, Artificial sequence
  Protein classification predicting sequence
RLERAGQRSVSALVDISNYVM

SEQ ID NO: 71941 - protein, 11 aa, Artificial sequence
  Protein classification predicting sequence
NIYLEAAFWWP

SEQ ID NO: 71942 - protein, 6 aa, Artificial sequence
  Protein classification predicting sequence
IRGRAR

SEQ ID NO: 71943 - protein, 16 aa, Artificial sequence
  Protein classification predicting sequence
LILDICGGQAGPVDDQ

SEQ ID NO: 71944 - protein, 9 aa, Artificial sequence
  Protein classification predicting sequence
AQIFTRLGL

SEQ ID NO: 71945 - protein, 8 aa, Artificial sequence
  Protein classification predicting sequence
EEVARIYG

SEQ ID NO: 71946 - protein, 12 aa, Artificial sequence
  Protein classification predicting sequence
PALHPGRSARIE

SEQ ID NO: 71947 - protein, 6 aa, Artificial sequence
  Protein classification predicting sequence
CQVDIG

SEQ ID NO: 71948 - protein, 7 aa, Artificial sequence
  Protein classification predicting sequence
IVCGAAN

SEQ ID NO: 71949 - protein, 7 aa, Artificial sequence
  Protein classification predicting sequence
TMAGLEV

SEQ ID NO: 71950 - protein, 5 aa, Artificial sequence
  Protein classification predicting sequence
VCQVD

SEQ ID NO: 71951 - protein, 9 aa, Artificial sequence
  Protein classification predicting sequence
YVPGLDVTL

SEQ ID NO: 71952 - protein, 8 aa, Artificial sequence
  Protein classification predicting sequence
ESDGIMEL

SEQ ID NO: 71953 - protein, 12 aa, Artificial sequence
  Protein classification predicting sequence
AIGLRPINALVD

SEQ ID NO: 71954 - protein, 7 aa, Artificial sequence
  Protein classification predicting sequence
MRPSLLP

SEQ ID NO: 71955 - protein, 7 aa, Artificial sequence
  Protein classification predicting sequence
KSVAIEV

SEQ ID NO: 71956 - protein, 11 aa, Artificial sequence
  Protein classification predicting sequence
SLTPNLGHCAS

SEQ ID NO: 71957 - protein, 6 aa, Artificial sequence
  Protein classification predicting sequence
AAYFLP

SEQ ID NO: 71958 - protein, 6 aa, Artificial sequence
  Protein classification predicting sequence
ARLYGY

SEQ ID NO: 71959 - protein, 6 aa, Artificial sequence
  Protein classification predicting sequence
VDFYDL

SEQ ID NO: 71960 - protein, 7 aa, Artificial sequence
  Protein classification predicting sequence
KIRGLES

SEQ ID NO: 71961 - protein, 6 aa, Artificial sequence
  Protein classification predicting sequence
LRVTKV

SEQ ID NO: 71962 - protein, 12 aa, Artificial sequence
  Protein classification predicting sequence
LFTLKITPNRAD

SEQ ID NO: 71963 - protein, 6 aa, Artificial sequence
  Protein classification predicting sequence
GGEHSG

SEQ ID NO: 71964 - protein, 7 aa, Artificial sequence
  Protein classification predicting sequence
YGYNNIP

SEQ ID NO: 71965 - protein, 7 aa, Artificial sequence
  Protein classification predicting sequence
PIRLQNP

SEQ ID NO: 71966 - protein, 12 aa, Artificial sequence
  Protein classification predicting sequence
VSKFQPVRRDLA

SEQ ID NO: 71967 - protein, 8 aa, Artificial sequence
  Protein classification predicting sequence
RDLALLVD

SEQ ID NO: 71968 - protein, 9 aa, Artificial sequence
  Protein classification predicting sequence
QDNSRTLTD

SEQ ID NO: 71969 - protein, 9 aa, Artificial sequence
  Protein classification predicting sequence
EEIARIYGY

SEQ ID NO: 71970 - protein, 6 aa, Artificial sequence
  Protein classification predicting sequence
TNFVML

SEQ ID NO: 71971 - protein, 6 aa, Artificial sequence
  Protein classification predicting sequence
TPDRGY

SEQ ID NO: 71972 - protein, 6 aa, Artificial sequence
  Protein classification predicting sequence
PMHAFD

SEQ ID NO: 71973 - protein, 5 aa, Artificial sequence
  Protein classification predicting sequence
QPLHA

SEQ ID NO: 71974 - protein, 5 aa, Artificial sequence
  Protein classification predicting sequence
ACPRY

SEQ ID NO: 71975 - protein, 17 aa, Artificial sequence
  Protein classification predicting sequence
HPVVDVMNYVMLELGQP

SEQ ID NO: 71976 - protein, 10 aa, Artificial sequence
  Protein classification predicting sequence
NYVMLELGQP

SEQ ID NO: 71977 - protein, 11 aa, Artificial sequence
  Protein classification predicting sequence
AGIMGGANSAV

SEQ ID NO: 71978 - protein, 7 aa, Artificial sequence
  Protein classification predicting sequence
FLESAYF

SEQ ID NO: 71979 - protein, 7 aa, Artificial sequence
  Protein classification predicting sequence
LGLARDL

SEQ ID NO: 71980 - protein, 6 aa, Artificial sequence
  Protein classification predicting sequence
NYVMLE

SEQ ID NO: 71981 - protein, 11 aa, Artificial sequence
  Protein classification predicting sequence
LGALHPEIAQE

SEQ ID NO: 71982 - protein, 8 aa, Artificial sequence
  Protein classification predicting sequence
IKKAKLRG

SEQ ID NO: 71983 - protein, 6 aa, Artificial sequence
  Protein classification predicting sequence
VDVTNY

SEQ ID NO: 71984 - protein, 7 aa, Artificial sequence
  Protein classification predicting sequence
TNYILME

SEQ ID NO: 71985 - protein, 7 aa, Artificial sequence
  Protein classification predicting sequence
PPVRRDI

SEQ ID NO: 71986 - protein, 10 aa, Artificial sequence
  Protein classification predicting sequence
ETQNVLLECA

SEQ ID NO: 71987 - protein, 7 aa, Artificial sequence
  Protein classification predicting sequence
KETVDFY

SEQ ID NO: 71988 - protein, 8 aa, Artificial sequence
  Protein classification predicting sequence
QIVCGAPN

SEQ ID NO: 71989 - protein, 7 aa, Artificial sequence
  Protein classification predicting sequence
SPQWLQN

SEQ ID NO: 71990 - protein, 6 aa, Artificial sequence
  Protein classification predicting sequence
TNYILL

SEQ ID NO: 71991 - protein, 9 aa, Artificial sequence
  Protein classification predicting sequence
KSMAYSLTF

SEQ ID NO: 71992 - protein, 9 aa, Artificial sequence
  Protein classification predicting sequence
WLREWVNPA

SEQ ID NO: 71993 - protein, 17 aa, Artificial sequence
  Protein classification predicting sequence
QITMAGLEVDGVEPVAG

SEQ ID NO: 71994 - protein, 10 aa, Artificial sequence
  Protein classification predicting sequence
GVVVGEVVEC

SEQ ID NO: 71995 - protein, 8 aa, Artificial sequence
  Protein classification predicting sequence
VVECGQHP

SEQ ID NO: 71996 - protein, 17 aa, Artificial sequence
  Protein classification predicting sequence
QHPNADKLRVTKVNVGG

SEQ ID NO: 71997 - protein, 7 aa, Artificial sequence
  Protein classification predicting sequence
YLKLDDN

SEQ ID NO: 71998 - protein, 11 aa, Artificial sequence
  Protein classification predicting sequence
GIFGGEHSGVN

SEQ ID NO: 71999 - protein, 7 aa, Artificial sequence
  Protein classification predicting sequence
ATITLRR

SEQ ID NO: 72000 - protein, 8 aa, Artificial sequence
  Protein classification predicting sequence
KLDRLIGH

SEQ ID NO: 72001 - protein, 7 aa, Artificial sequence
  Protein classification predicting sequence
PISVEMS

SEQ ID NO: 72002 - protein, 9 aa, Artificial sequence
  Protein classification predicting sequence
LGIRQDLML

SEQ ID NO: 72003 - protein, 11 aa, Artificial sequence
  Protein classification predicting sequence
VDFYDLKGDLE

SEQ ID NO: 72004 - protein, 14 aa, Artificial sequence
  Protein classification predicting sequence
HPELERKLDLNGRT

SEQ ID NO: 72005 - protein, 22 aa, Artificial sequence
  Protein classification predicting sequence
EISRFPANRRDIAVVVAENVPA

SEQ ID NO: 72006 - protein, 6 aa, Artificial sequence
  Protein classification predicting sequence
ECKKVG

SEQ ID NO: 72007 - protein, 7 aa, Artificial sequence
  Protein classification predicting sequence
VCSVDAG

SEQ ID NO: 72008 - protein, 6 aa, Artificial sequence
  Protein classification predicting sequence
LHTDSS

SEQ ID NO: 72009 - protein, 6 aa, Artificial sequence
  Protein classification predicting sequence
DRGYHE

SEQ ID NO: 72010 - protein, 7 aa, Artificial sequence
  Protein classification predicting sequence
QPMHAFD

SEQ ID NO: 72011 - protein, 7 aa, Artificial sequence
  Protein classification predicting sequence
GHVLECE

SEQ ID NO: 72012 - protein, 8 aa, Artificial sequence
  Protein classification predicting sequence
GEDEPVQI

SEQ ID NO: 72013 - protein, 7 aa, Artificial sequence
  Protein classification predicting sequence
CGAPNVA

SEQ ID NO: 72014 - protein, 8 aa, Artificial sequence
  Protein classification predicting sequence
KEYADGIF

SEQ ID NO: 72015 - protein, 8 aa, Artificial sequence
  Protein classification predicting sequence
LHDEVLEL

SEQ ID NO: 72016 - protein, 9 aa, Artificial sequence
  Protein classification predicting sequence
RLMAAGIRP

SEQ ID NO: 72017 - protein, 9 aa, Artificial sequence
  Protein classification predicting sequence
LGSKEIVVR

SEQ ID NO: 72018 - protein, 7 aa, Artificial sequence
  Protein classification predicting sequence
DIAIEED

SEQ ID NO: 72019 - protein, 7 aa, Artificial sequence
  Protein classification predicting sequence
LHPGRTA

SEQ ID NO: 72020 - protein, 10 aa, Artificial sequence
  Protein classification predicting sequence
YDLKETYVFE

SEQ ID NO: 72021 - protein, 5 aa, Artificial sequence
  Protein classification predicting sequence
IPRFP

SEQ ID NO: 72022 - protein, 6 aa, Artificial sequence
  Protein classification predicting sequence
PLHAFD

SEQ ID NO: 72023 - protein, 9 aa, Artificial sequence
  Protein classification predicting sequence
VGPLLGLDD

SEQ ID NO: 72024 - protein, 8 aa, Artificial sequence
  Protein classification predicting sequence
RPINNVVD

SEQ ID NO: 72025 - protein, 6 aa, Artificial sequence
  Protein classification predicting sequence
RYERGV

SEQ ID NO: 72026 - protein, 6 aa, Artificial sequence
  Protein classification predicting sequence
WLREWV

SEQ ID NO: 72027 - protein, 9 aa, Artificial sequence
  Protein classification predicting sequence
NCRQGLKVA

SEQ ID NO: 72028 - protein, 8 aa, Artificial sequence
  Protein classification predicting sequence
EKLRRCGI

SEQ ID NO: 72029 - protein, 7 aa, Artificial sequence
  Protein classification predicting sequence
LAGIMGG

SEQ ID NO: 72030 - protein, 6 aa, Artificial sequence
  Protein classification predicting sequence
AMERAT

SEQ ID NO: 72031 - protein, 7 aa, Artificial sequence
  Protein classification predicting sequence
SLLTGLL

SEQ ID NO: 72032 - protein, 7 aa, Artificial sequence
  Protein classification predicting sequence
DLKGDLE

SEQ ID NO: 72033 - protein, 7 aa, Artificial sequence
  Protein classification predicting sequence
VNLFDVY

SEQ ID NO: 72034 - protein, 7 aa, Artificial sequence
  Protein classification predicting sequence
REWVNPA

SEQ ID NO: 72035 - protein, 14 aa, Artificial sequence
  Protein classification predicting sequence
GVVVGEVVECAQHP

SEQ ID NO: 72036 - protein, 16 aa, Artificial sequence
  Protein classification predicting sequence
RLLDIVCGAPNCRQGL

SEQ ID NO: 72037 - protein, 6 aa, Artificial sequence
  Protein classification predicting sequence
ACPRYL

SEQ ID NO: 72038 - protein, 7 aa, Artificial sequence
  Protein classification predicting sequence
ICGGEAG

SEQ ID NO: 72039 - protein, 10 aa, Artificial sequence
  Protein classification predicting sequence
PISVEMSAMR

SEQ ID NO: 72040 - protein, 7 aa, Artificial sequence
  Protein classification predicting sequence
GLRFVPD

SEQ ID NO: 72041 - protein, 7 aa, Artificial sequence
  Protein classification predicting sequence
FPANRRD

SEQ ID NO: 72042 - protein, 7 aa, Artificial sequence
  Protein classification predicting sequence
VTKVNVG

SEQ ID NO: 72043 - protein, 8 aa, Artificial sequence
  Protein classification predicting sequence
HDGIIELP

SEQ ID NO: 72044 - protein, 9 aa, Artificial sequence
  Protein classification predicting sequence
AREVGVLNR

SEQ ID NO: 72045 - protein, 7 aa, Artificial sequence
  Protein classification predicting sequence
HNQKRQQ

SEQ ID NO: 72046 - protein, 7 aa, Artificial sequence
  Protein classification predicting sequence
RDLAVVV

SEQ ID NO: 72047 - protein, 9 aa, Artificial sequence
  Protein classification predicting sequence
KIKKGKIRG

SEQ ID NO: 72048 - protein, 7 aa, Artificial sequence
  Protein classification predicting sequence
VDVGEEE

SEQ ID NO: 72049 - protein, 7 aa, Artificial sequence
  Protein classification predicting sequence
GIEVEGV

SEQ ID NO: 72050 - protein, 17 aa, Artificial sequence
  Protein classification predicting sequence
GARIADNYKIKKGKIRG

SEQ ID NO: 72051 - protein, 16 aa, Artificial sequence
  Protein classification predicting sequence
IIELSITPNRADALSM

SEQ ID NO: 72052 - protein, 8 aa, Artificial sequence
  Protein classification predicting sequence
GEKMTTLD

SEQ ID NO: 72053 - protein, 9 aa, Artificial sequence
  Protein classification predicting sequence
GVMGGADSE

SEQ ID NO: 72054 - protein, 7 aa, Artificial sequence
  Protein classification predicting sequence
MHPGRTA

SEQ ID NO: 72055 - protein, 6 aa, Artificial sequence
  Protein classification predicting sequence
GKKSLA

SEQ ID NO: 72056 - protein, 7 aa, Artificial sequence
  Protein classification predicting sequence
WLREWVN

SEQ ID NO: 72057 - protein, 7 aa, Artificial sequence
  Protein classification predicting sequence
LTPNRAD

SEQ ID NO: 72058 - protein, 6 aa, Artificial sequence
  Protein classification predicting sequence
RLYGYD

SEQ ID NO: 72059 - protein, 6 aa, Artificial sequence
  Protein classification predicting sequence
YSFVDP

SEQ ID NO: 72060 - protein, 6 aa, Artificial sequence
  Protein classification predicting sequence
FDPVSI

SEQ ID NO: 72061 - protein, 11 aa, Artificial sequence
  Protein classification predicting sequence
KSLTFALRFRA

SEQ ID NO: 72062 - protein, 7 aa, Artificial sequence
  Protein classification predicting sequence
ITRTGIE

SEQ ID NO: 72063 - protein, 10 aa, Artificial sequence
  Protein classification predicting sequence
GIIELPADAP

SEQ ID NO: 72064 - protein, 15 aa, Artificial sequence
  Protein classification predicting sequence
WMKEKLRRCGIRSID

SEQ ID NO: 72065 - protein, 12 aa, Artificial sequence
  Protein classification predicting sequence
EKLRRCGIRSID

SEQ ID NO: 72066 - protein, 8 aa, Artificial sequence
  Protein classification predicting sequence
EAITYSFV

SEQ ID NO: 72067 - protein, 8 aa, Artificial sequence
  Protein classification predicting sequence
TMAGLEVD

SEQ ID NO: 72068 - protein, 7 aa, Artificial sequence
  Protein classification predicting sequence
VDVTNYV

SEQ ID NO: 72069 - protein, 7 aa, Artificial sequence
  Protein classification predicting sequence
GGEAGPV

SEQ ID NO: 72070 - protein, 6 aa, Artificial sequence
  Protein classification predicting sequence
ITYSFV

SEQ ID NO: 72071 - protein, 7 aa, Artificial sequence
  Protein classification predicting sequence
VDFFDVK

SEQ ID NO: 72072 - protein, 10 aa, Artificial sequence
  Protein classification predicting sequence
HHALHPGQSA

SEQ ID NO: 72073 - protein, 9 aa, Artificial sequence
  Protein classification predicting sequence
EILEKHEKG

SEQ ID NO: 72074 - protein, 6 aa, Artificial sequence
  Protein classification predicting sequence
AIGIHD

SEQ ID NO: 72075 - protein, 8 aa, Artificial sequence
  Protein classification predicting sequence
HAHDRNRI

SEQ ID NO: 72076 - protein, 16 aa, Artificial sequence
  Protein classification predicting sequence
TAAIGGVMGAASTEVR

SEQ ID NO: 72077 - protein, 17 aa, Artificial sequence
  Protein classification predicting sequence
TQRRLHLPSEAARRYER

SEQ ID NO: 72078 - protein, 14 aa, Artificial sequence
  Protein classification predicting sequence
VDPAISVAALDRCA

SEQ ID NO: 72079 - protein, 13 aa, Artificial sequence
  Protein classification predicting sequence
DLVEEVLRLEGLE

SEQ ID NO: 72080 - protein, 7 aa, Artificial sequence
  Protein classification predicting sequence
APAGRGL

SEQ ID NO: 72081 - protein, 16 aa, Artificial sequence
  Protein classification predicting sequence
LDASLPRQPQHVAAVL

SEQ ID NO: 72082 - protein, 7 aa, Artificial sequence
  Protein classification predicting sequence
RFDIEIE

SEQ ID NO: 72083 - protein, 15 aa, Artificial sequence
  Protein classification predicting sequence
QIVCGAPNVKAGIKV

SEQ ID NO: 72084 - protein, 11 aa, Artificial sequence
  Protein classification predicting sequence
LDLDDTLFTLK

SEQ ID NO: 72085 - protein, 8 aa, Artificial sequence
  Protein classification predicting sequence
AREGETLE

SEQ ID NO: 72086 - protein, 6 aa, Artificial sequence
  Protein classification predicting sequence
FDVYRG

SEQ ID NO: 72087 - protein, 8 aa, Artificial sequence
  Protein classification predicting sequence
TPNRADCL

SEQ ID NO: 72088 - protein, 7 aa, Artificial sequence
  Protein classification predicting sequence
TLDDTER

SEQ ID NO: 72089 - protein, 8 aa, Artificial sequence
  Protein classification predicting sequence
RTARRHKL

SEQ ID NO: 72090 - protein, 16 aa, Artificial sequence
  Protein classification predicting sequence
QPADLVEEVLRLEGLE

SEQ ID NO: 72091 - protein, 13 aa, Artificial sequence
  Protein classification predicting sequence
KITKSGIEVEGVE

SEQ ID NO: 72092 - protein, 6 aa, Artificial sequence
  Protein classification predicting sequence
FDVYQG

SEQ ID NO: 72093 - protein, 10 aa, Artificial sequence
  Protein classification predicting sequence
FDVYQGEHLE

SEQ ID NO: 72094 - protein, 6 aa, Artificial sequence
  Protein classification predicting sequence
IVVRMA

SEQ ID NO: 72095 - protein, 6 aa, Artificial sequence
  Protein classification predicting sequence
LESAFF

SEQ ID NO: 72096 - protein, 11 aa, Artificial sequence
  Protein classification predicting sequence
GMLCSFSELGI

SEQ ID NO: 72097 - protein, 6 aa, Artificial sequence
  Protein classification predicting sequence
EIEEDL

SEQ ID NO: 72098 - protein, 8 aa, Artificial sequence
  Protein classification predicting sequence
MSAMRLSL

SEQ ID NO: 72099 - protein, 6 aa, Artificial sequence
  Protein classification predicting sequence
PALHPG

SEQ ID NO: 72100 - protein, 7 aa, Artificial sequence
  Protein classification predicting sequence
TMIGLEV

SEQ ID NO: 72101 - protein, 13 aa, Artificial sequence
  Protein classification predicting sequence
RLLDIVCGAPNCR

SEQ ID NO: 72102 - protein, 8 aa, Artificial sequence
  Protein classification predicting sequence
REYLKLDD

SEQ ID NO: 72103 - protein, 10 aa, Artificial sequence
  Protein classification predicting sequence
IIGVARDVAV

SEQ ID NO: 72104 - protein, 8 aa, Artificial sequence
  Protein classification predicting sequence
WMREKLRR

SEQ ID NO: 72105 - protein, 8 aa, Artificial sequence
  Protein classification predicting sequence
KGDLEAVL

SEQ ID NO: 72106 - protein, 6 aa, Artificial sequence
  Protein classification predicting sequence
EISRFP

SEQ ID NO: 72107 - protein, 6 aa, Artificial sequence
  Protein classification predicting sequence
NRRDIA

SEQ ID NO: 72108 - protein, 7 aa, Artificial sequence
  Protein classification predicting sequence
GKGVAEG

SEQ ID NO: 72109 - protein, 11 aa, Artificial sequence
  Protein classification predicting sequence
RTLEEEEIAAT

SEQ ID NO: 72110 - protein, 10 aa, Artificial sequence
  Protein classification predicting sequence
FKIKKAKLRG

SEQ ID NO: 72111 - protein, 11 aa, Artificial sequence
  Protein classification predicting sequence
ACPRYLGRVVK

SEQ ID NO: 72112 - protein, 13 aa, Artificial sequence
  Protein classification predicting sequence
AFFAPDHIRGRAR

SEQ ID NO: 72113 - protein, 6 aa, Artificial sequence
  Protein classification predicting sequence
MSAMRL

SEQ ID NO: 72114 - protein, 27 aa, Artificial sequence
  Protein classification predicting sequence
GVIGTVHPELERKFGLNGRTIVFEIEW

SEQ ID NO: 72115 - protein, 9 aa, Artificial sequence
  Protein classification predicting sequence
ERTLEDADI

SEQ ID NO: 72116 - protein, 6 aa, Artificial sequence
  Protein classification predicting sequence
VAPTWR

SEQ ID NO: 72117 - protein, 8 aa, Artificial sequence
  Protein classification predicting sequence
PWHPGRCA

SEQ ID NO: 72118 - protein, 7 aa, Artificial sequence
  Protein classification predicting sequence
KLPAIDL

SEQ ID NO: 72119 - protein, 8 aa, Artificial sequence
  Protein classification predicting sequence
KQRLERSG

SEQ ID NO: 72120 - protein, 9 aa, Artificial sequence
  Protein classification predicting sequence
PIALAGVMG

SEQ ID NO: 72121 - protein, 6 aa, Artificial sequence
  Protein classification predicting sequence
LAGVMG

SEQ ID NO: 72122 - protein, 7 aa, Artificial sequence
  Protein classification predicting sequence
HPALHPG

SEQ ID NO: 72123 - protein, 8 aa, Artificial sequence
  Protein classification predicting sequence
GYLGALHP

SEQ ID NO: 72124 - protein, 9 aa, Artificial sequence
  Protein classification predicting sequence
ARSYGLHTD

SEQ ID NO: 72125 - protein, 6 aa, Artificial sequence
  Protein classification predicting sequence
RVRLFE

SEQ ID NO: 72126 - protein, 8 aa, Artificial sequence
  Protein classification predicting sequence
QEPMLAGV

SEQ ID NO: 72127 - protein, 12 aa, Artificial sequence
  Protein classification predicting sequence
VDFFDVKADVEA

SEQ ID NO: 72128 - protein, 6 aa, Artificial sequence
  Protein classification predicting sequence
YGYNNI

SEQ ID NO: 72129 - protein, 15 aa, Artificial sequence
  Protein classification predicting sequence
DSKDTNRPDLWSAEG

SEQ ID NO: 72130 - protein, 6 aa, Artificial sequence
  Protein classification predicting sequence
VLSMPP

SEQ ID NO: 72131 - protein, 8 aa, Artificial sequence
  Protein classification predicting sequence
NTHEEYPQ

SEQ ID NO: 72132 - protein, 7 aa, Artificial sequence
  Protein classification predicting sequence
REPVRMR

SEQ ID NO: 72133 - protein, 16 aa, Artificial sequence
  Protein classification predicting sequence
RFDIEIEEDLIEEVAR

SEQ ID NO: 72134 - protein, 7 aa, Artificial sequence
  Protein classification predicting sequence
HSALHPG

SEQ ID NO: 72135 - protein, 7 aa, Artificial sequence
  Protein classification predicting sequence
GETPVKV

SEQ ID NO: 72136 - protein, 22 aa, Artificial sequence
  Protein classification predicting sequence
LKLANPIAADMSDMRPSLLPGL

SEQ ID NO: 72137 - protein, 8 aa, Artificial sequence
  Protein classification predicting sequence
GVKNGPSP

SEQ ID NO: 72138 - protein, 6 aa, Artificial sequence
  Protein classification predicting sequence
GQPMHA

SEQ ID NO: 72139 - protein, 6 aa, Artificial sequence
  Protein classification predicting sequence
GIARDL

SEQ ID NO: 72140 - protein, 9 aa, Artificial sequence
  Protein classification predicting sequence
DTLPITVEA

SEQ ID NO: 72141 - protein, 15 aa, Artificial sequence
  Protein classification predicting sequence
ACPRYLGRVVKGINV

SEQ ID NO: 72142 - protein, 13 aa, Artificial sequence
  Protein classification predicting sequence
GGIVVRMAKEGET

SEQ ID NO: 72143 - protein, 13 aa, Artificial sequence
  Protein classification predicting sequence
DILRRLGCEVTEG

SEQ ID NO: 72144 - protein, 15 aa, Artificial sequence
  Protein classification predicting sequence
WRFDMEIEEDLVEEV

SEQ ID NO: 72145 - protein, 12 aa, Artificial sequence
  Protein classification predicting sequence
RVYGYNNIPDEP

SEQ ID NO: 72146 - protein, 18 aa, Artificial sequence
  Protein classification predicting sequence
LIMGTHREADLSLKRVKT

SEQ ID NO: 72147 - protein, 10 aa, Artificial sequence
  Protein classification predicting sequence
GLRFVPDTQA

SEQ ID NO: 72148 - protein, 18 aa, Artificial sequence
  Protein classification predicting sequence
LGIRQDLMLAGVICGNRY

SEQ ID NO: 72149 - protein, 20 aa, Artificial sequence
  Protein classification predicting sequence
EHWNLAKETVDFYDLKGDLE

SEQ ID NO: 72150 - protein, 8 aa, Artificial sequence
  Protein classification predicting sequence
VLDLTGKL

SEQ ID NO: 72151 - protein, 40 aa, Artificial sequence
  Protein classification predicting sequence
GTDIREYLKLDDNTIEISVTPNRADCLGIIGVARDVAVLN

SEQ ID NO: 72152 - protein, 45 aa, Artificial sequence
  Protein classification predicting sequence
APTPLWMKEKLRRCGIRSIDAVVDVTNYVLLELGQPMHAFDKDRI

SEQ ID NO: 72153 - protein, 31 aa, Artificial sequence
  Protein classification predicting sequence
NEATLPKRATITLRRSKLDRLIGHHIADEQV

SEQ ID NO: 72154 - protein, 21 aa, Artificial sequence
  Protein classification predicting sequence
LNDKGYQEVITYSFVDPKVQQ

SEQ ID NO: 72155 - protein, 21 aa, Artificial sequence
  Protein classification predicting sequence
GLLATVVYNQNRQQNRVRIFE

SEQ ID NO: 72156 - protein, 30 aa, Artificial sequence
  Protein classification predicting sequence
GVVHPELERKLDLNGRTLVFELEWNKLADR

SEQ ID NO: 72157 - protein, 10 aa, Artificial sequence
  Protein classification predicting sequence
QITMAGLEVD

SEQ ID NO: 72158 - protein, 6 aa, Artificial sequence
  Protein classification predicting sequence
GEVVEC

SEQ ID NO: 72159 - protein, 6 aa, Artificial sequence
  Protein classification predicting sequence
NRADCL

SEQ ID NO: 72160 - protein, 5 aa, Artificial sequence
  Protein classification predicting sequence
TPLWM

SEQ ID NO: 72161 - protein, 8 aa, Artificial sequence
  Protein classification predicting sequence
GQPMHAFD

SEQ ID NO: 72162 - protein, 8 aa, Artificial sequence
  Protein classification predicting sequence
TYSFVDPK

SEQ ID NO: 72163 - protein, 6 aa, Artificial sequence
  Protein classification predicting sequence
LPNPIS

SEQ ID NO: 72164 - protein, 33 aa, Artificial sequence
  Protein classification predicting sequence
LPGDFKIKAAKLRGEPSEGMLCSFSELGISDDH

SEQ ID NO: 72165 - protein, 27 aa, Artificial sequence
  Protein classification predicting sequence
PLSITGRARRHGLHTDASHRYERGVDP

SEQ ID NO: 72166 - protein, 9 aa, Artificial sequence
  Protein classification predicting sequence
RFERGVDPA

SEQ ID NO: 72167 - protein, 8 aa, Artificial sequence
  Protein classification predicting sequence
RDFAFVVD

SEQ ID NO: 72168 - protein, 43 aa, Artificial sequence
  Protein classification predicting sequence
KVTSGQLTDRQYKTRMVKEVLEGAGLDQAITYSLVSKEDATAF

SEQ ID NO: 72169 - protein, 14 aa, Artificial sequence
  Protein classification predicting sequence
LAERITRTGIEVDD

SEQ ID NO: 72170 - protein, 8 aa, Artificial sequence
  Protein classification predicting sequence
IDYTKDIK

SEQ ID NO: 72171 - protein, 9 aa, Artificial sequence
  Protein classification predicting sequence
KLVVGHVLS

SEQ ID NO: 72172 - protein, 7 aa, Artificial sequence
  Protein classification predicting sequence
ESGIYVF

SEQ ID NO: 72173 - protein, 18 aa, Artificial sequence
  Protein classification predicting sequence
DQVMEFDLTPNRADALSM

SEQ ID NO: 72174 - protein, 10 aa, Artificial sequence
  Protein classification predicting sequence
TPNRADALSM

SEQ ID NO: 72175 - protein, 8 aa, Artificial sequence
  Protein classification predicting sequence
NRADALSM

SEQ ID NO: 72176 - protein, 10 aa, Artificial sequence
  Protein classification predicting sequence
GTAYEVAALY

SEQ ID NO: 72177 - protein, 9 aa, Artificial sequence
  Protein classification predicting sequence
NEDKVPYYS

SEQ ID NO: 72178 - protein, 8 aa, Artificial sequence
  Protein classification predicting sequence
RVVHDVTI

SEQ ID NO: 72179 - protein, 10 aa, Artificial sequence
  Protein classification predicting sequence
GVMGGDFSEV

SEQ ID NO: 72180 - protein, 7 aa, Artificial sequence
  Protein classification predicting sequence
VLKDRVS

SEQ ID NO: 72181 - protein, 6 aa, Artificial sequence
  Protein classification predicting sequence
NRTIGF

SEQ ID NO: 72182 - protein, 7 aa, Artificial sequence
  Protein classification predicting sequence
QLGFDTE

SEQ ID NO: 72183 - protein, 8 aa, Artificial sequence
  Protein classification predicting sequence
VPSRRKDI

SEQ ID NO: 72184 - protein, 10 aa, Artificial sequence
  Protein classification predicting sequence
EEVARIYGYD

SEQ ID NO: 72185 - protein, 17 aa, Artificial sequence
  Protein classification predicting sequence
LEGAGLDQAITYSLVSK

SEQ ID NO: 72186 - protein, 9 aa, Artificial sequence
  Protein classification predicting sequence
LLMPMSEAH

SEQ ID NO: 72187 - protein, 10 aa, Artificial sequence
  Protein classification predicting sequence
LRQSLLPHLI

SEQ ID NO: 72188 - protein, 8 aa, Artificial sequence
  Protein classification predicting sequence
NGEGELPD

SEQ ID NO: 72189 - protein, 11 aa, Artificial sequence
  Protein classification predicting sequence
VEYLSGILTGD

SEQ ID NO: 72190 - protein, 12 aa, Artificial sequence
  Protein classification predicting sequence
NDLKRTYVFELN

SEQ ID NO: 72191 - protein, 8 aa, Artificial sequence
  Protein classification predicting sequence
VSVGYINY

SEQ ID NO: 72192 - protein, 15 aa, Artificial sequence
  Protein classification predicting sequence
GEHLEKGKKSIAIRL

SEQ ID NO: 72193 - protein, 13 aa, Artificial sequence
  Protein classification predicting sequence
VIVAKVGGRLPGG

SEQ ID NO: 72194 - protein, 26 aa, Artificial sequence
  Protein classification predicting sequence
KIKRAKLRGERSEGMICSLQEIGISS

SEQ ID NO: 72195 - protein, 33 aa, Artificial sequence
  Protein classification predicting sequence
RLIKAGIRPINNVVDISNYVLLEYGQPLHMFDQ

SEQ ID NO: 72196 - protein, 47 aa, Artificial sequence
  Protein classification predicting sequence
EGAIFDPVSIRHTSRRLNLRSESSSRFEKGIATEFVDEAVDRACYLL

SEQ ID NO: 72197 - protein, 39 aa, Artificial sequence
  Protein classification predicting sequence
VIVAVPGARIADNYKIKKGKIRGMESLGMICSLQELGLS

SEQ ID NO: 72198 - protein, 22 aa, Artificial sequence
  Protein classification predicting sequence
SIRKTSGRLNLRSESSSRFEKG

SEQ ID NO: 72199 - protein, 7 aa, Artificial sequence
  Protein classification predicting sequence
NPKEDLP

SEQ ID NO: 72200 - protein, 6 aa, Artificial sequence
  Protein classification predicting sequence
GQPLHA

SEQ ID NO: 72201 - protein, 16 aa, Artificial sequence
  Protein classification predicting sequence
ELAEKMSTTGIEVEGV

SEQ ID NO: 72202 - protein, 10 aa, Artificial sequence
  Protein classification predicting sequence
PVALAGVMGG

SEQ ID NO: 72203 - protein, 12 aa, Artificial sequence
  Protein classification predicting sequence
VVLEAAVFDGKS

SEQ ID NO: 72204 - protein, 15 aa, Artificial sequence
  Protein classification predicting sequence
RLNLRSESSSRFEKG

SEQ ID NO: 72205 - protein, 13 aa, Artificial sequence
  Protein classification predicting sequence
ADLVEEIARIYGY

SEQ ID NO: 72206 - protein, 9 aa, Artificial sequence
  Protein classification predicting sequence
YALTTPEKA

SEQ ID NO: 72207 - protein, 6 aa, Artificial sequence
  Protein classification predicting sequence
YNVARK

SEQ ID NO: 72208 - protein, 9 aa, Artificial sequence
  Protein classification predicting sequence
NLALYEIGK

SEQ ID NO: 72209 - protein, 9 aa, Artificial sequence
  Protein classification predicting sequence
PVDFFYAKG

SEQ ID NO: 72210 - protein, 11 aa, Artificial sequence
  Protein classification predicting sequence
ANMHPGRTALI

SEQ ID NO: 72211 - protein, 6 aa, Artificial sequence
  Protein classification predicting sequence
ITKFPA

SEQ ID NO: 72212 - protein, 29 aa, Artificial sequence
  Protein classification predicting sequence
KSMAYSLTFQNPNDNLTDEEVAKYMEKIT

SEQ ID NO: 72213 - protein, 14 aa, Artificial sequence
  Protein classification predicting sequence
LAEKMSTTGIEVEG

SEQ ID NO: 72214 - protein, 7 aa, Artificial sequence
  Protein classification predicting sequence
VPRRRWD

SEQ ID NO: 72215 - protein, 66 aa, Artificial sequence
  Protein classification predicting sequence
SIPADLVEEIARIYGYDKLPTTLPEAGGTAAELTPTQALRRKVRGLAEGLGLTEIISYALTTPEKA

SEQ ID NO: 72216 - protein, 7 aa, Artificial sequence
  Protein classification predicting sequence
LTTPEKA

SEQ ID NO: 72217 - protein, 58 aa, Artificial sequence
  Protein classification predicting sequence
EFAVAPSHLTELMWPMSVERSALRQNMVSGMLDTVAYNVARKQSNLALYEIGKIFEQE

SEQ ID NO: 72218 - protein, 7 aa, Artificial sequence
  Protein classification predicting sequence
RSALRQN

SEQ ID NO: 72219 - protein, 51 aa, Artificial sequence
  Protein classification predicting sequence
EAVPGDAIFKYLDLDDHIIELSITPNRADALSMRGVAHEVAAIYGKSVSFP

SEQ ID NO: 72220 - protein, 17 aa, Artificial sequence
  Protein classification predicting sequence
RAARQGESLVTLDGEKR

SEQ ID NO: 72221 - protein, 8 aa, Artificial sequence
  Protein classification predicting sequence
TEPVEVST

SEQ ID NO: 72222 - protein, 7 aa, Artificial sequence
  Protein classification predicting sequence
EITKFPA

SEQ ID NO: 72223 - protein, 13 aa, Artificial sequence
  Protein classification predicting sequence
VLSCEDVPETHLH

SEQ ID NO: 72224 - protein, 6 aa, Artificial sequence
  Protein classification predicting sequence
GMICSL

SEQ ID NO: 72225 - protein, 12 aa, Artificial sequence
  Protein classification predicting sequence
PSPQWLQNLLMN

SEQ ID NO: 72226 - protein, 12 aa, Artificial sequence
  Protein classification predicting sequence
LLYFGQPMHAFD

SEQ ID NO: 72227 - protein, 24 aa, Artificial sequence
  Protein classification predicting sequence
DLVITVADKPVALAGVMGGQATEI

SEQ ID NO: 72228 - protein, 7 aa, Artificial sequence
  Protein classification predicting sequence
VNRVLGT

SEQ ID NO: 72229 - protein, 8 aa, Artificial sequence
  Protein classification predicting sequence
VPRRRWDI

SEQ ID NO: 72230 - protein, 40 aa, Artificial sequence
  Protein classification predicting sequence
PSPQWLQNLLMNAGIRPINNVVDVTNYVLLYFGQPMHAFD

SEQ ID NO: 72231 - protein, 17 aa, Artificial sequence
  Protein classification predicting sequence
TVLEALDFAAAMLQELA

SEQ ID NO: 72232 - protein, 8 aa, Artificial sequence
  Protein classification predicting sequence
LGFGLTGD

SEQ ID NO: 72233 - protein, 9 aa, Artificial sequence
  Protein classification predicting sequence
KLPTTLPEA

SEQ ID NO: 72234 - protein, 7 aa, Artificial sequence
  Protein classification predicting sequence
TELMWPM

SEQ ID NO: 72235 - protein, 8 aa, Artificial sequence
  Protein classification predicting sequence
IPETYVAE

SEQ ID NO: 72236 - protein, 5 aa, Artificial sequence
  Protein classification predicting sequence
VSYKW

SEQ ID NO: 72237 - protein, 7 aa, Artificial sequence
  Protein classification predicting sequence
IVCGAPN

SEQ ID NO: 72238 - protein, 7 aa, Artificial sequence
  Protein classification predicting sequence
NRADALS

SEQ ID NO: 72239 - protein, 7 aa, Artificial sequence
  Protein classification predicting sequence
VTIAPSP

SEQ ID NO: 72240 - protein, 7 aa, Artificial sequence
  Protein classification predicting sequence
TQNIVLE

SEQ ID NO: 72241 - protein, 8 aa, Artificial sequence
  Protein classification predicting sequence
DLIEEIGR

SEQ ID NO: 72242 - protein, 11 aa, Artificial sequence
  Protein classification predicting sequence
AGIRPINNVVD

SEQ ID NO: 72243 - protein, 7 aa, Artificial sequence
  Protein classification predicting sequence
RDIAVVV

SEQ ID NO: 72244 - protein, 6 aa, Artificial sequence
  Protein classification predicting sequence
GFIGQL

SEQ ID NO: 72245 - protein, 20 aa, Artificial sequence
  Protein classification predicting sequence
TTDELTHQITMAGLEVDDVL

SEQ ID NO: 72246 - protein, 13 aa, Artificial sequence
  Protein classification predicting sequence
QHPDADKLRVTKV

SEQ ID NO: 72247 - protein, 9 aa, Artificial sequence
  Protein classification predicting sequence
ADKLRVTKV

SEQ ID NO: 72248 - protein, 7 aa, Artificial sequence
  Protein classification predicting sequence
VDITNFV

SEQ ID NO: 72249 - protein, 6 aa, Artificial sequence
  Protein classification predicting sequence
GGIVVR

SEQ ID NO: 72250 - protein, 42 aa, Artificial sequence
  Protein classification predicting sequence
TKDVLLECAFFAPDHIRGRARSYGLHTDSSMRFERGVDYALQ

SEQ ID NO: 72251 - protein, 8 aa, Artificial sequence
  Protein classification predicting sequence
LLVEICGG

SEQ ID NO: 72252 - protein, 14 aa, Artificial sequence
  Protein classification predicting sequence
PLKRVRDLLVDRGY

SEQ ID NO: 72253 - protein, 31 aa, Artificial sequence
  Protein classification predicting sequence
LIQGLLNTVVHNQKRQQPRVRLFEYGLRFIP

SEQ ID NO: 72254 - protein, 8 aa, Artificial sequence
  Protein classification predicting sequence
ADKLRVTK

SEQ ID NO: 72255 - protein, 19 aa, Artificial sequence
  Protein classification predicting sequence
IGTVHPELERKFGLNGRTI

SEQ ID NO: 72256 - protein, 25 aa, Artificial sequence
  Protein classification predicting sequence
TPLWMQEKLRRCGIRSIDPVVDITN

SEQ ID NO: 72257 - protein, 7 aa, Artificial sequence
  Protein classification predicting sequence
LNADTLV

SEQ ID NO: 72258 - protein, 8 aa, Artificial sequence
  Protein classification predicting sequence
ADHNKALA

SEQ ID NO: 72259 - protein, 9 aa, Artificial sequence
  Protein classification predicting sequence
NRRDIAVVV

SEQ ID NO: 72260 - protein, 7 aa, Artificial sequence
  Protein classification predicting sequence
RATELIL

SEQ ID NO: 72261 - protein, 7 aa, Artificial sequence
  Protein classification predicting sequence
RFDIAIE

SEQ ID NO: 72262 - protein, 6 aa, Artificial sequence
  Protein classification predicting sequence
DLKGDL

SEQ ID NO: 72263 - protein, 16 aa, Artificial sequence
  Protein classification predicting sequence
APSRRFDIAIEEDLIE

SEQ ID NO: 72264 - protein, 7 aa, Artificial sequence
  Protein classification predicting sequence
IEEDLIE

SEQ ID NO: 72265 - protein, 7 aa, Artificial sequence
  Protein classification predicting sequence
ELPDDAP

SEQ ID NO: 72266 - protein, 15 aa, Artificial sequence
  Protein classification predicting sequence
AIMGRGRKLGLHTDA

SEQ ID NO: 72267 - protein, 9 aa, Artificial sequence
  Protein classification predicting sequence
GLHTDASHR

SEQ ID NO: 72268 - protein, 8 aa, Artificial sequence
  Protein classification predicting sequence
HRFERGVD

SEQ ID NO: 72269 - protein, 12 aa, Artificial sequence
  Protein classification predicting sequence
ARELQETINYAF

SEQ ID NO: 72270 - protein, 7 aa, Artificial sequence
  Protein classification predicting sequence
LFDRYVG

SEQ ID NO: 72271 - protein, 8 aa, Artificial sequence
  Protein classification predicting sequence
LQDDTRTL

SEQ ID NO: 72272 - protein, 35 aa, Artificial sequence
  Protein classification predicting sequence
LPDASIEIKLTPNRADCFSVRGIAFDVAAACASEV

SEQ ID NO: 72273 - protein, 25 aa, Artificial sequence
  Protein classification predicting sequence
RPVSLLVDITQYVMLELGQPMHAFD

SEQ ID NO: 72274 - protein, 6 aa, Artificial sequence
  Protein classification predicting sequence
VVDVTN

SEQ ID NO: 72275 - protein, 8 aa, Artificial sequence
  Protein classification predicting sequence
DILRRLGC

SEQ ID NO: 72276 - protein, 9 aa, Artificial sequence
  Protein classification predicting sequence
ITYSFVDPK

SEQ ID NO: 72277 - protein, 6 aa, Artificial sequence
  Protein classification predicting sequence
LGIRQD

SEQ ID NO: 72278 - protein, 6 aa, Artificial sequence
  Protein classification predicting sequence
RYDEHW

SEQ ID NO: 72279 - protein, 7 aa, Artificial sequence
  Protein classification predicting sequence
WNKLADR

SEQ ID NO: 72280 - protein, 12 aa, Artificial sequence
  Protein classification predicting sequence
NQVVGVNLFDVY

SEQ ID NO: 72281 - protein, 20 aa, Artificial sequence
  Protein classification predicting sequence
RTLEEEEIAATVAKCVEALK

SEQ ID NO: 72282 - protein, 10 aa, Artificial sequence
  Protein classification predicting sequence
LILTLHNYWA

SEQ ID NO: 72283 - protein, 14 aa, Artificial sequence
  Protein classification predicting sequence
LQPYDMEVGAGTFH

SEQ ID NO: 72284 - protein, 16 aa, Artificial sequence
  Protein classification predicting sequence
DGRYGENPNRLQHYYQ

SEQ ID NO: 72285 - protein, 6 aa, Artificial sequence
  Protein classification predicting sequence
ISVTER

SEQ ID NO: 72286 - protein, 8 aa, Artificial sequence
  Protein classification predicting sequence
LRALGPEP

SEQ ID NO: 72287 - protein, 6 aa, Artificial sequence
  Protein classification predicting sequence
GWEVWL

SEQ ID NO: 72288 - protein, 8 aa, Artificial sequence
  Protein classification predicting sequence
EQSTYNFE

SEQ ID NO: 72289 - protein, 15 aa, Artificial sequence
  Protein classification predicting sequence
LGINPLEHDIRFVED

SEQ ID NO: 72290 - protein, 8 aa, Artificial sequence
  Protein classification predicting sequence
HDIRFVED

SEQ ID NO: 72291 - protein, 8 aa, Artificial sequence
  Protein classification predicting sequence
TQFTYFQQ

SEQ ID NO: 72292 - protein, 5 aa, Artificial sequence
  Protein classification predicting sequence
AMYIQ

SEQ ID NO: 72293 - protein, 9 aa, Artificial sequence
  Protein classification predicting sequence
LDARGAISV

SEQ ID NO: 72294 - protein, 9 aa, Artificial sequence
  Protein classification predicting sequence
AYVEPSRRP

SEQ ID NO: 72295 - protein, 18 aa, Artificial sequence
  Protein classification predicting sequence
ERLASYIQDKENVFDLEW

SEQ ID NO: 72296 - protein, 7 aa, Artificial sequence
  Protein classification predicting sequence
REKLGFP

SEQ ID NO: 72297 - protein, 6 aa, Artificial sequence
  Protein classification predicting sequence
LMQAYD

SEQ ID NO: 72298 - protein, 8 aa, Artificial sequence
  Protein classification predicting sequence
ERLASYIQ

SEQ ID NO: 72299 - protein, 8 aa, Artificial sequence
  Protein classification predicting sequence
FQGLILTL

SEQ ID NO: 72300 - protein, 6 aa, Artificial sequence
  Protein classification predicting sequence
GAGTFH

SEQ ID NO: 72301 - protein, 8 aa, Artificial sequence
  Protein classification predicting sequence
ERQSYILR

SEQ ID NO: 72302 - protein, 6 aa, Artificial sequence
  Protein classification predicting sequence
YILRIR

SEQ ID NO: 72303 - protein, 9 aa, Artificial sequence
  Protein classification predicting sequence
RRPTDGRYG

SEQ ID NO: 72304 - protein, 10 aa, Artificial sequence
  Protein classification predicting sequence
DIRFVEDNWE

SEQ ID NO: 72305 - protein, 12 aa, Artificial sequence
  Protein classification predicting sequence
DIRFVEDNWENP

SEQ ID NO: 72306 - protein, 18 aa, Artificial sequence
  Protein classification predicting sequence
DIRFVEDNWENPTLGAWG

SEQ ID NO: 72307 - protein, 6 aa, Artificial sequence
  Protein classification predicting sequence
FNLLDA

SEQ ID NO: 72308 - protein, 9 aa, Artificial sequence
  Protein classification predicting sequence
GAGTFHPAT

SEQ ID NO: 72309 - protein, 6 aa, Artificial sequence
  Protein classification predicting sequence
YYQFQV

SEQ ID NO: 72310 - protein, 6 aa, Artificial sequence
  Protein classification predicting sequence
WNAAYV

SEQ ID NO: 72311 - protein, 9 aa, Artificial sequence
  Protein classification predicting sequence
WCDGMEVSQ

SEQ ID NO: 72312 - protein, 7 aa, Artificial sequence
  Protein classification predicting sequence
MVLKASH

SEQ ID NO: 72313 - protein, 6 aa, Artificial sequence
  Protein classification predicting sequence
MILALQ

SEQ ID NO: 72314 - protein, 11 aa, Artificial sequence
  Protein classification predicting sequence
EVGAGTFHPAT

SEQ ID NO: 72315 - protein, 8 aa, Artificial sequence
  Protein classification predicting sequence
QHYYQFQV

SEQ ID NO: 72316 - protein, 5 aa, Artificial sequence
  Protein classification predicting sequence
GWEVW

SEQ ID NO: 72317 - protein, 6 aa, Artificial sequence
  Protein classification predicting sequence
VAEAYY

SEQ ID NO: 72318 - protein, 6 aa, Artificial sequence
  Protein classification predicting sequence
GPEPWN

SEQ ID NO: 72319 - protein, 8 aa, Artificial sequence
  Protein classification predicting sequence
YQHHQFQV

SEQ ID NO: 72320 - protein, 8 aa, Artificial sequence
  Protein classification predicting sequence
GLGWEVWL

SEQ ID NO: 72321 - protein, 11 aa, Artificial sequence
  Protein classification predicting sequence
KTFQGMILALQ

SEQ ID NO: 72322 - protein, 7 aa, Artificial sequence
  Protein classification predicting sequence
GCTIVQP

SEQ ID NO: 72323 - protein, 8 aa, Artificial sequence
  Protein classification predicting sequence
LKAAHSFN

SEQ ID NO: 72324 - protein, 15 aa, Artificial sequence
  Protein classification predicting sequence
VAEAYYASREALGFP

SEQ ID NO: 72325 - protein, 19 aa, Artificial sequence
  Protein classification predicting sequence
TYGDVFHQNEVEQSTYNFE

SEQ ID NO: 72326 - protein, 15 aa, Artificial sequence
  Protein classification predicting sequence
PLPLPAYERILKAAH

SEQ ID NO: 72327 - protein, 10 aa, Artificial sequence
  Protein classification predicting sequence
TYGLERLAMY

SEQ ID NO: 72328 - protein, 17 aa, Artificial sequence
  Protein classification predicting sequence
PSRRPADGRYGENPNRL

SEQ ID NO: 72329 - protein, 8 aa, Artificial sequence
  Protein classification predicting sequence
QHHQFQVV

SEQ ID NO: 72330 - protein, 8 aa, Artificial sequence
  Protein classification predicting sequence
QEIILTLQ

SEQ ID NO: 72331 - protein, 8 aa, Artificial sequence
  Protein classification predicting sequence
DQGCMLMQ

SEQ ID NO: 72332 - protein, 58 aa, Artificial sequence
  Protein classification predicting sequence
EKGAGTMSPYTFLRAIGPEPWNAAYVEPSRRPADGRYGENPNRLYQHHQFQVVMKPSP

SEQ ID NO: 72333 - protein, 25 aa, Artificial sequence
  Protein classification predicting sequence
SLEKLGINPLEHDIRFVEDNWENPS

SEQ ID NO: 72334 - protein, 13 aa, Artificial sequence
  Protein classification predicting sequence
QHHQFQVVMKPSP

SEQ ID NO: 72335 - protein, 7 aa, Artificial sequence
  Protein classification predicting sequence
RIRNLAR

SEQ ID NO: 72336 - protein, 25 aa, Artificial sequence
  Protein classification predicting sequence
GCVVLQPYDMEVGAGTFHTATFLRA

SEQ ID NO: 72337 - protein, 15 aa, Artificial sequence
  Protein classification predicting sequence
AYVQPSRRPTDGRYG

SEQ ID NO: 72338 - protein, 8 aa, Artificial sequence
  Protein classification predicting sequence
RFVEDNWE

SEQ ID NO: 72339 - protein, 6 aa, Artificial sequence
  Protein classification predicting sequence
ECFPVT

SEQ ID NO: 72340 - protein, 14 aa, Artificial sequence
  Protein classification predicting sequence
TYGDVFHQNEVEQS

SEQ ID NO: 72341 - protein, 10 aa, Artificial sequence
  Protein classification predicting sequence
KLFELFDFYE

SEQ ID NO: 72342 - protein, 11 aa, Artificial sequence
  Protein classification predicting sequence
DMEVGAGTSHP

SEQ ID NO: 72343 - protein, 13 aa, Artificial sequence
  Protein classification predicting sequence
NPNRLQHYYQFQV

SEQ ID NO: 72344 - protein, 6 aa, Artificial sequence
  Protein classification predicting sequence
VYDLVW

SEQ ID NO: 72345 - protein, 13 aa, Artificial sequence
  Protein classification predicting sequence
HQNEVEQSTYNFE

SEQ ID NO: 72346 - protein, 18 aa, Artificial sequence
  Protein classification predicting sequence
PAYDYVLKCSHTFNLLDA

SEQ ID NO: 72347 - protein, 11 aa, Artificial sequence
  Protein classification predicting sequence
GYIARIRNLAR

SEQ ID NO: 72348 - protein, 12 aa, Artificial sequence
  Protein classification predicting sequence
KPSPDNIQELYL

SEQ ID NO: 72349 - protein, 8 aa, Artificial sequence
  Protein classification predicting sequence
YWAEQGCV

SEQ ID NO: 72350 - protein, 11 aa, Artificial sequence
  Protein classification predicting sequence
HDIRFVEDNWE

SEQ ID NO: 72351 - protein, 11 aa, Artificial sequence
  Protein classification predicting sequence
DGRYGENPNRL

SEQ ID NO: 72352 - protein, 6 aa, Artificial sequence
  Protein classification predicting sequence
DPLVHD

SEQ ID NO: 72353 - protein, 6 aa, Artificial sequence
  Protein classification predicting sequence
QVILKP

SEQ ID NO: 72354 - protein, 14 aa, Artificial sequence
  Protein classification predicting sequence
WESPTLGAWGLGWE

SEQ ID NO: 72355 - protein, 10 aa, Artificial sequence
  Protein classification predicting sequence
QFTYFQQVGG

SEQ ID NO: 72356 - protein, 6 aa, Artificial sequence
  Protein classification predicting sequence
YILRVR

SEQ ID NO: 72357 - protein, 10 aa, Artificial sequence
  Protein classification predicting sequence
AAYVQPSRRP

SEQ ID NO: 72358 - protein, 8 aa, Artificial sequence
  Protein classification predicting sequence
RFVEDDWE

SEQ ID NO: 72359 - protein, 6 aa, Artificial sequence
  Protein classification predicting sequence
LGFPMC

SEQ ID NO: 72360 - protein, 19 aa, Artificial sequence
  Protein classification predicting sequence
DGRYGENPNRLQHYYQYQV

SEQ ID NO: 72361 - protein, 42 aa, Artificial sequence
  Protein classification predicting sequence
RFVEDDWESPTLGAWGLGWECWCDGMEVSQFTYFQQVCGIEC

SEQ ID NO: 72362 - protein, 6 aa, Artificial sequence
  Protein classification predicting sequence
VFPAYD

SEQ ID NO: 72363 - protein, 9 aa, Artificial sequence
  Protein classification predicting sequence
AYVQPSRRP

SEQ ID NO: 72364 - protein, 8 aa, Artificial sequence
  Protein classification predicting sequence
WESPTLGA

SEQ ID NO: 72365 - protein, 7 aa, Artificial sequence
  Protein classification predicting sequence
KASHAFN

SEQ ID NO: 72366 - protein, 8 aa, Artificial sequence
  Protein classification predicting sequence
KPSPDNIQ

SEQ ID NO: 72367 - protein, 10 aa, Artificial sequence
  Protein classification predicting sequence
NIQELYLGSL

SEQ ID NO: 72368 - protein, 8 aa, Artificial sequence
  Protein classification predicting sequence
DMEVGAGT

SEQ ID NO: 72369 - protein, 27 aa, Artificial sequence
  Protein classification predicting sequence
PTLGAWGLGWEVWLNGMEVTQFTYFQQ

SEQ ID NO: 72370 - protein, 9 aa, Artificial sequence
  Protein classification predicting sequence
HAFNLLDAR

SEQ ID NO: 72371 - protein, 7 aa, Artificial sequence
  Protein classification predicting sequence
FNLLDAR

SEQ ID NO: 72372 - protein, 13 aa, Artificial sequence
  Protein classification predicting sequence
AISVTERQRYILR

SEQ ID NO: 72373 - protein, 27 aa, Artificial sequence
  Protein classification predicting sequence
RIRNLARVVAKTFVAERKKLGFPLLDE

SEQ ID NO: 72374 - protein, 7 aa, Artificial sequence
  Protein classification predicting sequence
NIQELYL

SEQ ID NO: 72375 - protein, 8 aa, Artificial sequence
  Protein classification predicting sequence
LVHPAYDY

SEQ ID NO: 72376 - protein, 8 aa, Artificial sequence
  Protein classification predicting sequence
AKTFVAER

SEQ ID NO: 72377 - protein, 36 aa, Artificial sequence
  Protein classification predicting sequence
RALEEGLVHPAYDYVLKCSHTFNLLDARGAVSVTER

SEQ ID NO: 72378 - protein, 8 aa, Artificial sequence
  Protein classification predicting sequence
GVKYGEIF

SEQ ID NO: 72379 - protein, 22 aa, Artificial sequence
  Protein classification predicting sequence
PVTAEVTYGLERLASYIQEVDS

SEQ ID NO: 72380 - protein, 14 aa, Artificial sequence
  Protein classification predicting sequence
RRPADGRYGENPNR

SEQ ID NO: 72381 - protein, 10 aa, Artificial sequence
  Protein classification predicting sequence
DGRYGENPNR

SEQ ID NO: 72382 - protein, 6 aa, Artificial sequence
  Protein classification predicting sequence
YYQYQV

SEQ ID NO: 72383 - protein, 10 aa, Artificial sequence
  Protein classification predicting sequence
GWEVWLDGME

SEQ ID NO: 72384 - protein, 12 aa, Artificial sequence
  Protein classification predicting sequence
GMEVTQFTYFQQ

SEQ ID NO: 72385 - protein, 7 aa, Artificial sequence
  Protein classification predicting sequence
REALGFP

SEQ ID NO: 72386 - protein, 7 aa, Artificial sequence
  Protein classification predicting sequence
EKGAGTM

SEQ ID NO: 72387 - protein, 22 aa, Artificial sequence
  Protein classification predicting sequence
AYVQPSRRPTDGRYGENPNRLQ

SEQ ID NO: 72388 - protein, 8 aa, Artificial sequence
  Protein classification predicting sequence
ERLAMYIQ

SEQ ID NO: 72389 - protein, 6 aa, Artificial sequence
  Protein classification predicting sequence
KVTYGD

SEQ ID NO: 72390 - protein, 29 aa, Artificial sequence
  Protein classification predicting sequence
KVTYGDIFHQNEVEQSTYNFEHADVDFLF

SEQ ID NO: 72391 - protein, 7 aa, Artificial sequence
  Protein classification predicting sequence
ADVDFLF

SEQ ID NO: 72392 - protein, 17 aa, Artificial sequence
  Protein classification predicting sequence
VAEAYYASREALGFPMC

SEQ ID NO: 72393 - protein, 7 aa, Artificial sequence
  Protein classification predicting sequence
GCAILQP

SEQ ID NO: 72394 - protein, 6 aa, Artificial sequence
  Protein classification predicting sequence
TLGAWG

SEQ ID NO: 72395 - protein, 6 aa, Artificial sequence
  Protein classification predicting sequence
QYEKEA

SEQ ID NO: 72396 - protein, 8 aa, Artificial sequence
  Protein classification predicting sequence
GGLECKPV

SEQ ID NO: 72397 - protein, 9 aa, Artificial sequence
  Protein classification predicting sequence
LVWTYGPDG

SEQ ID NO: 72398 - protein, 8 aa, Artificial sequence
  Protein classification predicting sequence
HQNEVEQS

SEQ ID NO: 72399 - protein, 8 aa, Artificial sequence
  Protein classification predicting sequence
QELYLASL

SEQ ID NO: 72400 - protein, 29 aa, Artificial sequence
  Protein classification predicting sequence
AYVQPSRRPTDGRYGENPNRLQHYYQFQV

SEQ ID NO: 72401 - protein, 9 aa, Artificial sequence
  Protein classification predicting sequence
HTFNLLDAR

SEQ ID NO: 72402 - protein, 23 aa, Artificial sequence
  Protein classification predicting sequence
FNLLDARKAISVTERQRYILRIR

SEQ ID NO: 72403 - protein, 6 aa, Artificial sequence
  Protein classification predicting sequence
GTEELP

SEQ ID NO: 72404 - protein, 11 aa, Artificial sequence
  Protein classification predicting sequence
DLLEEVTNLVE

SEQ ID NO: 72405 - protein, 8 aa, Artificial sequence
  Protein classification predicting sequence
DPFALRRA

SEQ ID NO: 72406 - protein, 8 aa, Artificial sequence
  Protein classification predicting sequence
PTKALEGF

SEQ ID NO: 72407 - protein, 8 aa, Artificial sequence
  Protein classification predicting sequence
IPFEITGV

SEQ ID NO: 72408 - protein, 6 aa, Artificial sequence
  Protein classification predicting sequence
PRFAGD

SEQ ID NO: 72409 - protein, 10 aa, Artificial sequence
  Protein classification predicting sequence
KGPAKKIALD

SEQ ID NO: 72410 - protein, 10 aa, Artificial sequence
  Protein classification predicting sequence
DLRYIRPIKW

SEQ ID NO: 72411 - protein, 6 aa, Artificial sequence
  Protein classification predicting sequence
GHRFLG

SEQ ID NO: 72412 - protein, 12 aa, Artificial sequence
  Protein classification predicting sequence
TTMKEHQRYFPV

SEQ ID NO: 72413 - protein, 7 aa, Artificial sequence
  Protein classification predicting sequence
EFPELQG

SEQ ID NO: 72414 - protein, 8 aa, Artificial sequence
  Protein classification predicting sequence
IADKMDTL

SEQ ID NO: 72415 - protein, 7 aa, Artificial sequence
  Protein classification predicting sequence
LRRAALG

SEQ ID NO: 72416 - protein, 6 aa, Artificial sequence
  Protein classification predicting sequence
FVRPVH

SEQ ID NO: 72417 - protein, 8 aa, Artificial sequence
  Protein classification predicting sequence
EVLITTMK

SEQ ID NO: 72418 - protein, 7 aa, Artificial sequence
  Protein classification predicting sequence
VSNIESK

SEQ ID NO: 72419 - protein, 10 aa, Artificial sequence
  Protein classification predicting sequence
LQGIMGYYYA

SEQ ID NO: 72420 - protein, 13 aa, Artificial sequence
  Protein classification predicting sequence
FFDKVMVMVDDKE

SEQ ID NO: 72421 - protein, 8 aa, Artificial sequence
  Protein classification predicting sequence
QIADISLL

SEQ ID NO: 72422 - protein, 17 aa, Artificial sequence
  Protein classification predicting sequence
EALVYTMKGDQKYFPVY

SEQ ID NO: 72423 - protein, 7 aa, Artificial sequence
  Protein classification predicting sequence
FLEVPQE

SEQ ID NO: 72424 - protein, 7 aa, Artificial sequence
  Protein classification predicting sequence
PTGSKDP

SEQ ID NO: 72425 - protein, 9 aa, Artificial sequence
  Protein classification predicting sequence
LPIAKPMRW

SEQ ID NO: 72426 - protein, 5 aa, Artificial sequence
  Protein classification predicting sequence
RPVHT

SEQ ID NO: 72427 - protein, 7 aa, Artificial sequence
  Protein classification predicting sequence
FIFVSNI

SEQ ID NO: 72428 - protein, 10 aa, Artificial sequence
  Protein classification predicting sequence
GNEKVVRPRL

SEQ ID NO: 72429 - protein, 24 aa, Artificial sequence
  Protein classification predicting sequence
MVFEFTDTQGVMGMHYARHDGEAE

SEQ ID NO: 72430 - protein, 32 aa, Artificial sequence
  Protein classification predicting sequence
GIFGIGQHPKGDKDPFALRRAALGVLRIIVEK

SEQ ID NO: 72431 - protein, 9 aa, Artificial sequence
  Protein classification predicting sequence
WFAAPRRLA

SEQ ID NO: 72432 - protein, 8 aa, Artificial sequence
  Protein classification predicting sequence
AFDAEGKP

SEQ ID NO: 72433 - protein, 7 aa, Artificial sequence
  Protein classification predicting sequence
TDKGEWL

SEQ ID NO: 72434 - protein, 7 aa, Artificial sequence
  Protein classification predicting sequence
DAEFFFK

SEQ ID NO: 72435 - protein, 16 aa, Artificial sequence
  Protein classification predicting sequence
LPRLETVLFQQQLGTL

SEQ ID NO: 72436 - protein, 35 aa, Artificial sequence
  Protein classification predicting sequence
RAGLLSKCDLMTNMVFEFTDTQGVMGMHYARHDGE

SEQ ID NO: 72437 - protein, 12 aa, Artificial sequence
  Protein classification predicting sequence
GIFGIGQAPKGS

SEQ ID NO: 72438 - protein, 6 aa, Artificial sequence
  Protein classification predicting sequence
AVSHFR

SEQ ID NO: 72439 - protein, 6 aa, Artificial sequence
  Protein classification predicting sequence
VMVNAE

SEQ ID NO: 72440 - protein, 9 aa, Artificial sequence
  Protein classification predicting sequence
LFLQVADIS

SEQ ID NO: 72441 - protein, 8 aa, Artificial sequence
  Protein classification predicting sequence
LLEIGLEE

SEQ ID NO: 72442 - protein, 12 aa, Artificial sequence
  Protein classification predicting sequence
GNEKVLVARLED

SEQ ID NO: 72443 - protein, 19 aa, Artificial sequence
  Protein classification predicting sequence
IYKFDLLTGMVGEFDELQG

SEQ ID NO: 72444 - protein, 17 aa, Artificial sequence
  Protein classification predicting sequence
VGLIPSGSNDPYALRRA

SEQ ID NO: 72445 - protein, 8 aa, Artificial sequence
  Protein classification predicting sequence
DPYALRRA

SEQ ID NO: 72446 - protein, 6 aa, Artificial sequence
  Protein classification predicting sequence
STPRRL

SEQ ID NO: 72447 - protein, 7 aa, Artificial sequence
  Protein classification predicting sequence
GPAKKIA

SEQ ID NO: 72448 - protein, 7 aa, Artificial sequence
  Protein classification predicting sequence
DPFALRR

SEQ ID NO: 72449 - protein, 9 aa, Artificial sequence
  Protein classification predicting sequence
VDPSLFENE

SEQ ID NO: 72450 - protein, 10 aa, Artificial sequence
  Protein classification predicting sequence
ATAIREHYLP

SEQ ID NO: 72451 - protein, 10 aa, Artificial sequence
  Protein classification predicting sequence
GDKLTNANVV

SEQ ID NO: 72452 - protein, 14 aa, Artificial sequence
  Protein classification predicting sequence
FMLGRFRAWYQDEG

SEQ ID NO: 72453 - protein, 7 aa, Artificial sequence
  Protein classification predicting sequence
AAPRRLA

SEQ ID NO: 72454 - protein, 12 aa, Artificial sequence
  Protein classification predicting sequence
ALRRAALGVLRI

SEQ ID NO: 72455 - protein, 10 aa, Artificial sequence
  Protein classification predicting sequence
RAGLLSKCDL

SEQ ID NO: 72456 - protein, 6 aa, Artificial sequence
  Protein classification predicting sequence
NKRVSN

SEQ ID NO: 72457 - protein, 9 aa, Artificial sequence
  Protein classification predicting sequence
VANIESKDP

SEQ ID NO: 72458 - protein, 9 aa, Artificial sequence
  Protein classification predicting sequence
LREPVDAFF

SEQ ID NO: 72459 - protein, 6 aa, Artificial sequence
  Protein classification predicting sequence
VVRPRL

SEQ ID NO: 72460 - protein, 8 aa, Artificial sequence
  Protein classification predicting sequence
LVEWPVVL

SEQ ID NO: 72461 - protein, 7 aa, Artificial sequence
  Protein classification predicting sequence
ADKLDTL

SEQ ID NO: 72462 - protein, 6 aa, Artificial sequence
  Protein classification predicting sequence
QKYFCL

SEQ ID NO: 72463 - protein, 22 aa, Artificial sequence
  Protein classification predicting sequence
VVDDVIDFMLGRFRAWYQDEGY

SEQ ID NO: 72464 - protein, 6 aa, Artificial sequence
  Protein classification predicting sequence
EKRGPA

SEQ ID NO: 72465 - protein, 75 aa, Artificial sequence
  Protein classification predicting sequence
PNMVATSLAKLPIPKLMRWGASDVHFVRPVHTVTLLLGDKVIPATILGIQSDRVIRGHRFMGEPEFTIDNADQYP

SEQ ID NO: 72466 - protein, 52 aa, Artificial sequence
  Protein classification predicting sequence
RKAKIKADAEEAARKIGGNADLSESLLEEVASLVEWPVVLTAKFEEKFLAVP

SEQ ID NO: 72467 - protein, 22 aa, Artificial sequence
  Protein classification predicting sequence
DQALKNNRLAILSDLVSKAKTI

SEQ ID NO: 72468 - protein, 19 aa, Artificial sequence
  Protein classification predicting sequence
LDFLDIHSGRVSRGHRFLG

SEQ ID NO: 72469 - protein, 8 aa, Artificial sequence
  Protein classification predicting sequence
SRGHRFLG

SEQ ID NO: 72470 - protein, 11 aa, Artificial sequence
  Protein classification predicting sequence
ETTITSADSYE

SEQ ID NO: 72471 - protein, 8 aa, Artificial sequence
  Protein classification predicting sequence
MGEKYALL

SEQ ID NO: 72472 - protein, 14 aa, Artificial sequence
  Protein classification predicting sequence
IQTFSTPRRLAVRV

SEQ ID NO: 72473 - protein, 16 aa, Artificial sequence
  Protein classification predicting sequence
DLTEDFKGPAKKIALD

SEQ ID NO: 72474 - protein, 13 aa, Artificial sequence
  Protein classification predicting sequence
KAAQGFVRGKGLT

SEQ ID NO: 72475 - protein, 10 aa, Artificial sequence
  Protein classification predicting sequence
KGEEYVYVTK

SEQ ID NO: 72476 - protein, 11 aa, Artificial sequence
  Protein classification predicting sequence
VPEEVLVTSMK

SEQ ID NO: 72477 - protein, 5 aa, Artificial sequence
  Protein classification predicting sequence
HQRYF

SEQ ID NO: 72478 - protein, 10 aa, Artificial sequence
  Protein classification predicting sequence
HQRYFVVRDQ

SEQ ID NO: 72479 - protein, 11 aa, Artificial sequence
  Protein classification predicting sequence
NVTFHEKIGSL

SEQ ID NO: 72480 - protein, 8 aa, Artificial sequence
  Protein classification predicting sequence
ARVDKMMG

SEQ ID NO: 72481 - protein, 14 aa, Artificial sequence
  Protein classification predicting sequence
VESLSRAFNLAEKA

SEQ ID NO: 72482 - protein, 21 aa, Artificial sequence
  Protein classification predicting sequence
ELGLEELPAYVVTPSEKQLGE

SEQ ID NO: 72483 - protein, 27 aa, Artificial sequence
  Protein classification predicting sequence
NVIKGNEKVLVARLEDGEFFWREDQKL

SEQ ID NO: 72484 - protein, 25 aa, Artificial sequence
  Protein classification predicting sequence
LSFFSVGLIPSGSNDPYALRRATQG

SEQ ID NO: 72485 - protein, 7 aa, Artificial sequence
  Protein classification predicting sequence
MGEKYAL

SEQ ID NO: 72486 - protein, 6 aa, Artificial sequence
  Protein classification predicting sequence
KPMRWG

SEQ ID NO: 72487 - protein, 7 aa, Artificial sequence
  Protein classification predicting sequence
EYIRPVH

SEQ ID NO: 72488 - protein, 7 aa, Artificial sequence
  Protein classification predicting sequence
KGYERVI

SEQ ID NO: 72489 - protein, 9 aa, Artificial sequence
  Protein classification predicting sequence
ELGTEELPP

SEQ ID NO: 72490 - protein, 13 aa, Artificial sequence
  Protein classification predicting sequence
QLRTLAEAFAANF

SEQ ID NO: 72491 - protein, 13 aa, Artificial sequence
  Protein classification predicting sequence
PRRLALKVANLAE

SEQ ID NO: 72492 - protein, 9 aa, Artificial sequence
  Protein classification predicting sequence
KAAEGWARG

SEQ ID NO: 72493 - protein, 11 aa, Artificial sequence
  Protein classification predicting sequence
TQFIRPVKTLT

SEQ ID NO: 72494 - protein, 22 aa, Artificial sequence
  Protein classification predicting sequence
GNEKVVRPRLADAEFFFNTDRK

SEQ ID NO: 72495 - protein, 7 aa, Artificial sequence
  Protein classification predicting sequence
FQQQLGT

SEQ ID NO: 72496 - protein, 6 aa, Artificial sequence
  Protein classification predicting sequence
KCDLMT

SEQ ID NO: 72497 - protein, 6 aa, Artificial sequence
  Protein classification predicting sequence
FMLGRF

SEQ ID NO: 72498 - protein, 7 aa, Artificial sequence
  Protein classification predicting sequence
IQAVLAR

SEQ ID NO: 72499 - protein, 18 aa, Artificial sequence
  Protein classification predicting sequence
PTKPADFDQRVKAVSHFR

SEQ ID NO: 72500 - protein, 20 aa, Artificial sequence
  Protein classification predicting sequence
EALEPAFATGNYQEALSKLA

SEQ ID NO: 72501 - protein, 13 aa, Artificial sequence
  Protein classification predicting sequence
GWARGCGITVDQA

SEQ ID NO: 72502 - protein, 15 aa, Artificial sequence
  Protein classification predicting sequence
SLVEWPVVLTAKFEE

SEQ ID NO: 72503 - protein, 9 aa, Artificial sequence
  Protein classification predicting sequence
LGVLRIIVE

SEQ ID NO: 72504 - protein, 8 aa, Artificial sequence
  Protein classification predicting sequence
LLPNFIFV

SEQ ID NO: 72505 - protein, 9 aa, Artificial sequence
  Protein classification predicting sequence
ALNEQYMPR

SEQ ID NO: 72506 - protein, 7 aa, Artificial sequence
  Protein classification predicting sequence
FLAVPQE

SEQ ID NO: 72507 - protein, 7 aa, Artificial sequence
  Protein classification predicting sequence
FFDKVMV

SEQ ID NO: 72508 - protein, 34 aa, Artificial sequence
  Protein classification predicting sequence
TFLVEIGTEELPPKALRSLAESFAANFTAELDNA

SEQ ID NO: 72509 - protein, 38 aa, Artificial sequence
  Protein classification predicting sequence
EKRGPAIAQAFDAEGKPSKAAEGWARGCGITVDQAERL

SEQ ID NO: 72510 - protein, 11 aa, Artificial sequence
  Protein classification predicting sequence
KLPIPKLMRWG

SEQ ID NO: 72511 - protein, 13 aa, Artificial sequence
  Protein classification predicting sequence
SDRVIRGHRFMGE

SEQ ID NO: 72512 - protein, 14 aa, Artificial sequence
  Protein classification predicting sequence
TDRKKRLEDNLPRL

SEQ ID NO: 72513 - protein, 24 aa, Artificial sequence
  Protein classification predicting sequence
TVLFQQQLGTLRDKTDRIQALAGW

SEQ ID NO: 72514 - protein, 15 aa, Artificial sequence
  Protein classification predicting sequence
LDLQTLTEEAVRLYG

SEQ ID NO: 72515 - protein, 10 aa, Artificial sequence
  Protein classification predicting sequence
IQAVLARRPT

SEQ ID NO: 72516 - protein, 6 aa, Artificial sequence
  Protein classification predicting sequence
FRADHL

SEQ ID NO: 72517 - protein, 6 aa, Artificial sequence
  Protein classification predicting sequence
AQGIFV

SEQ ID NO: 72518 - protein, 7 aa, Artificial sequence
  Protein classification predicting sequence
SGHVDKF

SEQ ID NO: 72519 - protein, 7 aa, Artificial sequence
  Protein classification predicting sequence
LGYFIGR

SEQ ID NO: 72520 - protein, 7 aa, Artificial sequence
  Protein classification predicting sequence
RYARTDE

SEQ ID NO: 72521 - protein, 7 aa, Artificial sequence
  Protein classification predicting sequence
VFIASGH

SEQ ID NO: 72522 - protein, 6 aa, Artificial sequence
  Protein classification predicting sequence
DCWDAE

SEQ ID NO: 72523 - protein, 9 aa, Artificial sequence
  Protein classification predicting sequence
PIEVAVLPL

SEQ ID NO: 72524 - protein, 7 aa, Artificial sequence
  Protein classification predicting sequence
IGRRYRR

SEQ ID NO: 72525 - protein, 13 aa, Artificial sequence
  Protein classification predicting sequence
ELSHYSNATTDIE

SEQ ID NO: 72526 - protein, 11 aa, Artificial sequence
  Protein classification predicting sequence
MEQVRMPISEL

SEQ ID NO: 72527 - protein, 7 aa, Artificial sequence
  Protein classification predicting sequence
VWKASGH

SEQ ID NO: 72528 - protein, 8 aa, Artificial sequence
  Protein classification predicting sequence
LAFLCDAY

SEQ ID NO: 72529 - protein, 11 aa, Artificial sequence
  Protein classification predicting sequence
RYRRQDEIGTP

SEQ ID NO: 72530 - protein, 6 aa, Artificial sequence
  Protein classification predicting sequence
RGFVFP

SEQ ID NO: 72531 - protein, 8 aa, Artificial sequence
  Protein classification predicting sequence
KAAVLPLS

SEQ ID NO: 72532 - protein, 7 aa, Artificial sequence
  Protein classification predicting sequence
DRAKMED

SEQ ID NO: 72533 - protein, 8 aa, Artificial sequence
  Protein classification predicting sequence
KRRFFYDQ

SEQ ID NO: 72534 - protein, 22 aa, Artificial sequence
  Protein classification predicting sequence
LPFAAAQIGNSFRNEISPRSGL

SEQ ID NO: 72535 - protein, 7 aa, Artificial sequence
  Protein classification predicting sequence
RNEISPR

SEQ ID NO: 72536 - protein, 7 aa, Artificial sequence
  Protein classification predicting sequence
NEMAHYA

SEQ ID NO: 72537 - protein, 7 aa, Artificial sequence
  Protein classification predicting sequence
VGCADRS

SEQ ID NO: 72538 - protein, 7 aa, Artificial sequence
  Protein classification predicting sequence
VIEPSFG

SEQ ID NO: 72539 - protein, 8 aa, Artificial sequence
  Protein classification predicting sequence
REGDEQRT

SEQ ID NO: 72540 - protein, 21 aa, Artificial sequence
  Protein classification predicting sequence
VSHKVDDSSGSIGRRYARTDE

SEQ ID NO: 72541 - protein, 6 aa, Artificial sequence
  Protein classification predicting sequence
RDSMRQ

SEQ ID NO: 72542 - protein, 8 aa, Artificial sequence
  Protein classification predicting sequence
GKAFRNEI

SEQ ID NO: 72543 - protein, 6 aa, Artificial sequence
  Protein classification predicting sequence
NFIFRT

SEQ ID NO: 72544 - protein, 6 aa, Artificial sequence
  Protein classification predicting sequence
EFEQME

SEQ ID NO: 72545 - protein, 9 aa, Artificial sequence
  Protein classification predicting sequence
EKYVPYVIE

SEQ ID NO: 72546 - protein, 6 aa, Artificial sequence
  Protein classification predicting sequence
VTVRER

SEQ ID NO: 72547 - protein, 7 aa, Artificial sequence
  Protein classification predicting sequence
GLYDFGP

SEQ ID NO: 72548 - protein, 8 aa, Artificial sequence
  Protein classification predicting sequence
EIEHFVDP

SEQ ID NO: 72549 - protein, 6 aa, Artificial sequence
  Protein classification predicting sequence
KCSVLP

SEQ ID NO: 72550 - protein, 7 aa, Artificial sequence
  Protein classification predicting sequence
TVDFDSL

SEQ ID NO: 72551 - protein, 6 aa, Artificial sequence
  Protein classification predicting sequence
DYGPLG

SEQ ID NO: 72552 - protein, 7 aa, Artificial sequence
  Protein classification predicting sequence
FNDPMID

SEQ ID NO: 72553 - protein, 10 aa, Artificial sequence
  Protein classification predicting sequence
GSEIYGGLAN

SEQ ID NO: 72554 - protein, 7 aa, Artificial sequence
  Protein classification predicting sequence
FNLMFKT

SEQ ID NO: 72555 - protein, 13 aa, Artificial sequence
  Protein classification predicting sequence
LRPETAQGIFVNF

SEQ ID NO: 72556 - protein, 16 aa, Artificial sequence
  Protein classification predicting sequence
LRPETAQGIFVNFKNV

SEQ ID NO: 72557 - protein, 9 aa, Artificial sequence
  Protein classification predicting sequence
PFGIGQIGK

SEQ ID NO: 72558 - protein, 10 aa, Artificial sequence
  Protein classification predicting sequence
FRNEITPGNF

SEQ ID NO: 72559 - protein, 11 aa, Artificial sequence
  Protein classification predicting sequence
KFPFGWGELWG

SEQ ID NO: 72560 - protein, 6 aa, Artificial sequence
  Protein classification predicting sequence
PYVIEP

SEQ ID NO: 72561 - protein, 7 aa, Artificial sequence
  Protein classification predicting sequence
AFLIDAY

SEQ ID NO: 72562 - protein, 19 aa, Artificial sequence
  Protein classification predicting sequence
DETGSIGKRYRRQDEIGTP

SEQ ID NO: 72563 - protein, 7 aa, Artificial sequence
  Protein classification predicting sequence
VTIRDRD

SEQ ID NO: 72564 - protein, 6 aa, Artificial sequence
  Protein classification predicting sequence
RDRDSM

SEQ ID NO: 72565 - protein, 7 aa, Artificial sequence
  Protein classification predicting sequence
VGLDSAI

SEQ ID NO: 72566 - protein, 18 aa, Artificial sequence
  Protein classification predicting sequence
FRTREFEQMELEFFCKPG

SEQ ID NO: 72567 - protein, 9 aa, Artificial sequence
  Protein classification predicting sequence
RDHGEEELS

SEQ ID NO: 72568 - protein, 10 aa, Artificial sequence
  Protein classification predicting sequence
FPFGWGELWG

SEQ ID NO: 72569 - protein, 7 aa, Artificial sequence
  Protein classification predicting sequence
KHAEHSG

SEQ ID NO: 72570 - protein, 7 aa, Artificial sequence
  Protein classification predicting sequence
VTVRDRD

SEQ ID NO: 72571 - protein, 9 aa, Artificial sequence
  Protein classification predicting sequence
KNNVKKAWW

SEQ ID NO: 72572 - protein, 6 aa, Artificial sequence
  Protein classification predicting sequence
TVDIEY

SEQ ID NO: 72573 - protein, 7 aa, Artificial sequence
  Protein classification predicting sequence
DSRTVLR

SEQ ID NO: 72574 - protein, 6 aa, Artificial sequence
  Protein classification predicting sequence
DEIGTP

SEQ ID NO: 72575 - protein, 6 aa, Artificial sequence
  Protein classification predicting sequence
EDEAPN

SEQ ID NO: 72576 - protein, 9 aa, Artificial sequence
  Protein classification predicting sequence
TVDFDTLED

SEQ ID NO: 72577 - protein, 6 aa, Artificial sequence
  Protein classification predicting sequence
RDTMEQ

SEQ ID NO: 72578 - protein, 10 aa, Artificial sequence
  Protein classification predicting sequence
DYGPLGVELK

SEQ ID NO: 72579 - protein, 7 aa, Artificial sequence
  Protein classification predicting sequence
DPMIDNK

SEQ ID NO: 72580 - protein, 7 aa, Artificial sequence
  Protein classification predicting sequence
FRNEITP

SEQ ID NO: 72581 - protein, 6 aa, Artificial sequence
  Protein classification predicting sequence
HYSKRT

SEQ ID NO: 72582 - protein, 9 aa, Artificial sequence
  Protein classification predicting sequence
RPETAQGIF

SEQ ID NO: 72583 - protein, 8 aa, Artificial sequence
  Protein classification predicting sequence
IYGGLSNT

SEQ ID NO: 72584 - protein, 10 aa, Artificial sequence
  Protein classification predicting sequence
NPKVWEASGH

SEQ ID NO: 72585 - protein, 15 aa, Artificial sequence
  Protein classification predicting sequence
YLRPETAQGIFLNFK

SEQ ID NO: 72586 - protein, 10 aa, Artificial sequence
  Protein classification predicting sequence
QIGKSFRNEI

SEQ ID NO: 72587 - protein, 10 aa, Artificial sequence
  Protein classification predicting sequence
FRTREFEQME

SEQ ID NO: 72588 - protein, 14 aa, Artificial sequence
  Protein classification predicting sequence
FGWGELWGIASRTD

SEQ ID NO: 72589 - protein, 6 aa, Artificial sequence
  Protein classification predicting sequence
RTDYDL

SEQ ID NO: 72590 - protein, 8 aa, Artificial sequence
  Protein classification predicting sequence
GKRYRRQD

SEQ ID NO: 72591 - protein, 10 aa, Artificial sequence
  Protein classification predicting sequence
YRNEISPRQG

SEQ ID NO: 72592 - protein, 5 aa, Artificial sequence
  Protein classification predicting sequence
PFCIT

SEQ ID NO: 72593 - protein, 15 aa, Artificial sequence
  Protein classification predicting sequence
QIGKAYRNEISPRQG

SEQ ID NO: 72594 - protein, 7 aa, Artificial sequence
  Protein classification predicting sequence
ENFEKFE

SEQ ID NO: 72595 - protein, 7 aa, Artificial sequence
  Protein classification predicting sequence
GTPFCIT

SEQ ID NO: 72596 - protein, 16 aa, Artificial sequence
  Protein classification predicting sequence
FDDAGAIGRRYRRQDE

SEQ ID NO: 72597 - protein, 7 aa, Artificial sequence
  Protein classification predicting sequence
RADKLIE

SEQ ID NO: 72598 - protein, 6 aa, Artificial sequence
  Protein classification predicting sequence
VECKKC

SEQ ID NO: 72599 - protein, 6 aa, Artificial sequence
  Protein classification predicting sequence
RDSMEQ

SEQ ID NO: 72600 - protein, 8 aa, Artificial sequence
  Protein classification predicting sequence
FRTREFEQ

SEQ ID NO: 72601 - protein, 7 aa, Artificial sequence
  Protein classification predicting sequence
DNAVTVR

SEQ ID NO: 72602 - protein, 7 aa, Artificial sequence
  Protein classification predicting sequence
DPLIDCK

SEQ ID NO: 72603 - protein, 6 aa, Artificial sequence
  Protein classification predicting sequence
NWTEIR

SEQ ID NO: 72604 - protein, 6 aa, Artificial sequence
  Protein classification predicting sequence
IGTPYC

SEQ ID NO: 72605 - protein, 8 aa, Artificial sequence
  Protein classification predicting sequence
GFVFQSSE

SEQ ID NO: 72606 - protein, 7 aa, Artificial sequence
  Protein classification predicting sequence
GEIYGGT

SEQ ID NO: 72607 - protein, 11 aa, Artificial sequence
  Protein classification predicting sequence
YLRPETAQGIF

SEQ ID NO: 72608 - protein, 7 aa, Artificial sequence
  Protein classification predicting sequence
WHQYWID

SEQ ID NO: 72609 - protein, 6 aa, Artificial sequence
  Protein classification predicting sequence
HSEHSG

SEQ ID NO: 72610 - protein, 7 aa, Artificial sequence
  Protein classification predicting sequence
RTVLRLD

SEQ ID NO: 72611 - protein, 23 aa, Artificial sequence
  Protein classification predicting sequence
EFDDAGAIGRRYRRQDEIGTPFC

SEQ ID NO: 72612 - protein, 13 aa, Artificial sequence
  Protein classification predicting sequence
RYRRQDEIGTPFC

SEQ ID NO: 72613 - protein, 11 aa, Artificial sequence
  Protein classification predicting sequence
FNMMLKTYLGP

SEQ ID NO: 72614 - protein, 24 aa, Artificial sequence
  Protein classification predicting sequence
GKSFRNEITPGNFIFRTREFEQME

SEQ ID NO: 72615 - protein, 10 aa, Artificial sequence
  Protein classification predicting sequence
DEIGTPYCVT

SEQ ID NO: 72616 - protein, 18 aa, Artificial sequence
  Protein classification predicting sequence
DGTVTIRDRDTREQIRVK

SEQ ID NO: 72617 - protein, 8 aa, Artificial sequence
  Protein classification predicting sequence
ETPDITPE

SEQ ID NO: 72618 - protein, 31 aa, Artificial sequence
  Protein classification predicting sequence
RLNAFARNKLPFGVFQIGKAYRNEISPRQGM

SEQ ID NO: 72619 - protein, 9 aa, Artificial sequence
  Protein classification predicting sequence
RLREFTQAE

SEQ ID NO: 72620 - protein, 25 aa, Artificial sequence
  Protein classification predicting sequence
LLDIGIPEDKIRFRQQLPEERAHYS

SEQ ID NO: 72621 - protein, 11 aa, Artificial sequence
  Protein classification predicting sequence
SERFGWVECVG

SEQ ID NO: 72622 - protein, 8 aa, Artificial sequence
  Protein classification predicting sequence
DYDLSRHM

SEQ ID NO: 72623 - protein, 21 aa, Artificial sequence
  Protein classification predicting sequence
IKKDMAPIEVAVLPLVAKEPL

SEQ ID NO: 72624 - protein, 13 aa, Artificial sequence
  Protein classification predicting sequence
KKAWWQKFITQSP

SEQ ID NO: 72625 - protein, 11 aa, Artificial sequence
  Protein classification predicting sequence
DAAILMNPKTW

SEQ ID NO: 72626 - protein, 8 aa, Artificial sequence
  Protein classification predicting sequence
NFNDPMID

SEQ ID NO: 72627 - protein, 13 aa, Artificial sequence
  Protein classification predicting sequence
KGDENFIADGLSF

SEQ ID NO: 72628 - protein, 13 aa, Artificial sequence
  Protein classification predicting sequence
FLRPETAQGIFVN

SEQ ID NO: 72629 - protein, 13 aa, Artificial sequence
  Protein classification predicting sequence
EEGVEGSKDARTV

SEQ ID NO: 72630 - protein, 11 aa, Artificial sequence
  Protein classification predicting sequence
EAIKIFEQLSS

SEQ ID NO: 72631 - protein, 34 aa, Artificial sequence
  Protein classification predicting sequence
LAKHRGFVFPGSDIYGGLSNTWDYGPLGVELKNN

SEQ ID NO: 72632 - protein, 27 aa, Artificial sequence
  Protein classification predicting sequence
NFNDPMIDNKDSKIRYRADKLIEDYMQ

SEQ ID NO: 72633 - protein, 21 aa, Artificial sequence
  Protein classification predicting sequence
MKKIIDDEGIVCPVSKTANWT

SEQ ID NO: 72634 - protein, 21 aa, Artificial sequence
  Protein classification predicting sequence
IRQFNLMFKTFQGVTEDSTNE

SEQ ID NO: 72635 - protein, 41 aa, Artificial sequence
  Protein classification predicting sequence
NMRLRDHDEDELSHYSNATTDIEYKFPFGWGELWGIASRTD

SEQ ID NO: 72636 - protein, 33 aa, Artificial sequence
  Protein classification predicting sequence
YHDPETNEKYIPYCIEPSLGADRVTLAFLCDAY

SEQ ID NO: 72637 - protein, 24 aa, Artificial sequence
  Protein classification predicting sequence
IDFDESQSIGKRYRRQDEIGTPYC

SEQ ID NO: 72638 - protein, 31 aa, Artificial sequence
  Protein classification predicting sequence
TFDFDSLEDNQVTVRDRDSMEQVRMPISELE

SEQ ID NO: 72639 - protein, 6 aa, Artificial sequence
  Protein classification predicting sequence
KRQWWR

SEQ ID NO: 72640 - protein, 14 aa, Artificial sequence
  Protein classification predicting sequence
LRPETAQGIFVNFK

SEQ ID NO: 72641 - protein, 6 aa, Artificial sequence
  Protein classification predicting sequence
KLPFGI

SEQ ID NO: 72642 - protein, 7 aa, Artificial sequence
  Protein classification predicting sequence
REFEQME

SEQ ID NO: 72643 - protein, 24 aa, Artificial sequence
  Protein classification predicting sequence
RGFVFPGSEIYGGLANTWDYGPLG

SEQ ID NO: 72644 - protein, 6 aa, Artificial sequence
  Protein classification predicting sequence
KIPFGI

SEQ ID NO: 72645 - protein, 19 aa, Artificial sequence
  Protein classification predicting sequence
FRTREFEQMELEFFCKPGE

SEQ ID NO: 72646 - protein, 6 aa, Artificial sequence
  Protein classification predicting sequence
EHSGED

SEQ ID NO: 72647 - protein, 11 aa, Artificial sequence
  Protein classification predicting sequence
EKYIPYCIEPS

SEQ ID NO: 72648 - protein, 7 aa, Artificial sequence
  Protein classification predicting sequence
PYCIEPS

SEQ ID NO: 72649 - protein, 7 aa, Artificial sequence
  Protein classification predicting sequence
WDYGPLG

SEQ ID NO: 72650 - protein, 6 aa, Artificial sequence
  Protein classification predicting sequence
ELKNNV

SEQ ID NO: 72651 - protein, 8 aa, Artificial sequence
  Protein classification predicting sequence
CKSRFRAD

SEQ ID NO: 72652 - protein, 8 aa, Artificial sequence
  Protein classification predicting sequence
RTVLRFHP

SEQ ID NO: 72653 - protein, 5 aa, Artificial sequence
  Protein classification predicting sequence
WDYGP

SEQ ID NO: 72654 - protein, 8 aa, Artificial sequence
  Protein classification predicting sequence
ETSAGLTR

SEQ ID NO: 72655 - protein, 6 aa, Artificial sequence
  Protein classification predicting sequence
FLCDAY

SEQ ID NO: 72656 - protein, 9 aa, Artificial sequence
  Protein classification predicting sequence
PFGIAQIGK

SEQ ID NO: 72657 - protein, 9 aa, Artificial sequence
  Protein classification predicting sequence
YGGVSGLYD

SEQ ID NO: 72658 - protein, 11 aa, Artificial sequence
  Protein classification predicting sequence
VLKTSGHVDKF

SEQ ID NO: 72659 - protein, 8 aa, Artificial sequence
  Protein classification predicting sequence
TLRPEGTA

SEQ ID NO: 72660 - protein, 6 aa, Artificial sequence
  Protein classification predicting sequence
GRYRQF

SEQ ID NO: 72661 - protein, 7 aa, Artificial sequence
  Protein classification predicting sequence
KVNDRRI

SEQ ID NO: 72662 - protein, 16 aa, Artificial sequence
  Protein classification predicting sequence
KGLAPEVADRIGDYVQ

SEQ ID NO: 72663 - protein, 6 aa, Artificial sequence
  Protein classification predicting sequence
RGLDYY

SEQ ID NO: 72664 - protein, 8 aa, Artificial sequence
  Protein classification predicting sequence
RGLDYYTG

SEQ ID NO: 72665 - protein, 15 aa, Artificial sequence
  Protein classification predicting sequence
KVPCVGLSIGVERIF

SEQ ID NO: 72666 - protein, 8 aa, Artificial sequence
  Protein classification predicting sequence
DLTVPLAR

SEQ ID NO: 72667 - protein, 8 aa, Artificial sequence
  Protein classification predicting sequence
RAIDKLDK

SEQ ID NO: 72668 - protein, 12 aa, Artificial sequence
  Protein classification predicting sequence
EYTDALGKFLPD

SEQ ID NO: 72669 - protein, 24 aa, Artificial sequence
  Protein classification predicting sequence
PVPATGFSIGVSRLMTALKNLGKL

SEQ ID NO: 72670 - protein, 6 aa, Artificial sequence
  Protein classification predicting sequence
GRFRQF

SEQ ID NO: 72671 - protein, 6 aa, Artificial sequence
  Protein classification predicting sequence
NNRKVL

SEQ ID NO: 72672 - protein, 8 aa, Artificial sequence
  Protein classification predicting sequence
MFRYERPQ

SEQ ID NO: 72673 - protein, 8 aa, Artificial sequence
  Protein classification predicting sequence
GTQDILPG

SEQ ID NO: 72674 - protein, 6 aa, Artificial sequence
  Protein classification predicting sequence
CRRYNY

SEQ ID NO: 72675 - protein, 7 aa, Artificial sequence
  Protein classification predicting sequence
FEHTELF

SEQ ID NO: 72676 - protein, 6 aa, Artificial sequence
  Protein classification predicting sequence
VQKEMY

SEQ ID NO: 72677 - protein, 6 aa, Artificial sequence
  Protein classification predicting sequence
KEMYTF

SEQ ID NO: 72678 - protein, 7 aa, Artificial sequence
  Protein classification predicting sequence
RQFVQFG

SEQ ID NO: 72679 - protein, 8 aa, Artificial sequence
  Protein classification predicting sequence
DPAIDAEV

SEQ ID NO: 72680 - protein, 9 aa, Artificial sequence
  Protein classification predicting sequence
GISAEKDYL

SEQ ID NO: 72681 - protein, 10 aa, Artificial sequence
  Protein classification predicting sequence
EKDYLDRKMK

SEQ ID NO: 72682 - protein, 6 aa, Artificial sequence
  Protein classification predicting sequence
ENKLFA

SEQ ID NO: 72683 - protein, 7 aa, Artificial sequence
  Protein classification predicting sequence
QPTKLYY

SEQ ID NO: 72684 - protein, 9 aa, Artificial sequence
  Protein classification predicting sequence
QFGIEAIGS

SEQ ID NO: 72685 - protein, 9 aa, Artificial sequence
  Protein classification predicting sequence
EALVKHFEP

SEQ ID NO: 72686 - protein, 6 aa, Artificial sequence
  Protein classification predicting sequence
HFEPRI

SEQ ID NO: 72687 - protein, 11 aa, Artificial sequence
  Protein classification predicting sequence
DPNLVRGLDYY

SEQ ID NO: 72688 - protein, 12 aa, Artificial sequence
  Protein classification predicting sequence
PGIGFAMSIERL

SEQ ID NO: 72689 - protein, 12 aa, Artificial sequence
  Protein classification predicting sequence
LRYDLTVPFARY

SEQ ID NO: 72690 - protein, 6 aa, Artificial sequence
  Protein classification predicting sequence
IDKLDK

SEQ ID NO: 72691 - protein, 8 aa, Artificial sequence
  Protein classification predicting sequence
LVRGLDYY

SEQ ID NO: 72692 - protein, 6 aa, Artificial sequence
  Protein classification predicting sequence
GGGNFK

SEQ ID NO: 72693 - protein, 7 aa, Artificial sequence
  Protein classification predicting sequence
AIRGMND

SEQ ID NO: 72694 - protein, 7 aa, Artificial sequence
  Protein classification predicting sequence
RFDLTVP

SEQ ID NO: 72695 - protein, 8 aa, Artificial sequence
  Protein classification predicting sequence
DLTVPFAR

SEQ ID NO: 72696 - protein, 6 aa, Artificial sequence
  Protein classification predicting sequence
QKGRYR

SEQ ID NO: 72697 - protein, 7 aa, Artificial sequence
  Protein classification predicting sequence
GDFTKGA

SEQ ID NO: 72698 - protein, 8 aa, Artificial sequence
  Protein classification predicting sequence
PLARYVAE

SEQ ID NO: 72699 - protein, 9 aa, Artificial sequence
  Protein classification predicting sequence
TDVVEKEMY

SEQ ID NO: 72700 - protein, 9 aa, Artificial sequence
  Protein classification predicting sequence
KLVRGLDYY

SEQ ID NO: 72701 - protein, 16 aa, Artificial sequence
  Protein classification predicting sequence
KLVRGLDYYNKTVFEW

SEQ ID NO: 72702 - protein, 25 aa, Artificial sequence
  Protein classification predicting sequence
DQGGELLSLRYDLTVPFARYLAMNK

SEQ ID NO: 72703 - protein, 11 aa, Artificial sequence
  Protein classification predicting sequence
TICSSVDKLDK

SEQ ID NO: 72704 - protein, 11 aa, Artificial sequence
  Protein classification predicting sequence
RPEGTAGVVRA

SEQ ID NO: 72705 - protein, 7 aa, Artificial sequence
  Protein classification predicting sequence
ERPQKGR

SEQ ID NO: 72706 - protein, 8 aa, Artificial sequence
  Protein classification predicting sequence
DRPNEGVF

SEQ ID NO: 72707 - protein, 13 aa, Artificial sequence
  Protein classification predicting sequence
RNEKPGPGRFRQF

SEQ ID NO: 72708 - protein, 11 aa, Artificial sequence
  Protein classification predicting sequence
LPKGVFDIFPY

SEQ ID NO: 72709 - protein, 8 aa, Artificial sequence
  Protein classification predicting sequence
EIRTPIFE

SEQ ID NO: 72710 - protein, 7 aa, Artificial sequence
  Protein classification predicting sequence
SLTLRPE

SEQ ID NO: 72711 - protein, 7 aa, Artificial sequence
  Protein classification predicting sequence
ERPQAGR

SEQ ID NO: 72712 - protein, 7 aa, Artificial sequence
  Protein classification predicting sequence
APSILDY

SEQ ID NO: 72713 - protein, 6 aa, Artificial sequence
  Protein classification predicting sequence
NGDSLT

SEQ ID NO: 72714 - protein, 7 aa, Artificial sequence
  Protein classification predicting sequence
GPDIDAE

SEQ ID NO: 72715 - protein, 17 aa, Artificial sequence
  Protein classification predicting sequence
KRRMHTNPLRVLDTKNP

SEQ ID NO: 72716 - protein, 11 aa, Artificial sequence
  Protein classification predicting sequence
TDVVQKEMYTF

SEQ ID NO: 72717 - protein, 8 aa, Artificial sequence
  Protein classification predicting sequence
VQKEMYTF

SEQ ID NO: 72718 - protein, 7 aa, Artificial sequence
  Protein classification predicting sequence
REFYQCD

SEQ ID NO: 72719 - protein, 7 aa, Artificial sequence
  Protein classification predicting sequence
VLRAIDK

SEQ ID NO: 72720 - protein, 10 aa, Artificial sequence
  Protein classification predicting sequence
IARGLDYYTG

SEQ ID NO: 72721 - protein, 15 aa, Artificial sequence
  Protein classification predicting sequence
KLPGVGISIGLTRLF

SEQ ID NO: 72722 - protein, 8 aa, Artificial sequence
  Protein classification predicting sequence
APKGVPDY

SEQ ID NO: 72723 - protein, 7 aa, Artificial sequence
  Protein classification predicting sequence
FRYERPQ

SEQ ID NO: 72724 - protein, 11 aa, Artificial sequence
  Protein classification predicting sequence
QLGGQDLSGIG

SEQ ID NO: 72725 - protein, 11 aa, Artificial sequence
  Protein classification predicting sequence
ERPQKGRYRQF

SEQ ID NO: 72726 - protein, 8 aa, Artificial sequence
  Protein classification predicting sequence
QKGRYRQF

SEQ ID NO: 72727 - protein, 8 aa, Artificial sequence
  Protein classification predicting sequence
ERLLLALE

SEQ ID NO: 72728 - protein, 6 aa, Artificial sequence
  Protein classification predicting sequence
HFAGLC

SEQ ID NO: 72729 - protein, 13 aa, Artificial sequence
  Protein classification predicting sequence
GGRYDGLVEQLGG

SEQ ID NO: 72730 - protein, 6 aa, Artificial sequence
  Protein classification predicting sequence
QKPKGT

SEQ ID NO: 72731 - protein, 12 aa, Artificial sequence
  Protein classification predicting sequence
IKLVINSLGDKE

SEQ ID NO: 72732 - protein, 9 aa, Artificial sequence
  Protein classification predicting sequence
NPLRVLDSK

SEQ ID NO: 72733 - protein, 7 aa, Artificial sequence
  Protein classification predicting sequence
VRGLDYY

SEQ ID NO: 72734 - protein, 7 aa, Artificial sequence
  Protein classification predicting sequence
GGPDTPG

SEQ ID NO: 72735 - protein, 7 aa, Artificial sequence
  Protein classification predicting sequence
TPGFGFG

SEQ ID NO: 72736 - protein, 10 aa, Artificial sequence
  Protein classification predicting sequence
MIPDAECLKI

SEQ ID NO: 72737 - protein, 7 aa, Artificial sequence
  Protein classification predicting sequence
GGRYDNL

SEQ ID NO: 72738 - protein, 9 aa, Artificial sequence
  Protein classification predicting sequence
TDIVEKEMY

SEQ ID NO: 72739 - protein, 7 aa, Artificial sequence
  Protein classification predicting sequence
RSYIEHK

SEQ ID NO: 72740 - protein, 10 aa, Artificial sequence
  Protein classification predicting sequence
GPMFRYERPQ

SEQ ID NO: 72741 - protein, 6 aa, Artificial sequence
  Protein classification predicting sequence
EDCKRR

SEQ ID NO: 72742 - protein, 8 aa, Artificial sequence
  Protein classification predicting sequence
VRGLDYYT

SEQ ID NO: 72743 - protein, 7 aa, Artificial sequence
  Protein classification predicting sequence
GTRDFLP

SEQ ID NO: 72744 - protein, 8 aa, Artificial sequence
  Protein classification predicting sequence
LFKRSIGE

SEQ ID NO: 72745 - protein, 8 aa, Artificial sequence
  Protein classification predicting sequence
RMYSNPLR

SEQ ID NO: 72746 - protein, 6 aa, Artificial sequence
  Protein classification predicting sequence
EQRLWY

SEQ ID NO: 72747 - protein, 7 aa, Artificial sequence
  Protein classification predicting sequence
LNSIGSL

SEQ ID NO: 72748 - protein, 10 aa, Artificial sequence
  Protein classification predicting sequence
GLERLVLLVQ

SEQ ID NO: 72749 - protein, 13 aa, Artificial sequence
  Protein classification predicting sequence
ERPQKGRYRQFHQ

SEQ ID NO: 72750 - protein, 7 aa, Artificial sequence
  Protein classification predicting sequence
NPLRILD

SEQ ID NO: 72751 - protein, 14 aa, Artificial sequence
  Protein classification predicting sequence
FGFVPIETPHLEYA

SEQ ID NO: 72752 - protein, 9 aa, Artificial sequence
  Protein classification predicting sequence
RGERAQRGR

SEQ ID NO: 72753 - protein, 7 aa, Artificial sequence
  Protein classification predicting sequence
FSIARGL

SEQ ID NO: 72754 - protein, 6 aa, Artificial sequence
  Protein classification predicting sequence
YVENKL

SEQ ID NO: 72755 - protein, 7 aa, Artificial sequence
  Protein classification predicting sequence
FHQIGVE

SEQ ID NO: 72756 - protein, 6 aa, Artificial sequence
  Protein classification predicting sequence
TPAVGF

SEQ ID NO: 72757 - protein, 9 aa, Artificial sequence
  Protein classification predicting sequence
PMFRYERPQ

SEQ ID NO: 72758 - protein, 10 aa, Artificial sequence
  Protein classification predicting sequence
DIVTKEMYDF

SEQ ID NO: 72759 - protein, 15 aa, Artificial sequence
  Protein classification predicting sequence
DKGDRHITLRPEGTA

SEQ ID NO: 72760 - protein, 8 aa, Artificial sequence
  Protein classification predicting sequence
GRLREFHQ

SEQ ID NO: 72761 - protein, 8 aa, Artificial sequence
  Protein classification predicting sequence
MVRGLDYY

SEQ ID NO: 72762 - protein, 11 aa, Artificial sequence
  Protein classification predicting sequence
MVRGLDYYNHT

SEQ ID NO: 72763 - protein, 14 aa, Artificial sequence
  Protein classification predicting sequence
MVRGLDYYNHTIFE

SEQ ID NO: 72764 - protein, 6 aa, Artificial sequence
  Protein classification predicting sequence
GGGRYD

SEQ ID NO: 72765 - protein, 8 aa, Artificial sequence
  Protein classification predicting sequence
RGVGDSTD

SEQ ID NO: 72766 - protein, 6 aa, Artificial sequence
  Protein classification predicting sequence
GRQRQF

SEQ ID NO: 72767 - protein, 6 aa, Artificial sequence
  Protein classification predicting sequence
RYDGLV

SEQ ID NO: 72768 - protein, 27 aa, Artificial sequence
  Protein classification predicting sequence
LWDAGIKAELLYKKNPKLLNQLQYCEE

SEQ ID NO: 72769 - protein, 6 aa, Artificial sequence
  Protein classification predicting sequence
GVEVFG

SEQ ID NO: 72770 - protein, 7 aa, Artificial sequence
  Protein classification predicting sequence
KPVKLYY

SEQ ID NO: 72771 - protein, 6 aa, Artificial sequence
  Protein classification predicting sequence
PIKMYY

SEQ ID NO: 72772 - protein, 10 aa, Artificial sequence
  Protein classification predicting sequence
KLLKLKAQLG

SEQ ID NO: 72773 - protein, 13 aa, Artificial sequence
  Protein classification predicting sequence
EGLGDLKLLFEYL

SEQ ID NO: 72774 - protein, 9 aa, Artificial sequence
  Protein classification predicting sequence
IGFALSIER

SEQ ID NO: 72775 - protein, 6 aa, Artificial sequence
  Protein classification predicting sequence
RYERPQ

SEQ ID NO: 72776 - protein, 18 aa, Artificial sequence
  Protein classification predicting sequence
FEDTALFARGVGESTDVV

SEQ ID NO: 72777 - protein, 10 aa, Artificial sequence
  Protein classification predicting sequence
FRYERPQAGR

SEQ ID NO: 72778 - protein, 8 aa, Artificial sequence
  Protein classification predicting sequence
LEITSLGD

SEQ ID NO: 72779 - protein, 10 aa, Artificial sequence
  Protein classification predicting sequence
APVLLDHLSD

SEQ ID NO: 72780 - protein, 15 aa, Artificial sequence
  Protein classification predicting sequence
AKQHFDTVLAHLDAL

SEQ ID NO: 72781 - protein, 18 aa, Artificial sequence
  Protein classification predicting sequence
GLGAQSGIGGGGRYDGLM

SEQ ID NO: 72782 - protein, 7 aa, Artificial sequence
  Protein classification predicting sequence
RCDVFGV

SEQ ID NO: 72783 - protein, 6 aa, Artificial sequence
  Protein classification predicting sequence
PRGTQD

SEQ ID NO: 72784 - protein, 10 aa, Artificial sequence
  Protein classification predicting sequence
PEGTASVVRA

SEQ ID NO: 72785 - protein, 8 aa, Artificial sequence
  Protein classification predicting sequence
RLEKNPLR

SEQ ID NO: 72786 - protein, 12 aa, Artificial sequence
  Protein classification predicting sequence
RGLDYYTGVVFE

SEQ ID NO: 72787 - protein, 6 aa, Artificial sequence
  Protein classification predicting sequence
RYDEPQ

SEQ ID NO: 72788 - protein, 7 aa, Artificial sequence
  Protein classification predicting sequence
RGFDYYT

SEQ ID NO: 72789 - protein, 6 aa, Artificial sequence
  Protein classification predicting sequence
PIVEQT

SEQ ID NO: 72790 - protein, 8 aa, Artificial sequence
  Protein classification predicting sequence
TNPLRVLD

SEQ ID NO: 72791 - protein, 5 aa, Artificial sequence
  Protein classification predicting sequence
RGMND

SEQ ID NO: 72792 - protein, 10 aa, Artificial sequence
  Protein classification predicting sequence
VEALGFAGPD

SEQ ID NO: 72793 - protein, 7 aa, Artificial sequence
  Protein classification predicting sequence
YVENKLF

SEQ ID NO: 72794 - protein, 6 aa, Artificial sequence
  Protein classification predicting sequence
DQGGEL

SEQ ID NO: 72795 - protein, 15 aa, Artificial sequence
  Protein classification predicting sequence
AKNIQAIRGMNDYLP

SEQ ID NO: 72796 - protein, 6 aa, Artificial sequence
  Protein classification predicting sequence
IWQRIE

SEQ ID NO: 72797 - protein, 15 aa, Artificial sequence
  Protein classification predicting sequence
EVFGLQGPDIDAELI

SEQ ID NO: 72798 - protein, 9 aa, Artificial sequence
  Protein classification predicting sequence
GPDIDAELI

SEQ ID NO: 72799 - protein, 7 aa, Artificial sequence
  Protein classification predicting sequence
LTARWWR

SEQ ID NO: 72800 - protein, 10 aa, Artificial sequence
  Protein classification predicting sequence
LDEDCKRRMY

SEQ ID NO: 72801 - protein, 14 aa, Artificial sequence
  Protein classification predicting sequence
NPLRVLDSKNPEVQ

SEQ ID NO: 72802 - protein, 9 aa, Artificial sequence
  Protein classification predicting sequence
IQAIRGMND

SEQ ID NO: 72803 - protein, 15 aa, Artificial sequence
  Protein classification predicting sequence
IQAIRGMNDCLPTQS

SEQ ID NO: 72804 - protein, 6 aa, Artificial sequence
  Protein classification predicting sequence
RMPIVE

SEQ ID NO: 72805 - protein, 6 aa, Artificial sequence
  Protein classification predicting sequence
AFLEQH

SEQ ID NO: 72806 - protein, 16 aa, Artificial sequence
  Protein classification predicting sequence
HFAGLCELLDAAGIEY

SEQ ID NO: 72807 - protein, 7 aa, Artificial sequence
  Protein classification predicting sequence
DVRRSVD

SEQ ID NO: 72808 - protein, 13 aa, Artificial sequence
  Protein classification predicting sequence
GEGTMMAGMKLAE

SEQ ID NO: 72809 - protein, 6 aa, Artificial sequence
  Protein classification predicting sequence
RYEEPQ

SEQ ID NO: 72810 - protein, 6 aa, Artificial sequence
  Protein classification predicting sequence
IQAIRG

SEQ ID NO: 72811 - protein, 6 aa, Artificial sequence
  Protein classification predicting sequence
KQFKRA

SEQ ID NO: 72812 - protein, 7 aa, Artificial sequence
  Protein classification predicting sequence
VESVARD

SEQ ID NO: 72813 - protein, 8 aa, Artificial sequence
  Protein classification predicting sequence
LFARGIGE

SEQ ID NO: 72814 - protein, 11 aa, Artificial sequence
  Protein classification predicting sequence
TDVVSKEMYTF

SEQ ID NO: 72815 - protein, 7 aa, Artificial sequence
  Protein classification predicting sequence
DYLDEES

SEQ ID NO: 72816 - protein, 8 aa, Artificial sequence
  Protein classification predicting sequence
GGRYDGLV

SEQ ID NO: 72817 - protein, 10 aa, Artificial sequence
  Protein classification predicting sequence
SLTLRPEGTA

SEQ ID NO: 72818 - protein, 10 aa, Artificial sequence
  Protein classification predicting sequence
GGRYDGLVEQ

SEQ ID NO: 72819 - protein, 6 aa, Artificial sequence
  Protein classification predicting sequence
PYVINP

SEQ ID NO: 72820 - protein, 17 aa, Artificial sequence
  Protein classification predicting sequence
LGIGSIGGGGRYDNLIE

SEQ ID NO: 72821 - protein, 18 aa, Artificial sequence
  Protein classification predicting sequence
FGGKPTPATGFAIGIERL

SEQ ID NO: 72822 - protein, 14 aa, Artificial sequence
  Protein classification predicting sequence
LRSGEEVVKQLYAF

SEQ ID NO: 72823 - protein, 38 aa, Artificial sequence
  Protein classification predicting sequence
APKPIKWYYIANMFRYEEPQSGRYREFWQAGVELIGSD

SEQ ID NO: 72824 - protein, 13 aa, Artificial sequence
  Protein classification predicting sequence
IGEVTDIVEKEMY

SEQ ID NO: 72825 - protein, 11 aa, Artificial sequence
  Protein classification predicting sequence
PQRGRYRQFHQ

SEQ ID NO: 72826 - protein, 8 aa, Artificial sequence
  Protein classification predicting sequence
GRYRQFHQ

SEQ ID NO: 72827 - protein, 7 aa, Artificial sequence
  Protein classification predicting sequence
LELNSLG

SEQ ID NO: 72828 - protein, 11 aa, Artificial sequence
  Protein classification predicting sequence
NPRLVRGLDYY

SEQ ID NO: 72829 - protein, 18 aa, Artificial sequence
  Protein classification predicting sequence
NPRLVRGLDYYNLTVFEW

SEQ ID NO: 72830 - protein, 7 aa, Artificial sequence
  Protein classification predicting sequence
VYIVHQG

SEQ ID NO: 72831 - protein, 8 aa, Artificial sequence
  Protein classification predicting sequence
GSFKSQFK

SEQ ID NO: 72832 - protein, 6 aa, Artificial sequence
  Protein classification predicting sequence
KRYHIA

SEQ ID NO: 72833 - protein, 9 aa, Artificial sequence
  Protein classification predicting sequence
ARGLDYYTG

SEQ ID NO: 72834 - protein, 7 aa, Artificial sequence
  Protein classification predicting sequence
QDDDEQW

SEQ ID NO: 72835 - protein, 8 aa, Artificial sequence
  Protein classification predicting sequence
ADAEMCMM

SEQ ID NO: 72836 - protein, 22 aa, Artificial sequence
  Protein classification predicting sequence
LDEDCKRRMYTNPLRVLDSKNP

SEQ ID NO: 72837 - protein, 9 aa, Artificial sequence
  Protein classification predicting sequence
VQALLNDAP

SEQ ID NO: 72838 - protein, 12 aa, Artificial sequence
  Protein classification predicting sequence
SREHFAGLCKLL

SEQ ID NO: 72839 - protein, 9 aa, Artificial sequence
  Protein classification predicting sequence
PVVDIYLVA

SEQ ID NO: 72840 - protein, 8 aa, Artificial sequence
  Protein classification predicting sequence
QAIRGMND

SEQ ID NO: 72841 - protein, 10 aa, Artificial sequence
  Protein classification predicting sequence
LPTQSPLWQK

SEQ ID NO: 72842 - protein, 19 aa, Artificial sequence
  Protein classification predicting sequence
GPMFRHERPQKGRYRQFHQ

SEQ ID NO: 72843 - protein, 9 aa, Artificial sequence
  Protein classification predicting sequence
RLVRGLDYY

SEQ ID NO: 72844 - protein, 7 aa, Artificial sequence
  Protein classification predicting sequence
KWRYIEN

SEQ ID NO: 72845 - protein, 7 aa, Artificial sequence
  Protein classification predicting sequence
LFARGVG

SEQ ID NO: 72846 - protein, 8 aa, Artificial sequence
  Protein classification predicting sequence
LAMVMHIY

SEQ ID NO: 72847 - protein, 13 aa, Artificial sequence
  Protein classification predicting sequence
SFGLKHLKLVINS

SEQ ID NO: 72848 - protein, 17 aa, Artificial sequence
  Protein classification predicting sequence
SRKEYNEALVKHFEPVI

SEQ ID NO: 72849 - protein, 6 aa, Artificial sequence
  Protein classification predicting sequence
RILDCK

SEQ ID NO: 72850 - protein, 6 aa, Artificial sequence
  Protein classification predicting sequence
DRDKEA

SEQ ID NO: 72851 - protein, 20 aa, Artificial sequence
  Protein classification predicting sequence
EDPNLVRGLDYYTHTAFELM

SEQ ID NO: 72852 - protein, 18 aa, Artificial sequence
  Protein classification predicting sequence
YDGAITTLCGGGRYNGLL

SEQ ID NO: 72853 - protein, 14 aa, Artificial sequence
  Protein classification predicting sequence
ETGIGFALSIERLL

SEQ ID NO: 72854 - protein, 8 aa, Artificial sequence
  Protein classification predicting sequence
ADRYAVKL

SEQ ID NO: 72855 - protein, 13 aa, Artificial sequence
  Protein classification predicting sequence
RKIKGQMKQADRL

SEQ ID NO: 72856 - protein, 10 aa, Artificial sequence
  Protein classification predicting sequence
VIGDQELENN

SEQ ID NO: 72857 - protein, 27 aa, Artificial sequence
  Protein classification predicting sequence
LFARGVGDSTDVVQKEMYTFKDKGDRS

SEQ ID NO: 72858 - protein, 21 aa, Artificial sequence
  Protein classification predicting sequence
TLRPEGTAAVVRSYIEHKMQG

SEQ ID NO: 72859 - protein, 41 aa, Artificial sequence
  Protein classification predicting sequence
PNQPIKLYYNGPMFRYERKQKGRYRQFNQFGVEAIGAENPS

SEQ ID NO: 72860 - protein, 34 aa, Artificial sequence
  Protein classification predicting sequence
DKGDRHITLRPEGTAPVVRSYVENKLFAPEVQKP

SEQ ID NO: 72861 - protein, 11 aa, Artificial sequence
  Protein classification predicting sequence
NPATDVETIAM

SEQ ID NO: 72862 - protein, 8 aa, Artificial sequence
  Protein classification predicting sequence
LDSKEPED

SEQ ID NO: 72863 - protein, 7 aa, Artificial sequence
  Protein classification predicting sequence
CAGGRYD

SEQ ID NO: 72864 - protein, 19 aa, Artificial sequence
  Protein classification predicting sequence
ERDYLGRKIKAQFKSADTF

SEQ ID NO: 72865 - protein, 7 aa, Artificial sequence
  Protein classification predicting sequence
NSLGDKE

SEQ ID NO: 72866 - protein, 7 aa, Artificial sequence
  Protein classification predicting sequence
GGGGRYD

SEQ ID NO: 72867 - protein, 18 aa, Artificial sequence
  Protein classification predicting sequence
ANPATDVETIAMAYHLFE

SEQ ID NO: 72868 - protein, 9 aa, Artificial sequence
  Protein classification predicting sequence
LSKDSQRRL

SEQ ID NO: 72869 - protein, 21 aa, Artificial sequence
  Protein classification predicting sequence
IDTNMVRGLDYYNHTIFEFIT

SEQ ID NO: 72870 - protein, 9 aa, Artificial sequence
  Protein classification predicting sequence
QAIRRQGFT

SEQ ID NO: 72871 - protein, 8 aa, Artificial sequence
  Protein classification predicting sequence
EIRTPMFE

SEQ ID NO: 72872 - protein, 21 aa, Artificial sequence
  Protein classification predicting sequence
YIGSMFRYERPQAGRLREFHQ

SEQ ID NO: 72873 - protein, 49 aa, Artificial sequence
  Protein classification predicting sequence
HTIFEFITSVEGSDLTICAGGRYDSLVGYFGGPETPGFGFGLGLERLLM

SEQ ID NO: 72874 - protein, 15 aa, Artificial sequence
  Protein classification predicting sequence
IEKQGITLPIETEMD

SEQ ID NO: 72875 - protein, 12 aa, Artificial sequence
  Protein classification predicting sequence
AYRQALIDYLTP

SEQ ID NO: 72876 - protein, 66 aa, Artificial sequence
  Protein classification predicting sequence
AYRQALIDYLTPMRDQLSKDSQRRLDENPLRVLDSKEKEDKLAVEKAPSILDYLDEESQAHFEAVK

SEQ ID NO: 72877 - protein, 7 aa, Artificial sequence
  Protein classification predicting sequence
GTQDILP

SEQ ID NO: 72878 - protein, 6 aa, Artificial sequence
  Protein classification predicting sequence
RTPIFE

SEQ ID NO: 72879 - protein, 8 aa, Artificial sequence
  Protein classification predicting sequence
KALELVQA

SEQ ID NO: 72880 - protein, 8 aa, Artificial sequence
  Protein classification predicting sequence
KAQFKSAD

SEQ ID NO: 72881 - protein, 8 aa, Artificial sequence
  Protein classification predicting sequence
TLGESEVE

SEQ ID NO: 72882 - protein, 6 aa, Artificial sequence
  Protein classification predicting sequence
PRGTRD

SEQ ID NO: 72883 - protein, 14 aa, Artificial sequence
  Protein classification predicting sequence
LVRGLDYYTHTAFE

SEQ ID NO: 72884 - protein, 7 aa, Artificial sequence
  Protein classification predicting sequence
LVIGESE

SEQ ID NO: 72885 - protein, 8 aa, Artificial sequence
  Protein classification predicting sequence
TVCGGGRY

SEQ ID NO: 72886 - protein, 6 aa, Artificial sequence
  Protein classification predicting sequence
APSILD

SEQ ID NO: 72887 - protein, 7 aa, Artificial sequence
  Protein classification predicting sequence
DAEVIAL

SEQ ID NO: 72888 - protein, 7 aa, Artificial sequence
  Protein classification predicting sequence
YKEIRTP

SEQ ID NO: 72889 - protein, 12 aa, Artificial sequence
  Protein classification predicting sequence
FEHTELFLRGVG

SEQ ID NO: 72890 - protein, 8 aa, Artificial sequence
  Protein classification predicting sequence
RGVGESTD

SEQ ID NO: 72891 - protein, 9 aa, Artificial sequence
  Protein classification predicting sequence
TQPTKLYYI

SEQ ID NO: 72892 - protein, 11 aa, Artificial sequence
  Protein classification predicting sequence
TVCGGGRYDGL

SEQ ID NO: 72893 - protein, 7 aa, Artificial sequence
  Protein classification predicting sequence
GGRYDGL

SEQ ID NO: 72894 - protein, 7 aa, Artificial sequence
  Protein classification predicting sequence
KSGGETE

SEQ ID NO: 72895 - protein, 10 aa, Artificial sequence
  Protein classification predicting sequence
VKNVISAYGY

SEQ ID NO: 72896 - protein, 21 aa, Artificial sequence
  Protein classification predicting sequence
GPDVDAELIMMTARLWRELGI

SEQ ID NO: 72897 - protein, 21 aa, Artificial sequence
  Protein classification predicting sequence
YTVNQRLVRGLDYYNRTVFEW

SEQ ID NO: 72898 - protein, 16 aa, Artificial sequence
  Protein classification predicting sequence
RLVRGLDYYNRTVFEW

SEQ ID NO: 72899 - protein, 10 aa, Artificial sequence
  Protein classification predicting sequence
TDVRRSVDVY

SEQ ID NO: 72900 - protein, 19 aa, Artificial sequence
  Protein classification predicting sequence
HFGGGNFKKQFKRADKVGA

SEQ ID NO: 72901 - protein, 8 aa, Artificial sequence
  Protein classification predicting sequence
LELNSIGS

SEQ ID NO: 72902 - protein, 7 aa, Artificial sequence
  Protein classification predicting sequence
YNYKEIR

SEQ ID NO: 72903 - protein, 7 aa, Artificial sequence
  Protein classification predicting sequence
YMGPMFR

SEQ ID NO: 72904 - protein, 7 aa, Artificial sequence
  Protein classification predicting sequence
LELNSIG

SEQ ID NO: 72905 - protein, 11 aa, Artificial sequence
  Protein classification predicting sequence
GKYGEDSKLIY

SEQ ID NO: 72906 - protein, 13 aa, Artificial sequence
  Protein classification predicting sequence
IKRYHIAKVYRRD

SEQ ID NO: 72907 - protein, 7 aa, Artificial sequence
  Protein classification predicting sequence
YGYSEIR

SEQ ID NO: 72908 - protein, 11 aa, Artificial sequence
  Protein classification predicting sequence
NPLRVLDSKNP

SEQ ID NO: 72909 - protein, 21 aa, Artificial sequence
  Protein classification predicting sequence
YTVNERLVRGLDYYNRTVFEW

SEQ ID NO: 72910 - protein, 42 aa, Artificial sequence
  Protein classification predicting sequence
QGTVCAGGRYDGLVEQLGGRATPAVGFAMGLERLVLLVQAVN

SEQ ID NO: 72911 - protein, 7 aa, Artificial sequence
  Protein classification predicting sequence
AEAEVEY

SEQ ID NO: 72912 - protein, 7 aa, Artificial sequence
  Protein classification predicting sequence
DVWFDSG

SEQ ID NO: 72913 - protein, 8 aa, Artificial sequence
  Protein classification predicting sequence
TLKPEYEA

SEQ ID NO: 72914 - protein, 8 aa, Artificial sequence
  Protein classification predicting sequence
LAEAEIEY

SEQ ID NO: 72915 - protein, 11 aa, Artificial sequence
  Protein classification predicting sequence
DKRSASIYVAF

SEQ ID NO: 72916 - protein, 21 aa, Artificial sequence
  Protein classification predicting sequence
HVTTDAGTGCVHTAPGHGEDD

SEQ ID NO: 72917 - protein, 15 aa, Artificial sequence
  Protein classification predicting sequence
FITHSYPHDWRTKKP

SEQ ID NO: 72918 - protein, 7 aa, Artificial sequence
  Protein classification predicting sequence
NMVRDRG

SEQ ID NO: 72919 - protein, 23 aa, Artificial sequence
  Protein classification predicting sequence
EAKDLLPEGFTHPGSPNGTFTKE

SEQ ID NO: 72920 - protein, 7 aa, Artificial sequence
  Protein classification predicting sequence
RRSMQTV

SEQ ID NO: 72921 - protein, 9 aa, Artificial sequence
  Protein classification predicting sequence
ALETARNEK

SEQ ID NO: 72922 - protein, 7 aa, Artificial sequence
  Protein classification predicting sequence
RATPQWF

SEQ ID NO: 72923 - protein, 5 aa, Artificial sequence
  Protein classification predicting sequence
RPDWC

SEQ ID NO: 72924 - protein, 7 aa, Artificial sequence
  Protein classification predicting sequence
NINDFNP

SEQ ID NO: 72925 - protein, 8 aa, Artificial sequence
  Protein classification predicting sequence
DGPPYANG

SEQ ID NO: 72926 - protein, 7 aa, Artificial sequence
  Protein classification predicting sequence
WTTTPWT

SEQ ID NO: 72927 - protein, 7 aa, Artificial sequence
  Protein classification predicting sequence
DQHRGWF

SEQ ID NO: 72928 - protein, 6 aa, Artificial sequence
  Protein classification predicting sequence
DILRLW

SEQ ID NO: 72929 - protein, 7 aa, Artificial sequence
  Protein classification predicting sequence
YRKIRNT

SEQ ID NO: 72930 - protein, 6 aa, Artificial sequence
  Protein classification predicting sequence
KCPRCW

SEQ ID NO: 72931 - protein, 10 aa, Artificial sequence
  Protein classification predicting sequence
LHDGPPYANG

SEQ ID NO: 72932 - protein, 9 aa, Artificial sequence
  Protein classification predicting sequence
VNKILKDII

SEQ ID NO: 72933 - protein, 8 aa, Artificial sequence
  Protein classification predicting sequence
IWTTTPWT

SEQ ID NO: 72934 - protein, 7 aa, Artificial sequence
  Protein classification predicting sequence
GDHVTTD

SEQ ID NO: 72935 - protein, 8 aa, Artificial sequence
  Protein classification predicting sequence
HSYPHCWR

SEQ ID NO: 72936 - protein, 11 aa, Artificial sequence
  Protein classification predicting sequence
LEGSDQHRGWF

SEQ ID NO: 72937 - protein, 8 aa, Artificial sequence
  Protein classification predicting sequence
ISRQRVWG

SEQ ID NO: 72938 - protein, 13 aa, Artificial sequence
  Protein classification predicting sequence
EGSDQYRGWFNSS

SEQ ID NO: 72939 - protein, 6 aa, Artificial sequence
  Protein classification predicting sequence
CERCWN

SEQ ID NO: 72940 - protein, 24 aa, Artificial sequence
  Protein classification predicting sequence
TLLMPKTDFPMRGGLPNKEPQIQE

SEQ ID NO: 72941 - protein, 7 aa, Artificial sequence
  Protein classification predicting sequence
GHALNKI

SEQ ID NO: 72942 - protein, 43 aa, Artificial sequence
  Protein classification predicting sequence
KDFIVRYKTMQGFYAPYVPGWDTHGLPIEQALTKKGVDRKKMS

SEQ ID NO: 72943 - protein, 12 aa, Artificial sequence
  Protein classification predicting sequence
AEFREKCKEFAL

SEQ ID NO: 72944 - protein, 23 aa, Artificial sequence
  Protein classification predicting sequence
FIIWTTTPWTIPSNVAITVHPEL

SEQ ID NO: 72945 - protein, 8 aa, Artificial sequence
  Protein classification predicting sequence
AQHPFLDR

SEQ ID NO: 72946 - protein, 28 aa, Artificial sequence
  Protein classification predicting sequence
HVTTDAGTGCVHTAPGHGEDDYIVGQKY

SEQ ID NO: 72947 - protein, 10 aa, Artificial sequence
  Protein classification predicting sequence
DKGVFTEEGG

SEQ ID NO: 72948 - protein, 17 aa, Artificial sequence
  Protein classification predicting sequence
FEGMFYDKANKAVTDLL

SEQ ID NO: 72949 - protein, 34 aa, Artificial sequence
  Protein classification predicting sequence
ALLKLDFITHSYPHDWRTKKPVIFRATPQWFASI

SEQ ID NO: 72950 - protein, 11 aa, Artificial sequence
  Protein classification predicting sequence
KVRQDILDAIE

SEQ ID NO: 72951 - protein, 9 aa, Artificial sequence
  Protein classification predicting sequence
WGKTRIYNM

SEQ ID NO: 72952 - protein, 26 aa, Artificial sequence
  Protein classification predicting sequence
RDRGEWVISRQRVWGVPLPVFYAENG

SEQ ID NO: 72953 - protein, 15 aa, Artificial sequence
  Protein classification predicting sequence
IIMTKETVNHVADLF

SEQ ID NO: 72954 - protein, 7 aa, Artificial sequence
  Protein classification predicting sequence
GSNIWFE

SEQ ID NO: 72955 - protein, 33 aa, Artificial sequence
  Protein classification predicting sequence
FTKETDIMDVWFDSGSSHRGVLETRPELSFPAD

SEQ ID NO: 72956 - protein, 51 aa, Artificial sequence
  Protein classification predicting sequence
PYKFLLSHGFVMDGEGKKMSKSLGNVIVPDQVVKQKGADIARLWVSSTDYL

SEQ ID NO: 72957 - protein, 35 aa, Artificial sequence
  Protein classification predicting sequence
DVRISDEILKQTSDVYRKIRNTLRFMLGNINDFNP

SEQ ID NO: 72958 - protein, 58 aa, Artificial sequence
  Protein classification predicting sequence
LLEVDRYLLNRLREFTASTINNYENFDYLNIYQEVQNFINVELSNFYLDYGKDILYIE

SEQ ID NO: 72959 - protein, 12 aa, Artificial sequence
  Protein classification predicting sequence
RRSMQTVLYQIL

SEQ ID NO: 72960 - protein, 31 aa, Artificial sequence
  Protein classification predicting sequence
DMTKLLAPILVHTAEEVWSHTPHVKEESVHL

SEQ ID NO: 72961 - protein, 14 aa, Artificial sequence
  Protein classification predicting sequence
TFMNLRDDVNRALE

SEQ ID NO: 72962 - protein, 15 aa, Artificial sequence
  Protein classification predicting sequence
ARNEKVIGKSLEAKV

SEQ ID NO: 72963 - protein, 7 aa, Artificial sequence
  Protein classification predicting sequence
DWRTKKP

SEQ ID NO: 72964 - protein, 17 aa, Artificial sequence
  Protein classification predicting sequence
AKDLLPEGFTHPGSPNG

SEQ ID NO: 72965 - protein, 8 aa, Artificial sequence
  Protein classification predicting sequence
PEYEAAQI

SEQ ID NO: 72966 - protein, 7 aa, Artificial sequence
  Protein classification predicting sequence
PYITLKP

SEQ ID NO: 72967 - protein, 7 aa, Artificial sequence
  Protein classification predicting sequence
THHNALD

SEQ ID NO: 72968 - protein, 7 aa, Artificial sequence
  Protein classification predicting sequence
GGSYDTG

SEQ ID NO: 72969 - protein, 6 aa, Artificial sequence
  Protein classification predicting sequence
HNPEFT

SEQ ID NO: 72970 - protein, 7 aa, Artificial sequence
  Protein classification predicting sequence
FTELNDP

SEQ ID NO: 72971 - protein, 10 aa, Artificial sequence
  Protein classification predicting sequence
EELEALNIEV

SEQ ID NO: 72972 - protein, 6 aa, Artificial sequence
  Protein classification predicting sequence
IRQFMV

SEQ ID NO: 72973 - protein, 11 aa, Artificial sequence
  Protein classification predicting sequence
DFGKPFEKLTM

SEQ ID NO: 72974 - protein, 18 aa, Artificial sequence
  Protein classification predicting sequence
AGDDEAMFYDEDYVTALE

SEQ ID NO: 72975 - protein, 85 aa, Artificial sequence
  Protein classification predicting sequence
ARPFITHHNALDLDMYLRIAPELYLKRLVVGGFERVFEINRNFRNEGISVRHNPEFTMMELYMAYADYKDLIELTESLFRTLAQD

SEQ ID NO: 72976 - protein, 24 aa, Artificial sequence
  Protein classification predicting sequence
QVNAKAAGDDEAMFYDEDYVTALE

SEQ ID NO: 72977 - protein, 68 aa, Artificial sequence
  Protein classification predicting sequence
ARPFITHHNALDLDMYLRIAPELYLKRLVVGGFERVFEINRNFRNEGISVRHNPEFTMMELYMAYADY

SEQ ID NO: 72978 - protein, 7 aa, Artificial sequence
  Protein classification predicting sequence
YMAYADY

SEQ ID NO: 72979 - protein, 15 aa, Artificial sequence
  Protein classification predicting sequence
DLIELTESLFRTLAQ

SEQ ID NO: 72980 - protein, 15 aa, Artificial sequence
  Protein classification predicting sequence
VEKSWGLGRIVTEIF

SEQ ID NO: 72981 - protein, 7 aa, Artificial sequence
  Protein classification predicting sequence
GLPPTAG

SEQ ID NO: 72982 - protein, 20 aa, Artificial sequence
  Protein classification predicting sequence
MLFTNSHTIRDVILFPAMRP

SEQ ID NO: 72983 - protein, 8 aa, Artificial sequence
  Protein classification predicting sequence
RYLDLIVN

SEQ ID NO: 72984 - protein, 6 aa, Artificial sequence
  Protein classification predicting sequence
DYNDMM

SEQ ID NO: 72985 - protein, 7 aa, Artificial sequence
  Protein classification predicting sequence
YSELNDP

SEQ ID NO: 72986 - protein, 12 aa, Artificial sequence
  Protein classification predicting sequence
GIGIDRLVMLLT

SEQ ID NO: 72987 - protein, 7 aa, Artificial sequence
  Protein classification predicting sequence
DQETRYR

SEQ ID NO: 72988 - protein, 8 aa, Artificial sequence
  Protein classification predicting sequence
GGATAKPF

SEQ ID NO: 72989 - protein, 7 aa, Artificial sequence
  Protein classification predicting sequence
THNPEFT

SEQ ID NO: 72990 - protein, 12 aa, Artificial sequence
  Protein classification predicting sequence
THNPEFTTCEFY

SEQ ID NO: 72991 - protein, 8 aa, Artificial sequence
  Protein classification predicting sequence
SGKGDLYV

SEQ ID NO: 72992 - protein, 7 aa, Artificial sequence
  Protein classification predicting sequence
IPGGASA

SEQ ID NO: 72993 - protein, 12 aa, Artificial sequence
  Protein classification predicting sequence
VFEINRNFRNEG

SEQ ID NO: 72994 - protein, 8 aa, Artificial sequence
  Protein classification predicting sequence
SPLARRND

SEQ ID NO: 72995 - protein, 9 aa, Artificial sequence
  Protein classification predicting sequence
GIGIDRLVM

SEQ ID NO: 72996 - protein, 7 aa, Artificial sequence
  Protein classification predicting sequence
YRKRHLD

SEQ ID NO: 72997 - protein, 8 aa, Artificial sequence
  Protein classification predicting sequence
YLRIAPEL

SEQ ID NO: 72998 - protein, 10 aa, Artificial sequence
  Protein classification predicting sequence
STRHNPEFTM

SEQ ID NO: 72999 - protein, 8 aa, Artificial sequence
  Protein classification predicting sequence
GKLAFFTL

SEQ ID NO: 73000 - protein, 6 aa, Artificial sequence
  Protein classification predicting sequence
TFRRRA

SEQ ID NO: 73001 - protein, 8 aa, Artificial sequence
  Protein classification predicting sequence
LKRLIVGG

SEQ ID NO: 73002 - protein, 9 aa, Artificial sequence
  Protein classification predicting sequence
HNPEFTSIE

SEQ ID NO: 73003 - protein, 10 aa, Artificial sequence
  Protein classification predicting sequence
RFELFIVGRE

SEQ ID NO: 73004 - protein, 6 aa, Artificial sequence
  Protein classification predicting sequence
TNTGEL

SEQ ID NO: 73005 - protein, 7 aa, Artificial sequence
  Protein classification predicting sequence
RIAPELY

SEQ ID NO: 73006 - protein, 6 aa, Artificial sequence
  Protein classification predicting sequence
RFELFI

SEQ ID NO: 73007 - protein, 6 aa, Artificial sequence
  Protein classification predicting sequence
FPAMRP

SEQ ID NO: 73008 - protein, 6 aa, Artificial sequence
  Protein classification predicting sequence
GCHDSY

SEQ ID NO: 73009 - protein, 11 aa, Artificial sequence
  Protein classification predicting sequence
GGGKLTWRVDW

SEQ ID NO: 73010 - protein, 5 aa, Artificial sequence
  Protein classification predicting sequence
WRVDW

SEQ ID NO: 73011 - protein, 7 aa, Artificial sequence
  Protein classification predicting sequence
QIYVRKD

SEQ ID NO: 73012 - protein, 8 aa, Artificial sequence
  Protein classification predicting sequence
EQRYRQRY

SEQ ID NO: 73013 - protein, 8 aa, Artificial sequence
  Protein classification predicting sequence
EVETPMMH

SEQ ID NO: 73014 - protein, 8 aa, Artificial sequence
  Protein classification predicting sequence
GGASARPF

SEQ ID NO: 73015 - protein, 6 aa, Artificial sequence
  Protein classification predicting sequence
EIKDTM

SEQ ID NO: 73016 - protein, 11 aa, Artificial sequence
  Protein classification predicting sequence
KEREQGNDEAH

SEQ ID NO: 73017 - protein, 6 aa, Artificial sequence
  Protein classification predicting sequence
LFPAMR

SEQ ID NO: 73018 - protein, 13 aa, Artificial sequence
  Protein classification predicting sequence
MTKRGKGKAGFAH

SEQ ID NO: 73019 - protein, 17 aa, Artificial sequence
  Protein classification predicting sequence
MTKRGKGKAGFAHVQDL

SEQ ID NO: 73020 - protein, 7 aa, Artificial sequence
  Protein classification predicting sequence
HMVDAIK

SEQ ID NO: 73021 - protein, 12 aa, Artificial sequence
  Protein classification predicting sequence
EQRYRQRYLDLI

SEQ ID NO: 73022 - protein, 11 aa, Artificial sequence
  Protein classification predicting sequence
ELHLKRLIVGG

SEQ ID NO: 73023 - protein, 35 aa, Artificial sequence
  Protein classification predicting sequence
EKVYEIGRVFRNEGVSTRHNPEFTMIELYEAYADY

SEQ ID NO: 73024 - protein, 7 aa, Artificial sequence
  Protein classification predicting sequence
VLGTTTI

SEQ ID NO: 73025 - protein, 9 aa, Artificial sequence
  Protein classification predicting sequence
ELNDPIDQR

SEQ ID NO: 73026 - protein, 8 aa, Artificial sequence
  Protein classification predicting sequence
HEELNDQL

SEQ ID NO: 73027 - protein, 7 aa, Artificial sequence
  Protein classification predicting sequence
DPFGKRF

SEQ ID NO: 73028 - protein, 7 aa, Artificial sequence
  Protein classification predicting sequence
GKAGFAH

SEQ ID NO: 73029 - protein, 8 aa, Artificial sequence
  Protein classification predicting sequence
GQIQIYVR

SEQ ID NO: 73030 - protein, 8 aa, Artificial sequence
  Protein classification predicting sequence
GGAAARPF

SEQ ID NO: 73031 - protein, 12 aa, Artificial sequence
  Protein classification predicting sequence
STRHNPEFTMLE

SEQ ID NO: 73032 - protein, 9 aa, Artificial sequence
  Protein classification predicting sequence
KEYVGVDFW

SEQ ID NO: 73033 - protein, 5 aa, Artificial sequence
  Protein classification predicting sequence
GVDFW

SEQ ID NO: 73034 - protein, 7 aa, Artificial sequence
  Protein classification predicting sequence
QGNDEAH

SEQ ID NO: 73035 - protein, 12 aa, Artificial sequence
  Protein classification predicting sequence
QGNDEAHEMDED

SEQ ID NO: 73036 - protein, 26 aa, Artificial sequence
  Protein classification predicting sequence
LRPLPDKYHGLKDVEQRYRQRYLDLI

SEQ ID NO: 73037 - protein, 8 aa, Artificial sequence
  Protein classification predicting sequence
AQEVLGTT

SEQ ID NO: 73038 - protein, 12 aa, Artificial sequence
  Protein classification predicting sequence
VDAVKEATGVDF

SEQ ID NO: 73039 - protein, 7 aa, Artificial sequence
  Protein classification predicting sequence
NEFFEQK

SEQ ID NO: 73040 - protein, 9 aa, Artificial sequence
  Protein classification predicting sequence
EISPLAKKN

SEQ ID NO: 73041 - protein, 6 aa, Artificial sequence
  Protein classification predicting sequence
GNDEAH

SEQ ID NO: 73042 - protein, 7 aa, Artificial sequence
  Protein classification predicting sequence
ELYLKRL

SEQ ID NO: 73043 - protein, 7 aa, Artificial sequence
  Protein classification predicting sequence
LLTKSLR

SEQ ID NO: 73044 - protein, 8 aa, Artificial sequence
  Protein classification predicting sequence
IRDVILFP

SEQ ID NO: 73045 - protein, 6 aa, Artificial sequence
  Protein classification predicting sequence
DWPMRW

SEQ ID NO: 73046 - protein, 6 aa, Artificial sequence
  Protein classification predicting sequence
AFPNDF

SEQ ID NO: 73047 - protein, 7 aa, Artificial sequence
  Protein classification predicting sequence
PFITYHN

SEQ ID NO: 73048 - protein, 6 aa, Artificial sequence
  Protein classification predicting sequence
TMKESI

SEQ ID NO: 73049 - protein, 18 aa, Artificial sequence
  Protein classification predicting sequence
KKWDLGDILGAKGKLFKT

SEQ ID NO: 73050 - protein, 7 aa, Artificial sequence
  Protein classification predicting sequence
PVEVSPL

SEQ ID NO: 73051 - protein, 8 aa, Artificial sequence
  Protein classification predicting sequence
HFGLKDKE

SEQ ID NO: 73052 - protein, 19 aa, Artificial sequence
  Protein classification predicting sequence
APELYHKMLVVGGIDRVYE

SEQ ID NO: 73053 - protein, 8 aa, Artificial sequence
  Protein classification predicting sequence
KDAGDDEA

SEQ ID NO: 73054 - protein, 11 aa, Artificial sequence
  Protein classification predicting sequence
GFLEVETPMMH

SEQ ID NO: 73055 - protein, 7 aa, Artificial sequence
  Protein classification predicting sequence
MDLTEEL

SEQ ID NO: 73056 - protein, 11 aa, Artificial sequence
  Protein classification predicting sequence
ATYSPFLPISP

SEQ ID NO: 73057 - protein, 7 aa, Artificial sequence
  Protein classification predicting sequence
DGLRKVP

SEQ ID NO: 73058 - protein, 10 aa, Artificial sequence
  Protein classification predicting sequence
LVETVTLLCK

SEQ ID NO: 73059 - protein, 13 aa, Artificial sequence
  Protein classification predicting sequence
VDFKAPWIRMTMK

SEQ ID NO: 73060 - protein, 11 aa, Artificial sequence
  Protein classification predicting sequence
LIAPHHITDHP

SEQ ID NO: 73061 - protein, 24 aa, Artificial sequence
  Protein classification predicting sequence
HPIDEEFLEALCQGMPPAGGFGIG

SEQ ID NO: 73062 - protein, 6 aa, Artificial sequence
  Protein classification predicting sequence
MGKASF

SEQ ID NO: 73063 - protein, 7 aa, Artificial sequence
  Protein classification predicting sequence
FKTKTGE

SEQ ID NO: 73064 - protein, 7 aa, Artificial sequence
  Protein classification predicting sequence
DLGDILG

SEQ ID NO: 73065 - protein, 21 aa, Artificial sequence
  Protein classification predicting sequence
VAGRMMLKRVMGKASFATLQD

SEQ ID NO: 73066 - protein, 9 aa, Artificial sequence
  Protein classification predicting sequence
LEVETPMMH

SEQ ID NO: 73067 - protein, 13 aa, Artificial sequence
  Protein classification predicting sequence
APELYLKRLVVGG

SEQ ID NO: 73068 - protein, 10 aa, Artificial sequence
  Protein classification predicting sequence
SELNDPEDQA

SEQ ID NO: 73069 - protein, 10 aa, Artificial sequence
  Protein classification predicting sequence
PSIRDVILFP

SEQ ID NO: 73070 - protein, 14 aa, Artificial sequence
  Protein classification predicting sequence
PSIRDVILFPHMRP

SEQ ID NO: 73071 - protein, 8 aa, Artificial sequence
  Protein classification predicting sequence
HGLKDPDL

SEQ ID NO: 73072 - protein, 10 aa, Artificial sequence
  Protein classification predicting sequence
RHNPEFTMIE

SEQ ID NO: 73073 - protein, 10 aa, Artificial sequence
  Protein classification predicting sequence
LTDSPSIRDV

SEQ ID NO: 73074 - protein, 7 aa, Artificial sequence
  Protein classification predicting sequence
DMYLRIA

SEQ ID NO: 73075 - protein, 9 aa, Artificial sequence
  Protein classification predicting sequence
SVRHNPEFT

SEQ ID NO: 73076 - protein, 10 aa, Artificial sequence
  Protein classification predicting sequence
IELYEAYADY

SEQ ID NO: 73077 - protein, 7 aa, Artificial sequence
  Protein classification predicting sequence
LFPTMKP

SEQ ID NO: 73078 - protein, 7 aa, Artificial sequence
  Protein classification predicting sequence
PVEISPL

SEQ ID NO: 73079 - protein, 9 aa, Artificial sequence
  Protein classification predicting sequence
NAYTELNDP

SEQ ID NO: 73080 - protein, 7 aa, Artificial sequence
  Protein classification predicting sequence
FRNEGIS

SEQ ID NO: 73081 - protein, 6 aa, Artificial sequence
  Protein classification predicting sequence
GREIAN

SEQ ID NO: 73082 - protein, 7 aa, Artificial sequence
  Protein classification predicting sequence
HNPEFTM

SEQ ID NO: 73083 - protein, 8 aa, Artificial sequence
  Protein classification predicting sequence
NDQMLVRR

SEQ ID NO: 73084 - protein, 9 aa, Artificial sequence
  Protein classification predicting sequence
GIDPFGKRF

SEQ ID NO: 73085 - protein, 10 aa, Artificial sequence
  Protein classification predicting sequence
GQIQIYVRKD

SEQ ID NO: 73086 - protein, 12 aa, Artificial sequence
  Protein classification predicting sequence
ELHLKRLIVGGM

SEQ ID NO: 73087 - protein, 9 aa, Artificial sequence
  Protein classification predicting sequence
QPTFIYGHP

SEQ ID NO: 73088 - protein, 10 aa, Artificial sequence
  Protein classification predicting sequence
IRDVLLFPTM

SEQ ID NO: 73089 - protein, 7 aa, Artificial sequence
  Protein classification predicting sequence
PFITHHN

SEQ ID NO: 73090 - protein, 6 aa, Artificial sequence
  Protein classification predicting sequence
NDMMDL

SEQ ID NO: 73091 - protein, 12 aa, Artificial sequence
  Protein classification predicting sequence
RYRQRYLDLIAN

SEQ ID NO: 73092 - protein, 8 aa, Artificial sequence
  Protein classification predicting sequence
LKRLVVGG

SEQ ID NO: 73093 - protein, 9 aa, Artificial sequence
  Protein classification predicting sequence
STRHNPEFT

SEQ ID NO: 73094 - protein, 7 aa, Artificial sequence
  Protein classification predicting sequence
GFSELND

SEQ ID NO: 73095 - protein, 8 aa, Artificial sequence
  Protein classification predicting sequence
IQLYVARD

SEQ ID NO: 73096 - protein, 7 aa, Artificial sequence
  Protein classification predicting sequence
KSLRPLP

SEQ ID NO: 73097 - protein, 10 aa, Artificial sequence
  Protein classification predicting sequence
PFVTHHNALD

SEQ ID NO: 73098 - protein, 7 aa, Artificial sequence
  Protein classification predicting sequence
GIDRLVM

SEQ ID NO: 73099 - protein, 9 aa, Artificial sequence
  Protein classification predicting sequence
RREKLAALR

SEQ ID NO: 73100 - protein, 20 aa, Artificial sequence
  Protein classification predicting sequence
FIGGREIGNGFSELNDAEDQ

SEQ ID NO: 73101 - protein, 8 aa, Artificial sequence
  Protein classification predicting sequence
NRNFRNEG

SEQ ID NO: 73102 - protein, 17 aa, Artificial sequence
  Protein classification predicting sequence
NRNFRNEGMDHSHNPEF

SEQ ID NO: 73103 - protein, 7 aa, Artificial sequence
  Protein classification predicting sequence
DRFELFI

SEQ ID NO: 73104 - protein, 7 aa, Artificial sequence
  Protein classification predicting sequence
FSELNDP

SEQ ID NO: 73105 - protein, 6 aa, Artificial sequence
  Protein classification predicting sequence
EELNDQ

SEQ ID NO: 73106 - protein, 34 aa, Artificial sequence
  Protein classification predicting sequence
IVAGRLMTKRGKGKVGFAHLQDREGQIQLYVRKD

SEQ ID NO: 73107 - protein, 10 aa, Artificial sequence
  Protein classification predicting sequence
TDMGELSIKA

SEQ ID NO: 73108 - protein, 12 aa, Artificial sequence
  Protein classification predicting sequence
EKHFTSVGHIIN

SEQ ID NO: 73109 - protein, 8 aa, Artificial sequence
  Protein classification predicting sequence
TDRFELFI

SEQ ID NO: 73110 - protein, 8 aa, Artificial sequence
  Protein classification predicting sequence
ELNDPIDQ

SEQ ID NO: 73111 - protein, 11 aa, Artificial sequence
  Protein classification predicting sequence
AKELGDDEATG

SEQ ID NO: 73112 - protein, 6 aa, Artificial sequence
  Protein classification predicting sequence
KRGKGK

SEQ ID NO: 73113 - protein, 7 aa, Artificial sequence
  Protein classification predicting sequence
KALRPLP

SEQ ID NO: 73114 - protein, 9 aa, Artificial sequence
  Protein classification predicting sequence
AGGAAARPF

SEQ ID NO: 73115 - protein, 6 aa, Artificial sequence
  Protein classification predicting sequence
VGHIIN

SEQ ID NO: 73116 - protein, 14 aa, Artificial sequence
  Protein classification predicting sequence
VGHIINAFFEEFVE

SEQ ID NO: 73117 - protein, 6 aa, Artificial sequence
  Protein classification predicting sequence
GINPYP

SEQ ID NO: 73118 - protein, 9 aa, Artificial sequence
  Protein classification predicting sequence
NAFTELNDP

SEQ ID NO: 73119 - protein, 6 aa, Artificial sequence
  Protein classification predicting sequence
AGDDEA

SEQ ID NO: 73120 - protein, 6 aa, Artificial sequence
  Protein classification predicting sequence
MDEDYI

SEQ ID NO: 73121 - protein, 10 aa, Artificial sequence
  Protein classification predicting sequence
TNTGELSVKA

SEQ ID NO: 73122 - protein, 7 aa, Artificial sequence
  Protein classification predicting sequence
IAGGAAA

SEQ ID NO: 73123 - protein, 13 aa, Artificial sequence
  Protein classification predicting sequence
KVYEIGRVFRNEG

SEQ ID NO: 73124 - protein, 10 aa, Artificial sequence
  Protein classification predicting sequence
YGHILNEFFE

SEQ ID NO: 73125 - protein, 6 aa, Artificial sequence
  Protein classification predicting sequence
PELYLK

SEQ ID NO: 73126 - protein, 8 aa, Artificial sequence
  Protein classification predicting sequence
RLLDKLVG

SEQ ID NO: 73127 - protein, 6 aa, Artificial sequence
  Protein classification predicting sequence
GDDEAM

SEQ ID NO: 73128 - protein, 7 aa, Artificial sequence
  Protein classification predicting sequence
GKLTWRV

SEQ ID NO: 73129 - protein, 7 aa, Artificial sequence
  Protein classification predicting sequence
GAAAKPF

SEQ ID NO: 73130 - protein, 6 aa, Artificial sequence
  Protein classification predicting sequence
PEKFHG

SEQ ID NO: 73131 - protein, 8 aa, Artificial sequence
  Protein classification predicting sequence
GGAAAKPF

SEQ ID NO: 73132 - protein, 5 aa, Artificial sequence
  Protein classification predicting sequence
FVTHH

SEQ ID NO: 73133 - protein, 6 aa, Artificial sequence
  Protein classification predicting sequence
YQAYAD

SEQ ID NO: 73134 - protein, 8 aa, Artificial sequence
  Protein classification predicting sequence
NAYSELND

SEQ ID NO: 73135 - protein, 8 aa, Artificial sequence
  Protein classification predicting sequence
GLGIGIDR

SEQ ID NO: 73136 - protein, 8 aa, Artificial sequence
  Protein classification predicting sequence
PTFVYGHP

SEQ ID NO: 73137 - protein, 8 aa, Artificial sequence
  Protein classification predicting sequence
IVGGFDKV

SEQ ID NO: 73138 - protein, 8 aa, Artificial sequence
  Protein classification predicting sequence
ELFINTKE

SEQ ID NO: 73139 - protein, 6 aa, Artificial sequence
  Protein classification predicting sequence
YLNNKG

SEQ ID NO: 73140 - protein, 9 aa, Artificial sequence
  Protein classification predicting sequence
KSLRPLPDK

SEQ ID NO: 73141 - protein, 14 aa, Artificial sequence
  Protein classification predicting sequence
GIGIDRLVMLLTDS

SEQ ID NO: 73142 - protein, 6 aa, Artificial sequence
  Protein classification predicting sequence
GRIQLY

SEQ ID NO: 73143 - protein, 9 aa, Artificial sequence
  Protein classification predicting sequence
KFHGLADQE

SEQ ID NO: 73144 - protein, 7 aa, Artificial sequence
  Protein classification predicting sequence
MDLTESM

SEQ ID NO: 73145 - protein, 10 aa, Artificial sequence
  Protein classification predicting sequence
YPAEVSPLAR

SEQ ID NO: 73146 - protein, 7 aa, Artificial sequence
  Protein classification predicting sequence
EVSPLAR

SEQ ID NO: 73147 - protein, 8 aa, Artificial sequence
  Protein classification predicting sequence
EAMHYDAD

SEQ ID NO: 73148 - protein, 13 aa, Artificial sequence
  Protein classification predicting sequence
IAGRLMTKRGKGK

SEQ ID NO: 73149 - protein, 7 aa, Artificial sequence
  Protein classification predicting sequence
GVMFKTN

SEQ ID NO: 73150 - protein, 7 aa, Artificial sequence
  Protein classification predicting sequence
FKTNVGE

SEQ ID NO: 73151 - protein, 7 aa, Artificial sequence
  Protein classification predicting sequence
ELHLKRL

SEQ ID NO: 73152 - protein, 11 aa, Artificial sequence
  Protein classification predicting sequence
WTRLHIVDAVK

SEQ ID NO: 73153 - protein, 7 aa, Artificial sequence
  Protein classification predicting sequence
LIQPTFI

SEQ ID NO: 73154 - protein, 13 aa, Artificial sequence
  Protein classification predicting sequence
GHPVEISPLAKKN

SEQ ID NO: 73155 - protein, 8 aa, Artificial sequence
  Protein classification predicting sequence
AGRIMTKR

SEQ ID NO: 73156 - protein, 11 aa, Artificial sequence
  Protein classification predicting sequence
IMSPLAKWHRS

SEQ ID NO: 73157 - protein, 9 aa, Artificial sequence
  Protein classification predicting sequence
ALEYGLPPT

SEQ ID NO: 73158 - protein, 7 aa, Artificial sequence
  Protein classification predicting sequence
IFEEVAE

SEQ ID NO: 73159 - protein, 19 aa, Artificial sequence
  Protein classification predicting sequence
GRMMTRRIMGKASFVTLQD

SEQ ID NO: 73160 - protein, 11 aa, Artificial sequence
  Protein classification predicting sequence
LRPLPDKFHGL

SEQ ID NO: 73161 - protein, 17 aa, Artificial sequence
  Protein classification predicting sequence
GFMEVETPMMQVIPGGA

SEQ ID NO: 73162 - protein, 12 aa, Artificial sequence
  Protein classification predicting sequence
ARPFITHHNALD

SEQ ID NO: 73163 - protein, 12 aa, Artificial sequence
  Protein classification predicting sequence
SPRHNPEFTMME

SEQ ID NO: 73164 - protein, 10 aa, Artificial sequence
  Protein classification predicting sequence
RHNPEFTMME

SEQ ID NO: 73165 - protein, 23 aa, Artificial sequence
  Protein classification predicting sequence
HLIQPTFITEYPAEVSPLARRND

SEQ ID NO: 73166 - protein, 28 aa, Artificial sequence
  Protein classification predicting sequence
ITDRFEFFIGGREIGNGFSELNDAEDQA

SEQ ID NO: 73167 - protein, 15 aa, Artificial sequence
  Protein classification predicting sequence
SHTIRDVILFPAMRP

SEQ ID NO: 73168 - protein, 7 aa, Artificial sequence
  Protein classification predicting sequence
LTERFEL

SEQ ID NO: 73169 - protein, 11 aa, Artificial sequence
  Protein classification predicting sequence
DLTPPWRRVTM

SEQ ID NO: 73170 - protein, 6 aa, Artificial sequence
  Protein classification predicting sequence
VSVAGR

SEQ ID NO: 73171 - protein, 8 aa, Artificial sequence
  Protein classification predicting sequence
GRIFRNEG

SEQ ID NO: 73172 - protein, 9 aa, Artificial sequence
  Protein classification predicting sequence
PLPDKWHGL

SEQ ID NO: 73173 - protein, 8 aa, Artificial sequence
  Protein classification predicting sequence
FRNEGIST

SEQ ID NO: 73174 - protein, 8 aa, Artificial sequence
  Protein classification predicting sequence
QEENKLIA

SEQ ID NO: 73175 - protein, 9 aa, Artificial sequence
  Protein classification predicting sequence
YADKTKEEL

SEQ ID NO: 73176 - protein, 6 aa, Artificial sequence
  Protein classification predicting sequence
WDLGDI

SEQ ID NO: 73177 - protein, 12 aa, Artificial sequence
  Protein classification predicting sequence
LRIAPELYLKRL

SEQ ID NO: 73178 - protein, 10 aa, Artificial sequence
  Protein classification predicting sequence
EINRNFRNEG

SEQ ID NO: 73179 - protein, 8 aa, Artificial sequence
  Protein classification predicting sequence
AQSVLGTT

SEQ ID NO: 73180 - protein, 7 aa, Artificial sequence
  Protein classification predicting sequence
DKTKEEL

SEQ ID NO: 73181 - protein, 11 aa, Artificial sequence
  Protein classification predicting sequence
RYRQRYVDLIV

SEQ ID NO: 73182 - protein, 7 aa, Artificial sequence
  Protein classification predicting sequence
FRKVPKN

SEQ ID NO: 73183 - protein, 8 aa, Artificial sequence
  Protein classification predicting sequence
VHIGNFRE

SEQ ID NO: 73184 - protein, 6 aa, Artificial sequence
  Protein classification predicting sequence
AKQPPL

SEQ ID NO: 73185 - protein, 14 aa, Artificial sequence
  Protein classification predicting sequence
RREKLAALRQQGVA

SEQ ID NO: 73186 - protein, 6 aa, Artificial sequence
  Protein classification predicting sequence
AYPNDF

SEQ ID NO: 73187 - protein, 19 aa, Artificial sequence
  Protein classification predicting sequence
EVETPMLHPIPGGAAAKPF

SEQ ID NO: 73188 - protein, 10 aa, Artificial sequence
  Protein classification predicting sequence
IPGGAAAKPF

SEQ ID NO: 73189 - protein, 8 aa, Artificial sequence
  Protein classification predicting sequence
THHNALDM

SEQ ID NO: 73190 - protein, 31 aa, Artificial sequence
  Protein classification predicting sequence
THHNALDMQMFLRIAPELYLKRLIVGGFERV

SEQ ID NO: 73191 - protein, 7 aa, Artificial sequence
  Protein classification predicting sequence
VGGFERV

SEQ ID NO: 73192 - protein, 12 aa, Artificial sequence
  Protein classification predicting sequence
EINRNFRNEGVS

SEQ ID NO: 73193 - protein, 7 aa, Artificial sequence
  Protein classification predicting sequence
DYRWLMD

SEQ ID NO: 73194 - protein, 33 aa, Artificial sequence
  Protein classification predicting sequence
GITERFELFITGREIANGFSELNDPEDQAERFR

SEQ ID NO: 73195 - protein, 12 aa, Artificial sequence
  Protein classification predicting sequence
DADYIRALEYGM

SEQ ID NO: 73196 - protein, 33 aa, Artificial sequence
  Protein classification predicting sequence
DADYIRALEYGMPPTGGCGIGIDRLVMLLTDSP

SEQ ID NO: 73197 - protein, 15 aa, Artificial sequence
  Protein classification predicting sequence
GIGIDRLVMLLTDSP

SEQ ID NO: 73198 - protein, 7 aa, Artificial sequence
  Protein classification predicting sequence
VMLPTLG

SEQ ID NO: 73199 - protein, 10 aa, Artificial sequence
  Protein classification predicting sequence
AKKLYFDVIP

SEQ ID NO: 73200 - protein, 11 aa, Artificial sequence
  Protein classification predicting sequence
LRIAPELYLKR

SEQ ID NO: 73201 - protein, 11 aa, Artificial sequence
  Protein classification predicting sequence
MLLTNSPSIRD

SEQ ID NO: 73202 - protein, 15 aa, Artificial sequence
  Protein classification predicting sequence
KLQWKPDFGMRWAAL

SEQ ID NO: 73203 - protein, 13 aa, Artificial sequence
  Protein classification predicting sequence
ENKLIAERRAKLD

SEQ ID NO: 73204 - protein, 11 aa, Artificial sequence
  Protein classification predicting sequence
MAKRGPFLVIQ

SEQ ID NO: 73205 - protein, 8 aa, Artificial sequence
  Protein classification predicting sequence
SGRIQAYA

SEQ ID NO: 73206 - protein, 6 aa, Artificial sequence
  Protein classification predicting sequence
RYRQRY

SEQ ID NO: 73207 - protein, 19 aa, Artificial sequence
  Protein classification predicting sequence
MYLRIAPELYLKRLVVGGF

SEQ ID NO: 73208 - protein, 13 aa, Artificial sequence
  Protein classification predicting sequence
RVFEINRNFRNEG

SEQ ID NO: 73209 - protein, 34 aa, Artificial sequence
  Protein classification predicting sequence
RVFEINRNFRNEGLSPRHNPEFTMMEFYMAYADY

SEQ ID NO: 73210 - protein, 8 aa, Artificial sequence
  Protein classification predicting sequence
MPYGEHTV

SEQ ID NO: 73211 - protein, 17 aa, Artificial sequence
  Protein classification predicting sequence
FWTCGQLLEEIFGETAE

SEQ ID NO: 73212 - protein, 20 aa, Artificial sequence
  Protein classification predicting sequence
LMQPTFITGYPADISPLARR

SEQ ID NO: 73213 - protein, 6 aa, Artificial sequence
  Protein classification predicting sequence
QPTFIT

SEQ ID NO: 73214 - protein, 12 aa, Artificial sequence
  Protein classification predicting sequence
TDRFEFFIGGRE

SEQ ID NO: 73215 - protein, 23 aa, Artificial sequence
  Protein classification predicting sequence
TDRFEFFIGGREVANGFSELNDA

SEQ ID NO: 73216 - protein, 9 aa, Artificial sequence
  Protein classification predicting sequence
NGFSELNDA

SEQ ID NO: 73217 - protein, 6 aa, Artificial sequence
  Protein classification predicting sequence
RFKAQV

SEQ ID NO: 73218 - protein, 9 aa, Artificial sequence
  Protein classification predicting sequence
GDDEAMFYD

SEQ ID NO: 73219 - protein, 36 aa, Artificial sequence
  Protein classification predicting sequence
GDDEAMFYDADYITALEHGLPPTAGQGIGIDRLVML

SEQ ID NO: 73220 - protein, 10 aa, Artificial sequence
  Protein classification predicting sequence
GIGIDRLVML

SEQ ID NO: 73221 - protein, 17 aa, Artificial sequence
  Protein classification predicting sequence
RFTDRFELFIVGREHAN

SEQ ID NO: 73222 - protein, 10 aa, Artificial sequence
  Protein classification predicting sequence
FTELNDPIDQ

SEQ ID NO: 73223 - protein, 6 aa, Artificial sequence
  Protein classification predicting sequence
GIDPFG

SEQ ID NO: 73224 - protein, 13 aa, Artificial sequence
  Protein classification predicting sequence
GVEGVMFKTNTGE

SEQ ID NO: 73225 - protein, 12 aa, Artificial sequence
  Protein classification predicting sequence
LLSKSLRPLPDK

SEQ ID NO: 73226 - protein, 17 aa, Artificial sequence
  Protein classification predicting sequence
TFINRSKIIQEMRNYLN

SEQ ID NO: 73227 - protein, 6 aa, Artificial sequence
  Protein classification predicting sequence
MVRHIA

SEQ ID NO: 73228 - protein, 8 aa, Artificial sequence
  Protein classification predicting sequence
GSAKVQYN

SEQ ID NO: 73229 - protein, 8 aa, Artificial sequence
  Protein classification predicting sequence
KEVTGVDF

SEQ ID NO: 73230 - protein, 19 aa, Artificial sequence
  Protein classification predicting sequence
RFTDRFELFIVGREHANAF

SEQ ID NO: 73231 - protein, 34 aa, Artificial sequence
  Protein classification predicting sequence
KSLRPLPDKFHGLQDIEQRYRQRYLDLITNEDST

SEQ ID NO: 73232 - protein, 29 aa, Artificial sequence
  Protein classification predicting sequence
MKYGHILNEFFEQKVEETLIQPTFIYGHP

SEQ ID NO: 73233 - protein, 22 aa, Artificial sequence
  Protein classification predicting sequence
VGEENYEIFKKADLGDFLGVEG

SEQ ID NO: 73234 - protein, 15 aa, Artificial sequence
  Protein classification predicting sequence
KALRPLPEKFHGLTD

SEQ ID NO: 73235 - protein, 29 aa, Artificial sequence
  Protein classification predicting sequence
LRPLPEKFHGLTDIETIYRKRHLDLISNR

SEQ ID NO: 73236 - protein, 7 aa, Artificial sequence
  Protein classification predicting sequence
RFVTRSK

SEQ ID NO: 73237 - protein, 8 aa, Artificial sequence
  Protein classification predicting sequence
LTEGIIQH

SEQ ID NO: 73238 - protein, 7 aa, Artificial sequence
  Protein classification predicting sequence
SPLAKKN

SEQ ID NO: 73239 - protein, 14 aa, Artificial sequence
  Protein classification predicting sequence
EELNDQQIVRREKM

SEQ ID NO: 73240 - protein, 13 aa, Artificial sequence
  Protein classification predicting sequence
MRTDMGELSIKAT

SEQ ID NO: 73241 - protein, 7 aa, Artificial sequence
  Protein classification predicting sequence
ETIYRKR

SEQ ID NO: 73242 - protein, 25 aa, Artificial sequence
  Protein classification predicting sequence
DMVLRIATELHLKRLIVGGMERVYE

SEQ ID NO: 73243 - protein, 6 aa, Artificial sequence
  Protein classification predicting sequence
YQGTEI

SEQ ID NO: 73244 - protein, 15 aa, Artificial sequence
  Protein classification predicting sequence
RFTDRFELFIMTKEY

SEQ ID NO: 73245 - protein, 13 aa, Artificial sequence
  Protein classification predicting sequence
NYEIFKKADLGDF

SEQ ID NO: 73246 - protein, 32 aa, Artificial sequence
  Protein classification predicting sequence
GDGPIDYQGTEIRINEPFKRVHMVDAIKEVTG

SEQ ID NO: 73247 - protein, 26 aa, Artificial sequence
  Protein classification predicting sequence
DFWPEMTVEEAIALAKEKQVPLEKHF

SEQ ID NO: 73248 - protein, 10 aa, Artificial sequence
  Protein classification predicting sequence
RTANSAELKE

SEQ ID NO: 73249 - protein, 7 aa, Artificial sequence
  Protein classification predicting sequence
TKRGKGK

SEQ ID NO: 73250 - protein, 6 aa, Artificial sequence
  Protein classification predicting sequence
VKGDGP

SEQ ID NO: 73251 - protein, 17 aa, Artificial sequence
  Protein classification predicting sequence
VGHIINAFFEEFVEETL

SEQ ID NO: 73252 - protein, 10 aa, Artificial sequence
  Protein classification predicting sequence
RFTDRFELFI

SEQ ID NO: 73253 - protein, 12 aa, Artificial sequence
  Protein classification predicting sequence
NAFTELNDPIDQ

SEQ ID NO: 73254 - protein, 20 aa, Artificial sequence
  Protein classification predicting sequence
NAFTELNDPIDQLSRFEAQA

SEQ ID NO: 73255 - protein, 23 aa, Artificial sequence
  Protein classification predicting sequence
DYIEALEYGMPPTGGLGIGIDRL

SEQ ID NO: 73256 - protein, 20 aa, Artificial sequence
  Protein classification predicting sequence
EALEYGMPPTGGLGIGIDRL

SEQ ID NO: 73257 - protein, 7 aa, Artificial sequence
  Protein classification predicting sequence
DIMNLTE

SEQ ID NO: 73258 - protein, 6 aa, Artificial sequence
  Protein classification predicting sequence
TALEHG

SEQ ID NO: 73259 - protein, 15 aa, Artificial sequence
  Protein classification predicting sequence
RFELFIVGREHANAF

SEQ ID NO: 73260 - protein, 5 aa, Artificial sequence
  Protein classification predicting sequence
QPTFI

SEQ ID NO: 73261 - protein, 15 aa, Artificial sequence
  Protein classification predicting sequence
GMPPTGGLGIGIDRL

SEQ ID NO: 73262 - protein, 10 aa, Artificial sequence
  Protein classification predicting sequence
DPLRKVYPFL

SEQ ID NO: 73263 - protein, 6 aa, Artificial sequence
  Protein classification predicting sequence
GRIQAY

SEQ ID NO: 73264 - protein, 8 aa, Artificial sequence
  Protein classification predicting sequence
GGAEARPF

SEQ ID NO: 73265 - protein, 6 aa, Artificial sequence
  Protein classification predicting sequence
EAHMMD

SEQ ID NO: 73266 - protein, 7 aa, Artificial sequence
  Protein classification predicting sequence
EVAVAGR

SEQ ID NO: 73267 - protein, 10 aa, Artificial sequence
  Protein classification predicting sequence
RYRQRYLDLI

SEQ ID NO: 73268 - protein, 7 aa, Artificial sequence
  Protein classification predicting sequence
RDVLLFP

SEQ ID NO: 73269 - protein, 7 aa, Artificial sequence
  Protein classification predicting sequence
MVDAIKE

SEQ ID NO: 73270 - protein, 11 aa, Artificial sequence
  Protein classification predicting sequence
GMPPTGGLGIG

SEQ ID NO: 73271 - protein, 7 aa, Artificial sequence
  Protein classification predicting sequence
EPFGKDH

SEQ ID NO: 73272 - protein, 8 aa, Artificial sequence
  Protein classification predicting sequence
FEPAGKDH

SEQ ID NO: 73273 - protein, 7 aa, Artificial sequence
  Protein classification predicting sequence
GAAARPF

SEQ ID NO: 73274 - protein, 6 aa, Artificial sequence
  Protein classification predicting sequence
LIAERR

SEQ ID NO: 73275 - protein, 8 aa, Artificial sequence
  Protein classification predicting sequence
CKANGHPN

SEQ ID NO: 73276 - protein, 10 aa, Artificial sequence
  Protein classification predicting sequence
LLTKALRPLP

SEQ ID NO: 73277 - protein, 15 aa, Artificial sequence
  Protein classification predicting sequence
HTIRDVILFPAMRPQ

SEQ ID NO: 73278 - protein, 22 aa, Artificial sequence
  Protein classification predicting sequence
TEELLSSVALEVLGSTSMPYGE

SEQ ID NO: 73279 - protein, 6 aa, Artificial sequence
  Protein classification predicting sequence
PFITHH

SEQ ID NO: 73280 - protein, 8 aa, Artificial sequence
  Protein classification predicting sequence
PTEISPLA

SEQ ID NO: 73281 - protein, 6 aa, Artificial sequence
  Protein classification predicting sequence
PTFITE

SEQ ID NO: 73282 - protein, 8 aa, Artificial sequence
  Protein classification predicting sequence
NGFSELND

SEQ ID NO: 73283 - protein, 9 aa, Artificial sequence
  Protein classification predicting sequence
MDEDYVWAL

SEQ ID NO: 73284 - protein, 9 aa, Artificial sequence
  Protein classification predicting sequence
LIAERRAKL

SEQ ID NO: 73285 - protein, 7 aa, Artificial sequence
  Protein classification predicting sequence
ELYEAYA

SEQ ID NO: 73286 - protein, 9 aa, Artificial sequence
  Protein classification predicting sequence
SIRDVLLFP

SEQ ID NO: 73287 - protein, 12 aa, Artificial sequence
  Protein classification predicting sequence
SIRDVLLFPYMR

SEQ ID NO: 73288 - protein, 8 aa, Artificial sequence
  Protein classification predicting sequence
PVEVSPLA

SEQ ID NO: 73289 - protein, 13 aa, Artificial sequence
  Protein classification predicting sequence
PVEVSPLARASDT

SEQ ID NO: 73290 - protein, 7 aa, Artificial sequence
  Protein classification predicting sequence
PFVTYHN

SEQ ID NO: 73291 - protein, 8 aa, Artificial sequence
  Protein classification predicting sequence
PTGGLGIG

SEQ ID NO: 73292 - protein, 9 aa, Artificial sequence
  Protein classification predicting sequence
SDQLHAEFD

SEQ ID NO: 73293 - protein, 30 aa, Artificial sequence
  Protein classification predicting sequence
VAGRMMTRRIMGKASFVTLQDVGGRIQLYV

SEQ ID NO: 73294 - protein, 11 aa, Artificial sequence
  Protein classification predicting sequence
RDDLPEGVYNE

SEQ ID NO: 73295 - protein, 8 aa, Artificial sequence
  Protein classification predicting sequence
TGELSIHC

SEQ ID NO: 73296 - protein, 7 aa, Artificial sequence
  Protein classification predicting sequence
TFKVRSQ

SEQ ID NO: 73297 - protein, 10 aa, Artificial sequence
  Protein classification predicting sequence
VEKSWGLGRI

SEQ ID NO: 73298 - protein, 12 aa, Artificial sequence
  Protein classification predicting sequence
TALEHGLPPTAG

SEQ ID NO: 73299 - protein, 6 aa, Artificial sequence
  Protein classification predicting sequence
MAVPAH

SEQ ID NO: 73300 - protein, 8 aa, Artificial sequence
  Protein classification predicting sequence
PHLAEELW

SEQ ID NO: 73301 - protein, 6 aa, Artificial sequence
  Protein classification predicting sequence
YWYPVD

SEQ ID NO: 73302 - protein, 9 aa, Artificial sequence
  Protein classification predicting sequence
KMSKSLRNI

SEQ ID NO: 73303 - protein, 12 aa, Artificial sequence
  Protein classification predicting sequence
IESLSDSTIYMA

SEQ ID NO: 73304 - protein, 10 aa, Artificial sequence
  Protein classification predicting sequence
WPKGIAVNGF

SEQ ID NO: 73305 - protein, 6 aa, Artificial sequence
  Protein classification predicting sequence
KWQKRW

SEQ ID NO: 73306 - protein, 7 aa, Artificial sequence
  Protein classification predicting sequence
GIAYRKT

SEQ ID NO: 73307 - protein, 6 aa, Artificial sequence
  Protein classification predicting sequence
WFLRIT

SEQ ID NO: 73308 - protein, 6 aa, Artificial sequence
  Protein classification predicting sequence
RDWEFA

SEQ ID NO: 73309 - protein, 6 aa, Artificial sequence
  Protein classification predicting sequence
YRLRDW

SEQ ID NO: 73310 - protein, 7 aa, Artificial sequence
  Protein classification predicting sequence
FVNTTCP

SEQ ID NO: 73311 - protein, 8 aa, Artificial sequence
  Protein classification predicting sequence
YIGGIEHA

SEQ ID NO: 73312 - protein, 6 aa, Artificial sequence
  Protein classification predicting sequence
PITPHI

SEQ ID NO: 73313 - protein, 6 aa, Artificial sequence
  Protein classification predicting sequence
PHIAEE

SEQ ID NO: 73314 - protein, 12 aa, Artificial sequence
  Protein classification predicting sequence
PMGWDAFGLPAE

SEQ ID NO: 73315 - protein, 6 aa, Artificial sequence
  Protein classification predicting sequence
QWFLKI

SEQ ID NO: 73316 - protein, 7 aa, Artificial sequence
  Protein classification predicting sequence
RPDTLFG

SEQ ID NO: 73317 - protein, 7 aa, Artificial sequence
  Protein classification predicting sequence
GAVMGVP

SEQ ID NO: 73318 - protein, 7 aa, Artificial sequence
  Protein classification predicting sequence
PIPIVHC

SEQ ID NO: 73319 - protein, 7 aa, Artificial sequence
  Protein classification predicting sequence
TDTMDTF

SEQ ID NO: 73320 - protein, 8 aa, Artificial sequence
  Protein classification predicting sequence
TQWIFLKL

SEQ ID NO: 73321 - protein, 6 aa, Artificial sequence
  Protein classification predicting sequence
NWDPVD

SEQ ID NO: 73322 - protein, 9 aa, Artificial sequence
  Protein classification predicting sequence
LSMFPYPSG

SEQ ID NO: 73323 - protein, 7 aa, Artificial sequence
  Protein classification predicting sequence
MFPYPSG

SEQ ID NO: 73324 - protein, 6 aa, Artificial sequence
  Protein classification predicting sequence
WEQWLF

SEQ ID NO: 73325 - protein, 6 aa, Artificial sequence
  Protein classification predicting sequence
LYKKGL

SEQ ID NO: 73326 - protein, 6 aa, Artificial sequence
  Protein classification predicting sequence
RITDYA

SEQ ID NO: 73327 - protein, 6 aa, Artificial sequence
  Protein classification predicting sequence
TTRADT

SEQ ID NO: 73328 - protein, 10 aa, Artificial sequence
  Protein classification predicting sequence
GAVMAVPAHD

SEQ ID NO: 73329 - protein, 15 aa, Artificial sequence
  Protein classification predicting sequence
SGEFDGLEFQAAFDA

SEQ ID NO: 73330 - protein, 6 aa, Artificial sequence
  Protein classification predicting sequence
RLRDWG

SEQ ID NO: 73331 - protein, 9 aa, Artificial sequence
  Protein classification predicting sequence
EHAILHLLY

SEQ ID NO: 73332 - protein, 7 aa, Artificial sequence
  Protein classification predicting sequence
VPNKLVN

SEQ ID NO: 73333 - protein, 8 aa, Artificial sequence
  Protein classification predicting sequence
REFYTTSL

SEQ ID NO: 73334 - protein, 9 aa, Artificial sequence
  Protein classification predicting sequence
VMSVPAHAP

SEQ ID NO: 73335 - protein, 6 aa, Artificial sequence
  Protein classification predicting sequence
VYCRCG

SEQ ID NO: 73336 - protein, 6 aa, Artificial sequence
  Protein classification predicting sequence
RWYLRR

SEQ ID NO: 73337 - protein, 29 aa, Artificial sequence
  Protein classification predicting sequence
GFNVLHPMGWDAFGMPAENAAMQNKVHPK

SEQ ID NO: 73338 - protein, 8 aa, Artificial sequence
  Protein classification predicting sequence
TVLANEQV

SEQ ID NO: 73339 - protein, 10 aa, Artificial sequence
  Protein classification predicting sequence
PVYVANFVLM

SEQ ID NO: 73340 - protein, 8 aa, Artificial sequence
  Protein classification predicting sequence
FARKYGLP

SEQ ID NO: 73341 - protein, 6 aa, Artificial sequence
  Protein classification predicting sequence
PIPVIH

SEQ ID NO: 73342 - protein, 9 aa, Artificial sequence
  Protein classification predicting sequence
LTIARDADQ

SEQ ID NO: 73343 - protein, 6 aa, Artificial sequence
  Protein classification predicting sequence
PAKWTY

SEQ ID NO: 73344 - protein, 6 aa, Artificial sequence
  Protein classification predicting sequence
NWIGKS

SEQ ID NO: 73345 - protein, 10 aa, Artificial sequence
  Protein classification predicting sequence
TTRPDTVYGV

SEQ ID NO: 73346 - protein, 9 aa, Artificial sequence
  Protein classification predicting sequence
PIWIADYVL

SEQ ID NO: 73347 - protein, 11 aa, Artificial sequence
  Protein classification predicting sequence
SRQRYWGAPIP

SEQ ID NO: 73348 - protein, 7 aa, Artificial sequence
  Protein classification predicting sequence
LPVILPE

SEQ ID NO: 73349 - protein, 7 aa, Artificial sequence
  Protein classification predicting sequence
LNFDEPF

SEQ ID NO: 73350 - protein, 8 aa, Artificial sequence
  Protein classification predicting sequence
LLAPFAPH

SEQ ID NO: 73351 - protein, 8 aa, Artificial sequence
  Protein classification predicting sequence
ILPAEFVD

SEQ ID NO: 73352 - protein, 6 aa, Artificial sequence
  Protein classification predicting sequence
FEYWYP

SEQ ID NO: 73353 - protein, 14 aa, Artificial sequence
  Protein classification predicting sequence
FTVFTTRPDTLFGA

SEQ ID NO: 73354 - protein, 7 aa, Artificial sequence
  Protein classification predicting sequence
ELPLVLP

SEQ ID NO: 73355 - protein, 10 aa, Artificial sequence
  Protein classification predicting sequence
YEMFMGPLDA

SEQ ID NO: 73356 - protein, 10 aa, Artificial sequence
  Protein classification predicting sequence
VIVVPGKLVN

SEQ ID NO: 73357 - protein, 12 aa, Artificial sequence
  Protein classification predicting sequence
VFTTRPDTLFGA

SEQ ID NO: 73358 - protein, 12 aa, Artificial sequence
  Protein classification predicting sequence
YCVLAPEHALVA

SEQ ID NO: 73359 - protein, 17 aa, Artificial sequence
  Protein classification predicting sequence
FNLPMKEVVKGGDITKE

SEQ ID NO: 73360 - protein, 42 aa, Artificial sequence
  Protein classification predicting sequence
LEKAYHQTVKKVTEDYAELRFNTAISQMMVFINDAYKAETLP

SEQ ID NO: 73361 - protein, 71 aa, Artificial sequence
  Protein classification predicting sequence
EYVEGFVKMIAPVAPHIGEELWSKLGYNETITYASWPTFDESKLVEDEVEIVVQVMGKVRAKLTMSKDASK

SEQ ID NO: 73362 - protein, 8 aa, Artificial sequence
  Protein classification predicting sequence
GLPAEQYA

SEQ ID NO: 73363 - protein, 7 aa, Artificial sequence
  Protein classification predicting sequence
MAVPAHD

SEQ ID NO: 73364 - protein, 7 aa, Artificial sequence
  Protein classification predicting sequence
VNFRLRD

SEQ ID NO: 73365 - protein, 10 aa, Artificial sequence
  Protein classification predicting sequence
FSRQRYWGEP

SEQ ID NO: 73366 - protein, 6 aa, Artificial sequence
  Protein classification predicting sequence
EPFQKL

SEQ ID NO: 73367 - protein, 6 aa, Artificial sequence
  Protein classification predicting sequence
NVVNPD

SEQ ID NO: 73368 - protein, 18 aa, Artificial sequence
  Protein classification predicting sequence
GWDAFGLPAEQYAIDTGN

SEQ ID NO: 73369 - protein, 9 aa, Artificial sequence
  Protein classification predicting sequence
YYKWTQWIF

SEQ ID NO: 73370 - protein, 19 aa, Artificial sequence
  Protein classification predicting sequence
YYKWTQWIFIQLYNKGLAY

SEQ ID NO: 73371 - protein, 11 aa, Artificial sequence
  Protein classification predicting sequence
VNWCPALGTVL

SEQ ID NO: 73372 - protein, 9 aa, Artificial sequence
  Protein classification predicting sequence
IDGKSERGG

SEQ ID NO: 73373 - protein, 7 aa, Artificial sequence
  Protein classification predicting sequence
QWMLKIT

SEQ ID NO: 73374 - protein, 7 aa, Artificial sequence
  Protein classification predicting sequence
LVDAITT

SEQ ID NO: 73375 - protein, 10 aa, Artificial sequence
  Protein classification predicting sequence
KTGVFTGAYA

SEQ ID NO: 73376 - protein, 10 aa, Artificial sequence
  Protein classification predicting sequence
RRFLDRVWRL

SEQ ID NO: 73377 - protein, 9 aa, Artificial sequence
  Protein classification predicting sequence
QTVKKVTED

SEQ ID NO: 73378 - protein, 6 aa, Artificial sequence
  Protein classification predicting sequence
ISQLMV

SEQ ID NO: 73379 - protein, 8 aa, Artificial sequence
  Protein classification predicting sequence
EELWSKLG

SEQ ID NO: 73380 - protein, 6 aa, Artificial sequence
  Protein classification predicting sequence
IEKKWQ

SEQ ID NO: 73381 - protein, 30 aa, Artificial sequence
  Protein classification predicting sequence
KRMQGYNVLHPMGWDAFGLPAEQYALDTGN

SEQ ID NO: 73382 - protein, 15 aa, Artificial sequence
  Protein classification predicting sequence
VNWCPALGTVLANEE

SEQ ID NO: 73383 - protein, 13 aa, Artificial sequence
  Protein classification predicting sequence
GAVMAVPAHDERD

SEQ ID NO: 73384 - protein, 24 aa, Artificial sequence
  Protein classification predicting sequence
DPETGKKGRRETNTMPQWAGSCWY

SEQ ID NO: 73385 - protein, 18 aa, Artificial sequence
  Protein classification predicting sequence
KGRRETNTMPQWAGSCWY

SEQ ID NO: 73386 - protein, 9 aa, Artificial sequence
  Protein classification predicting sequence
GVVPTKEPF

SEQ ID NO: 73387 - protein, 6 aa, Artificial sequence
  Protein classification predicting sequence
KWQAFW

SEQ ID NO: 73388 - protein, 18 aa, Artificial sequence
  Protein classification predicting sequence
TFKRQIKELGFSYDWDRE

SEQ ID NO: 73389 - protein, 10 aa, Artificial sequence
  Protein classification predicting sequence
LGFSYDWDRE

SEQ ID NO: 73390 - protein, 9 aa, Artificial sequence
  Protein classification predicting sequence
LGTVLANEE

SEQ ID NO: 73391 - protein, 13 aa, Artificial sequence
  Protein classification predicting sequence
SERGGHPVERRPM

SEQ ID NO: 73392 - protein, 9 aa, Artificial sequence
  Protein classification predicting sequence
KDMQRNWIG

SEQ ID NO: 73393 - protein, 7 aa, Artificial sequence
  Protein classification predicting sequence
WIADYVL

SEQ ID NO: 73394 - protein, 6 aa, Artificial sequence
  Protein classification predicting sequence
IHWEDG

SEQ ID NO: 73395 - protein, 9 aa, Artificial sequence
  Protein classification predicting sequence
GLDGSRRFL

SEQ ID NO: 73396 - protein, 7 aa, Artificial sequence
  Protein classification predicting sequence
QLMVFVN

SEQ ID NO: 73397 - protein, 6 aa, Artificial sequence
  Protein classification predicting sequence
WPTYDE

SEQ ID NO: 73398 - protein, 15 aa, Artificial sequence
  Protein classification predicting sequence
VLHPMGWDAFGLPAE

SEQ ID NO: 73399 - protein, 18 aa, Artificial sequence
  Protein classification predicting sequence
VLHPMGWDAFGLPAEQYA

SEQ ID NO: 73400 - protein, 18 aa, Artificial sequence
  Protein classification predicting sequence
NPVNGEKLPIWIADYVLA

SEQ ID NO: 73401 - protein, 7 aa, Artificial sequence
  Protein classification predicting sequence
KEVVKGG

SEQ ID NO: 73402 - protein, 7 aa, Artificial sequence
  Protein classification predicting sequence
IHWEDGT

SEQ ID NO: 73403 - protein, 12 aa, Artificial sequence
  Protein classification predicting sequence
PSGTGESPLANI

SEQ ID NO: 73404 - protein, 6 aa, Artificial sequence
  Protein classification predicting sequence
LRYIDP

SEQ ID NO: 73405 - protein, 8 aa, Artificial sequence
  Protein classification predicting sequence
DEVEIVVQ

SEQ ID NO: 73406 - protein, 8 aa, Artificial sequence
  Protein classification predicting sequence
LEGKTIRK

SEQ ID NO: 73407 - protein, 8 aa, Artificial sequence
  Protein classification predicting sequence
DGVSERGG

SEQ ID NO: 73408 - protein, 8 aa, Artificial sequence
  Protein classification predicting sequence
NWIGRSEG

SEQ ID NO: 73409 - protein, 7 aa, Artificial sequence
  Protein classification predicting sequence
KKIIVVP

SEQ ID NO: 73410 - protein, 7 aa, Artificial sequence
  Protein classification predicting sequence
PAHDQRD

SEQ ID NO: 73411 - protein, 9 aa, Artificial sequence
  Protein classification predicting sequence
GWRSGALVE

SEQ ID NO: 73412 - protein, 6 aa, Artificial sequence
  Protein classification predicting sequence
QWFFKI

SEQ ID NO: 73413 - protein, 10 aa, Artificial sequence
  Protein classification predicting sequence
YALDMFPYPS

SEQ ID NO: 73414 - protein, 6 aa, Artificial sequence
  Protein classification predicting sequence
GLHVGH

SEQ ID NO: 73415 - protein, 8 aa, Artificial sequence
  Protein classification predicting sequence
DIISRYKR

SEQ ID NO: 73416 - protein, 8 aa, Artificial sequence
  Protein classification predicting sequence
DAFGLPAE

SEQ ID NO: 73417 - protein, 7 aa, Artificial sequence
  Protein classification predicting sequence
VNWCPAL

SEQ ID NO: 73418 - protein, 6 aa, Artificial sequence
  Protein classification predicting sequence
QRNWIG

SEQ ID NO: 73419 - protein, 7 aa, Artificial sequence
  Protein classification predicting sequence
MAVPGHD

SEQ ID NO: 73420 - protein, 7 aa, Artificial sequence
  Protein classification predicting sequence
EFATKFN

SEQ ID NO: 73421 - protein, 6 aa, Artificial sequence
  Protein classification predicting sequence
AGSSWY

SEQ ID NO: 73422 - protein, 7 aa, Artificial sequence
  Protein classification predicting sequence
APHLAEE

SEQ ID NO: 73423 - protein, 9 aa, Artificial sequence
  Protein classification predicting sequence
APHLAEELW

SEQ ID NO: 73424 - protein, 7 aa, Artificial sequence
  Protein classification predicting sequence
LPDVPDY

SEQ ID NO: 73425 - protein, 9 aa, Artificial sequence
  Protein classification predicting sequence
EHAVLHLLY

SEQ ID NO: 73426 - protein, 7 aa, Artificial sequence
  Protein classification predicting sequence
RFWHKVL

SEQ ID NO: 73427 - protein, 8 aa, Artificial sequence
  Protein classification predicting sequence
YEMSMGPL

SEQ ID NO: 73428 - protein, 8 aa, Artificial sequence
  Protein classification predicting sequence
RFLQRLWR

SEQ ID NO: 73429 - protein, 7 aa, Artificial sequence
  Protein classification predicting sequence
PWPVADE

SEQ ID NO: 73430 - protein, 8 aa, Artificial sequence
  Protein classification predicting sequence
VVQIKGKV

SEQ ID NO: 73431 - protein, 5 aa, Artificial sequence
  Protein classification predicting sequence
YCLSM

SEQ ID NO: 73432 - protein, 12 aa, Artificial sequence
  Protein classification predicting sequence
PIGWDAFGLPAE

SEQ ID NO: 73433 - protein, 10 aa, Artificial sequence
  Protein classification predicting sequence
GWDAFGLPAE

SEQ ID NO: 73434 - protein, 10 aa, Artificial sequence
  Protein classification predicting sequence
VKTMQRNWIG

SEQ ID NO: 73435 - protein, 5 aa, Artificial sequence
  Protein classification predicting sequence
PAHDQ

SEQ ID NO: 73436 - protein, 11 aa, Artificial sequence
  Protein classification predicting sequence
DWGVSRQRYWG

SEQ ID NO: 73437 - protein, 6 aa, Artificial sequence
  Protein classification predicting sequence
ANYWLP

SEQ ID NO: 73438 - protein, 10 aa, Artificial sequence
  Protein classification predicting sequence
DQYIGGIEHA

SEQ ID NO: 73439 - protein, 6 aa, Artificial sequence
  Protein classification predicting sequence
HKLMRD

SEQ ID NO: 73440 - protein, 7 aa, Artificial sequence
  Protein classification predicting sequence
MLPYPSG

SEQ ID NO: 73441 - protein, 8 aa, Artificial sequence
  Protein classification predicting sequence
PAENAAIK

SEQ ID NO: 73442 - protein, 7 aa, Artificial sequence
  Protein classification predicting sequence
QVNGKLR

SEQ ID NO: 73443 - protein, 6 aa, Artificial sequence
  Protein classification predicting sequence
WDNNKT

SEQ ID NO: 73444 - protein, 7 aa, Artificial sequence
  Protein classification predicting sequence
YGTGAVM

SEQ ID NO: 73445 - protein, 6 aa, Artificial sequence
  Protein classification predicting sequence
WYYLRY

SEQ ID NO: 73446 - protein, 9 aa, Artificial sequence
  Protein classification predicting sequence
GLSLDWSRE

SEQ ID NO: 73447 - protein, 11 aa, Artificial sequence
  Protein classification predicting sequence
TVLANEQVIDG

SEQ ID NO: 73448 - protein, 15 aa, Artificial sequence
  Protein classification predicting sequence
RETDTMDTFVDSSWY

SEQ ID NO: 73449 - protein, 6 aa, Artificial sequence
  Protein classification predicting sequence
DQYIGG

SEQ ID NO: 73450 - protein, 11 aa, Artificial sequence
  Protein classification predicting sequence
FTQGMVVHETY

SEQ ID NO: 73451 - protein, 6 aa, Artificial sequence
  Protein classification predicting sequence
LSDSPP

SEQ ID NO: 73452 - protein, 7 aa, Artificial sequence
  Protein classification predicting sequence
FTKLYEK

SEQ ID NO: 73453 - protein, 6 aa, Artificial sequence
  Protein classification predicting sequence
RLFIMF

SEQ ID NO: 73454 - protein, 7 aa, Artificial sequence
  Protein classification predicting sequence
HKTIAKV

SEQ ID NO: 73455 - protein, 13 aa, Artificial sequence
  Protein classification predicting sequence
DDIGRRQTFNTAI

SEQ ID NO: 73456 - protein, 6 aa, Artificial sequence
  Protein classification predicting sequence
YWLPVD

SEQ ID NO: 73457 - protein, 8 aa, Artificial sequence
  Protein classification predicting sequence
YFRFYHKL

SEQ ID NO: 73458 - protein, 5 aa, Artificial sequence
  Protein classification predicting sequence
QRNWI

SEQ ID NO: 73459 - protein, 6 aa, Artificial sequence
  Protein classification predicting sequence
DDIGRR

SEQ ID NO: 73460 - protein, 11 aa, Artificial sequence
  Protein classification predicting sequence
RYQRMLGKNVL

SEQ ID NO: 73461 - protein, 8 aa, Artificial sequence
  Protein classification predicting sequence
RMLGKNVL

SEQ ID NO: 73462 - protein, 6 aa, Artificial sequence
  Protein classification predicting sequence
WTYENI

SEQ ID NO: 73463 - protein, 7 aa, Artificial sequence
  Protein classification predicting sequence
TCKPEYY

SEQ ID NO: 73464 - protein, 7 aa, Artificial sequence
  Protein classification predicting sequence
QWFIKIT

SEQ ID NO: 73465 - protein, 6 aa, Artificial sequence
  Protein classification predicting sequence
KLPIWI

SEQ ID NO: 73466 - protein, 6 aa, Artificial sequence
  Protein classification predicting sequence
DTFDTF

SEQ ID NO: 73467 - protein, 8 aa, Artificial sequence
  Protein classification predicting sequence
SMLPYPSG

SEQ ID NO: 73468 - protein, 16 aa, Artificial sequence
  Protein classification predicting sequence
VFTTRADTIMGVTFCA

SEQ ID NO: 73469 - protein, 7 aa, Artificial sequence
  Protein classification predicting sequence
ATMEKKG

SEQ ID NO: 73470 - protein, 6 aa, Artificial sequence
  Protein classification predicting sequence
HPLTGE

SEQ ID NO: 73471 - protein, 14 aa, Artificial sequence
  Protein classification predicting sequence
TYSTDAWQEWYGDK

SEQ ID NO: 73472 - protein, 11 aa, Artificial sequence
  Protein classification predicting sequence
LLRVLYPVVPH

SEQ ID NO: 73473 - protein, 8 aa, Artificial sequence
  Protein classification predicting sequence
HLLYARFF

SEQ ID NO: 73474 - protein, 8 aa, Artificial sequence
  Protein classification predicting sequence
CMEALNAL

SEQ ID NO: 73475 - protein, 16 aa, Artificial sequence
  Protein classification predicting sequence
KYYVLEMFPYPSGRIH

SEQ ID NO: 73476 - protein, 7 aa, Artificial sequence
  Protein classification predicting sequence
MQENWIG

SEQ ID NO: 73477 - protein, 8 aa, Artificial sequence
  Protein classification predicting sequence
LMDYGTGA

SEQ ID NO: 73478 - protein, 15 aa, Artificial sequence
  Protein classification predicting sequence
YRLRDWGVSRQRYWG

SEQ ID NO: 73479 - protein, 6 aa, Artificial sequence
  Protein classification predicting sequence
PHLAEE

SEQ ID NO: 73480 - protein, 9 aa, Artificial sequence
  Protein classification predicting sequence
FGLPAEQYA

SEQ ID NO: 73481 - protein, 7 aa, Artificial sequence
  Protein classification predicting sequence
WTQKLFL

SEQ ID NO: 73482 - protein, 7 aa, Artificial sequence
  Protein classification predicting sequence
KTGVFTG

SEQ ID NO: 73483 - protein, 8 aa, Artificial sequence
  Protein classification predicting sequence
VPAHDERD

SEQ ID NO: 73484 - protein, 12 aa, Artificial sequence
  Protein classification predicting sequence
GGAEHAVLHLLY

SEQ ID NO: 73485 - protein, 8 aa, Artificial sequence
  Protein classification predicting sequence
GVFTGAYA

SEQ ID NO: 73486 - protein, 14 aa, Artificial sequence
  Protein classification predicting sequence
EHAVLHLLYARFWH

SEQ ID NO: 73487 - protein, 5 aa, Artificial sequence
  Protein classification predicting sequence
KYYVL

SEQ ID NO: 73488 - protein, 36 aa, Artificial sequence
  Protein classification predicting sequence
KYYVLDMFPYPSGAGLHVGHLIGYTATDIVARYKRA

SEQ ID NO: 73489 - protein, 8 aa, Artificial sequence
  Protein classification predicting sequence
KSERDRIS

SEQ ID NO: 73490 - protein, 6 aa, Artificial sequence
  Protein classification predicting sequence
WISDYV

SEQ ID NO: 73491 - protein, 8 aa, Artificial sequence
  Protein classification predicting sequence
TMPQWAGS

SEQ ID NO: 73492 - protein, 6 aa, Artificial sequence
  Protein classification predicting sequence
TGTHPR

SEQ ID NO: 73493 - protein, 6 aa, Artificial sequence
  Protein classification predicting sequence
GFSYDW

SEQ ID NO: 73494 - protein, 7 aa, Artificial sequence
  Protein classification predicting sequence
KWTQWIF

SEQ ID NO: 73495 - protein, 10 aa, Artificial sequence
  Protein classification predicting sequence
KWTQWIFLKL

SEQ ID NO: 73496 - protein, 7 aa, Artificial sequence
  Protein classification predicting sequence
LRLYEMF

SEQ ID NO: 73497 - protein, 9 aa, Artificial sequence
  Protein classification predicting sequence
LGTVLSNEE

SEQ ID NO: 73498 - protein, 6 aa, Artificial sequence
  Protein classification predicting sequence
NIEYMK

SEQ ID NO: 73499 - protein, 6 aa, Artificial sequence
  Protein classification predicting sequence
RELATC

SEQ ID NO: 73500 - protein, 6 aa, Artificial sequence
  Protein classification predicting sequence
MEKKGM

SEQ ID NO: 73501 - protein, 10 aa, Artificial sequence
  Protein classification predicting sequence
VPVPEKDLPV

SEQ ID NO: 73502 - protein, 7 aa, Artificial sequence
  Protein classification predicting sequence
LLTQGMV

SEQ ID NO: 73503 - protein, 9 aa, Artificial sequence
  Protein classification predicting sequence
YGADTARLF

SEQ ID NO: 73504 - protein, 7 aa, Artificial sequence
  Protein classification predicting sequence
WTQWLFL

SEQ ID NO: 73505 - protein, 8 aa, Artificial sequence
  Protein classification predicting sequence
LDELDWPE

SEQ ID NO: 73506 - protein, 9 aa, Artificial sequence
  Protein classification predicting sequence
EHACMHLLY

SEQ ID NO: 73507 - protein, 7 aa, Artificial sequence
  Protein classification predicting sequence
HLLYARF

SEQ ID NO: 73508 - protein, 8 aa, Artificial sequence
  Protein classification predicting sequence
AIKTGIHP

SEQ ID NO: 73509 - protein, 5 aa, Artificial sequence
  Protein classification predicting sequence
WIGRS

SEQ ID NO: 73510 - protein, 22 aa, Artificial sequence
  Protein classification predicting sequence
DYVLATYGTGAVMAVPAHDERD

SEQ ID NO: 73511 - protein, 8 aa, Artificial sequence
  Protein classification predicting sequence
TYAVLAPE

SEQ ID NO: 73512 - protein, 11 aa, Artificial sequence
  Protein classification predicting sequence
DYVLSTYGTGA

SEQ ID NO: 73513 - protein, 6 aa, Artificial sequence
  Protein classification predicting sequence
RQRYWG

SEQ ID NO: 73514 - protein, 10 aa, Artificial sequence
  Protein classification predicting sequence
MPQWAGSSWY

SEQ ID NO: 73515 - protein, 9 aa, Artificial sequence
  Protein classification predicting sequence
GGVDLYVGG

SEQ ID NO: 73516 - protein, 6 aa, Artificial sequence
  Protein classification predicting sequence
GADTLR

SEQ ID NO: 73517 - protein, 10 aa, Artificial sequence
  Protein classification predicting sequence
GADTLRVYEM

SEQ ID NO: 73518 - protein, 13 aa, Artificial sequence
  Protein classification predicting sequence
YGTGAIMAVPAHD

SEQ ID NO: 73519 - protein, 13 aa, Artificial sequence
  Protein classification predicting sequence
DADSEPSPPLAKA

SEQ ID NO: 73520 - protein, 11 aa, Artificial sequence
  Protein classification predicting sequence
YGADTLRVYEM

SEQ ID NO: 73521 - protein, 12 aa, Artificial sequence
  Protein classification predicting sequence
SRPWATKDVVGA

SEQ ID NO: 73522 - protein, 7 aa, Artificial sequence
  Protein classification predicting sequence
EEAAFTE

SEQ ID NO: 73523 - protein, 7 aa, Artificial sequence
  Protein classification predicting sequence
WRLVVDE

SEQ ID NO: 73524 - protein, 6 aa, Artificial sequence
  Protein classification predicting sequence
PIAPHI

SEQ ID NO: 73525 - protein, 9 aa, Artificial sequence
  Protein classification predicting sequence
DQTVLANEQ

SEQ ID NO: 73526 - protein, 7 aa, Artificial sequence
  Protein classification predicting sequence
TVLANEQ

SEQ ID NO: 73527 - protein, 6 aa, Artificial sequence
  Protein classification predicting sequence
ANFVLM

SEQ ID NO: 73528 - protein, 7 aa, Artificial sequence
  Protein classification predicting sequence
PIPIIYC

SEQ ID NO: 73529 - protein, 31 aa, Artificial sequence
  Protein classification predicting sequence
MLDDRAKYWTPVDQYIGGIEHAVMHLLYARF

SEQ ID NO: 73530 - protein, 7 aa, Artificial sequence
  Protein classification predicting sequence
TCDPEYY

SEQ ID NO: 73531 - protein, 6 aa, Artificial sequence
  Protein classification predicting sequence
PEYYRW

SEQ ID NO: 73532 - protein, 5 aa, Artificial sequence
  Protein classification predicting sequence
PIWVA

SEQ ID NO: 73533 - protein, 9 aa, Artificial sequence
  Protein classification predicting sequence
FAKKFDLPI

SEQ ID NO: 73534 - protein, 12 aa, Artificial sequence
  Protein classification predicting sequence
HMGHVRNYTIGD

SEQ ID NO: 73535 - protein, 6 aa, Artificial sequence
  Protein classification predicting sequence
GDVVAR

SEQ ID NO: 73536 - protein, 9 aa, Artificial sequence
  Protein classification predicting sequence
GDVVARYKR

SEQ ID NO: 73537 - protein, 6 aa, Artificial sequence
  Protein classification predicting sequence
WTYDNI

SEQ ID NO: 73538 - protein, 7 aa, Artificial sequence
  Protein classification predicting sequence
SYDWDRE

SEQ ID NO: 73539 - protein, 7 aa, Artificial sequence
  Protein classification predicting sequence
FTTRPDT

SEQ ID NO: 73540 - protein, 6 aa, Artificial sequence
  Protein classification predicting sequence
RDFEFA

SEQ ID NO: 73541 - protein, 7 aa, Artificial sequence
  Protein classification predicting sequence
VDQYIGG

SEQ ID NO: 73542 - protein, 6 aa, Artificial sequence
  Protein classification predicting sequence
KLVNIV

SEQ ID NO: 73543 - protein, 9 aa, Artificial sequence
  Protein classification predicting sequence
ITDYAEELL

SEQ ID NO: 73544 - protein, 7 aa, Artificial sequence
  Protein classification predicting sequence
GVFTGAY

SEQ ID NO: 73545 - protein, 8 aa, Artificial sequence
  Protein classification predicting sequence
FARKYDLP

SEQ ID NO: 73546 - protein, 7 aa, Artificial sequence
  Protein classification predicting sequence
PIPVIYC

SEQ ID NO: 73547 - protein, 9 aa, Artificial sequence
  Protein classification predicting sequence
RETDTMDTF

SEQ ID NO: 73548 - protein, 15 aa, Artificial sequence
  Protein classification predicting sequence
RETDTMDTFVESSWY

SEQ ID NO: 73549 - protein, 11 aa, Artificial sequence
  Protein classification predicting sequence
FNTAIAAVMEL

SEQ ID NO: 73550 - protein, 7 aa, Artificial sequence
  Protein classification predicting sequence
GVTVRKV

SEQ ID NO: 73551 - protein, 6 aa, Artificial sequence
  Protein classification predicting sequence
PGKLVN

SEQ ID NO: 73552 - protein, 19 aa, Artificial sequence
  Protein classification predicting sequence
RLRDWGVSRQRYWGAPIPM

SEQ ID NO: 73553 - protein, 7 aa, Artificial sequence
  Protein classification predicting sequence
YNHKEIE

SEQ ID NO: 73554 - protein, 15 aa, Artificial sequence
  Protein classification predicting sequence
GLHVGHPEGYTATDI

SEQ ID NO: 73555 - protein, 18 aa, Artificial sequence
  Protein classification predicting sequence
GLHVGHPEGYTATDILSR

SEQ ID NO: 73556 - protein, 22 aa, Artificial sequence
  Protein classification predicting sequence
QGYNVLHPMGWDAFGLPAEQYA

SEQ ID NO: 73557 - protein, 12 aa, Artificial sequence
  Protein classification predicting sequence
PMRQWMLKITAY

SEQ ID NO: 73558 - protein, 9 aa, Artificial sequence
  Protein classification predicting sequence
QWMLKITAY

SEQ ID NO: 73559 - protein, 8 aa, Artificial sequence
  Protein classification predicting sequence
GANVTFKV

SEQ ID NO: 73560 - protein, 13 aa, Artificial sequence
  Protein classification predicting sequence
IRPSGTGESPLAN

SEQ ID NO: 73561 - protein, 26 aa, Artificial sequence
  Protein classification predicting sequence
IRPSGTGESPLANIDEWVNVVDPETG

SEQ ID NO: 73562 - protein, 12 aa, Artificial sequence
  Protein classification predicting sequence
RETNTMPQWAGS

SEQ ID NO: 73563 - protein, 5 aa, Artificial sequence
  Protein classification predicting sequence
WYYLR

SEQ ID NO: 73564 - protein, 20 aa, Artificial sequence
  Protein classification predicting sequence
YIGGAEHAVLHLLYARFWHK

SEQ ID NO: 73565 - protein, 15 aa, Artificial sequence
  Protein classification predicting sequence
EHAVLHLLYARFWHK

SEQ ID NO: 73566 - protein, 16 aa, Artificial sequence
  Protein classification predicting sequence
NQGMILGENNEKMSKS

SEQ ID NO: 73567 - protein, 12 aa, Artificial sequence
  Protein classification predicting sequence
ASIAWNENGLEG

SEQ ID NO: 73568 - protein, 12 aa, Artificial sequence
  Protein classification predicting sequence
GLEGSRKFLDRV

SEQ ID NO: 73569 - protein, 15 aa, Artificial sequence
  Protein classification predicting sequence
VQLHWQEKQTFKVTE

SEQ ID NO: 73570 - protein, 7 aa, Artificial sequence
  Protein classification predicting sequence
YYRWEQW

SEQ ID NO: 73571 - protein, 9 aa, Artificial sequence
  Protein classification predicting sequence
KGLVYKKTS

SEQ ID NO: 73572 - protein, 6 aa, Artificial sequence
  Protein classification predicting sequence
ITAYAD

SEQ ID NO: 73573 - protein, 12 aa, Artificial sequence
  Protein classification predicting sequence
VKTMQRNWIGRS

SEQ ID NO: 73574 - protein, 7 aa, Artificial sequence
  Protein classification predicting sequence
TYVAVAA

SEQ ID NO: 73575 - protein, 10 aa, Artificial sequence
  Protein classification predicting sequence
ECRNTKVAEA

SEQ ID NO: 73576 - protein, 10 aa, Artificial sequence
  Protein classification predicting sequence
MAVPGHDQRD

SEQ ID NO: 73577 - protein, 9 aa, Artificial sequence
  Protein classification predicting sequence
ADGSEPDLS

SEQ ID NO: 73578 - protein, 8 aa, Artificial sequence
  Protein classification predicting sequence
FNAIADKL

SEQ ID NO: 73579 - protein, 12 aa, Artificial sequence
  Protein classification predicting sequence
VERDEKGRIVKA

SEQ ID NO: 73580 - protein, 34 aa, Artificial sequence
  Protein classification predicting sequence
MVEKYGADTVRLFMMFASPAEMTLEWQESGVEGA

SEQ ID NO: 73581 - protein, 13 aa, Artificial sequence
  Protein classification predicting sequence
MTLEWQESGVEGA

SEQ ID NO: 73582 - protein, 10 aa, Artificial sequence
  Protein classification predicting sequence
HKTIAKVTDD

SEQ ID NO: 73583 - protein, 9 aa, Artificial sequence
  Protein classification predicting sequence
MQGKNVLHP

SEQ ID NO: 73584 - protein, 6 aa, Artificial sequence
  Protein classification predicting sequence
WEQWFF

SEQ ID NO: 73585 - protein, 7 aa, Artificial sequence
  Protein classification predicting sequence
KEIPQWF

SEQ ID NO: 73586 - protein, 8 aa, Artificial sequence
  Protein classification predicting sequence
VPAHDQRD

SEQ ID NO: 73587 - protein, 9 aa, Artificial sequence
  Protein classification predicting sequence
RETDTFDTF

SEQ ID NO: 73588 - protein, 5 aa, Artificial sequence
  Protein classification predicting sequence
ESSWY

SEQ ID NO: 73589 - protein, 8 aa, Artificial sequence
  Protein classification predicting sequence
ANYWLPVD

SEQ ID NO: 73590 - protein, 10 aa, Artificial sequence
  Protein classification predicting sequence
KYGADTVRLF

SEQ ID NO: 73591 - protein, 12 aa, Artificial sequence
  Protein classification predicting sequence
MFAAPPEQSLEW

SEQ ID NO: 73592 - protein, 6 aa, Artificial sequence
  Protein classification predicting sequence
GVEGAN

SEQ ID NO: 73593 - protein, 8 aa, Artificial sequence
  Protein classification predicting sequence
RMKGYNVL

SEQ ID NO: 73594 - protein, 5 aa, Artificial sequence
  Protein classification predicting sequence
PMGWD

SEQ ID NO: 73595 - protein, 10 aa, Artificial sequence
  Protein classification predicting sequence
WTPVDQYIGG

SEQ ID NO: 73596 - protein, 8 aa, Artificial sequence
  Protein classification predicting sequence
PVDQYIGG

SEQ ID NO: 73597 - protein, 7 aa, Artificial sequence
  Protein classification predicting sequence
KVLRDLG

SEQ ID NO: 73598 - protein, 7 aa, Artificial sequence
  Protein classification predicting sequence
MFAAPPE

SEQ ID NO: 73599 - protein, 7 aa, Artificial sequence
  Protein classification predicting sequence
FNTAIAA

SEQ ID NO: 73600 - protein, 6 aa, Artificial sequence
  Protein classification predicting sequence
KWQDYW

SEQ ID NO: 73601 - protein, 6 aa, Artificial sequence
  Protein classification predicting sequence
DTGNDP

SEQ ID NO: 73602 - protein, 9 aa, Artificial sequence
  Protein classification predicting sequence
NIDNFRRQI

SEQ ID NO: 73603 - protein, 8 aa, Artificial sequence
  Protein classification predicting sequence
SERGGHPV

SEQ ID NO: 73604 - protein, 6 aa, Artificial sequence
  Protein classification predicting sequence
RTDLAK

SEQ ID NO: 73605 - protein, 9 aa, Artificial sequence
  Protein classification predicting sequence
RDYEFAKKF

SEQ ID NO: 73606 - protein, 22 aa, Artificial sequence
  Protein classification predicting sequence
GGAEHAVLHLLYARFWHKFLYD

SEQ ID NO: 73607 - protein, 19 aa, Artificial sequence
  Protein classification predicting sequence
VPTKEPFQKLFNQGMILGE

SEQ ID NO: 73608 - protein, 10 aa, Artificial sequence
  Protein classification predicting sequence
LFNQGMILGE

SEQ ID NO: 73609 - protein, 8 aa, Artificial sequence
  Protein classification predicting sequence
NQGMILGE

SEQ ID NO: 73610 - protein, 15 aa, Artificial sequence
  Protein classification predicting sequence
GADTLRLYEMFMGPL

SEQ ID NO: 73611 - protein, 7 aa, Artificial sequence
  Protein classification predicting sequence
FNTAISQ

SEQ ID NO: 73612 - protein, 12 aa, Artificial sequence
  Protein classification predicting sequence
WPTYDETKLVED

SEQ ID NO: 73613 - protein, 7 aa, Artificial sequence
  Protein classification predicting sequence
WEENKTF

SEQ ID NO: 73614 - protein, 8 aa, Artificial sequence
  Protein classification predicting sequence
HMGHVRNY

SEQ ID NO: 73615 - protein, 9 aa, Artificial sequence
  Protein classification predicting sequence
FGMPAENAA

SEQ ID NO: 73616 - protein, 11 aa, Artificial sequence
  Protein classification predicting sequence
TVLANEQVEDG

SEQ ID NO: 73617 - protein, 5 aa, Artificial sequence
  Protein classification predicting sequence
HDQRD

SEQ ID NO: 73618 - protein, 6 aa, Artificial sequence
  Protein classification predicting sequence
YWMPVD

SEQ ID NO: 73619 - protein, 8 aa, Artificial sequence
  Protein classification predicting sequence
LHLLYSRF

SEQ ID NO: 73620 - protein, 7 aa, Artificial sequence
  Protein classification predicting sequence
YGADTAR

SEQ ID NO: 73621 - protein, 7 aa, Artificial sequence
  Protein classification predicting sequence
APPEKDL

SEQ ID NO: 73622 - protein, 6 aa, Artificial sequence
  Protein classification predicting sequence
RVWRLV

SEQ ID NO: 73623 - protein, 7 aa, Artificial sequence
  Protein classification predicting sequence
GVLVNSG

SEQ ID NO: 73624 - protein, 8 aa, Artificial sequence
  Protein classification predicting sequence
LFKAPPEK

SEQ ID NO: 73625 - protein, 7 aa, Artificial sequence
  Protein classification predicting sequence
KVIVVPG

SEQ ID NO: 73626 - protein, 6 aa, Artificial sequence
  Protein classification predicting sequence
IESKVQ

SEQ ID NO: 73627 - protein, 6 aa, Artificial sequence
  Protein classification predicting sequence
REITTC

SEQ ID NO: 73628 - protein, 16 aa, Artificial sequence
  Protein classification predicting sequence
FFTELYKKGLVYKKTS

SEQ ID NO: 73629 - protein, 12 aa, Artificial sequence
  Protein classification predicting sequence
GCCWRCDTPVEQ

SEQ ID NO: 73630 - protein, 8 aa, Artificial sequence
  Protein classification predicting sequence
VYTTRPDT

SEQ ID NO: 73631 - protein, 8 aa, Artificial sequence
  Protein classification predicting sequence
ATMEKKGM

SEQ ID NO: 73632 - protein, 21 aa, Artificial sequence
  Protein classification predicting sequence
ETDTFDTFMESSWYYARYTCP

SEQ ID NO: 73633 - protein, 11 aa, Artificial sequence
  Protein classification predicting sequence
RFFHKLLRDAG

SEQ ID NO: 73634 - protein, 9 aa, Artificial sequence
  Protein classification predicting sequence
KLLCQGMVL

SEQ ID NO: 73635 - protein, 8 aa, Artificial sequence
  Protein classification predicting sequence
LLCQGMVL

SEQ ID NO: 73636 - protein, 8 aa, Artificial sequence
  Protein classification predicting sequence
ERDEKGRI

SEQ ID NO: 73637 - protein, 12 aa, Artificial sequence
  Protein classification predicting sequence
LRRDVHKTIAKV

SEQ ID NO: 73638 - protein, 16 aa, Artificial sequence
  Protein classification predicting sequence
VKTMQRNWIGRSEGVE

SEQ ID NO: 73639 - protein, 7 aa, Artificial sequence
  Protein classification predicting sequence
AIHPLTG

SEQ ID NO: 73640 - protein, 8 aa, Artificial sequence
  Protein classification predicting sequence
WVANFVLM

SEQ ID NO: 73641 - protein, 8 aa, Artificial sequence
  Protein classification predicting sequence
VHKTIAKV

SEQ ID NO: 73642 - protein, 15 aa, Artificial sequence
  Protein classification predicting sequence
DDIGRRQTFNTAIAA

SEQ ID NO: 73643 - protein, 7 aa, Artificial sequence
  Protein classification predicting sequence
MELMNKL

SEQ ID NO: 73644 - protein, 7 aa, Artificial sequence
  Protein classification predicting sequence
EWDDADV

SEQ ID NO: 73645 - protein, 7 aa, Artificial sequence
  Protein classification predicting sequence
LGFGYDW

SEQ ID NO: 73646 - protein, 5 aa, Artificial sequence
  Protein classification predicting sequence
MQRNW

SEQ ID NO: 73647 - protein, 13 aa, Artificial sequence
  Protein classification predicting sequence
LRDWGVSRQRYWG

SEQ ID NO: 73648 - protein, 7 aa, Artificial sequence
  Protein classification predicting sequence
HLLYSRF

SEQ ID NO: 73649 - protein, 7 aa, Artificial sequence
  Protein classification predicting sequence
HPKTWTY

SEQ ID NO: 73650 - protein, 6 aa, Artificial sequence
  Protein classification predicting sequence
WTYSNI

SEQ ID NO: 73651 - protein, 8 aa, Artificial sequence
  Protein classification predicting sequence
CAVAPEHP

SEQ ID NO: 73652 - protein, 6 aa, Artificial sequence
  Protein classification predicting sequence
VAPEHP

SEQ ID NO: 73653 - protein, 6 aa, Artificial sequence
  Protein classification predicting sequence
PVWVAN

SEQ ID NO: 73654 - protein, 6 aa, Artificial sequence
  Protein classification predicting sequence
DTMDTF

SEQ ID NO: 73655 - protein, 9 aa, Artificial sequence
  Protein classification predicting sequence
TKVLRDLGY

SEQ ID NO: 73656 - protein, 6 aa, Artificial sequence
  Protein classification predicting sequence
CWRCDT

SEQ ID NO: 73657 - protein, 7 aa, Artificial sequence
  Protein classification predicting sequence
PIPMIHC

SEQ ID NO: 73658 - protein, 18 aa, Artificial sequence
  Protein classification predicting sequence
RLFILFAAPPAKELEWND

SEQ ID NO: 73659 - protein, 10 aa, Artificial sequence
  Protein classification predicting sequence
LHMGHVRNYT

SEQ ID NO: 73660 - protein, 8 aa, Artificial sequence
  Protein classification predicting sequence
EKGLVYKK

SEQ ID NO: 73661 - protein, 7 aa, Artificial sequence
  Protein classification predicting sequence
MQRNWIG

SEQ ID NO: 73662 - protein, 11 aa, Artificial sequence
  Protein classification predicting sequence
MQRNWIGRSEG

SEQ ID NO: 73663 - protein, 16 aa, Artificial sequence
  Protein classification predicting sequence
NYRLRDWGVSRQRYWG

SEQ ID NO: 73664 - protein, 9 aa, Artificial sequence
  Protein classification predicting sequence
LPEDVVMDG

SEQ ID NO: 73665 - protein, 18 aa, Artificial sequence
  Protein classification predicting sequence
ETDTFDTFMESSWYYARY

SEQ ID NO: 73666 - protein, 6 aa, Artificial sequence
  Protein classification predicting sequence
RFFHKL

SEQ ID NO: 73667 - protein, 11 aa, Artificial sequence
  Protein classification predicting sequence
FNTAIAAIMEL

SEQ ID NO: 73668 - protein, 6 aa, Artificial sequence
  Protein classification predicting sequence
IYVPGK

SEQ ID NO: 73669 - protein, 6 aa, Artificial sequence
  Protein classification predicting sequence
NKTFRT

SEQ ID NO: 73670 - protein, 8 aa, Artificial sequence
  Protein classification predicting sequence
YKWTQWIF

SEQ ID NO: 73671 - protein, 7 aa, Artificial sequence
  Protein classification predicting sequence
DWPESIK

SEQ ID NO: 73672 - protein, 8 aa, Artificial sequence
  Protein classification predicting sequence
VFTTRPDT

SEQ ID NO: 73673 - protein, 14 aa, Artificial sequence
  Protein classification predicting sequence
VFTTRPDTLFGATY

SEQ ID NO: 73674 - protein, 12 aa, Artificial sequence
  Protein classification predicting sequence
ASLKSDLARTDL

SEQ ID NO: 73675 - protein, 10 aa, Artificial sequence
  Protein classification predicting sequence
MAVPAHDERD

SEQ ID NO: 73676 - protein, 7 aa, Artificial sequence
  Protein classification predicting sequence
DGPHINS

SEQ ID NO: 73677 - protein, 20 aa, Artificial sequence
  Protein classification predicting sequence
TYRLRDWLFSRQRYWGEPIP

SEQ ID NO: 73678 - protein, 7 aa, Artificial sequence
  Protein classification predicting sequence
WLPVDIY

SEQ ID NO: 73679 - protein, 15 aa, Artificial sequence
  Protein classification predicting sequence
RGALVATDKVEKRDG

SEQ ID NO: 73680 - protein, 23 aa, Artificial sequence
  Protein classification predicting sequence
LEQAPAKMSKSLKNVVNPDDVVE

SEQ ID NO: 73681 - protein, 7 aa, Artificial sequence
  Protein classification predicting sequence
YGADTLR

SEQ ID NO: 73682 - protein, 12 aa, Artificial sequence
  Protein classification predicting sequence
YEMFMGPLDASI

SEQ ID NO: 73683 - protein, 8 aa, Artificial sequence
  Protein classification predicting sequence
WSEEGLEG

SEQ ID NO: 73684 - protein, 8 aa, Artificial sequence
  Protein classification predicting sequence
ISYVAWPT

SEQ ID NO: 73685 - protein, 8 aa, Artificial sequence
  Protein classification predicting sequence
ITAYADRL

SEQ ID NO: 73686 - protein, 8 aa, Artificial sequence
  Protein classification predicting sequence
QRNWIGRS

SEQ ID NO: 73687 - protein, 8 aa, Artificial sequence
  Protein classification predicting sequence
WIADYVLA

SEQ ID NO: 73688 - protein, 8 aa, Artificial sequence
  Protein classification predicting sequence
AGEKKVNY

SEQ ID NO: 73689 - protein, 12 aa, Artificial sequence
  Protein classification predicting sequence
FSRQRYWGEPIP

SEQ ID NO: 73690 - protein, 19 aa, Artificial sequence
  Protein classification predicting sequence
FSRQRYWGEPIPVIHWEDG

SEQ ID NO: 73691 - protein, 7 aa, Artificial sequence
  Protein classification predicting sequence
VDLYVGG

SEQ ID NO: 73692 - protein, 8 aa, Artificial sequence
  Protein classification predicting sequence
TVKKVTED

SEQ ID NO: 73693 - protein, 7 aa, Artificial sequence
  Protein classification predicting sequence
YIEGFVK

SEQ ID NO: 73694 - protein, 7 aa, Artificial sequence
  Protein classification predicting sequence
RFLKRVW

SEQ ID NO: 73695 - protein, 9 aa, Artificial sequence
  Protein classification predicting sequence
MQRNWIGRS

SEQ ID NO: 73696 - protein, 5 aa, Artificial sequence
  Protein classification predicting sequence
KFYCL

SEQ ID NO: 73697 - protein, 28 aa, Artificial sequence
  Protein classification predicting sequence
LDMFPYPSGAGLHVGHPEGYTATDILSR

SEQ ID NO: 73698 - protein, 5 aa, Artificial sequence
  Protein classification predicting sequence
TQWIF

SEQ ID NO: 73699 - protein, 9 aa, Artificial sequence
  Protein classification predicting sequence
TQWIFIQLY

SEQ ID NO: 73700 - protein, 5 aa, Artificial sequence
  Protein classification predicting sequence
RFWHK

SEQ ID NO: 73701 - protein, 7 aa, Artificial sequence
  Protein classification predicting sequence
HQGLILG

SEQ ID NO: 73702 - protein, 7 aa, Artificial sequence
  Protein classification predicting sequence
EMFMGPL

SEQ ID NO: 73703 - protein, 7 aa, Artificial sequence
  Protein classification predicting sequence
VPGKLVN

SEQ ID NO: 73704 - protein, 28 aa, Artificial sequence
  Protein classification predicting sequence
FYALDMFPYPSGAGLHVGHPEGYTATDI

SEQ ID NO: 73705 - protein, 6 aa, Artificial sequence
  Protein classification predicting sequence
APEHEL

SEQ ID NO: 73706 - protein, 8 aa, Artificial sequence
  Protein classification predicting sequence
LERTDLAK

SEQ ID NO: 73707 - protein, 7 aa, Artificial sequence
  Protein classification predicting sequence
GKNVLQP

SEQ ID NO: 73708 - protein, 16 aa, Artificial sequence
  Protein classification predicting sequence
GWDAFGLPAEGAAVKN

SEQ ID NO: 73709 - protein, 7 aa, Artificial sequence
  Protein classification predicting sequence
VNWCPND

SEQ ID NO: 73710 - protein, 19 aa, Artificial sequence
  Protein classification predicting sequence
VKTMQRNWIGRSEGVEITF

SEQ ID NO: 73711 - protein, 11 aa, Artificial sequence
  Protein classification predicting sequence
ATMEKKGMATG

SEQ ID NO: 73712 - protein, 10 aa, Artificial sequence
  Protein classification predicting sequence
YGTGAVMAVP

SEQ ID NO: 73713 - protein, 13 aa, Artificial sequence
  Protein classification predicting sequence
YGTGAVMAVPAHD

SEQ ID NO: 73714 - protein, 28 aa, Artificial sequence
  Protein classification predicting sequence
KLLCQGMVLADAFYYTSPTNERIWVSPT

SEQ ID NO: 73715 - protein, 10 aa, Artificial sequence
  Protein classification predicting sequence
KVIYVPGKLL

SEQ ID NO: 73716 - protein, 6 aa, Artificial sequence
  Protein classification predicting sequence
GYTATD

SEQ ID NO: 73717 - protein, 7 aa, Artificial sequence
  Protein classification predicting sequence
QWVLKIT

SEQ ID NO: 73718 - protein, 7 aa, Artificial sequence
  Protein classification predicting sequence
YADRLLE

SEQ ID NO: 73719 - protein, 10 aa, Artificial sequence
  Protein classification predicting sequence
PYIEGFVKML

SEQ ID NO: 73720 - protein, 6 aa, Artificial sequence
  Protein classification predicting sequence
DSTIYM

SEQ ID NO: 73721 - protein, 14 aa, Artificial sequence
  Protein classification predicting sequence
LHMGHVRNYTIGDV

SEQ ID NO: 73722 - protein, 16 aa, Artificial sequence
  Protein classification predicting sequence
YYRWEQWLFTRLFEKG

SEQ ID NO: 73723 - protein, 6 aa, Artificial sequence
  Protein classification predicting sequence
LPGWPE

SEQ ID NO: 73724 - protein, 8 aa, Artificial sequence
  Protein classification predicting sequence
NPELAAFI

SEQ ID NO: 73725 - protein, 7 aa, Artificial sequence
  Protein classification predicting sequence
PIPIIHC

SEQ ID NO: 73726 - protein, 7 aa, Artificial sequence
  Protein classification predicting sequence
CGDVPVP

SEQ ID NO: 73727 - protein, 9 aa, Artificial sequence
  Protein classification predicting sequence
ESSWYYARY

SEQ ID NO: 73728 - protein, 10 aa, Artificial sequence
  Protein classification predicting sequence
RLFTMFAAPP

SEQ ID NO: 73729 - protein, 6 aa, Artificial sequence
  Protein classification predicting sequence
MFAAPP

SEQ ID NO: 73730 - protein, 12 aa, Artificial sequence
  Protein classification predicting sequence
VIVVPGKLVNVV

SEQ ID NO: 73731 - protein, 10 aa, Artificial sequence
  Protein classification predicting sequence
KDLIPNHLTF

SEQ ID NO: 73732 - protein, 7 aa, Artificial sequence
  Protein classification predicting sequence
SVPAHAP

SEQ ID NO: 73733 - protein, 7 aa, Artificial sequence
  Protein classification predicting sequence
YMAYYTI

SEQ ID NO: 73734 - protein, 8 aa, Artificial sequence
  Protein classification predicting sequence
NHLTFFIF

SEQ ID NO: 73735 - protein, 9 aa, Artificial sequence
  Protein classification predicting sequence
NPVTGDEVI

SEQ ID NO: 73736 - protein, 7 aa, Artificial sequence
  Protein classification predicting sequence
GYGEFPA

SEQ ID NO: 73737 - protein, 7 aa, Artificial sequence
  Protein classification predicting sequence
GLGTRLP

SEQ ID NO: 73738 - protein, 6 aa, Artificial sequence
  Protein classification predicting sequence
WTQWIF

SEQ ID NO: 73739 - protein, 7 aa, Artificial sequence
  Protein classification predicting sequence
ANKARPI

SEQ ID NO: 73740 - protein, 7 aa, Artificial sequence
  Protein classification predicting sequence
KLRDWLF

SEQ ID NO: 73741 - protein, 6 aa, Artificial sequence
  Protein classification predicting sequence
RKVIVV

SEQ ID NO: 73742 - protein, 10 aa, Artificial sequence
  Protein classification predicting sequence
YVLDMFPYPS

SEQ ID NO: 73743 - protein, 8 aa, Artificial sequence
  Protein classification predicting sequence
LDMFPYPS

SEQ ID NO: 73744 - protein, 6 aa, Artificial sequence
  Protein classification predicting sequence
YKLRDW

SEQ ID NO: 73745 - protein, 14 aa, Artificial sequence
  Protein classification predicting sequence
DKLFVQDMFPYPSG

SEQ ID NO: 73746 - protein, 8 aa, Artificial sequence
  Protein classification predicting sequence
DMFPYPSG

SEQ ID NO: 73747 - protein, 15 aa, Artificial sequence
  Protein classification predicting sequence
GLHVGHPLGYIATDV

SEQ ID NO: 73748 - protein, 8 aa, Artificial sequence
  Protein classification predicting sequence
RMTGHNVL

SEQ ID NO: 73749 - protein, 11 aa, Artificial sequence
  Protein classification predicting sequence
DAFGLPAEQYA

SEQ ID NO: 73750 - protein, 9 aa, Artificial sequence
  Protein classification predicting sequence
TEANVVNFR

SEQ ID NO: 73751 - protein, 9 aa, Artificial sequence
  Protein classification predicting sequence
WTQWIFLQI

SEQ ID NO: 73752 - protein, 9 aa, Artificial sequence
  Protein classification predicting sequence
LPIVEVIAG

SEQ ID NO: 73753 - protein, 23 aa, Artificial sequence
  Protein classification predicting sequence
YDSDGRPHALDEAALPVELPDVP

SEQ ID NO: 73754 - protein, 14 aa, Artificial sequence
  Protein classification predicting sequence
CAKENEAYWMGPRP

SEQ ID NO: 73755 - protein, 12 aa, Artificial sequence
  Protein classification predicting sequence
NQGYIQAFAYTD

SEQ ID NO: 73756 - protein, 13 aa, Artificial sequence
  Protein classification predicting sequence
GWDAFGLPAEQYA

SEQ ID NO: 73757 - protein, 6 aa, Artificial sequence
  Protein classification predicting sequence
DPNYYK

SEQ ID NO: 73758 - protein, 8 aa, Artificial sequence
  Protein classification predicting sequence
RETNTMPQ

SEQ ID NO: 73759 - protein, 9 aa, Artificial sequence
  Protein classification predicting sequence
QWMMRITAY

SEQ ID NO: 73760 - protein, 7 aa, Artificial sequence
  Protein classification predicting sequence
SPDEICD

SEQ ID NO: 73761 - protein, 30 aa, Artificial sequence
  Protein classification predicting sequence
YGADTLRVYEMSMGPLEASRPWATKDVVGA

SEQ ID NO: 73762 - protein, 8 aa, Artificial sequence
  Protein classification predicting sequence
RKVIVVPG

SEQ ID NO: 73763 - protein, 8 aa, Artificial sequence
  Protein classification predicting sequence
LPLLLPET

SEQ ID NO: 73764 - protein, 7 aa, Artificial sequence
  Protein classification predicting sequence
FINECYK

SEQ ID NO: 73765 - protein, 5 aa, Artificial sequence
  Protein classification predicting sequence
KPKYY

SEQ ID NO: 73766 - protein, 7 aa, Artificial sequence
  Protein classification predicting sequence
EVNTTDP

SEQ ID NO: 73767 - protein, 7 aa, Artificial sequence
  Protein classification predicting sequence
NQGMILG

SEQ ID NO: 73768 - protein, 6 aa, Artificial sequence
  Protein classification predicting sequence
LMVFVN

SEQ ID NO: 73769 - protein, 6 aa, Artificial sequence
  Protein classification predicting sequence
DASKPK

SEQ ID NO: 73770 - protein, 14 aa, Artificial sequence
  Protein classification predicting sequence
MAVPAHDERDFEFA

SEQ ID NO: 73771 - protein, 9 aa, Artificial sequence
  Protein classification predicting sequence
DTFMESSWY

SEQ ID NO: 73772 - protein, 20 aa, Artificial sequence
  Protein classification predicting sequence
PPEQSLEWSDSGVEGAHRFL

SEQ ID NO: 73773 - protein, 6 aa, Artificial sequence
  Protein classification predicting sequence
AKVSDD

SEQ ID NO: 73774 - protein, 23 aa, Artificial sequence
  Protein classification predicting sequence
KTQVVNWDPVDQTVLANEQVIDG

SEQ ID NO: 73775 - protein, 7 aa, Artificial sequence
  Protein classification predicting sequence
VEKREIP

SEQ ID NO: 73776 - protein, 11 aa, Artificial sequence
  Protein classification predicting sequence
VEKREIPGYYL

SEQ ID NO: 73777 - protein, 7 aa, Artificial sequence
  Protein classification predicting sequence
LPVWVAN

SEQ ID NO: 73778 - protein, 8 aa, Artificial sequence
  Protein classification predicting sequence
MSKSKNNG

SEQ ID NO: 73779 - protein, 9 aa, Artificial sequence
  Protein classification predicting sequence
RLFMMFASP

SEQ ID NO: 73780 - protein, 14 aa, Artificial sequence
  Protein classification predicting sequence
TFNTAIAAIMELMN

SEQ ID NO: 73781 - protein, 9 aa, Artificial sequence
  Protein classification predicting sequence
GRNVLHALG

SEQ ID NO: 73782 - protein, 7 aa, Artificial sequence
  Protein classification predicting sequence
TTDPEYY

SEQ ID NO: 73783 - protein, 11 aa, Artificial sequence
  Protein classification predicting sequence
VNWCPGLGTVL

SEQ ID NO: 73784 - protein, 10 aa, Artificial sequence
  Protein classification predicting sequence
VPIFIADYVL

SEQ ID NO: 73785 - protein, 7 aa, Artificial sequence
  Protein classification predicting sequence
RDTNVMP

SEQ ID NO: 73786 - protein, 7 aa, Artificial sequence
  Protein classification predicting sequence
WAGSSWY

SEQ ID NO: 73787 - protein, 6 aa, Artificial sequence
  Protein classification predicting sequence
EPYRRL

SEQ ID NO: 73788 - protein, 7 aa, Artificial sequence
  Protein classification predicting sequence
TKDVVGA

SEQ ID NO: 73789 - protein, 8 aa, Artificial sequence
  Protein classification predicting sequence
LAGATPRK

SEQ ID NO: 73790 - protein, 6 aa, Artificial sequence
  Protein classification predicting sequence
NKTFKT

SEQ ID NO: 73791 - protein, 10 aa, Artificial sequence
  Protein classification predicting sequence
DTGNSPAEFT

SEQ ID NO: 73792 - protein, 13 aa, Artificial sequence
  Protein classification predicting sequence
KTGVFTGAYAINP

SEQ ID NO: 73793 - protein, 11 aa, Artificial sequence
  Protein classification predicting sequence
GVFTGAYAINP

SEQ ID NO: 73794 - protein, 8 aa, Artificial sequence
  Protein classification predicting sequence
TGAYAINP

SEQ ID NO: 73795 - protein, 10 aa, Artificial sequence
  Protein classification predicting sequence
RQRYWGEPIP

SEQ ID NO: 73796 - protein, 6 aa, Artificial sequence
  Protein classification predicting sequence
DIYIGG

SEQ ID NO: 73797 - protein, 8 aa, Artificial sequence
  Protein classification predicting sequence
TKEPFQKL

SEQ ID NO: 73798 - protein, 11 aa, Artificial sequence
  Protein classification predicting sequence
NEKMSKSKGNV

SEQ ID NO: 73799 - protein, 7 aa, Artificial sequence
  Protein classification predicting sequence
FNTGISQ

SEQ ID NO: 73800 - protein, 23 aa, Artificial sequence
  Protein classification predicting sequence
HPMGWDSFGLPAEQYAIRTGTHP

SEQ ID NO: 73801 - protein, 16 aa, Artificial sequence
  Protein classification predicting sequence
MPQWAGSCWYYLRFCD

SEQ ID NO: 73802 - protein, 19 aa, Artificial sequence
  Protein classification predicting sequence
EHAVLHLLYARFWHKVLYD

SEQ ID NO: 73803 - protein, 11 aa, Artificial sequence
  Protein classification predicting sequence
YCLSMFPYPSG

SEQ ID NO: 73804 - protein, 29 aa, Artificial sequence
  Protein classification predicting sequence
YCLSMFPYPSGRLHMGHVRNYTIGDVVSR

SEQ ID NO: 73805 - protein, 7 aa, Artificial sequence
  Protein classification predicting sequence
YMKNQLK

SEQ ID NO: 73806 - protein, 6 aa, Artificial sequence
  Protein classification predicting sequence
REVTTC

SEQ ID NO: 73807 - protein, 5 aa, Artificial sequence
  Protein classification predicting sequence
WVSPT

SEQ ID NO: 73808 - protein, 7 aa, Artificial sequence
  Protein classification predicting sequence
TCTPEYY

SEQ ID NO: 73809 - protein, 11 aa, Artificial sequence
  Protein classification predicting sequence
TVLANEQVVDG

SEQ ID NO: 73810 - protein, 8 aa, Artificial sequence
  Protein classification predicting sequence
AAENNPEL

SEQ ID NO: 73811 - protein, 7 aa, Artificial sequence
  Protein classification predicting sequence
LFNSGEF

SEQ ID NO: 73812 - protein, 15 aa, Artificial sequence
  Protein classification predicting sequence
LDPAAANYWLPVDQY

SEQ ID NO: 73813 - protein, 10 aa, Artificial sequence
  Protein classification predicting sequence
GGIEHAIMHL

SEQ ID NO: 73814 - protein, 19 aa, Artificial sequence
  Protein classification predicting sequence
EPAKRLLCQGMVLADAFYY

SEQ ID NO: 73815 - protein, 17 aa, Artificial sequence
  Protein classification predicting sequence
MVEKYGADTVRLFMMFA

SEQ ID NO: 73816 - protein, 7 aa, Artificial sequence
  Protein classification predicting sequence
TLEWQES

SEQ ID NO: 73817 - protein, 7 aa, Artificial sequence
  Protein classification predicting sequence
QVNGKVR

SEQ ID NO: 73818 - protein, 6 aa, Artificial sequence
  Protein classification predicting sequence
TIRKVI

SEQ ID NO: 73819 - protein, 9 aa, Artificial sequence
  Protein classification predicting sequence
PQDIEQKVQ

SEQ ID NO: 73820 - protein, 22 aa, Artificial sequence
  Protein classification predicting sequence
REFATCTPEYYRWEQEFFTKLY

SEQ ID NO: 73821 - protein, 41 aa, Artificial sequence
  Protein classification predicting sequence
KGLVYKKTSSVNWCPNDQTVLANEQVEDGCCWRCDTPVEQK

SEQ ID NO: 73822 - protein, 10 aa, Artificial sequence
  Protein classification predicting sequence
DQTVLANEQV

SEQ ID NO: 73823 - protein, 22 aa, Artificial sequence
  Protein classification predicting sequence
GWPEMVKTMQRNWIGRSEGVEL

SEQ ID NO: 73824 - protein, 26 aa, Artificial sequence
  Protein classification predicting sequence
LEVYTTRPDTLMGVTYVGIAAGHPLA

SEQ ID NO: 73825 - protein, 7 aa, Artificial sequence
  Protein classification predicting sequence
AAGHPLA

SEQ ID NO: 73826 - protein, 9 aa, Artificial sequence
  Protein classification predicting sequence
HPLNGREVP

SEQ ID NO: 73827 - protein, 16 aa, Artificial sequence
  Protein classification predicting sequence
EFATKYGLDIIPVIKP

SEQ ID NO: 73828 - protein, 7 aa, Artificial sequence
  Protein classification predicting sequence
TEKGVLF

SEQ ID NO: 73829 - protein, 7 aa, Artificial sequence
  Protein classification predicting sequence
SGEFDGL

SEQ ID NO: 73830 - protein, 30 aa, Artificial sequence
  Protein classification predicting sequence
KTVNFRLRDWGVSRQRYWGAPIPMVTTEDG

SEQ ID NO: 73831 - protein, 14 aa, Artificial sequence
  Protein classification predicting sequence
RLRDWGVSRQRYWG

SEQ ID NO: 73832 - protein, 9 aa, Artificial sequence
  Protein classification predicting sequence
DQLPVILPE

SEQ ID NO: 73833 - protein, 6 aa, Artificial sequence
  Protein classification predicting sequence
EWAKTT

SEQ ID NO: 73834 - protein, 10 aa, Artificial sequence
  Protein classification predicting sequence
ANYWLPVDQY

SEQ ID NO: 73835 - protein, 6 aa, Artificial sequence
  Protein classification predicting sequence
GGIEHA

SEQ ID NO: 73836 - protein, 12 aa, Artificial sequence
  Protein classification predicting sequence
LLCQGMVLADAF

SEQ ID NO: 73837 - protein, 23 aa, Artificial sequence
  Protein classification predicting sequence
HSGMIKMSKSKNNGIDPQEMVDK

SEQ ID NO: 73838 - protein, 11 aa, Artificial sequence
  Protein classification predicting sequence
KAPQESAQDRA

SEQ ID NO: 73839 - protein, 9 aa, Artificial sequence
  Protein classification predicting sequence
LDEALKAVV

SEQ ID NO: 73840 - protein, 5 aa, Artificial sequence
  Protein classification predicting sequence
WPTFD

SEQ ID NO: 73841 - protein, 7 aa, Artificial sequence
  Protein classification predicting sequence
DATEEQV

SEQ ID NO: 73842 - protein, 7 aa, Artificial sequence
  Protein classification predicting sequence
FTTRADT

SEQ ID NO: 73843 - protein, 7 aa, Artificial sequence
  Protein classification predicting sequence
VDLYIGG

SEQ ID NO: 73844 - protein, 6 aa, Artificial sequence
  Protein classification predicting sequence
KVIVVP

SEQ ID NO: 73845 - protein, 6 aa, Artificial sequence
  Protein classification predicting sequence
AINPIN

SEQ ID NO: 73846 - protein, 8 aa, Artificial sequence
  Protein classification predicting sequence
ETDTMDTF

SEQ ID NO: 73847 - protein, 7 aa, Artificial sequence
  Protein classification predicting sequence
WLPVDQY

SEQ ID NO: 73848 - protein, 8 aa, Artificial sequence
  Protein classification predicting sequence
WRSGALVE

SEQ ID NO: 73849 - protein, 8 aa, Artificial sequence
  Protein classification predicting sequence
ISRQRYWG

SEQ ID NO: 73850 - protein, 9 aa, Artificial sequence
  Protein classification predicting sequence
LHMGHVRNY

SEQ ID NO: 73851 - protein, 12 aa, Artificial sequence
  Protein classification predicting sequence
TVLANEQVDSEG

SEQ ID NO: 73852 - protein, 10 aa, Artificial sequence
  Protein classification predicting sequence
EKMSKSKYNG

SEQ ID NO: 73853 - protein, 7 aa, Artificial sequence
  Protein classification predicting sequence
TCKPDYY

SEQ ID NO: 73854 - protein, 9 aa, Artificial sequence
  Protein classification predicting sequence
TTRPDTLMG

SEQ ID NO: 73855 - protein, 7 aa, Artificial sequence
  Protein classification predicting sequence
EKKGMAT

SEQ ID NO: 73856 - protein, 9 aa, Artificial sequence
  Protein classification predicting sequence
FNTAIAAVM

SEQ ID NO: 73857 - protein, 8 aa, Artificial sequence
  Protein classification predicting sequence
QVNGKLRG

SEQ ID NO: 73858 - protein, 11 aa, Artificial sequence
  Protein classification predicting sequence
LHMGHVRNYTI

SEQ ID NO: 73859 - protein, 20 aa, Artificial sequence
  Protein classification predicting sequence
DQTVLANEQVIDGRGWRSGA

SEQ ID NO: 73860 - protein, 32 aa, Artificial sequence
  Protein classification predicting sequence
DQTVLANEQVIDGRGWRSGALIEKREIPMYYF

SEQ ID NO: 73861 - protein, 6 aa, Artificial sequence
  Protein classification predicting sequence
VLMHYG

SEQ ID NO: 73862 - protein, 6 aa, Artificial sequence
  Protein classification predicting sequence
NNVAPA

SEQ ID NO: 73863 - protein, 7 aa, Artificial sequence
  Protein classification predicting sequence
PEDQLPV

SEQ ID NO: 73864 - protein, 10 aa, Artificial sequence
  Protein classification predicting sequence
LEWSDSGVEG

SEQ ID NO: 73865 - protein, 8 aa, Artificial sequence
  Protein classification predicting sequence
ATYVKAKV

SEQ ID NO: 73866 - protein, 16 aa, Artificial sequence
  Protein classification predicting sequence
KRACARTRGLGTPLPW

SEQ ID NO: 73867 - protein, 11 aa, Artificial sequence
  Protein classification predicting sequence
EEFKGEKLIGK

SEQ ID NO: 73868 - protein, 22 aa, Artificial sequence
  Protein classification predicting sequence
IVKYFMKAAKETFIRAGFSVDW

SEQ ID NO: 73869 - protein, 7 aa, Artificial sequence
  Protein classification predicting sequence
EFFDYIF

SEQ ID NO: 73870 - protein, 8 aa, Artificial sequence
  Protein classification predicting sequence
EELWEKLG

SEQ ID NO: 73871 - protein, 15 aa, Artificial sequence
  Protein classification predicting sequence
PMGWDAFGMPAENAA

SEQ ID NO: 73872 - protein, 23 aa, Artificial sequence
  Protein classification predicting sequence
DGKLYVFTTRADTIMGVTFCAVA

SEQ ID NO: 73873 - protein, 7 aa, Artificial sequence
  Protein classification predicting sequence
AVAAEHP

SEQ ID NO: 73874 - protein, 6 aa, Artificial sequence
  Protein classification predicting sequence
AFIDEC

SEQ ID NO: 73875 - protein, 14 aa, Artificial sequence
  Protein classification predicting sequence
GMPTGLTVTHPLTG

SEQ ID NO: 73876 - protein, 30 aa, Artificial sequence
  Protein classification predicting sequence
VWVGNYVLMTYGDGAVMGVPAHDERDFAFA

SEQ ID NO: 73877 - protein, 7 aa, Artificial sequence
  Protein classification predicting sequence
FANKYGL

SEQ ID NO: 73878 - protein, 18 aa, Artificial sequence
  Protein classification predicting sequence
RLRDWGISRQRYWGTPIP

SEQ ID NO: 73879 - protein, 5 aa, Artificial sequence
  Protein classification predicting sequence
SCWYY

SEQ ID NO: 73880 - protein, 8 aa, Artificial sequence
  Protein classification predicting sequence
LHLLYARF

SEQ ID NO: 73881 - protein, 7 aa, Artificial sequence
  Protein classification predicting sequence
LLDAPWP

SEQ ID NO: 73882 - protein, 12 aa, Artificial sequence
  Protein classification predicting sequence
DGRGWRSGALVE

SEQ ID NO: 73883 - protein, 7 aa, Artificial sequence
  Protein classification predicting sequence
TIFGASF

SEQ ID NO: 73884 - protein, 19 aa, Artificial sequence
  Protein classification predicting sequence
FRLRDWGISRQRYWGCPIP

SEQ ID NO: 73885 - protein, 7 aa, Artificial sequence
  Protein classification predicting sequence
REFATCD

SEQ ID NO: 73886 - protein, 11 aa, Artificial sequence
  Protein classification predicting sequence
GRGWRSGALVE

SEQ ID NO: 73887 - protein, 7 aa, Artificial sequence
  Protein classification predicting sequence
GYTATDI

SEQ ID NO: 73888 - protein, 6 aa, Artificial sequence
  Protein classification predicting sequence
VLHPMG

SEQ ID NO: 73889 - protein, 6 aa, Artificial sequence
  Protein classification predicting sequence
ITDYAE

SEQ ID NO: 73890 - protein, 6 aa, Artificial sequence
  Protein classification predicting sequence
APEHPL

SEQ ID NO: 73891 - protein, 7 aa, Artificial sequence
  Protein classification predicting sequence
FLDRVWR

SEQ ID NO: 73892 - protein, 9 aa, Artificial sequence
  Protein classification predicting sequence
MINSRFLDG

SEQ ID NO: 73893 - protein, 8 aa, Artificial sequence
  Protein classification predicting sequence
GLFTQGMV

SEQ ID NO: 73894 - protein, 13 aa, Artificial sequence
  Protein classification predicting sequence
GLFTQGMVVHETY

SEQ ID NO: 73895 - protein, 6 aa, Artificial sequence
  Protein classification predicting sequence
GHVRNY

SEQ ID NO: 73896 - protein, 6 aa, Artificial sequence
  Protein classification predicting sequence
LAYQKE

SEQ ID NO: 73897 - protein, 7 aa, Artificial sequence
  Protein classification predicting sequence
VNWDPVD

SEQ ID NO: 73898 - protein, 8 aa, Artificial sequence
  Protein classification predicting sequence
DWGISRQR

SEQ ID NO: 73899 - protein, 10 aa, Artificial sequence
  Protein classification predicting sequence
HLLYARFFTK

SEQ ID NO: 73900 - protein, 8 aa, Artificial sequence
  Protein classification predicting sequence
PPEKDLEW

SEQ ID NO: 73901 - protein, 6 aa, Artificial sequence
  Protein classification predicting sequence
KWQKIW

SEQ ID NO: 73902 - protein, 19 aa, Artificial sequence
  Protein classification predicting sequence
VLHPMGWDAFGLPAENAAI

SEQ ID NO: 73903 - protein, 16 aa, Artificial sequence
  Protein classification predicting sequence
PMGWDAFGLPAENAAI

SEQ ID NO: 73904 - protein, 8 aa, Artificial sequence
  Protein classification predicting sequence
GRGWRSGA

SEQ ID NO: 73905 - protein, 20 aa, Artificial sequence
  Protein classification predicting sequence
PYPSGRLHMGHVRNYTIGDV

SEQ ID NO: 73906 - protein, 12 aa, Artificial sequence
  Protein classification predicting sequence
ATCTPEYYRWEQ

SEQ ID NO: 73907 - protein, 17 aa, Artificial sequence
  Protein classification predicting sequence
YDNTLTVYTTRPDTFMG

SEQ ID NO: 73908 - protein, 6 aa, Artificial sequence
  Protein classification predicting sequence
TYLAVA

SEQ ID NO: 73909 - protein, 16 aa, Artificial sequence
  Protein classification predicting sequence
TYLAVAAGHPLAQKAA

SEQ ID NO: 73910 - protein, 16 aa, Artificial sequence
  Protein classification predicting sequence
IKPVILAADGSEPDLS

SEQ ID NO: 73911 - protein, 15 aa, Artificial sequence
  Protein classification predicting sequence
QALTEKGVLFNSGEF

SEQ ID NO: 73912 - protein, 14 aa, Artificial sequence
  Protein classification predicting sequence
KRVWKLVYEHTAKG

SEQ ID NO: 73913 - protein, 6 aa, Artificial sequence
  Protein classification predicting sequence
AVVRML

SEQ ID NO: 73914 - protein, 11 aa, Artificial sequence
  Protein classification predicting sequence
LVVVQVNGKVR

SEQ ID NO: 73915 - protein, 30 aa, Artificial sequence
  Protein classification predicting sequence
DLDKLDHWPDTVKTMQRNWIGRSEGVEITF

SEQ ID NO: 73916 - protein, 44 aa, Artificial sequence
  Protein classification predicting sequence
HPLTGEEIPVWAANFVLMEYGTGAVMAVPGHDQRDYEFASKYGL

SEQ ID NO: 73917 - protein, 114 aa, Artificial sequence
  Protein classification predicting sequence
SDEPAKQLLCQGMVLADAFYYVGENGERNWVSPVDAIVERDEKGRIVKAKDAAGHELVYTGMSKMSKSKNNGIDPQVMVERYGADTVRLFMMFASPADMTLEWQESGVEGANRF

SEQ ID NO: 73918 - protein, 7 aa, Artificial sequence
  Protein classification predicting sequence
TFEVTED

SEQ ID NO: 73919 - protein, 6 aa, Artificial sequence
  Protein classification predicting sequence
NKTAPA

SEQ ID NO: 73920 - protein, 8 aa, Artificial sequence
  Protein classification predicting sequence
TAPAPWTY

SEQ ID NO: 73921 - protein, 11 aa, Artificial sequence
  Protein classification predicting sequence
KEIPQWFIKIT

SEQ ID NO: 73922 - protein, 9 aa, Artificial sequence
  Protein classification predicting sequence
EAELATMEK

SEQ ID NO: 73923 - protein, 9 aa, Artificial sequence
  Protein classification predicting sequence
ATGLYAIHP

SEQ ID NO: 73924 - protein, 6 aa, Artificial sequence
  Protein classification predicting sequence
RDYEFA

SEQ ID NO: 73925 - protein, 22 aa, Artificial sequence
  Protein classification predicting sequence
VNYRLRDWGVSRQRYWGAPIPM

SEQ ID NO: 73926 - protein, 20 aa, Artificial sequence
  Protein classification predicting sequence
PTPEDQLPVILPEDVVMDGI

SEQ ID NO: 73927 - protein, 21 aa, Artificial sequence
  Protein classification predicting sequence
ALRETDTFDTFMESSWYYARY

SEQ ID NO: 73928 - protein, 26 aa, Artificial sequence
  Protein classification predicting sequence
ALRETDTFDTFMESSWYYARYCSPQA

SEQ ID NO: 73929 - protein, 16 aa, Artificial sequence
  Protein classification predicting sequence
QGMVLADAFYYTNDKG

SEQ ID NO: 73930 - protein, 19 aa, Artificial sequence
  Protein classification predicting sequence
KYLDGVTVRKVIYVPGKLL

SEQ ID NO: 73931 - protein, 11 aa, Artificial sequence
  Protein classification predicting sequence
KNAVVNWDPVD

SEQ ID NO: 73932 - protein, 9 aa, Artificial sequence
  Protein classification predicting sequence
DGRGWRSGA

SEQ ID NO: 73933 - protein, 11 aa, Artificial sequence
  Protein classification predicting sequence
SRQRYWGCPIP

SEQ ID NO: 73934 - protein, 15 aa, Artificial sequence
  Protein classification predicting sequence
CGKPARRETDTMDTF

SEQ ID NO: 73935 - protein, 11 aa, Artificial sequence
  Protein classification predicting sequence
ARRETDTMDTF

SEQ ID NO: 73936 - protein, 6 aa, Artificial sequence
  Protein classification predicting sequence
GADTAR

SEQ ID NO: 73937 - protein, 17 aa, Artificial sequence
  Protein classification predicting sequence
LRDWLFSRQRYWGEPIP

SEQ ID NO: 73938 - protein, 20 aa, Artificial sequence
  Protein classification predicting sequence
EHAVLHLLYARFWHKVLYDL

SEQ ID NO: 73939 - protein, 29 aa, Artificial sequence
  Protein classification predicting sequence
EGKVEVFTTRPDTIYGASFLVLSPEHALV

SEQ ID NO: 73940 - protein, 8 aa, Artificial sequence
  Protein classification predicting sequence
SITTDEYK

SEQ ID NO: 73941 - protein, 7 aa, Artificial sequence
  Protein classification predicting sequence
ENKTFKT

SEQ ID NO: 73942 - protein, 10 aa, Artificial sequence
  Protein classification predicting sequence
KNIQTFKRQI

SEQ ID NO: 73943 - protein, 10 aa, Artificial sequence
  Protein classification predicting sequence
LGTVLSNEEV

SEQ ID NO: 73944 - protein, 14 aa, Artificial sequence
  Protein classification predicting sequence
KDMQRNWIGRSEGA

SEQ ID NO: 73945 - protein, 7 aa, Artificial sequence
  Protein classification predicting sequence
AINPLSG

SEQ ID NO: 73946 - protein, 8 aa, Artificial sequence
  Protein classification predicting sequence
IWIADYVL

SEQ ID NO: 73947 - protein, 10 aa, Artificial sequence
  Protein classification predicting sequence
LPIIEVIEGG

SEQ ID NO: 73948 - protein, 13 aa, Artificial sequence
  Protein classification predicting sequence
PSGTGESPLANID

SEQ ID NO: 73949 - protein, 9 aa, Artificial sequence
  Protein classification predicting sequence
WYYLRYIDP

SEQ ID NO: 73950 - protein, 19 aa, Artificial sequence
  Protein classification predicting sequence
SHGADTLRLYEMFMGPLDA

SEQ ID NO: 73951 - protein, 17 aa, Artificial sequence
  Protein classification predicting sequence
SLDKVYNQTVKKVTEDF

SEQ ID NO: 73952 - protein, 8 aa, Artificial sequence
  Protein classification predicting sequence
ITYQPWPT

SEQ ID NO: 73953 - protein, 8 aa, Artificial sequence
  Protein classification predicting sequence
ALSNDNVK

SEQ ID NO: 73954 - protein, 83 aa, Artificial sequence
  Protein classification predicting sequence
ENKTFKTNDNLGQKKFYALDMFPYPSGAGLHVGHPEGYTATDIISRYKRMQGYNVLHPMGWDAFGLPAEQYALDTGNDPREFT

SEQ ID NO: 73955 - protein, 58 aa, Artificial sequence
  Protein classification predicting sequence
ELGFSYDWDREVNTTDPEYYKWTQWIFIQLYNKGLAYVDEVAVNWCPALGTVLSNEEV

SEQ ID NO: 73956 - protein, 28 aa, Artificial sequence
  Protein classification predicting sequence
DGVSERGGHPVYRKPMKQWVLKITEYAD

SEQ ID NO: 73957 - protein, 23 aa, Artificial sequence
  Protein classification predicting sequence
AYTGEGKHINSGELDGLENEAAI

SEQ ID NO: 73958 - protein, 28 aa, Artificial sequence
  Protein classification predicting sequence
KGAGEKKVNYKLRDWLFSRQRYWGEPIP

SEQ ID NO: 73959 - protein, 26 aa, Artificial sequence
  Protein classification predicting sequence
ELPLLLPETDEIKPSGTGESPLANID

SEQ ID NO: 73960 - protein, 31 aa, Artificial sequence
  Protein classification predicting sequence
DEKTGMKGRRETNTMPQWAGSCWYYLRYIDP

SEQ ID NO: 73961 - protein, 41 aa, Artificial sequence
  Protein classification predicting sequence
SHGADTLRLYEMFMGPLDAAIAWSEKGLDGSRRFLDRVWRL

SEQ ID NO: 73962 - protein, 8 aa, Artificial sequence
  Protein classification predicting sequence
FLDGLDKA

SEQ ID NO: 73963 - protein, 11 aa, Artificial sequence
  Protein classification predicting sequence
PSGTGESPLAN

SEQ ID NO: 73964 - protein, 18 aa, Artificial sequence
  Protein classification predicting sequence
SISYVPWPSYDESKLVEN

SEQ ID NO: 73965 - protein, 26 aa, Artificial sequence
  Protein classification predicting sequence
EIVVQIKGKVKAKLVVAKDLSREELQ

SEQ ID NO: 73966 - protein, 22 aa, Artificial sequence
  Protein classification predicting sequence
LGFDAFGLPAEQYAVQTGTHPR

SEQ ID NO: 73967 - protein, 18 aa, Artificial sequence
  Protein classification predicting sequence
PGLGTVLANEEVTADGRS

SEQ ID NO: 73968 - protein, 10 aa, Artificial sequence
  Protein classification predicting sequence
RQRYWGEPFP

SEQ ID NO: 73969 - protein, 7 aa, Artificial sequence
  Protein classification predicting sequence
RETNTMP

SEQ ID NO: 73970 - protein, 7 aa, Artificial sequence
  Protein classification predicting sequence
WAGSCWY

SEQ ID NO: 73971 - protein, 15 aa, Artificial sequence
  Protein classification predicting sequence
NTTDPNYYKWTQWIF

SEQ ID NO: 73972 - protein, 7 aa, Artificial sequence
  Protein classification predicting sequence
RLLEDLE

SEQ ID NO: 73973 - protein, 15 aa, Artificial sequence
  Protein classification predicting sequence
DWPESIKDMQRNWIG

SEQ ID NO: 73974 - protein, 14 aa, Artificial sequence
  Protein classification predicting sequence
WIADYVLASYGTGA

SEQ ID NO: 73975 - protein, 30 aa, Artificial sequence
  Protein classification predicting sequence
TDWLEVTREDGVKGRRETNTMPQWAGSSWY

SEQ ID NO: 73976 - protein, 18 aa, Artificial sequence
  Protein classification predicting sequence
KGRRETNTMPQWAGSSWY

SEQ ID NO: 73977 - protein, 29 aa, Artificial sequence
  Protein classification predicting sequence
LYDLGVVPTKEPFQKLFNQGMILGTSYRD

SEQ ID NO: 73978 - protein, 8 aa, Artificial sequence
  Protein classification predicting sequence
FVNAANKE

SEQ ID NO: 73979 - protein, 17 aa, Artificial sequence
  Protein classification predicting sequence
LHPMGWDAFGLPAEQYA

SEQ ID NO: 73980 - protein, 11 aa, Artificial sequence
  Protein classification predicting sequence
TGAYAINPVNG

SEQ ID NO: 73981 - protein, 6 aa, Artificial sequence
  Protein classification predicting sequence
LDIIPV

SEQ ID NO: 73982 - protein, 8 aa, Artificial sequence
  Protein classification predicting sequence
YAINPVNG

SEQ ID NO: 73983 - protein, 6 aa, Artificial sequence
  Protein classification predicting sequence
YAERLL

SEQ ID NO: 73984 - protein, 24 aa, Artificial sequence
  Protein classification predicting sequence
ESIKDMQRNWIGKSTGANVTFKVK

SEQ ID NO: 73985 - protein, 9 aa, Artificial sequence
  Protein classification predicting sequence
RDWEFAKQF

SEQ ID NO: 73986 - protein, 46 aa, Artificial sequence
  Protein classification predicting sequence
TDWLEVTREDGVKGRRETNTMPQWAGSSWYYLRYIDPHNTEKLADE

SEQ ID NO: 73987 - protein, 20 aa, Artificial sequence
  Protein classification predicting sequence
YVGGAEHAVLHLLYARFWHK

SEQ ID NO: 73988 - protein, 17 aa, Artificial sequence
  Protein classification predicting sequence
GALDKVYNETVKAVTEQ

SEQ ID NO: 73989 - protein, 6 aa, Artificial sequence
  Protein classification predicting sequence
KFNTAI

SEQ ID NO: 73990 - protein, 7 aa, Artificial sequence
  Protein classification predicting sequence
APFAPHL

SEQ ID NO: 73991 - protein, 7 aa, Artificial sequence
  Protein classification predicting sequence
GESISYV

SEQ ID NO: 73992 - protein, 25 aa, Artificial sequence
  Protein classification predicting sequence
HTFKTGTDASKPKFYALDMFPYPSG

SEQ ID NO: 73993 - protein, 15 aa, Artificial sequence
  Protein classification predicting sequence
KPKFYALDMFPYPSG

SEQ ID NO: 73994 - protein, 8 aa, Artificial sequence
  Protein classification predicting sequence
QASLKSDL

SEQ ID NO: 73995 - protein, 37 aa, Artificial sequence
  Protein classification predicting sequence
EKVTYRLRDWLFSRQRYWGEPIPIIHWEDGTSTAVPE

SEQ ID NO: 73996 - protein, 11 aa, Artificial sequence
  Protein classification predicting sequence
YNETVKAVTEQ

SEQ ID NO: 73997 - protein, 22 aa, Artificial sequence
  Protein classification predicting sequence
KFNTAIAQLMVFVNAANKEDKL

SEQ ID NO: 73998 - protein, 10 aa, Artificial sequence
  Protein classification predicting sequence
FGMPAENAAI

SEQ ID NO: 73999 - protein, 7 aa, Artificial sequence
  Protein classification predicting sequence
PAENAAI

SEQ ID NO: 74000 - protein, 6 aa, Artificial sequence
  Protein classification predicting sequence
WGAPIP

SEQ ID NO: 74001 - protein, 7 aa, Artificial sequence
  Protein classification predicting sequence
WIANYVL

SEQ ID NO: 74002 - protein, 12 aa, Artificial sequence
  Protein classification predicting sequence
ISRQRYWGCPIP

SEQ ID NO: 74003 - protein, 9 aa, Artificial sequence
  Protein classification predicting sequence
VFTTRPDTL

SEQ ID NO: 74004 - protein, 6 aa, Artificial sequence
  Protein classification predicting sequence
DPHNTE

SEQ ID NO: 74005 - protein, 9 aa, Artificial sequence
  Protein classification predicting sequence
DVEGQFRFL

SEQ ID NO: 74006 - protein, 8 aa, Artificial sequence
  Protein classification predicting sequence
GAYLEFPI

SEQ ID NO: 74007 - protein, 6 aa, Artificial sequence
  Protein classification predicting sequence
REIATC

SEQ ID NO: 74008 - protein, 7 aa, Artificial sequence
  Protein classification predicting sequence
YKLRDWL

SEQ ID NO: 74009 - protein, 8 aa, Artificial sequence
  Protein classification predicting sequence
DTLFGATY

SEQ ID NO: 74010 - protein, 6 aa, Artificial sequence
  Protein classification predicting sequence
GGAEHA

SEQ ID NO: 74011 - protein, 7 aa, Artificial sequence
  Protein classification predicting sequence
NVVNPDD

SEQ ID NO: 74012 - protein, 8 aa, Artificial sequence
  Protein classification predicting sequence
YEMFMGPL

SEQ ID NO: 74013 - protein, 7 aa, Artificial sequence
  Protein classification predicting sequence
MFSYPSG

SEQ ID NO: 74014 - protein, 8 aa, Artificial sequence
  Protein classification predicting sequence
GLAYRKKA

SEQ ID NO: 74015 - protein, 9 aa, Artificial sequence
  Protein classification predicting sequence
VLPDGTSER

SEQ ID NO: 74016 - protein, 6 aa, Artificial sequence
  Protein classification predicting sequence
QWVLKI

SEQ ID NO: 74017 - protein, 7 aa, Artificial sequence
  Protein classification predicting sequence
GAYAINP

SEQ ID NO: 74018 - protein, 8 aa, Artificial sequence
  Protein classification predicting sequence
NVINPDDI

SEQ ID NO: 74019 - protein, 7 aa, Artificial sequence
  Protein classification predicting sequence
LDRVYRL

SEQ ID NO: 74020 - protein, 13 aa, Artificial sequence
  Protein classification predicting sequence
QPIGWDAFGLPAE

SEQ ID NO: 74021 - protein, 54 aa, Artificial sequence
  Protein classification predicting sequence
QPIGWDAFGLPAENAAVKNNTAPAPWTYENIEYMKNQLKLLGFGYDWNREFATC

SEQ ID NO: 74022 - protein, 6 aa, Artificial sequence
  Protein classification predicting sequence
REFATC

SEQ ID NO: 74023 - protein, 8 aa, Artificial sequence
  Protein classification predicting sequence
PEYYRWEQ

SEQ ID NO: 74024 - protein, 14 aa, Artificial sequence
  Protein classification predicting sequence
PEYYRWEQEFFTKL

SEQ ID NO: 74025 - protein, 11 aa, Artificial sequence
  Protein classification predicting sequence
ECKNTKVAEAE

SEQ ID NO: 74026 - protein, 24 aa, Artificial sequence
  Protein classification predicting sequence
ATMEKKGMATGLTAIHPLNGREVP

SEQ ID NO: 74027 - protein, 12 aa, Artificial sequence
  Protein classification predicting sequence
AIAAKLEAEGKG

SEQ ID NO: 74028 - protein, 34 aa, Artificial sequence
  Protein classification predicting sequence
YGADTVRLFMMFASPADMTLEWQESGVEGANRFL

SEQ ID NO: 74029 - protein, 13 aa, Artificial sequence
  Protein classification predicting sequence
AQDRAILDEALKA

SEQ ID NO: 74030 - protein, 7 aa, Artificial sequence
  Protein classification predicting sequence
KGGKEWV

SEQ ID NO: 74031 - protein, 9 aa, Artificial sequence
  Protein classification predicting sequence
VERDGKGRI

SEQ ID NO: 74032 - protein, 6 aa, Artificial sequence
  Protein classification predicting sequence
WPTFDE

SEQ ID NO: 74033 - protein, 8 aa, Artificial sequence
  Protein classification predicting sequence
IVVQVNGK

SEQ ID NO: 74034 - protein, 7 aa, Artificial sequence
  Protein classification predicting sequence
VVQVNGK

SEQ ID NO: 74035 - protein, 9 aa, Artificial sequence
  Protein classification predicting sequence
VVQVNGKVR

SEQ ID NO: 74036 - protein, 8 aa, Artificial sequence
  Protein classification predicting sequence
CDPKYYKW

SEQ ID NO: 74037 - protein, 12 aa, Artificial sequence
  Protein classification predicting sequence
GMSKMSKSKNNG

SEQ ID NO: 74038 - protein, 11 aa, Artificial sequence
  Protein classification predicting sequence
YVLEMFPYPSG

SEQ ID NO: 74039 - protein, 10 aa, Artificial sequence
  Protein classification predicting sequence
YYKHEQKFFL

SEQ ID NO: 74040 - protein, 7 aa, Artificial sequence
  Protein classification predicting sequence
RLFVLSD

SEQ ID NO: 74041 - protein, 6 aa, Artificial sequence
  Protein classification predicting sequence
NWCPND

SEQ ID NO: 74042 - protein, 8 aa, Artificial sequence
  Protein classification predicting sequence
GADTARLF

SEQ ID NO: 74043 - protein, 26 aa, Artificial sequence
  Protein classification predicting sequence
VNWDPVDQTVLANEQVIDGRGWRSGA

SEQ ID NO: 74044 - protein, 8 aa, Artificial sequence
  Protein classification predicting sequence
GVTFVSIA

SEQ ID NO: 74045 - protein, 6 aa, Artificial sequence
  Protein classification predicting sequence
VYKKTS

SEQ ID NO: 74046 - protein, 33 aa, Artificial sequence
  Protein classification predicting sequence
TVLANEQVIDGCCWRCDTKVERKEIPQWFIKIT

SEQ ID NO: 74047 - protein, 19 aa, Artificial sequence
  Protein classification predicting sequence
ECRNTKVAEAEMATMEKKG

SEQ ID NO: 74048 - protein, 7 aa, Artificial sequence
  Protein classification predicting sequence
GEKLPIW

SEQ ID NO: 74049 - protein, 32 aa, Artificial sequence
  Protein classification predicting sequence
RKVNYRLRDWGVSRQRYWGAPIPMVTLEDGTV

SEQ ID NO: 74050 - protein, 8 aa, Artificial sequence
  Protein classification predicting sequence
YFRFFHKL

SEQ ID NO: 74051 - protein, 12 aa, Artificial sequence
  Protein classification predicting sequence
WVSPVDAIVERD

SEQ ID NO: 74052 - protein, 7 aa, Artificial sequence
  Protein classification predicting sequence
ARRETDT

SEQ ID NO: 74053 - protein, 7 aa, Artificial sequence
  Protein classification predicting sequence
DETFYTE

SEQ ID NO: 74054 - protein, 9 aa, Artificial sequence
  Protein classification predicting sequence
GGKSPDSGH

SEQ ID NO: 74055 - protein, 5 aa, Artificial sequence
  Protein classification predicting sequence
IYWPI

SEQ ID NO: 74056 - protein, 17 aa, Artificial sequence
  Protein classification predicting sequence
LMKDGKMSKSKGNVVDP

SEQ ID NO: 74057 - protein, 13 aa, Artificial sequence
  Protein classification predicting sequence
GKMSKSKGNVVDP

SEQ ID NO: 74058 - protein, 8 aa, Artificial sequence
  Protein classification predicting sequence
PWVLAKDE

SEQ ID NO: 74059 - protein, 9 aa, Artificial sequence
  Protein classification predicting sequence
LASVMAHLA

SEQ ID NO: 74060 - protein, 6 aa, Artificial sequence
  Protein classification predicting sequence
PIFPRL

SEQ ID NO: 74061 - protein, 8 aa, Artificial sequence
  Protein classification predicting sequence
VKKADKLL

SEQ ID NO: 74062 - protein, 7 aa, Artificial sequence
  Protein classification predicting sequence
ARGDQCD

SEQ ID NO: 74063 - protein, 7 aa, Artificial sequence
  Protein classification predicting sequence
LLEPFLP

SEQ ID NO: 74064 - protein, 33 aa, Artificial sequence
  Protein classification predicting sequence
KGENVLYVSGSDCNGTPIAIRAKQEGVTAKEIA

SEQ ID NO: 74065 - protein, 14 aa, Artificial sequence
  Protein classification predicting sequence
IFDAVRFANKYFDE

SEQ ID NO: 74066 - protein, 8 aa, Artificial sequence
  Protein classification predicting sequence
LITSALPY

SEQ ID NO: 74067 - protein, 6 aa, Artificial sequence
  Protein classification predicting sequence
TSALPY

SEQ ID NO: 74068 - protein, 8 aa, Artificial sequence
  Protein classification predicting sequence
IGSVLSAD

SEQ ID NO: 74069 - protein, 6 aa, Artificial sequence
  Protein classification predicting sequence
DRYVEG

SEQ ID NO: 74070 - protein, 6 aa, Artificial sequence
  Protein classification predicting sequence
YVWFDA

SEQ ID NO: 74071 - protein, 7 aa, Artificial sequence
  Protein classification predicting sequence
KDNVPFH

SEQ ID NO: 74072 - protein, 11 aa, Artificial sequence
  Protein classification predicting sequence
RFHCIYWPIFL

SEQ ID NO: 74073 - protein, 7 aa, Artificial sequence
  Protein classification predicting sequence
TGTDEHG

SEQ ID NO: 74074 - protein, 7 aa, Artificial sequence
  Protein classification predicting sequence
KGTCPKC

SEQ ID NO: 74075 - protein, 6 aa, Artificial sequence
  Protein classification predicting sequence
KYFYVW

SEQ ID NO: 74076 - protein, 6 aa, Artificial sequence
  Protein classification predicting sequence
YWKKDS

SEQ ID NO: 74077 - protein, 10 aa, Artificial sequence
  Protein classification predicting sequence
FHALFWPAML

SEQ ID NO: 74078 - protein, 8 aa, Artificial sequence
  Protein classification predicting sequence
LMQRVDPK

SEQ ID NO: 74079 - protein, 8 aa, Artificial sequence
  Protein classification predicting sequence
ANLAPRKM

SEQ ID NO: 74080 - protein, 9 aa, Artificial sequence
  Protein classification predicting sequence
SPDSGAKPG

SEQ ID NO: 74081 - protein, 13 aa, Artificial sequence
  Protein classification predicting sequence
RIVNTELNDDIGN

SEQ ID NO: 74082 - protein, 17 aa, Artificial sequence
  Protein classification predicting sequence
KHVMYVWVDALTNYITA

SEQ ID NO: 74083 - protein, 8 aa, Artificial sequence
  Protein classification predicting sequence
FGQDGSYS

SEQ ID NO: 74084 - protein, 7 aa, Artificial sequence
  Protein classification predicting sequence
FIQPESR

SEQ ID NO: 74085 - protein, 9 aa, Artificial sequence
  Protein classification predicting sequence
RFHAVYWPA

SEQ ID NO: 74086 - protein, 5 aa, Artificial sequence
  Protein classification predicting sequence
WPAML

SEQ ID NO: 74087 - protein, 6 aa, Artificial sequence
  Protein classification predicting sequence
TTPIYY

SEQ ID NO: 74088 - protein, 8 aa, Artificial sequence
  Protein classification predicting sequence
LTGTDEHG

SEQ ID NO: 74089 - protein, 12 aa, Artificial sequence
  Protein classification predicting sequence
GDIYLGEYEGWY

SEQ ID NO: 74090 - protein, 5 aa, Artificial sequence
  Protein classification predicting sequence
VVYVW

SEQ ID NO: 74091 - protein, 10 aa, Artificial sequence
  Protein classification predicting sequence
EQRQIVSGIA

SEQ ID NO: 74092 - protein, 10 aa, Artificial sequence
  Protein classification predicting sequence
HLGHLVGYIQ

SEQ ID NO: 74093 - protein, 8 aa, Artificial sequence
  Protein classification predicting sequence
ADDTHGTP

SEQ ID NO: 74094 - protein, 6 aa, Artificial sequence
  Protein classification predicting sequence
SEHYFF

SEQ ID NO: 74095 - protein, 6 aa, Artificial sequence
  Protein classification predicting sequence
YFFRLS

SEQ ID NO: 74096 - protein, 8 aa, Artificial sequence
  Protein classification predicting sequence
NKMKEWLG

SEQ ID NO: 74097 - protein, 7 aa, Artificial sequence
  Protein classification predicting sequence
LFWPAML

SEQ ID NO: 74098 - protein, 7 aa, Artificial sequence
  Protein classification predicting sequence
GFLTVDG

SEQ ID NO: 74099 - protein, 12 aa, Artificial sequence
  Protein classification predicting sequence
KMSKSRGTFITA

SEQ ID NO: 74100 - protein, 6 aa, Artificial sequence
  Protein classification predicting sequence
LRYYFA

SEQ ID NO: 74101 - protein, 7 aa, Artificial sequence
  Protein classification predicting sequence
KRFDGKL

SEQ ID NO: 74102 - protein, 7 aa, Artificial sequence
  Protein classification predicting sequence
VEGADKL

SEQ ID NO: 74103 - protein, 6 aa, Artificial sequence
  Protein classification predicting sequence
GIKSAY

SEQ ID NO: 74104 - protein, 12 aa, Artificial sequence
  Protein classification predicting sequence
VANLAPRKMKFG

SEQ ID NO: 74105 - protein, 67 aa, Artificial sequence
  Protein classification predicting sequence
AKQTGTWRDNAIQLTERYVKEGLLDRAVSRDLPIGVPIPVEGYEDKKIYVWIEAVTGYYSASKHWAE

SEQ ID NO: 74106 - protein, 17 aa, Artificial sequence
  Protein classification predicting sequence
EAKTYYVHGKDNIPFHS

SEQ ID NO: 74107 - protein, 7 aa, Artificial sequence
  Protein classification predicting sequence
FHSIIWP

SEQ ID NO: 74108 - protein, 7 aa, Artificial sequence
  Protein classification predicting sequence
LINPKSA

SEQ ID NO: 74109 - protein, 7 aa, Artificial sequence
  Protein classification predicting sequence
STSRNWA

SEQ ID NO: 74110 - protein, 7 aa, Artificial sequence
  Protein classification predicting sequence
ANLAPRK

SEQ ID NO: 74111 - protein, 7 aa, Artificial sequence
  Protein classification predicting sequence
DEHGQKI

SEQ ID NO: 74112 - protein, 11 aa, Artificial sequence
  Protein classification predicting sequence
DDFIRTTEERH

SEQ ID NO: 74113 - protein, 8 aa, Artificial sequence
  Protein classification predicting sequence
LPLPKKVF

SEQ ID NO: 74114 - protein, 11 aa, Artificial sequence
  Protein classification predicting sequence
PFGSDGVFTPE

SEQ ID NO: 74115 - protein, 11 aa, Artificial sequence
  Protein classification predicting sequence
EKRQVVSGIAK

SEQ ID NO: 74116 - protein, 7 aa, Artificial sequence
  Protein classification predicting sequence
SGIAKYY

SEQ ID NO: 74117 - protein, 7 aa, Artificial sequence
  Protein classification predicting sequence
DDFIRTT

SEQ ID NO: 74118 - protein, 35 aa, Artificial sequence
  Protein classification predicting sequence
PESRKNEMINNFIKPGLEDLAVSRTTFDWGIKVPG

SEQ ID NO: 74119 - protein, 11 aa, Artificial sequence
  Protein classification predicting sequence
PGLEDLAVSRT

SEQ ID NO: 74120 - protein, 7 aa, Artificial sequence
  Protein classification predicting sequence
YVWIDAL

SEQ ID NO: 74121 - protein, 8 aa, Artificial sequence
  Protein classification predicting sequence
IDRYGLDA

SEQ ID NO: 74122 - protein, 9 aa, Artificial sequence
  Protein classification predicting sequence
RTNKYIDET

SEQ ID NO: 74123 - protein, 6 aa, Artificial sequence
  Protein classification predicting sequence
PWVLAK

SEQ ID NO: 74124 - protein, 10 aa, Artificial sequence
  Protein classification predicting sequence
LMALDLPLPK

SEQ ID NO: 74125 - protein, 7 aa, Artificial sequence
  Protein classification predicting sequence
FSVALST

SEQ ID NO: 74126 - protein, 8 aa, Artificial sequence
  Protein classification predicting sequence
VELRVAEV

SEQ ID NO: 74127 - protein, 7 aa, Artificial sequence
  Protein classification predicting sequence
ALPYANG

SEQ ID NO: 74128 - protein, 6 aa, Artificial sequence
  Protein classification predicting sequence
FICADD

SEQ ID NO: 74129 - protein, 6 aa, Artificial sequence
  Protein classification predicting sequence
HGTPIM

SEQ ID NO: 74130 - protein, 7 aa, Artificial sequence
  Protein classification predicting sequence
PVMKDSE

SEQ ID NO: 74131 - protein, 9 aa, Artificial sequence
  Protein classification predicting sequence
KMSKSKGTF

SEQ ID NO: 74132 - protein, 13 aa, Artificial sequence
  Protein classification predicting sequence
VLMVSGTDEHGTP

SEQ ID NO: 74133 - protein, 6 aa, Artificial sequence
  Protein classification predicting sequence
GTDEHG

SEQ ID NO: 74134 - protein, 13 aa, Artificial sequence
  Protein classification predicting sequence
LGLSYDLFTRTTT

SEQ ID NO: 74135 - protein, 13 aa, Artificial sequence
  Protein classification predicting sequence
LINPVSKINGETP

SEQ ID NO: 74136 - protein, 6 aa, Artificial sequence
  Protein classification predicting sequence
RAITRD

SEQ ID NO: 74137 - protein, 10 aa, Artificial sequence
  Protein classification predicting sequence
GYLSASIEWA

SEQ ID NO: 74138 - protein, 17 aa, Artificial sequence
  Protein classification predicting sequence
YYFMGKDNITFHSQIWP

SEQ ID NO: 74139 - protein, 10 aa, Artificial sequence
  Protein classification predicting sequence
GHMLEHIQAD

SEQ ID NO: 74140 - protein, 6 aa, Artificial sequence
  Protein classification predicting sequence
FLPDRF

SEQ ID NO: 74141 - protein, 6 aa, Artificial sequence
  Protein classification predicting sequence
LRYYYA

SEQ ID NO: 74142 - protein, 6 aa, Artificial sequence
  Protein classification predicting sequence
NLASRN

SEQ ID NO: 74143 - protein, 6 aa, Artificial sequence
  Protein classification predicting sequence
ADDAHG

SEQ ID NO: 74144 - protein, 11 aa, Artificial sequence
  Protein classification predicting sequence
HFIGKDIIYFH

SEQ ID NO: 74145 - protein, 8 aa, Artificial sequence
  Protein classification predicting sequence
KLLRLTLD

SEQ ID NO: 74146 - protein, 7 aa, Artificial sequence
  Protein classification predicting sequence
GDQCDNC

SEQ ID NO: 74147 - protein, 8 aa, Artificial sequence
  Protein classification predicting sequence
ITRDLKWG

SEQ ID NO: 74148 - protein, 6 aa, Artificial sequence
  Protein classification predicting sequence
EYLNYE

SEQ ID NO: 74149 - protein, 7 aa, Artificial sequence
  Protein classification predicting sequence
GDQCENC

SEQ ID NO: 74150 - protein, 8 aa, Artificial sequence
  Protein classification predicting sequence
NYITALGY

SEQ ID NO: 74151 - protein, 8 aa, Artificial sequence
  Protein classification predicting sequence
LVERYGLD

SEQ ID NO: 74152 - protein, 7 aa, Artificial sequence
  Protein classification predicting sequence
PTDLINP

SEQ ID NO: 74153 - protein, 11 aa, Artificial sequence
  Protein classification predicting sequence
ICTMGINLFRI

SEQ ID NO: 74154 - protein, 10 aa, Artificial sequence
  Protein classification predicting sequence
KYFYVWLDAP

SEQ ID NO: 74155 - protein, 6 aa, Artificial sequence
  Protein classification predicting sequence
WDISRD

SEQ ID NO: 74156 - protein, 7 aa, Artificial sequence
  Protein classification predicting sequence
LSSRIDD

SEQ ID NO: 74157 - protein, 8 aa, Artificial sequence
  Protein classification predicting sequence
IQTDIWVR

SEQ ID NO: 74158 - protein, 11 aa, Artificial sequence
  Protein classification predicting sequence
ADDTHGTPVML

SEQ ID NO: 74159 - protein, 6 aa, Artificial sequence
  Protein classification predicting sequence
DIDLNL

SEQ ID NO: 74160 - protein, 19 aa, Artificial sequence
  Protein classification predicting sequence
ARVNSDLVGKYVNIASRAA

SEQ ID NO: 74161 - protein, 8 aa, Artificial sequence
  Protein classification predicting sequence
ADEKAEPG

SEQ ID NO: 74162 - protein, 12 aa, Artificial sequence
  Protein classification predicting sequence
PRCITRDLKWGT

SEQ ID NO: 74163 - protein, 6 aa, Artificial sequence
  Protein classification predicting sequence
DAPIGY

SEQ ID NO: 74164 - protein, 12 aa, Artificial sequence
  Protein classification predicting sequence
IPADIWRFYLLY

SEQ ID NO: 74165 - protein, 6 aa, Artificial sequence
  Protein classification predicting sequence
NLKPAK

SEQ ID NO: 74166 - protein, 7 aa, Artificial sequence
  Protein classification predicting sequence
RTSFDWG

SEQ ID NO: 74167 - protein, 6 aa, Artificial sequence
  Protein classification predicting sequence
GMILSA

SEQ ID NO: 74168 - protein, 6 aa, Artificial sequence
  Protein classification predicting sequence
TDLINP

SEQ ID NO: 74169 - protein, 8 aa, Artificial sequence
  Protein classification predicting sequence
QFSKSEGN

SEQ ID NO: 74170 - protein, 6 aa, Artificial sequence
  Protein classification predicting sequence
WGVPVP

SEQ ID NO: 74171 - protein, 9 aa, Artificial sequence
  Protein classification predicting sequence
APETSDSEF

SEQ ID NO: 74172 - protein, 6 aa, Artificial sequence
  Protein classification predicting sequence
PWKLAK

SEQ ID NO: 74173 - protein, 7 aa, Artificial sequence
  Protein classification predicting sequence
CGADYEA

SEQ ID NO: 74174 - protein, 15 aa, Artificial sequence
  Protein classification predicting sequence
KVFYVWFDAPIGYIS

SEQ ID NO: 74175 - protein, 6 aa, Artificial sequence
  Protein classification predicting sequence
FIGKDN

SEQ ID NO: 74176 - protein, 8 aa, Artificial sequence
  Protein classification predicting sequence
ALPYANGP

SEQ ID NO: 74177 - protein, 7 aa, Artificial sequence
  Protein classification predicting sequence
GHLAGVY

SEQ ID NO: 74178 - protein, 6 aa, Artificial sequence
  Protein classification predicting sequence
SPTELI

SEQ ID NO: 74179 - protein, 6 aa, Artificial sequence
  Protein classification predicting sequence
DTDFSW

SEQ ID NO: 74180 - protein, 8 aa, Artificial sequence
  Protein classification predicting sequence
DFFSRTTN

SEQ ID NO: 74181 - protein, 12 aa, Artificial sequence
  Protein classification predicting sequence
TRDLSWGIPVPD

SEQ ID NO: 74182 - protein, 6 aa, Artificial sequence
  Protein classification predicting sequence
ALPYAN

SEQ ID NO: 74183 - protein, 25 aa, Artificial sequence
  Protein classification predicting sequence
IEQLFDPEKQMFLPDRFVKGECPKC

SEQ ID NO: 74184 - protein, 6 aa, Artificial sequence
  Protein classification predicting sequence
SEHFFF

SEQ ID NO: 74185 - protein, 14 aa, Artificial sequence
  Protein classification predicting sequence
LGECADFLKAWTSG

SEQ ID NO: 74186 - protein, 16 aa, Artificial sequence
  Protein classification predicting sequence
DWDISRDAPYFGFEIP

SEQ ID NO: 74187 - protein, 26 aa, Artificial sequence
  Protein classification predicting sequence
DSQTEMYHFIGKDILYFHALFWPAML

SEQ ID NO: 74188 - protein, 9 aa, Artificial sequence
  Protein classification predicting sequence
AHGFLTVDG

SEQ ID NO: 74189 - protein, 12 aa, Artificial sequence
  Protein classification predicting sequence
GQKMSKSRGTFI

SEQ ID NO: 74190 - protein, 6 aa, Artificial sequence
  Protein classification predicting sequence
VNIASR

SEQ ID NO: 74191 - protein, 8 aa, Artificial sequence
  Protein classification predicting sequence
MALADIVN

SEQ ID NO: 74192 - protein, 8 aa, Artificial sequence
  Protein classification predicting sequence
VEGSDKLL

SEQ ID NO: 74193 - protein, 6 aa, Artificial sequence
  Protein classification predicting sequence
RKMRFG

SEQ ID NO: 74194 - protein, 6 aa, Artificial sequence
  Protein classification predicting sequence
FIRTTD

SEQ ID NO: 74195 - protein, 5 aa, Artificial sequence
  Protein classification predicting sequence
YEGWY

SEQ ID NO: 74196 - protein, 6 aa, Artificial sequence
  Protein classification predicting sequence
PFGSDG

SEQ ID NO: 74197 - protein, 9 aa, Artificial sequence
  Protein classification predicting sequence
DLANDLGNL

SEQ ID NO: 74198 - protein, 7 aa, Artificial sequence
  Protein classification predicting sequence
PWVLAKD

SEQ ID NO: 74199 - protein, 7 aa, Artificial sequence
  Protein classification predicting sequence
NLKPAKL

SEQ ID NO: 74200 - protein, 9 aa, Artificial sequence
  Protein classification predicting sequence
DAIARFKRL

SEQ ID NO: 74201 - protein, 6 aa, Artificial sequence
  Protein classification predicting sequence
VSRTSF

SEQ ID NO: 74202 - protein, 8 aa, Artificial sequence
  Protein classification predicting sequence
GKDILRFH

SEQ ID NO: 74203 - protein, 13 aa, Artificial sequence
  Protein classification predicting sequence
DLANDLGNLLSRT

SEQ ID NO: 74204 - protein, 9 aa, Artificial sequence
  Protein classification predicting sequence
DFDKIDLRV

SEQ ID NO: 74205 - protein, 6 aa, Artificial sequence
  Protein classification predicting sequence
DEHGQK

SEQ ID NO: 74206 - protein, 11 aa, Artificial sequence
  Protein classification predicting sequence
FIQPESRKNEM

SEQ ID NO: 74207 - protein, 7 aa, Artificial sequence
  Protein classification predicting sequence
KHVIYVW

SEQ ID NO: 74208 - protein, 10 aa, Artificial sequence
  Protein classification predicting sequence
ALPYANGPIH

SEQ ID NO: 74209 - protein, 8 aa, Artificial sequence
  Protein classification predicting sequence
ELIYTRLK

SEQ ID NO: 74210 - protein, 6 aa, Artificial sequence
  Protein classification predicting sequence
TELYHF

SEQ ID NO: 74211 - protein, 8 aa, Artificial sequence
  Protein classification predicting sequence
GKDIVYFH

SEQ ID NO: 74212 - protein, 8 aa, Artificial sequence
  Protein classification predicting sequence
ASRCAGFI

SEQ ID NO: 74213 - protein, 8 aa, Artificial sequence
  Protein classification predicting sequence
DNYHSTHS

SEQ ID NO: 74214 - protein, 6 aa, Artificial sequence
  Protein classification predicting sequence
LSELIY

SEQ ID NO: 74215 - protein, 46 aa, Artificial sequence
  Protein classification predicting sequence
LSELIYTRLKENGFIKNRTISQLYDPEKGMFLPDRFVKGTCPKCKS

SEQ ID NO: 74216 - protein, 39 aa, Artificial sequence
  Protein classification predicting sequence
RLKENGFIKNRTISQLYDPEKGMFLPDRFVKGTCPKCKS

SEQ ID NO: 74217 - protein, 17 aa, Artificial sequence
  Protein classification predicting sequence
MFLPDRFVKGTCPKCKS

SEQ ID NO: 74218 - protein, 15 aa, Artificial sequence
  Protein classification predicting sequence
ELADPQLYKTFTDAA

SEQ ID NO: 74219 - protein, 14 aa, Artificial sequence
  Protein classification predicting sequence
VIGEAWESREFGKA

SEQ ID NO: 74220 - protein, 8 aa, Artificial sequence
  Protein classification predicting sequence
REIMALAD

SEQ ID NO: 74221 - protein, 29 aa, Artificial sequence
  Protein classification predicting sequence
NLFVHGYVTVNGAKMSKSRGTFIKASTWL

SEQ ID NO: 74222 - protein, 10 aa, Artificial sequence
  Protein classification predicting sequence
FKALYNRIDM

SEQ ID NO: 74223 - protein, 7 aa, Artificial sequence
  Protein classification predicting sequence
YTTIACD

SEQ ID NO: 74224 - protein, 6 aa, Artificial sequence
  Protein classification predicting sequence
LDISYD

SEQ ID NO: 74225 - protein, 9 aa, Artificial sequence
  Protein classification predicting sequence
GWYSVSDEE

SEQ ID NO: 74226 - protein, 9 aa, Artificial sequence
  Protein classification predicting sequence
VIGGKAPSG

SEQ ID NO: 74227 - protein, 22 aa, Artificial sequence
  Protein classification predicting sequence
EVELVKEESYFFRMSKYADRLV

SEQ ID NO: 74228 - protein, 6 aa, Artificial sequence
  Protein classification predicting sequence
AMINKY

SEQ ID NO: 74229 - protein, 6 aa, Artificial sequence
  Protein classification predicting sequence
MSQEHQ

SEQ ID NO: 74230 - protein, 16 aa, Artificial sequence
  Protein classification predicting sequence
MFLPDRFVKGTCPKCK

SEQ ID NO: 74231 - protein, 8 aa, Artificial sequence
  Protein classification predicting sequence
TELIEPKS

SEQ ID NO: 74232 - protein, 23 aa, Artificial sequence
  Protein classification predicting sequence
MLQAWTRSGALQEQVANKMQEWF

SEQ ID NO: 74233 - protein, 13 aa, Artificial sequence
  Protein classification predicting sequence
APGKYFYVWLDAP

SEQ ID NO: 74234 - protein, 5 aa, Artificial sequence
  Protein classification predicting sequence
WKKDS

SEQ ID NO: 74235 - protein, 30 aa, Artificial sequence
  Protein classification predicting sequence
FRKPTNLFVHGYVTVNGAKMSKSRGTFIKA

SEQ ID NO: 74236 - protein, 40 aa, Artificial sequence
  Protein classification predicting sequence
AKLSSRIDDIDLNLEDFVQRVNADIVNKVVNLASRNAGFI

SEQ ID NO: 74237 - protein, 8 aa, Artificial sequence
  Protein classification predicting sequence
LYKTFTDA

SEQ ID NO: 74238 - protein, 15 aa, Artificial sequence
  Protein classification predicting sequence
ANRYVDEQAPWVVAK

SEQ ID NO: 74239 - protein, 8 aa, Artificial sequence
  Protein classification predicting sequence
EAFLNTEL

SEQ ID NO: 74240 - protein, 9 aa, Artificial sequence
  Protein classification predicting sequence
FKALFNRID

SEQ ID NO: 74241 - protein, 8 aa, Artificial sequence
  Protein classification predicting sequence
FDDFAKVD

SEQ ID NO: 74242 - protein, 13 aa, Artificial sequence
  Protein classification predicting sequence
MVANLAPRKMRFG

SEQ ID NO: 74243 - protein, 8 aa, Artificial sequence
  Protein classification predicting sequence
CEVCGATY

SEQ ID NO: 74244 - protein, 7 aa, Artificial sequence
  Protein classification predicting sequence
PTELINP

SEQ ID NO: 74245 - protein, 8 aa, Artificial sequence
  Protein classification predicting sequence
FYVWLDAP

SEQ ID NO: 74246 - protein, 7 aa, Artificial sequence
  Protein classification predicting sequence
PRKMKFG

SEQ ID NO: 74247 - protein, 14 aa, Artificial sequence
  Protein classification predicting sequence
ILEPHEGAQPGMRV

SEQ ID NO: 74248 - protein, 6 aa, Artificial sequence
  Protein classification predicting sequence
YCVSCE

SEQ ID NO: 74249 - protein, 10 aa, Artificial sequence
  Protein classification predicting sequence
YFFKMSKYAD

SEQ ID NO: 74250 - protein, 8 aa, Artificial sequence
  Protein classification predicting sequence
RRNEVISF

SEQ ID NO: 74251 - protein, 13 aa, Artificial sequence
  Protein classification predicting sequence
DLANDLGNLLNRT

SEQ ID NO: 74252 - protein, 7 aa, Artificial sequence
  Protein classification predicting sequence
NKYIDET

SEQ ID NO: 74253 - protein, 5 aa, Artificial sequence
  Protein classification predicting sequence
PIFPR

SEQ ID NO: 74254 - protein, 10 aa, Artificial sequence
  Protein classification predicting sequence
MFLPDRFVKG

SEQ ID NO: 74255 - protein, 13 aa, Artificial sequence
  Protein classification predicting sequence
QWDISRDAPYFGF

SEQ ID NO: 74256 - protein, 12 aa, Artificial sequence
  Protein classification predicting sequence
WDISRDAPYFGF

SEQ ID NO: 74257 - protein, 12 aa, Artificial sequence
  Protein classification predicting sequence
FYVWLDAPIGYM

SEQ ID NO: 74258 - protein, 10 aa, Artificial sequence
  Protein classification predicting sequence
GYMASFKNLC

SEQ ID NO: 74259 - protein, 7 aa, Artificial sequence
  Protein classification predicting sequence
DFVQRVN

SEQ ID NO: 74260 - protein, 13 aa, Artificial sequence
  Protein classification predicting sequence
MVANLAPRKMKFG

SEQ ID NO: 74261 - protein, 8 aa, Artificial sequence
  Protein classification predicting sequence
SEGMILSA

SEQ ID NO: 74262 - protein, 13 aa, Artificial sequence
  Protein classification predicting sequence
KILVTCALPYANG

SEQ ID NO: 74263 - protein, 13 aa, Artificial sequence
  Protein classification predicting sequence
IHLGHMLEHIQAD

SEQ ID NO: 74264 - protein, 17 aa, Artificial sequence
  Protein classification predicting sequence
IHLGHMLEHIQADIWVR

SEQ ID NO: 74265 - protein, 28 aa, Artificial sequence
  Protein classification predicting sequence
SDAELYHFIGKDIVYFHSLFWPAMLEGS

SEQ ID NO: 74266 - protein, 6 aa, Artificial sequence
  Protein classification predicting sequence
NKYIDE

SEQ ID NO: 74267 - protein, 6 aa, Artificial sequence
  Protein classification predicting sequence
LFRVLM

SEQ ID NO: 74268 - protein, 8 aa, Artificial sequence
  Protein classification predicting sequence
KLLRFELD

SEQ ID NO: 74269 - protein, 9 aa, Artificial sequence
  Protein classification predicting sequence
NDLGNLLNR

SEQ ID NO: 74270 - protein, 8 aa, Artificial sequence
  Protein classification predicting sequence
YFFRLSAY

SEQ ID NO: 74271 - protein, 8 aa, Artificial sequence
  Protein classification predicting sequence
IQADIWVR

SEQ ID NO: 74272 - protein, 5 aa, Artificial sequence
  Protein classification predicting sequence
WVRFQ

SEQ ID NO: 74273 - protein, 16 aa, Artificial sequence
  Protein classification predicting sequence
CADDAHGTPIMLKAQQ

SEQ ID NO: 74274 - protein, 26 aa, Artificial sequence
  Protein classification predicting sequence
CADDAHGTPIMLKAQQLGITPEQMIG

SEQ ID NO: 74275 - protein, 10 aa, Artificial sequence
  Protein classification predicting sequence
ESEHYFFDLP

SEQ ID NO: 74276 - protein, 5 aa, Artificial sequence
  Protein classification predicting sequence
WTRSG

SEQ ID NO: 74277 - protein, 6 aa, Artificial sequence
  Protein classification predicting sequence
HGFITV

SEQ ID NO: 74278 - protein, 9 aa, Artificial sequence
  Protein classification predicting sequence
TYLEHLDPE

SEQ ID NO: 74279 - protein, 8 aa, Artificial sequence
  Protein classification predicting sequence
VNSDLVGK

SEQ ID NO: 74280 - protein, 8 aa, Artificial sequence
  Protein classification predicting sequence
LTLDLGGE

SEQ ID NO: 74281 - protein, 8 aa, Artificial sequence
  Protein classification predicting sequence
GGETRQVF

SEQ ID NO: 74282 - protein, 17 aa, Artificial sequence
  Protein classification predicting sequence
YTTIACDVLARYKRLMG

SEQ ID NO: 74283 - protein, 7 aa, Artificial sequence
  Protein classification predicting sequence
QDDIYLG

SEQ ID NO: 74284 - protein, 13 aa, Artificial sequence
  Protein classification predicting sequence
GGIAPSGHEVEWV

SEQ ID NO: 74285 - protein, 7 aa, Artificial sequence
  Protein classification predicting sequence
VEWVEEE

SEQ ID NO: 74286 - protein, 7 aa, Artificial sequence
  Protein classification predicting sequence
PGLEDLA

SEQ ID NO: 74287 - protein, 12 aa, Artificial sequence
  Protein classification predicting sequence
VPSNPKHVVYVW

SEQ ID NO: 74288 - protein, 8 aa, Artificial sequence
  Protein classification predicting sequence
PKHVVYVW

SEQ ID NO: 74289 - protein, 19 aa, Artificial sequence
  Protein classification predicting sequence
MKDGKMSKSKGNVVYPEML

SEQ ID NO: 74290 - protein, 6 aa, Artificial sequence
  Protein classification predicting sequence
RYYLMR

SEQ ID NO: 74291 - protein, 9 aa, Artificial sequence
  Protein classification predicting sequence
EKEWVPEEV

SEQ ID NO: 74292 - protein, 8 aa, Artificial sequence
  Protein classification predicting sequence
RQILSGIA

SEQ ID NO: 74293 - protein, 10 aa, Artificial sequence
  Protein classification predicting sequence
DEEYFTETQL

SEQ ID NO: 74294 - protein, 12 aa, Artificial sequence
  Protein classification predicting sequence
NGKVIGGKAPSG

SEQ ID NO: 74295 - protein, 12 aa, Artificial sequence
  Protein classification predicting sequence
PKHVVYVWIDAL

SEQ ID NO: 74296 - protein, 15 aa, Artificial sequence
  Protein classification predicting sequence
VGKEIVRFHTIYWPI

SEQ ID NO: 74297 - protein, 8 aa, Artificial sequence
  Protein classification predicting sequence
THAPKEIF

SEQ ID NO: 74298 - protein, 8 aa, Artificial sequence
  Protein classification predicting sequence
KGTPIFPR

SEQ ID NO: 74299 - protein, 7 aa, Artificial sequence
  Protein classification predicting sequence
QLGITPE

SEQ ID NO: 74300 - protein, 7 aa, Artificial sequence
  Protein classification predicting sequence
QFYDPVK

SEQ ID NO: 74301 - protein, 8 aa, Artificial sequence
  Protein classification predicting sequence
DFAKVDLR

SEQ ID NO: 74302 - protein, 7 aa, Artificial sequence
  Protein classification predicting sequence
GHISRRS

SEQ ID NO: 74303 - protein, 8 aa, Artificial sequence
  Protein classification predicting sequence
PYFGFEIP

SEQ ID NO: 74304 - protein, 11 aa, Artificial sequence
  Protein classification predicting sequence
HFIGKDILYFH

SEQ ID NO: 74305 - protein, 7 aa, Artificial sequence
  Protein classification predicting sequence
VNSDLVG

SEQ ID NO: 74306 - protein, 21 aa, Artificial sequence
  Protein classification predicting sequence
HGWILMKDGKMSKSKGNVVDP

SEQ ID NO: 74307 - protein, 9 aa, Artificial sequence
  Protein classification predicting sequence
NLKPVKLRG

SEQ ID NO: 74308 - protein, 9 aa, Artificial sequence
  Protein classification predicting sequence
KGTPIFPRL

SEQ ID NO: 74309 - protein, 9 aa, Artificial sequence
  Protein classification predicting sequence
RLKENGFIK

SEQ ID NO: 74310 - protein, 8 aa, Artificial sequence
  Protein classification predicting sequence
FESMLKEW

SEQ ID NO: 74311 - protein, 9 aa, Artificial sequence
  Protein classification predicting sequence
VANKMQEWF

SEQ ID NO: 74312 - protein, 10 aa, Artificial sequence
  Protein classification predicting sequence
KMSKSRGTFI

SEQ ID NO: 74313 - protein, 11 aa, Artificial sequence
  Protein classification predicting sequence
VNLASRNAGFI

SEQ ID NO: 74314 - protein, 5 aa, Artificial sequence
  Protein classification predicting sequence
EHFFF

SEQ ID NO: 74315 - protein, 7 aa, Artificial sequence
  Protein classification predicting sequence
HGTPIML

SEQ ID NO: 74316 - protein, 8 aa, Artificial sequence
  Protein classification predicting sequence
FFKLGECA

SEQ ID NO: 74317 - protein, 7 aa, Artificial sequence
  Protein classification predicting sequence
SGFRTPT

SEQ ID NO: 74318 - protein, 11 aa, Artificial sequence
  Protein classification predicting sequence
SYLEQGLNPEW

SEQ ID NO: 74319 - protein, 6 aa, Artificial sequence
  Protein classification predicting sequence
GLNPEW

SEQ ID NO: 74320 - protein, 10 aa, Artificial sequence
  Protein classification predicting sequence
GLNPEWLRYY

SEQ ID NO: 74321 - protein, 8 aa, Artificial sequence
  Protein classification predicting sequence
ISIDDFAK

SEQ ID NO: 74322 - protein, 8 aa, Artificial sequence
  Protein classification predicting sequence
SEGMVLAA

SEQ ID NO: 74323 - protein, 8 aa, Artificial sequence
  Protein classification predicting sequence
DIFLLSPD

SEQ ID NO: 74324 - protein, 7 aa, Artificial sequence
  Protein classification predicting sequence
APIGYIS

SEQ ID NO: 74325 - protein, 7 aa, Artificial sequence
  Protein classification predicting sequence
EGSDKLL

SEQ ID NO: 74326 - protein, 7 aa, Artificial sequence
  Protein classification predicting sequence
CGKLINA

SEQ ID NO: 74327 - protein, 12 aa, Artificial sequence
  Protein classification predicting sequence
NRGEKMSKSVGN

SEQ ID NO: 74328 - protein, 7 aa, Artificial sequence
  Protein classification predicting sequence
RYFLLRE

SEQ ID NO: 74329 - protein, 10 aa, Artificial sequence
  Protein classification predicting sequence
AGAYLPADIF

SEQ ID NO: 74330 - protein, 7 aa, Artificial sequence
  Protein classification predicting sequence
LYICGSD

SEQ ID NO: 74331 - protein, 5 aa, Artificial sequence
  Protein classification predicting sequence
APRKM

SEQ ID NO: 74332 - protein, 13 aa, Artificial sequence
  Protein classification predicting sequence
ALPYANGSIHLGH

SEQ ID NO: 74333 - protein, 9 aa, Artificial sequence
  Protein classification predicting sequence
FLPDRFVKG

SEQ ID NO: 74334 - protein, 7 aa, Artificial sequence
  Protein classification predicting sequence
QYGDSCE

SEQ ID NO: 74335 - protein, 6 aa, Artificial sequence
  Protein classification predicting sequence
GAQPGM

SEQ ID NO: 74336 - protein, 8 aa, Artificial sequence
  Protein classification predicting sequence
EYEGWYSV

SEQ ID NO: 74337 - protein, 12 aa, Artificial sequence
  Protein classification predicting sequence
EYEGWYSVPDET

SEQ ID NO: 74338 - protein, 10 aa, Artificial sequence
  Protein classification predicting sequence
FGSDGVFTPE

SEQ ID NO: 74339 - protein, 7 aa, Artificial sequence
  Protein classification predicting sequence
DFISRVN

SEQ ID NO: 74340 - protein, 7 aa, Artificial sequence
  Protein classification predicting sequence
FKNLCDK

SEQ ID NO: 74341 - protein, 12 aa, Artificial sequence
  Protein classification predicting sequence
YVWFDAPIGYIS

SEQ ID NO: 74342 - protein, 6 aa, Artificial sequence
  Protein classification predicting sequence
GNLVNR

SEQ ID NO: 74343 - protein, 10 aa, Artificial sequence
  Protein classification predicting sequence
KLDLRVGKII

SEQ ID NO: 74344 - protein, 6 aa, Artificial sequence
  Protein classification predicting sequence
VANLKP

SEQ ID NO: 74345 - protein, 10 aa, Artificial sequence
  Protein classification predicting sequence
ELYHFIGKDI

SEQ ID NO: 74346 - protein, 11 aa, Artificial sequence
  Protein classification predicting sequence
LVTCALPYANG

SEQ ID NO: 74347 - protein, 14 aa, Artificial sequence
  Protein classification predicting sequence
IKNRTISQLYDPEK

SEQ ID NO: 74348 - protein, 8 aa, Artificial sequence
  Protein classification predicting sequence
EHFFFDLP

SEQ ID NO: 74349 - protein, 8 aa, Artificial sequence
  Protein classification predicting sequence
ANKMQEWF

SEQ ID NO: 74350 - protein, 9 aa, Artificial sequence
  Protein classification predicting sequence
RDAPYFGFE

SEQ ID NO: 74351 - protein, 16 aa, Artificial sequence
  Protein classification predicting sequence
FVHGYVTVNGAKMSKS

SEQ ID NO: 74352 - protein, 7 aa, Artificial sequence
  Protein classification predicting sequence
QADIWVR

SEQ ID NO: 74353 - protein, 6 aa, Artificial sequence
  Protein classification predicting sequence
WVRYQR

SEQ ID NO: 74354 - protein, 20 aa, Artificial sequence
  Protein classification predicting sequence
FICADDAHGTPIMLKAQQMG

SEQ ID NO: 74355 - protein, 6 aa, Artificial sequence
  Protein classification predicting sequence
RTISQL

SEQ ID NO: 74356 - protein, 15 aa, Artificial sequence
  Protein classification predicting sequence
MKDSEHFFFDLPQFE

SEQ ID NO: 74357 - protein, 9 aa, Artificial sequence
  Protein classification predicting sequence
LFWPAMLEG

SEQ ID NO: 74358 - protein, 6 aa, Artificial sequence
  Protein classification predicting sequence
GTFIKA

SEQ ID NO: 74359 - protein, 10 aa, Artificial sequence
  Protein classification predicting sequence
GTFIKAGTYL

SEQ ID NO: 74360 - protein, 16 aa, Artificial sequence
  Protein classification predicting sequence
RAIREITALADKANQY

SEQ ID NO: 74361 - protein, 8 aa, Artificial sequence
  Protein classification predicting sequence
GINLFRVL

SEQ ID NO: 74362 - protein, 6 aa, Artificial sequence
  Protein classification predicting sequence
TYLKPV

SEQ ID NO: 74363 - protein, 7 aa, Artificial sequence
  Protein classification predicting sequence
RTEAFLN

SEQ ID NO: 74364 - protein, 9 aa, Artificial sequence
  Protein classification predicting sequence
ALFTRIDPK

SEQ ID NO: 74365 - protein, 9 aa, Artificial sequence
  Protein classification predicting sequence
EASKEDAAA

SEQ ID NO: 74366 - protein, 9 aa, Artificial sequence
  Protein classification predicting sequence
VFSGIKSAY

SEQ ID NO: 74367 - protein, 7 aa, Artificial sequence
  Protein classification predicting sequence
TVMVANL

SEQ ID NO: 74368 - protein, 8 aa, Artificial sequence
  Protein classification predicting sequence
GHIAGAYL

SEQ ID NO: 74369 - protein, 10 aa, Artificial sequence
  Protein classification predicting sequence
FIGKDNIPFH

SEQ ID NO: 74370 - protein, 11 aa, Artificial sequence
  Protein classification predicting sequence
IGGSDEHGVPI

SEQ ID NO: 74371 - protein, 15 aa, Artificial sequence
  Protein classification predicting sequence
VAWPYANGPRHIGHV

SEQ ID NO: 74372 - protein, 8 aa, Artificial sequence
  Protein classification predicting sequence
QLDPADLI

SEQ ID NO: 74373 - protein, 10 aa, Artificial sequence
  Protein classification predicting sequence
DWRPNVLKFS

SEQ ID NO: 74374 - protein, 8 aa, Artificial sequence
  Protein classification predicting sequence
PVEGWQDN

SEQ ID NO: 74375 - protein, 8 aa, Artificial sequence
  Protein classification predicting sequence
GKDNIVFH

SEQ ID NO: 74376 - protein, 12 aa, Artificial sequence
  Protein classification predicting sequence
VSSEFLTMSGSK

SEQ ID NO: 74377 - protein, 6 aa, Artificial sequence
  Protein classification predicting sequence
DTDFTW

SEQ ID NO: 74378 - protein, 7 aa, Artificial sequence
  Protein classification predicting sequence
ALQVVSD

SEQ ID NO: 74379 - protein, 6 aa, Artificial sequence
  Protein classification predicting sequence
EYIQTD

SEQ ID NO: 74380 - protein, 9 aa, Artificial sequence
  Protein classification predicting sequence
FDPEKQMFL

SEQ ID NO: 74381 - protein, 9 aa, Artificial sequence
  Protein classification predicting sequence
KMSKSRGTF

SEQ ID NO: 74382 - protein, 6 aa, Artificial sequence
  Protein classification predicting sequence
GINLFR

SEQ ID NO: 74383 - protein, 8 aa, Artificial sequence
  Protein classification predicting sequence
KGMFLADR

SEQ ID NO: 74384 - protein, 10 aa, Artificial sequence
  Protein classification predicting sequence
TVNGAKMSKS

SEQ ID NO: 74385 - protein, 7 aa, Artificial sequence
  Protein classification predicting sequence
PRKMRFG

SEQ ID NO: 74386 - protein, 12 aa, Artificial sequence
  Protein classification predicting sequence
SEGMVMAAGPGG

SEQ ID NO: 74387 - protein, 7 aa, Artificial sequence
  Protein classification predicting sequence
HLGHMLE

SEQ ID NO: 74388 - protein, 7 aa, Artificial sequence
  Protein classification predicting sequence
HFFFDLP

SEQ ID NO: 74389 - protein, 6 aa, Artificial sequence
  Protein classification predicting sequence
FDDFAK

SEQ ID NO: 74390 - protein, 8 aa, Artificial sequence
  Protein classification predicting sequence
SQGMLLAA

SEQ ID NO: 74391 - protein, 6 aa, Artificial sequence
  Protein classification predicting sequence
ARGDQC

SEQ ID NO: 74392 - protein, 6 aa, Artificial sequence
  Protein classification predicting sequence
TKHWYL

SEQ ID NO: 74393 - protein, 7 aa, Artificial sequence
  Protein classification predicting sequence
GVWIDEA

SEQ ID NO: 74394 - protein, 15 aa, Artificial sequence
  Protein classification predicting sequence
LVKKVTKQAYCEHDK

SEQ ID NO: 74395 - protein, 6 aa, Artificial sequence
  Protein classification predicting sequence
MFLPDR

SEQ ID NO: 74396 - protein, 27 aa, Artificial sequence
  Protein classification predicting sequence
VIHFIGKDNIPFHAIFWPAFLMAYGKY

SEQ ID NO: 74397 - protein, 20 aa, Artificial sequence
  Protein classification predicting sequence
DEEVEAEWNLPYDIPANEYL

SEQ ID NO: 74398 - protein, 12 aa, Artificial sequence
  Protein classification predicting sequence
IMPETRDSDFSF

SEQ ID NO: 74399 - protein, 7 aa, Artificial sequence
  Protein classification predicting sequence
FAKLDLR

SEQ ID NO: 74400 - protein, 15 aa, Artificial sequence
  Protein classification predicting sequence
LVAGLKKYYKPEELL

SEQ ID NO: 74401 - protein, 7 aa, Artificial sequence
  Protein classification predicting sequence
DIWVRFQ

SEQ ID NO: 74402 - protein, 8 aa, Artificial sequence
  Protein classification predicting sequence
AEKEGITP

SEQ ID NO: 74403 - protein, 7 aa, Artificial sequence
  Protein classification predicting sequence
RNVFSGI

SEQ ID NO: 74404 - protein, 12 aa, Artificial sequence
  Protein classification predicting sequence
YPNGKPHIGHAY

SEQ ID NO: 74405 - protein, 19 aa, Artificial sequence
  Protein classification predicting sequence
RFHAVYWPAFLMSAGIELP

SEQ ID NO: 74406 - protein, 6 aa, Artificial sequence
  Protein classification predicting sequence
VSRTTF

SEQ ID NO: 74407 - protein, 8 aa, Artificial sequence
  Protein classification predicting sequence
TYSPTELI

SEQ ID NO: 74408 - protein, 9 aa, Artificial sequence
  Protein classification predicting sequence
APYFGFEIP

SEQ ID NO: 74409 - protein, 7 aa, Artificial sequence
  Protein classification predicting sequence
HFIGKDI

SEQ ID NO: 74410 - protein, 8 aa, Artificial sequence
  Protein classification predicting sequence
YFHTLFWP

SEQ ID NO: 74411 - protein, 13 aa, Artificial sequence
  Protein classification predicting sequence
DLRVALIENAEFV

SEQ ID NO: 74412 - protein, 46 aa, Artificial sequence
  Protein classification predicting sequence
ANRYVDEQAPWVVAKQEGRDADLQAICSMGINLFRVLMTYLKPVLP

SEQ ID NO: 74413 - protein, 36 aa, Artificial sequence
  Protein classification predicting sequence
GSDKLLRLTLDLGGEKRNVFSGIRSAYPDPQALIGR

SEQ ID NO: 74414 - protein, 7 aa, Artificial sequence
  Protein classification predicting sequence
EHQQDFA

SEQ ID NO: 74415 - protein, 7 aa, Artificial sequence
  Protein classification predicting sequence
DQYGDNC

SEQ ID NO: 74416 - protein, 10 aa, Artificial sequence
  Protein classification predicting sequence
TYSPTELINP

SEQ ID NO: 74417 - protein, 9 aa, Artificial sequence
  Protein classification predicting sequence
MLKEWTRSG

SEQ ID NO: 74418 - protein, 7 aa, Artificial sequence
  Protein classification predicting sequence
GLQQWDI

SEQ ID NO: 74419 - protein, 8 aa, Artificial sequence
  Protein classification predicting sequence
YHFIGKDI

SEQ ID NO: 74420 - protein, 9 aa, Artificial sequence
  Protein classification predicting sequence
LRYYYAAKL

SEQ ID NO: 74421 - protein, 8 aa, Artificial sequence
  Protein classification predicting sequence
DFAKIDLR

SEQ ID NO: 74422 - protein, 9 aa, Artificial sequence
  Protein classification predicting sequence
APVTGPLAD

SEQ ID NO: 74423 - protein, 7 aa, Artificial sequence
  Protein classification predicting sequence
DLAVSRT

SEQ ID NO: 74424 - protein, 7 aa, Artificial sequence
  Protein classification predicting sequence
KEIVRFH

SEQ ID NO: 74425 - protein, 64 aa, Artificial sequence
  Protein classification predicting sequence
TFYITTPIYYPSGNLHIGHAYSTVAGDVIARYKRMQGYDVRYLTGTDEHGQKIQEKAQKAGKTE

SEQ ID NO: 74426 - protein, 36 aa, Artificial sequence
  Protein classification predicting sequence
VFERLLKQGDIYLGEYEGWYSVPDETYYTESQLVDP

SEQ ID NO: 74427 - protein, 23 aa, Artificial sequence
  Protein classification predicting sequence
GGKSPDSGHEVELVKEESYFFNI

SEQ ID NO: 74428 - protein, 11 aa, Artificial sequence
  Protein classification predicting sequence
KYTDRLLEFYD

SEQ ID NO: 74429 - protein, 15 aa, Artificial sequence
  Protein classification predicting sequence
SRKNEMINNFIKPGL

SEQ ID NO: 74430 - protein, 9 aa, Artificial sequence
  Protein classification predicting sequence
LIDRYGLDA

SEQ ID NO: 74431 - protein, 36 aa, Artificial sequence
  Protein classification predicting sequence
LIDRYGLDATRYYLMRELPFGSDGVFTPEAFVERTN

SEQ ID NO: 74432 - protein, 11 aa, Artificial sequence
  Protein classification predicting sequence
NYDLANDLGNL

SEQ ID NO: 74433 - protein, 16 aa, Artificial sequence
  Protein classification predicting sequence
DLANDLGNLVNRTISM

SEQ ID NO: 74434 - protein, 9 aa, Artificial sequence
  Protein classification predicting sequence
GELPAYQGP

SEQ ID NO: 74435 - protein, 11 aa, Artificial sequence
  Protein classification predicting sequence
MEAMALETVKS

SEQ ID NO: 74436 - protein, 27 aa, Artificial sequence
  Protein classification predicting sequence
MESLQFSVALSTVWKFISRTNKYIDET

SEQ ID NO: 74437 - protein, 14 aa, Artificial sequence
  Protein classification predicting sequence
MLGNVMAHLVENIR

SEQ ID NO: 74438 - protein, 7 aa, Artificial sequence
  Protein classification predicting sequence
PFLTHAP

SEQ ID NO: 74439 - protein, 7 aa, Artificial sequence
  Protein classification predicting sequence
QLNINNP

SEQ ID NO: 74440 - protein, 14 aa, Artificial sequence
  Protein classification predicting sequence
EAEIAYIKESMQPP

SEQ ID NO: 74441 - protein, 38 aa, Artificial sequence
  Protein classification predicting sequence
DIIGKKVAVVTNLKPAKLMGQKSEGMILSAEKDGVLTL

SEQ ID NO: 74442 - protein, 10 aa, Artificial sequence
  Protein classification predicting sequence
FMAKDNVPFH

SEQ ID NO: 74443 - protein, 10 aa, Artificial sequence
  Protein classification predicting sequence
GHAYTTVAGD

SEQ ID NO: 74444 - protein, 7 aa, Artificial sequence
  Protein classification predicting sequence
YVWVDAL

SEQ ID NO: 74445 - protein, 9 aa, Artificial sequence
  Protein classification predicting sequence
PADVHLVGK

SEQ ID NO: 74446 - protein, 22 aa, Artificial sequence
  Protein classification predicting sequence
VAHVIQPFMMETSAAIMAQLGL

SEQ ID NO: 74447 - protein, 7 aa, Artificial sequence
  Protein classification predicting sequence
SKYADRL

SEQ ID NO: 74448 - protein, 22 aa, Artificial sequence
  Protein classification predicting sequence
YISQGMILSAEHGDQLTVLTVD

SEQ ID NO: 74449 - protein, 9 aa, Artificial sequence
  Protein classification predicting sequence
VANLKPRKM

SEQ ID NO: 74450 - protein, 17 aa, Artificial sequence
  Protein classification predicting sequence
FYITTPIYYPSGKLHIG

SEQ ID NO: 74451 - protein, 8 aa, Artificial sequence
  Protein classification predicting sequence
DEHGQKIQ

SEQ ID NO: 74452 - protein, 13 aa, Artificial sequence
  Protein classification predicting sequence
LANDLGNLLNRTV

SEQ ID NO: 74453 - protein, 8 aa, Artificial sequence
  Protein classification predicting sequence
MINKYFDG

SEQ ID NO: 74454 - protein, 16 aa, Artificial sequence
  Protein classification predicting sequence
HMEAVDYPRALEAVWT

SEQ ID NO: 74455 - protein, 7 aa, Artificial sequence
  Protein classification predicting sequence
PFMMETS

SEQ ID NO: 74456 - protein, 7 aa, Artificial sequence
  Protein classification predicting sequence
DFDKVEI

SEQ ID NO: 74457 - protein, 17 aa, Artificial sequence
  Protein classification predicting sequence
VEIRVAEVKEVSKVEGS

SEQ ID NO: 74458 - protein, 11 aa, Artificial sequence
  Protein classification predicting sequence
YPNEQELVGKK

SEQ ID NO: 74459 - protein, 36 aa, Artificial sequence
  Protein classification predicting sequence
FYITTPIYYPSGKLHIGSAYTTIACDVLARYKRLMG

SEQ ID NO: 74460 - protein, 29 aa, Artificial sequence
  Protein classification predicting sequence
LLAQDDIYLGEYSGWYSVSDEEFFTESQL

SEQ ID NO: 74461 - protein, 25 aa, Artificial sequence
  Protein classification predicting sequence
GGIAPSGHEVEWVSEESYFLRLSKY

SEQ ID NO: 74462 - protein, 25 aa, Artificial sequence
  Protein classification predicting sequence
NFIEPGLEDLAVSRTTFTWGVPVPS

SEQ ID NO: 74463 - protein, 21 aa, Artificial sequence
  Protein classification predicting sequence
PKHVVYVWIDALLNYATALGY

SEQ ID NO: 74464 - protein, 34 aa, Artificial sequence
  Protein classification predicting sequence
NFDKFWNGTVFHMVGKDILRFHSIYWPILLMMLD

SEQ ID NO: 74465 - protein, 33 aa, Artificial sequence
  Protein classification predicting sequence
PDRLIAHGWFVMKDGKMSKSKGNVVYPEMLVER

SEQ ID NO: 74466 - protein, 34 aa, Artificial sequence
  Protein classification predicting sequence
LPVGSDGTFTPEDYVGRINYELANDLGNLLNRTV

SEQ ID NO: 74467 - protein, 7 aa, Artificial sequence
  Protein classification predicting sequence
WGIPAPF

SEQ ID NO: 74468 - protein, 6 aa, Artificial sequence
  Protein classification predicting sequence
ISFDNY

SEQ ID NO: 74469 - protein, 11 aa, Artificial sequence
  Protein classification predicting sequence
LPDRFVKGTCP

SEQ ID NO: 74470 - protein, 6 aa, Artificial sequence
  Protein classification predicting sequence
GTCPYC

SEQ ID NO: 74471 - protein, 10 aa, Artificial sequence
  Protein classification predicting sequence
ARGDQCDNCG

SEQ ID NO: 74472 - protein, 7 aa, Artificial sequence
  Protein classification predicting sequence
LTVNGQK

SEQ ID NO: 74473 - protein, 8 aa, Artificial sequence
  Protein classification predicting sequence
RLGTVLYN

SEQ ID NO: 74474 - protein, 11 aa, Artificial sequence
  Protein classification predicting sequence
VGKEIVRFHTI

SEQ ID NO: 74475 - protein, 7 aa, Artificial sequence
  Protein classification predicting sequence
PDRYIEG

SEQ ID NO: 74476 - protein, 13 aa, Artificial sequence
  Protein classification predicting sequence
ALPYVNNVPHLGN

SEQ ID NO: 74477 - protein, 8 aa, Artificial sequence
  Protein classification predicting sequence
LSADVFAR

SEQ ID NO: 74478 - protein, 8 aa, Artificial sequence
  Protein classification predicting sequence
GKDNIPFH

SEQ ID NO: 74479 - protein, 7 aa, Artificial sequence
  Protein classification predicting sequence
WRFYLLY

SEQ ID NO: 74480 - protein, 19 aa, Artificial sequence
  Protein classification predicting sequence
GLQQWDISRDAPYFGFEIP

SEQ ID NO: 74481 - protein, 29 aa, Artificial sequence
  Protein classification predicting sequence
NVFVHGYVTVNGAKMSKSKGTFVKASTYL

SEQ ID NO: 74482 - protein, 21 aa, Artificial sequence
  Protein classification predicting sequence
VGINLFRVLMTYLKPVMPALA

SEQ ID NO: 74483 - protein, 15 aa, Artificial sequence
  Protein classification predicting sequence
GINLFRVLMTYLKPV

SEQ ID NO: 74484 - protein, 8 aa, Artificial sequence
  Protein classification predicting sequence
ETELSKDP

SEQ ID NO: 74485 - protein, 10 aa, Artificial sequence
  Protein classification predicting sequence
EMAAKEKAEA

SEQ ID NO: 74486 - protein, 11 aa, Artificial sequence
  Protein classification predicting sequence
ISFDNYHSTHS

SEQ ID NO: 74487 - protein, 11 aa, Artificial sequence
  Protein classification predicting sequence
ENRELASHIYL

SEQ ID NO: 74488 - protein, 47 aa, Artificial sequence
  Protein classification predicting sequence
LKKNGFISSRTISQLFDPEKEMFLPDRFVKGTCPKCKSEDQYGDNCD

SEQ ID NO: 74489 - protein, 19 aa, Artificial sequence
  Protein classification predicting sequence
FYVWLDAPIGYMGSFKNLC

SEQ ID NO: 74490 - protein, 7 aa, Artificial sequence
  Protein classification predicting sequence
APWVVAK

SEQ ID NO: 74491 - protein, 8 aa, Artificial sequence
  Protein classification predicting sequence
VPKADKLL

SEQ ID NO: 74492 - protein, 8 aa, Artificial sequence
  Protein classification predicting sequence
FNISYDNY

SEQ ID NO: 74493 - protein, 14 aa, Artificial sequence
  Protein classification predicting sequence
DQYGDNCEVCGATY

SEQ ID NO: 74494 - protein, 11 aa, Artificial sequence
  Protein classification predicting sequence
GAKMSKSRGTF

SEQ ID NO: 74495 - protein, 8 aa, Artificial sequence
  Protein classification predicting sequence
LRYYFAAK

SEQ ID NO: 74496 - protein, 11 aa, Artificial sequence
  Protein classification predicting sequence
RQIFSGIRASY

SEQ ID NO: 74497 - protein, 7 aa, Artificial sequence
  Protein classification predicting sequence
DFVARVN

SEQ ID NO: 74498 - protein, 7 aa, Artificial sequence
  Protein classification predicting sequence
CEAVEGS

SEQ ID NO: 74499 - protein, 11 aa, Artificial sequence
  Protein classification predicting sequence
QASHERDFAAF

SEQ ID NO: 74500 - protein, 7 aa, Artificial sequence
  Protein classification predicting sequence
MFLPDRY

SEQ ID NO: 74501 - protein, 6 aa, Artificial sequence
  Protein classification predicting sequence
VKGTCP

SEQ ID NO: 74502 - protein, 14 aa, Artificial sequence
  Protein classification predicting sequence
TPELRDSEHFFFEV

SEQ ID NO: 74503 - protein, 15 aa, Artificial sequence
  Protein classification predicting sequence
WDISRDAPYFGFEIP

SEQ ID NO: 74504 - protein, 11 aa, Artificial sequence
  Protein classification predicting sequence
HFIGKDIVNFH

SEQ ID NO: 74505 - protein, 5 aa, Artificial sequence
  Protein classification predicting sequence
LFWPA

SEQ ID NO: 74506 - protein, 12 aa, Artificial sequence
  Protein classification predicting sequence
ALRYYFAAKSSG

SEQ ID NO: 74507 - protein, 8 aa, Artificial sequence
  Protein classification predicting sequence
ASAIRQTM

SEQ ID NO: 74508 - protein, 10 aa, Artificial sequence
  Protein classification predicting sequence
LADEANKYID

SEQ ID NO: 74509 - protein, 6 aa, Artificial sequence
  Protein classification predicting sequence
LFTRID

SEQ ID NO: 74510 - protein, 15 aa, Artificial sequence
  Protein classification predicting sequence
VEGSDKLLRFELDAG

SEQ ID NO: 74511 - protein, 17 aa, Artificial sequence
  Protein classification predicting sequence
VVFIANLAPRKMRFGIS

SEQ ID NO: 74512 - protein, 35 aa, Artificial sequence
  Protein classification predicting sequence
TALVTTALPYANGPLHLGHLVGYIQADIWVRARRL

SEQ ID NO: 74513 - protein, 22 aa, Artificial sequence
  Protein classification predicting sequence
TWFVCADDTHGTPIMLAAEKAG

SEQ ID NO: 74514 - protein, 20 aa, Artificial sequence
  Protein classification predicting sequence
SVISGATPELRDSEHFFFEV

SEQ ID NO: 74515 - protein, 24 aa, Artificial sequence
  Protein classification predicting sequence
QPGKYFYVWLDAPIGYLCSFKTLC

SEQ ID NO: 74516 - protein, 8 aa, Artificial sequence
  Protein classification predicting sequence
VSGATPVM

SEQ ID NO: 74517 - protein, 18 aa, Artificial sequence
  Protein classification predicting sequence
ANRYVDEQAPWVVAKQEG

SEQ ID NO: 74518 - protein, 11 aa, Artificial sequence
  Protein classification predicting sequence
FSGIRSAYPDP

SEQ ID NO: 74519 - protein, 6 aa, Artificial sequence
  Protein classification predicting sequence
SEGMVM

SEQ ID NO: 74520 - protein, 9 aa, Artificial sequence
  Protein classification predicting sequence
DTRSPFGYE

SEQ ID NO: 74521 - protein, 12 aa, Artificial sequence
  Protein classification predicting sequence
RVSYDDAITLLQ

SEQ ID NO: 74522 - protein, 12 aa, Artificial sequence
  Protein classification predicting sequence
APEGYGEIIGGS

SEQ ID NO: 74523 - protein, 7 aa, Artificial sequence
  Protein classification predicting sequence
GEIIGGS

SEQ ID NO: 74524 - protein, 10 aa, Artificial sequence
  Protein classification predicting sequence
HVRETIPFPR

SEQ ID NO: 74525 - protein, 10 aa, Artificial sequence
  Protein classification predicting sequence
IPFPRMLHRI

SEQ ID NO: 74526 - protein, 22 aa, Artificial sequence
  Protein classification predicting sequence
IGAWLTNKRSSGKIAFLQLRDG

SEQ ID NO: 74527 - protein, 7 aa, Artificial sequence
  Protein classification predicting sequence
IRNEVIR

SEQ ID NO: 74528 - protein, 10 aa, Artificial sequence
  Protein classification predicting sequence
FGPTFRAEKS

SEQ ID NO: 74529 - protein, 17 aa, Artificial sequence
  Protein classification predicting sequence
CADLLAPEGYGEIIGGS

SEQ ID NO: 74530 - protein, 7 aa, Artificial sequence
  Protein classification predicting sequence
EGAGEMF

SEQ ID NO: 74531 - protein, 7 aa, Artificial sequence
  Protein classification predicting sequence
FGRITYT

SEQ ID NO: 74532 - protein, 8 aa, Artificial sequence
  Protein classification predicting sequence
DFSKDFFG

SEQ ID NO: 74533 - protein, 6 aa, Artificial sequence
  Protein classification predicting sequence
YPKAIK

SEQ ID NO: 74534 - protein, 7 aa, Artificial sequence
  Protein classification predicting sequence
LRDGTGF

SEQ ID NO: 74535 - protein, 6 aa, Artificial sequence
  Protein classification predicting sequence
HVEAEC

SEQ ID NO: 74536 - protein, 8 aa, Artificial sequence
  Protein classification predicting sequence
RKYGSVPH

SEQ ID NO: 74537 - protein, 6 aa, Artificial sequence
  Protein classification predicting sequence
FRAEKS

SEQ ID NO: 74538 - protein, 10 aa, Artificial sequence
  Protein classification predicting sequence
VEGGATLFKL

SEQ ID NO: 74539 - protein, 7 aa, Artificial sequence
  Protein classification predicting sequence
SRTRRHL

SEQ ID NO: 74540 - protein, 11 aa, Artificial sequence
  Protein classification predicting sequence
RFPVEIKSFYM

SEQ ID NO: 74541 - protein, 6 aa, Artificial sequence
  Protein classification predicting sequence
YPLQKK

SEQ ID NO: 74542 - protein, 6 aa, Artificial sequence
  Protein classification predicting sequence
LQTEHE

SEQ ID NO: 74543 - protein, 8 aa, Artificial sequence
  Protein classification predicting sequence
PVFVTDYP

SEQ ID NO: 74544 - protein, 7 aa, Artificial sequence
  Protein classification predicting sequence
GAVARVR

SEQ ID NO: 74545 - protein, 14 aa, Artificial sequence
  Protein classification predicting sequence
FLTVSGQLNGETYA

SEQ ID NO: 74546 - protein, 8 aa, Artificial sequence
  Protein classification predicting sequence
EFWMIEPE

SEQ ID NO: 74547 - protein, 10 aa, Artificial sequence
  Protein classification predicting sequence
YPKEIKAFYM

SEQ ID NO: 74548 - protein, 11 aa, Artificial sequence
  Protein classification predicting sequence
AIHQFFQERGF

SEQ ID NO: 74549 - protein, 10 aa, Artificial sequence
  Protein classification predicting sequence
PKIGEIIGGS

SEQ ID NO: 74550 - protein, 9 aa, Artificial sequence
  Protein classification predicting sequence
EGAGEMFRV

SEQ ID NO: 74551 - protein, 6 aa, Artificial sequence
  Protein classification predicting sequence
EHERYL

SEQ ID NO: 74552 - protein, 40 aa, Artificial sequence
  Protein classification predicting sequence
QTVQVSGWIRNLRDSKAFGFIELNDGSFFKSVQIVFDTEL

SEQ ID NO: 74553 - protein, 177 aa, Artificial sequence
  Protein classification predicting sequence
VDESKDFFGKETNLTVSGQLNAEAYALAFRDVYTFGPTFRAENSNTTRHAAEFWMVEPEIAFAELGDVMNLTEDMLKYAMKYVLEHAPEEMEFFNSFVDKTVLERMNNVINSDFGRITYTEAIKVLQESGADFKYPVEWGIDLQTEHERYLSEEIFKRPVFVTDYPKDIKAFYMRLN

SEQ ID NO: 74554 - protein, 13 aa, Artificial sequence
  Protein classification predicting sequence
YPKDIKAFYMRLN

SEQ ID NO: 74555 - protein, 7 aa, Artificial sequence
  Protein classification predicting sequence
DGKTVAA

SEQ ID NO: 74556 - protein, 7 aa, Artificial sequence
  Protein classification predicting sequence
EGAGQMF

SEQ ID NO: 74557 - protein, 8 aa, Artificial sequence
  Protein classification predicting sequence
RHLAEFWM

SEQ ID NO: 74558 - protein, 8 aa, Artificial sequence
  Protein classification predicting sequence
PVYWGVDL

SEQ ID NO: 74559 - protein, 7 aa, Artificial sequence
  Protein classification predicting sequence
NEDGKTV

SEQ ID NO: 74560 - protein, 24 aa, Artificial sequence
  Protein classification predicting sequence
GAWLANKRSSGKIAFLQLRDGTGF

SEQ ID NO: 74561 - protein, 19 aa, Artificial sequence
  Protein classification predicting sequence
NKRSSGKIAFLQLRDGTGF

SEQ ID NO: 74562 - protein, 13 aa, Artificial sequence
  Protein classification predicting sequence
HGTEFLMDHRHLW

SEQ ID NO: 74563 - protein, 8 aa, Artificial sequence
  Protein classification predicting sequence
IRATYEFF

SEQ ID NO: 74564 - protein, 8 aa, Artificial sequence
  Protein classification predicting sequence
GFDDIEWG

SEQ ID NO: 74565 - protein, 5 aa, Artificial sequence
  Protein classification predicting sequence
KPFYM

SEQ ID NO: 74566 - protein, 9 aa, Artificial sequence
  Protein classification predicting sequence
RQHAIMKIR

SEQ ID NO: 74567 - protein, 9 aa, Artificial sequence
  Protein classification predicting sequence
ELFHTKYFD

SEQ ID NO: 74568 - protein, 10 aa, Artificial sequence
  Protein classification predicting sequence
ESLEIQEQYV

SEQ ID NO: 74569 - protein, 9 aa, Artificial sequence
  Protein classification predicting sequence
GIVKEDERS

SEQ ID NO: 74570 - protein, 8 aa, Artificial sequence
  Protein classification predicting sequence
TKYFDEDA

SEQ ID NO: 74571 - protein, 8 aa, Artificial sequence
  Protein classification predicting sequence
LSQSGQLY

SEQ ID NO: 74572 - protein, 8 aa, Artificial sequence
  Protein classification predicting sequence
FRAEKSKT

SEQ ID NO: 74573 - protein, 10 aa, Artificial sequence
  Protein classification predicting sequence
RHLIEFWMIE

SEQ ID NO: 74574 - protein, 15 aa, Artificial sequence
  Protein classification predicting sequence
RHLIEFWMIEPEMAF

SEQ ID NO: 74575 - protein, 8 aa, Artificial sequence
  Protein classification predicting sequence
LQVQENYV

SEQ ID NO: 74576 - protein, 7 aa, Artificial sequence
  Protein classification predicting sequence
RDTSKLE

SEQ ID NO: 74577 - protein, 7 aa, Artificial sequence
  Protein classification predicting sequence
GWIRTRR

SEQ ID NO: 74578 - protein, 6 aa, Artificial sequence
  Protein classification predicting sequence
LTTGCS

SEQ ID NO: 74579 - protein, 7 aa, Artificial sequence
  Protein classification predicting sequence
RTNTFGA

SEQ ID NO: 74580 - protein, 19 aa, Artificial sequence
  Protein classification predicting sequence
ALSKIYTFGPTFRAENSNT

SEQ ID NO: 74581 - protein, 5 aa, Artificial sequence
  Protein classification predicting sequence
KAFYM

SEQ ID NO: 74582 - protein, 6 aa, Artificial sequence
  Protein classification predicting sequence
YDGSCF

SEQ ID NO: 74583 - protein, 7 aa, Artificial sequence
  Protein classification predicting sequence
LTTGCSV

SEQ ID NO: 74584 - protein, 7 aa, Artificial sequence
  Protein classification predicting sequence
RTNLIGA

SEQ ID NO: 74585 - protein, 8 aa, Artificial sequence
  Protein classification predicting sequence
DLSSEHER

SEQ ID NO: 74586 - protein, 6 aa, Artificial sequence
  Protein classification predicting sequence
VKNYPK

SEQ ID NO: 74587 - protein, 8 aa, Artificial sequence
  Protein classification predicting sequence
KAFYMRLN

SEQ ID NO: 74588 - protein, 7 aa, Artificial sequence
  Protein classification predicting sequence
KTVAAMD

SEQ ID NO: 74589 - protein, 8 aa, Artificial sequence
  Protein classification predicting sequence
TGISNIRD

SEQ ID NO: 74590 - protein, 7 aa, Artificial sequence
  Protein classification predicting sequence
HLRSRTN

SEQ ID NO: 74591 - protein, 7 aa, Artificial sequence
  Protein classification predicting sequence
NDGSFFK

SEQ ID NO: 74592 - protein, 6 aa, Artificial sequence
  Protein classification predicting sequence
AHLRPR

SEQ ID NO: 74593 - protein, 9 aa, Artificial sequence
  Protein classification predicting sequence
LNKEDYWWY

SEQ ID NO: 74594 - protein, 6 aa, Artificial sequence
  Protein classification predicting sequence
GLGFER

SEQ ID NO: 74595 - protein, 7 aa, Artificial sequence
  Protein classification predicting sequence
LVKSLYR

SEQ ID NO: 74596 - protein, 26 aa, Artificial sequence
  Protein classification predicting sequence
SDSDYPLQKKRHTFEYLRTIAHLRPR

SEQ ID NO: 74597 - protein, 11 aa, Artificial sequence
  Protein classification predicting sequence
NAFSATFRVRS

SEQ ID NO: 74598 - protein, 11 aa, Artificial sequence
  Protein classification predicting sequence
NIRDVIPFPRT

SEQ ID NO: 74599 - protein, 9 aa, Artificial sequence
  Protein classification predicting sequence
RDVIPFPRT

SEQ ID NO: 74600 - protein, 13 aa, Artificial sequence
  Protein classification predicting sequence
FGFIELNDGSFFK

SEQ ID NO: 74601 - protein, 8 aa, Artificial sequence
  Protein classification predicting sequence
YPLQKKRH

SEQ ID NO: 74602 - protein, 7 aa, Artificial sequence
  Protein classification predicting sequence
RITYTEA

SEQ ID NO: 74603 - protein, 5 aa, Artificial sequence
  Protein classification predicting sequence
EHERY

SEQ ID NO: 74604 - protein, 5 aa, Artificial sequence
  Protein classification predicting sequence
DYWWY

SEQ ID NO: 74605 - protein, 10 aa, Artificial sequence
  Protein classification predicting sequence
NIRDVIPFPR

SEQ ID NO: 74606 - protein, 12 aa, Artificial sequence
  Protein classification predicting sequence
NIRDVIPFPRTP

SEQ ID NO: 74607 - protein, 7 aa, Artificial sequence
  Protein classification predicting sequence
HLRPRTN

SEQ ID NO: 74608 - protein, 7 aa, Artificial sequence
  Protein classification predicting sequence
VHTPIIT

SEQ ID NO: 74609 - protein, 6 aa, Artificial sequence
  Protein classification predicting sequence
EPEMAF

SEQ ID NO: 74610 - protein, 11 aa, Artificial sequence
  Protein classification predicting sequence
NEDGKTVAAMD

SEQ ID NO: 74611 - protein, 9 aa, Artificial sequence
  Protein classification predicting sequence
DGKTVAAMD

SEQ ID NO: 74612 - protein, 8 aa, Artificial sequence
  Protein classification predicting sequence
GGSQREER

SEQ ID NO: 74613 - protein, 7 aa, Artificial sequence
  Protein classification predicting sequence
TGMANIR

SEQ ID NO: 74614 - protein, 7 aa, Artificial sequence
  Protein classification predicting sequence
LTVSGQL

SEQ ID NO: 74615 - protein, 8 aa, Artificial sequence
  Protein classification predicting sequence
EHERYLAE

SEQ ID NO: 74616 - protein, 6 aa, Artificial sequence
  Protein classification predicting sequence
IKAFYM

SEQ ID NO: 74617 - protein, 9 aa, Artificial sequence
  Protein classification predicting sequence
IGGSQREER

SEQ ID NO: 74618 - protein, 6 aa, Artificial sequence
  Protein classification predicting sequence
EDYWWY

SEQ ID NO: 74619 - protein, 14 aa, Artificial sequence
  Protein classification predicting sequence
YTFGPTFRAENSNT

SEQ ID NO: 74620 - protein, 8 aa, Artificial sequence
  Protein classification predicting sequence
DFAQVDYT

SEQ ID NO: 74621 - protein, 17 aa, Artificial sequence
  Protein classification predicting sequence
NKRSSGKIAFLQLRDGT

SEQ ID NO: 74622 - protein, 6 aa, Artificial sequence
  Protein classification predicting sequence
AFFQGV

SEQ ID NO: 74623 - protein, 7 aa, Artificial sequence
  Protein classification predicting sequence
FKPNFIE

SEQ ID NO: 74624 - protein, 9 aa, Artificial sequence
  Protein classification predicting sequence
GQLYAEAGA

SEQ ID NO: 74625 - protein, 8 aa, Artificial sequence
  Protein classification predicting sequence
DFGSPHET

SEQ ID NO: 74626 - protein, 13 aa, Artificial sequence
  Protein classification predicting sequence
EGAGEMFRVSTLD

SEQ ID NO: 74627 - protein, 20 aa, Artificial sequence
  Protein classification predicting sequence
EGAGEMFRVSTLDMENLPRT

SEQ ID NO: 74628 - protein, 10 aa, Artificial sequence
  Protein classification predicting sequence
DFAQVDYTDA

SEQ ID NO: 74629 - protein, 21 aa, Artificial sequence
  Protein classification predicting sequence
FENPVYWGVDLSSEHERYLAE

SEQ ID NO: 74630 - protein, 12 aa, Artificial sequence
  Protein classification predicting sequence
DLSSEHERYLAE

SEQ ID NO: 74631 - protein, 20 aa, Artificial sequence
  Protein classification predicting sequence
EMGLNKEDYWWYRDLRRYGT

SEQ ID NO: 74632 - protein, 8 aa, Artificial sequence
  Protein classification predicting sequence
PHSGFGLG

SEQ ID NO: 74633 - protein, 12 aa, Artificial sequence
  Protein classification predicting sequence
PHSGFGLGFERL

SEQ ID NO: 74634 - protein, 7 aa, Artificial sequence
  Protein classification predicting sequence
PIITGSD

SEQ ID NO: 74635 - protein, 8 aa, Artificial sequence
  Protein classification predicting sequence
LTVSGQLN

SEQ ID NO: 74636 - protein, 10 aa, Artificial sequence
  Protein classification predicting sequence
YPKDIKAFYM

SEQ ID NO: 74637 - protein, 6 aa, Artificial sequence
  Protein classification predicting sequence
FVVNYP

SEQ ID NO: 74638 - protein, 8 aa, Artificial sequence
  Protein classification predicting sequence
GCSVIVTG

SEQ ID NO: 74639 - protein, 8 aa, Artificial sequence
  Protein classification predicting sequence
GQAVELQA

SEQ ID NO: 74640 - protein, 38 aa, Artificial sequence
  Protein classification predicting sequence
DPDTYPMAAKRHSIEYLREVAHLRPRTNLIGAVARVRH

SEQ ID NO: 74641 - protein, 9 aa, Artificial sequence
  Protein classification predicting sequence
IGAVARVRH

SEQ ID NO: 74642 - protein, 28 aa, Artificial sequence
  Protein classification predicting sequence
TPLITASDTEGAGEMFRVSTLDLENLPR

SEQ ID NO: 74643 - protein, 20 aa, Artificial sequence
  Protein classification predicting sequence
AFATLADNAKLAEDMLKYVF

SEQ ID NO: 74644 - protein, 6 aa, Artificial sequence
  Protein classification predicting sequence
FAQVDY

SEQ ID NO: 74645 - protein, 7 aa, Artificial sequence
  Protein classification predicting sequence
LAEEHFK

SEQ ID NO: 74646 - protein, 7 aa, Artificial sequence
  Protein classification predicting sequence
IKAFYMR

SEQ ID NO: 74647 - protein, 6 aa, Artificial sequence
  Protein classification predicting sequence
VIPFPR

SEQ ID NO: 74648 - protein, 8 aa, Artificial sequence
  Protein classification predicting sequence
YDGSCFDP

SEQ ID NO: 74649 - protein, 26 aa, Artificial sequence
  Protein classification predicting sequence
KTVAAMDVLAPGIGEIIGGSQREERL

SEQ ID NO: 74650 - protein, 7 aa, Artificial sequence
  Protein classification predicting sequence
YVTGVQN

SEQ ID NO: 74651 - protein, 8 aa, Artificial sequence
  Protein classification predicting sequence
KEHGIDFL

SEQ ID NO: 74652 - protein, 7 aa, Artificial sequence
  Protein classification predicting sequence
SKTRRHL

SEQ ID NO: 74653 - protein, 6 aa, Artificial sequence
  Protein classification predicting sequence
FDRPFF

SEQ ID NO: 74654 - protein, 8 aa, Artificial sequence
  Protein classification predicting sequence
APEGYGEI

SEQ ID NO: 74655 - protein, 7 aa, Artificial sequence
  Protein classification predicting sequence
RHLWLRS

SEQ ID NO: 74656 - protein, 6 aa, Artificial sequence
  Protein classification predicting sequence
GGSERE

SEQ ID NO: 74657 - protein, 12 aa, Artificial sequence
  Protein classification predicting sequence
FLQLRDGTAFFQ

SEQ ID NO: 74658 - protein, 9 aa, Artificial sequence
  Protein classification predicting sequence
QETSVYVTG

SEQ ID NO: 74659 - protein, 12 aa, Artificial sequence
  Protein classification predicting sequence
NGFIKFDSPILS

SEQ ID NO: 74660 - protein, 8 aa, Artificial sequence
  Protein classification predicting sequence
PFKRVSYD

SEQ ID NO: 74661 - protein, 8 aa, Artificial sequence
  Protein classification predicting sequence
DEDTDYEH

SEQ ID NO: 74662 - protein, 10 aa, Artificial sequence
  Protein classification predicting sequence
ERMVTFVAGT

SEQ ID NO: 74663 - protein, 9 aa, Artificial sequence
  Protein classification predicting sequence
YPITPKEHG

SEQ ID NO: 74664 - protein, 26 aa, Artificial sequence
  Protein classification predicting sequence
NKRSSGKIAFLQLRDGTGFMQGVVVK

SEQ ID NO: 74665 - protein, 8 aa, Artificial sequence
  Protein classification predicting sequence
ELFHTKYF

SEQ ID NO: 74666 - protein, 9 aa, Artificial sequence
  Protein classification predicting sequence
HRFFNEQGF

SEQ ID NO: 74667 - protein, 19 aa, Artificial sequence
  Protein classification predicting sequence
PVVVKNYPKDIKAFYMRLN

SEQ ID NO: 74668 - protein, 8 aa, Artificial sequence
  Protein classification predicting sequence
VIPFPRTP

SEQ ID NO: 74669 - protein, 11 aa, Artificial sequence
  Protein classification predicting sequence
VIPFPRTPRNA

SEQ ID NO: 74670 - protein, 12 aa, Artificial sequence
  Protein classification predicting sequence
YTFGPTFRAENS

SEQ ID NO: 74671 - protein, 6 aa, Artificial sequence
  Protein classification predicting sequence
LTVSGQ

SEQ ID NO: 74672 - protein, 6 aa, Artificial sequence
  Protein classification predicting sequence
GGSQRE

SEQ ID NO: 74673 - protein, 7 aa, Artificial sequence
  Protein classification predicting sequence
EPEIAFA

SEQ ID NO: 74674 - protein, 6 aa, Artificial sequence
  Protein classification predicting sequence
PKIGEI

SEQ ID NO: 74675 - protein, 7 aa, Artificial sequence
  Protein classification predicting sequence
PILTSND

SEQ ID NO: 74676 - protein, 6 aa, Artificial sequence
  Protein classification predicting sequence
PTFRAE

SEQ ID NO: 74677 - protein, 7 aa, Artificial sequence
  Protein classification predicting sequence
DESKDFF

SEQ ID NO: 74678 - protein, 7 aa, Artificial sequence
  Protein classification predicting sequence
HAAEFWM

SEQ ID NO: 74679 - protein, 6 aa, Artificial sequence
  Protein classification predicting sequence
EPEVAF

SEQ ID NO: 74680 - protein, 7 aa, Artificial sequence
  Protein classification predicting sequence
IPFPRTP

SEQ ID NO: 74681 - protein, 8 aa, Artificial sequence
  Protein classification predicting sequence
LRTIAHLR

SEQ ID NO: 74682 - protein, 6 aa, Artificial sequence
  Protein classification predicting sequence
PGIGEI

SEQ ID NO: 74683 - protein, 9 aa, Artificial sequence
  Protein classification predicting sequence
AGFGLGFER

SEQ ID NO: 74684 - protein, 13 aa, Artificial sequence
  Protein classification predicting sequence
AGFGLGFERFLMY

SEQ ID NO: 74685 - protein, 8 aa, Artificial sequence
  Protein classification predicting sequence
FIELNDGS

SEQ ID NO: 74686 - protein, 7 aa, Artificial sequence
  Protein classification predicting sequence
DYPITPK

SEQ ID NO: 74687 - protein, 16 aa, Artificial sequence
  Protein classification predicting sequence
HGTEFLMDHRHLWLRS

SEQ ID NO: 74688 - protein, 28 aa, Artificial sequence
  Protein classification predicting sequence
HGTEFLMDHRHLWLRSKKQHAVMKIRNE

SEQ ID NO: 74689 - protein, 6 aa, Artificial sequence
  Protein classification predicting sequence
NCKLEL

SEQ ID NO: 74690 - protein, 11 aa, Artificial sequence
  Protein classification predicting sequence
DFGAPHETAIA

SEQ ID NO: 74691 - protein, 9 aa, Artificial sequence
  Protein classification predicting sequence
PKEIKAFYM

SEQ ID NO: 74692 - protein, 6 aa, Artificial sequence
  Protein classification predicting sequence
LQKKRH

SEQ ID NO: 74693 - protein, 8 aa, Artificial sequence
  Protein classification predicting sequence
DLQSEHER

SEQ ID NO: 74694 - protein, 6 aa, Artificial sequence
  Protein classification predicting sequence
VTVRGW

SEQ ID NO: 74695 - protein, 9 aa, Artificial sequence
  Protein classification predicting sequence
RTRRDSKAG

SEQ ID NO: 74696 - protein, 28 aa, Artificial sequence
  Protein classification predicting sequence
DGKTVAAMDVLAPGIGEIIGGSQREERL

SEQ ID NO: 74697 - protein, 11 aa, Artificial sequence
  Protein classification predicting sequence
AVDSEVTVRGW

SEQ ID NO: 74698 - protein, 14 aa, Artificial sequence
  Protein classification predicting sequence
RTRRDSKAGISFLA

SEQ ID NO: 74699 - protein, 12 aa, Artificial sequence
  Protein classification predicting sequence
RHTLAQALHRFF

SEQ ID NO: 74700 - protein, 9 aa, Artificial sequence
  Protein classification predicting sequence
NDDGKTVAA

SEQ ID NO: 74701 - protein, 20 aa, Artificial sequence
  Protein classification predicting sequence
DVLSGKLAVDSEVTVRGWIR

SEQ ID NO: 74702 - protein, 12 aa, Artificial sequence
  Protein classification predicting sequence
RRDSKAGISFLA

SEQ ID NO: 74703 - protein, 18 aa, Artificial sequence
  Protein classification predicting sequence
RHSIEYLREVAHLRPRTN

SEQ ID NO: 74704 - protein, 7 aa, Artificial sequence
  Protein classification predicting sequence
PLITASD

SEQ ID NO: 74705 - protein, 6 aa, Artificial sequence
  Protein classification predicting sequence
VEWGID

SEQ ID NO: 74706 - protein, 6 aa, Artificial sequence
  Protein classification predicting sequence
SSEHER

SEQ ID NO: 74707 - protein, 25 aa, Artificial sequence
  Protein classification predicting sequence
EVFPPILVTGAVEGGATLFKLKYFD

SEQ ID NO: 74708 - protein, 12 aa, Artificial sequence
  Protein classification predicting sequence
ERLVAWVLKLDH

SEQ ID NO: 74709 - protein, 7 aa, Artificial sequence
  Protein classification predicting sequence
RTRRDSK

SEQ ID NO: 74710 - protein, 7 aa, Artificial sequence
  Protein classification predicting sequence
EVTVRGW

SEQ ID NO: 74711 - protein, 13 aa, Artificial sequence
  Protein classification predicting sequence
VTGKVVASPGQGQ

SEQ ID NO: 74712 - protein, 9 aa, Artificial sequence
  Protein classification predicting sequence
IKAFYMRLN

SEQ ID NO: 74713 - protein, 45 aa, Artificial sequence
  Protein classification predicting sequence
EVTVRGWVRTRRDSKAGISFLAVYDGSCFDPVQAVINNSLPNYNE

SEQ ID NO: 74714 - protein, 57 aa, Artificial sequence
  Protein classification predicting sequence
KVEVAGWVEDPDTYPMAAKRHSIEYLREVAHLRPRTNLIGAVARVRHTLAQALHRFF

SEQ ID NO: 74715 - protein, 40 aa, Artificial sequence
  Protein classification predicting sequence
EQGFFWVSTPLITASDTEGAGEMFRVSTLDLENLPRNDQG

SEQ ID NO: 74716 - protein, 63 aa, Artificial sequence
  Protein classification predicting sequence
VDFDKDFFGKESFLTVSGQLNGETYACALSKIYTFGPTFRAENSNTSRHLAEFWMLEPEVAFA

SEQ ID NO: 74717 - protein, 9 aa, Artificial sequence
  Protein classification predicting sequence
SGREFEFPV

SEQ ID NO: 74718 - protein, 13 aa, Artificial sequence
  Protein classification predicting sequence
WYRDLRRYGTVPH

SEQ ID NO: 74719 - protein, 29 aa, Artificial sequence
  Protein classification predicting sequence
WYRDLRRYGTVPHAGFGLGFERLVSYVTG

SEQ ID NO: 74720 - protein, 6 aa, Artificial sequence
  Protein classification predicting sequence
VTIGAW

SEQ ID NO: 74721 - protein, 8 aa, Artificial sequence
  Protein classification predicting sequence
ITQESSLY

SEQ ID NO: 74722 - protein, 22 aa, Artificial sequence
  Protein classification predicting sequence
TGTITEDNRSDLGYEMQVKSIE

SEQ ID NO: 74723 - protein, 39 aa, Artificial sequence
  Protein classification predicting sequence
EAHDYPITPKNHGTEFLMDHRHLWLRSKKQHAVMKIRNE

SEQ ID NO: 74724 - protein, 23 aa, Artificial sequence
  Protein classification predicting sequence
DPPILTASAPEGTSELFHTKYFD

SEQ ID NO: 74725 - protein, 18 aa, Artificial sequence
  Protein classification predicting sequence
EMAFTNHAESLEIQEQYV

SEQ ID NO: 74726 - protein, 22 aa, Artificial sequence
  Protein classification predicting sequence
KLEKVATPFPRISYDDAIEFLK

SEQ ID NO: 74727 - protein, 46 aa, Artificial sequence
  Protein classification predicting sequence
EGFDDIEWGEDFGAPHETAIANHYDLPVFITNYPTKIKPFYMQPNP

SEQ ID NO: 74728 - protein, 9 aa, Artificial sequence
  Protein classification predicting sequence
GEIIGGSER

SEQ ID NO: 74729 - protein, 8 aa, Artificial sequence
  Protein classification predicting sequence
DLELLEQR

SEQ ID NO: 74730 - protein, 15 aa, Artificial sequence
  Protein classification predicting sequence
GFGLGLERTVAWISG

SEQ ID NO: 74731 - protein, 65 aa, Artificial sequence
  Protein classification predicting sequence
YDALVAKMDELGMDKSEYDFYLDLRKYGSVPHGGFGIGIERMVTFVAGTKHIREAIPFPRMLHRI

SEQ ID NO: 74732 - protein, 19 aa, Artificial sequence
  Protein classification predicting sequence
EVTIGAWVANKSGKGKIAF

SEQ ID NO: 74733 - protein, 9 aa, Artificial sequence
  Protein classification predicting sequence
YEFFDQNGF

SEQ ID NO: 74734 - protein, 8 aa, Artificial sequence
  Protein classification predicting sequence
KFDSPILS

SEQ ID NO: 74735 - protein, 8 aa, Artificial sequence
  Protein classification predicting sequence
LFETDYFG

SEQ ID NO: 74736 - protein, 31 aa, Artificial sequence
  Protein classification predicting sequence
GRVFDFGPVFRAEKSKTRRHLTEFWMMDAEY

SEQ ID NO: 74737 - protein, 10 aa, Artificial sequence
  Protein classification predicting sequence
SLDLQEAYVK

SEQ ID NO: 74738 - protein, 18 aa, Artificial sequence
  Protein classification predicting sequence
PFKRVSYDDAITLLQEHE

SEQ ID NO: 74739 - protein, 12 aa, Artificial sequence
  Protein classification predicting sequence
KAFYMKPVPGNP

SEQ ID NO: 74740 - protein, 6 aa, Artificial sequence
  Protein classification predicting sequence
YGSVPH

SEQ ID NO: 74741 - protein, 11 aa, Artificial sequence
  Protein classification predicting sequence
GLEKFDVIKRL

SEQ ID NO: 74742 - protein, 16 aa, Artificial sequence
  Protein classification predicting sequence
NAAEDSTELFETDYFG

SEQ ID NO: 74743 - protein, 11 aa, Artificial sequence
  Protein classification predicting sequence
QGVLDRAPQAL

SEQ ID NO: 74744 - protein, 14 aa, Artificial sequence
  Protein classification predicting sequence
YDALVAKMDELGMD

SEQ ID NO: 74745 - protein, 8 aa, Artificial sequence
  Protein classification predicting sequence
YLDLRKYG

SEQ ID NO: 74746 - protein, 6 aa, Artificial sequence
  Protein classification predicting sequence
YGTVPH

SEQ ID NO: 74747 - protein, 16 aa, Artificial sequence
  Protein classification predicting sequence
VPHGGFGIGIERMVTF

SEQ ID NO: 74748 - protein, 19 aa, Artificial sequence
  Protein classification predicting sequence
AGTKHIREAIPFPRMLHRI

SEQ ID NO: 74749 - protein, 27 aa, Artificial sequence
  Protein classification predicting sequence
QETSVYVTGIVKEDERSKFGYELDITD

SEQ ID NO: 74750 - protein, 21 aa, Artificial sequence
  Protein classification predicting sequence
DYEHLEHGDDFGSPHETWISN

SEQ ID NO: 74751 - protein, 7 aa, Artificial sequence
  Protein classification predicting sequence
EGGATLF

SEQ ID NO: 74752 - protein, 7 aa, Artificial sequence
  Protein classification predicting sequence
LSQSGQL

SEQ ID NO: 74753 - protein, 7 aa, Artificial sequence
  Protein classification predicting sequence
AMALGRV

SEQ ID NO: 74754 - protein, 8 aa, Artificial sequence
  Protein classification predicting sequence
DFGAPHET

SEQ ID NO: 74755 - protein, 7 aa, Artificial sequence
  Protein classification predicting sequence
ERTVAWI

SEQ ID NO: 74756 - protein, 6 aa, Artificial sequence
  Protein classification predicting sequence
EHVRET

SEQ ID NO: 74757 - protein, 9 aa, Artificial sequence
  Protein classification predicting sequence
PFPRLLNRL

SEQ ID NO: 74758 - protein, 8 aa, Artificial sequence
  Protein classification predicting sequence
GFGLGFER

SEQ ID NO: 74759 - protein, 16 aa, Artificial sequence
  Protein classification predicting sequence
PSFRAEKSRTRRHLTE

SEQ ID NO: 74760 - protein, 7 aa, Artificial sequence
  Protein classification predicting sequence
TRRHLTE

SEQ ID NO: 74761 - protein, 6 aa, Artificial sequence
  Protein classification predicting sequence
RHLWLR

SEQ ID NO: 74762 - protein, 7 aa, Artificial sequence
  Protein classification predicting sequence
EGTTELF

SEQ ID NO: 74763 - protein, 7 aa, Artificial sequence
  Protein classification predicting sequence
FFQERGF

SEQ ID NO: 74764 - protein, 23 aa, Artificial sequence
  Protein classification predicting sequence
YTFGPTFRAENSNTSRHLAEFWM

SEQ ID NO: 74765 - protein, 9 aa, Artificial sequence
  Protein classification predicting sequence
GFGLGFERL

SEQ ID NO: 74766 - protein, 18 aa, Artificial sequence
  Protein classification predicting sequence
YTFGPTFRAENSNTSRHL

SEQ ID NO: 74767 - protein, 8 aa, Artificial sequence
  Protein classification predicting sequence
AHLRPRTN

SEQ ID NO: 74768 - protein, 9 aa, Artificial sequence
  Protein classification predicting sequence
TFGPTFRAE

SEQ ID NO: 74769 - protein, 6 aa, Artificial sequence
  Protein classification predicting sequence
DTYPMA

SEQ ID NO: 74770 - protein, 6 aa, Artificial sequence
  Protein classification predicting sequence
QAIHRF

SEQ ID NO: 74771 - protein, 13 aa, Artificial sequence
  Protein classification predicting sequence
LTVSGQLNAEAYA

SEQ ID NO: 74772 - protein, 9 aa, Artificial sequence
  Protein classification predicting sequence
ERRDDLEFF

SEQ ID NO: 74773 - protein, 5 aa, Artificial sequence
  Protein classification predicting sequence
TYPMA

SEQ ID NO: 74774 - protein, 7 aa, Artificial sequence
  Protein classification predicting sequence
EPEVAFA

SEQ ID NO: 74775 - protein, 16 aa, Artificial sequence
  Protein classification predicting sequence
VKNYPKDIKAFYMRMN

SEQ ID NO: 74776 - protein, 18 aa, Artificial sequence
  Protein classification predicting sequence
EVLKLTTGCSVEVTGKIV

SEQ ID NO: 74777 - protein, 12 aa, Artificial sequence
  Protein classification predicting sequence
AKLAEDMLKYVF

SEQ ID NO: 74778 - protein, 6 aa, Artificial sequence
  Protein classification predicting sequence
VYDGSC

SEQ ID NO: 74779 - protein, 6 aa, Artificial sequence
  Protein classification predicting sequence
WYRDLR

SEQ ID NO: 74780 - protein, 8 aa, Artificial sequence
  Protein classification predicting sequence
GQSFEIQA

SEQ ID NO: 74781 - protein, 6 aa, Artificial sequence
  Protein classification predicting sequence
GWVEDP

SEQ ID NO: 74782 - protein, 8 aa, Artificial sequence
  Protein classification predicting sequence
DLQTEHER

SEQ ID NO: 74783 - protein, 12 aa, Artificial sequence
  Protein classification predicting sequence
RHLAEFWMIEPE

SEQ ID NO: 74784 - protein, 19 aa, Artificial sequence
  Protein classification predicting sequence
VYVCGLSNIRDAIPYPRAP

SEQ ID NO: 74785 - protein, 6 aa, Artificial sequence
  Protein classification predicting sequence
MLKYVF

SEQ ID NO: 74786 - protein, 7 aa, Artificial sequence
  Protein classification predicting sequence
MKDAYSF

SEQ ID NO: 74787 - protein, 7 aa, Artificial sequence
  Protein classification predicting sequence
LGPTHEE

SEQ ID NO: 74788 - protein, 7 aa, Artificial sequence
  Protein classification predicting sequence
GDPSPDG

SEQ ID NO: 74789 - protein, 7 aa, Artificial sequence
  Protein classification predicting sequence
REFIMKD

SEQ ID NO: 74790 - protein, 11 aa, Artificial sequence
  Protein classification predicting sequence
KFRDEIRPRFG

SEQ ID NO: 74791 - protein, 7 aa, Artificial sequence
  Protein classification predicting sequence
RDEIRPR

SEQ ID NO: 74792 - protein, 7 aa, Artificial sequence
  Protein classification predicting sequence
MGCYGIG

SEQ ID NO: 74793 - protein, 8 aa, Artificial sequence
  Protein classification predicting sequence
LRFDDTNP

SEQ ID NO: 74794 - protein, 5 aa, Artificial sequence
  Protein classification predicting sequence
WCIYP

SEQ ID NO: 74795 - protein, 6 aa, Artificial sequence
  Protein classification predicting sequence
PHQYEF

SEQ ID NO: 74796 - protein, 10 aa, Artificial sequence
  Protein classification predicting sequence
CNLRFDDTNP

SEQ ID NO: 74797 - protein, 10 aa, Artificial sequence
  Protein classification predicting sequence
EQIREYRGTL

SEQ ID NO: 74798 - protein, 7 aa, Artificial sequence
  Protein classification predicting sequence
ACLRAKI

SEQ ID NO: 74799 - protein, 7 aa, Artificial sequence
  Protein classification predicting sequence
IYPMYDF

SEQ ID NO: 74800 - protein, 6 aa, Artificial sequence
  Protein classification predicting sequence
IGVTKQ

SEQ ID NO: 74801 - protein, 7 aa, Artificial sequence
  Protein classification predicting sequence
GKNSPYR

SEQ ID NO: 74802 - protein, 10 aa, Artificial sequence
  Protein classification predicting sequence
GHAKSICLNF

SEQ ID NO: 74803 - protein, 7 aa, Artificial sequence
  Protein classification predicting sequence
QYEFSRL

SEQ ID NO: 74804 - protein, 9 aa, Artificial sequence
  Protein classification predicting sequence
SKRKLNLLV

SEQ ID NO: 74805 - protein, 5 aa, Artificial sequence
  Protein classification predicting sequence
GVIHW

SEQ ID NO: 74806 - protein, 9 aa, Artificial sequence
  Protein classification predicting sequence
QFEREGYFC

SEQ ID NO: 74807 - protein, 7 aa, Artificial sequence
  Protein classification predicting sequence
IIDEDLA

SEQ ID NO: 74808 - protein, 6 aa, Artificial sequence
  Protein classification predicting sequence
GQCNLR

SEQ ID NO: 74809 - protein, 15 aa, Artificial sequence
  Protein classification predicting sequence
KIDMASGNINLRDPA

SEQ ID NO: 74810 - protein, 7 aa, Artificial sequence
  Protein classification predicting sequence
THCISDA

SEQ ID NO: 74811 - protein, 7 aa, Artificial sequence
  Protein classification predicting sequence
LRAKIDM

SEQ ID NO: 74812 - protein, 9 aa, Artificial sequence
  Protein classification predicting sequence
TGDKWCIYP

SEQ ID NO: 74813 - protein, 17 aa, Artificial sequence
  Protein classification predicting sequence
CIREDLNENAPRAMAVI

SEQ ID NO: 74814 - protein, 16 aa, Artificial sequence
  Protein classification predicting sequence
PADGRKVKGVIHWVSA

SEQ ID NO: 74815 - protein, 7 aa, Artificial sequence
  Protein classification predicting sequence
QFEREGY

SEQ ID NO: 74816 - protein, 24 aa, Artificial sequence
  Protein classification predicting sequence
TRFPPEPNGYLHIGHAKSICLNFG

SEQ ID NO: 74817 - protein, 5 aa, Artificial sequence
  Protein classification predicting sequence
CTLEF

SEQ ID NO: 74818 - protein, 16 aa, Artificial sequence
  Protein classification predicting sequence
CTLEFQDNRRLYDWVL

SEQ ID NO: 74819 - protein, 9 aa, Artificial sequence
  Protein classification predicting sequence
TRFPPEPNG

SEQ ID NO: 74820 - protein, 7 aa, Artificial sequence
  Protein classification predicting sequence
SDYFDQL

SEQ ID NO: 74821 - protein, 7 aa, Artificial sequence
  Protein classification predicting sequence
APRAMAV

SEQ ID NO: 74822 - protein, 5 aa, Artificial sequence
  Protein classification predicting sequence
FQFER

SEQ ID NO: 74823 - protein, 9 aa, Artificial sequence
  Protein classification predicting sequence
FQFERLGYF

SEQ ID NO: 74824 - protein, 6 aa, Artificial sequence
  Protein classification predicting sequence
VFNRTV

SEQ ID NO: 74825 - protein, 10 aa, Artificial sequence
  Protein classification predicting sequence
KIDMASGNIN

SEQ ID NO: 74826 - protein, 9 aa, Artificial sequence
  Protein classification predicting sequence
LYDWVLDNI

SEQ ID NO: 74827 - protein, 7 aa, Artificial sequence
  Protein classification predicting sequence
GYFVTDR

SEQ ID NO: 74828 - protein, 7 aa, Artificial sequence
  Protein classification predicting sequence
NINLRDP

SEQ ID NO: 74829 - protein, 7 aa, Artificial sequence
  Protein classification predicting sequence
LYDWVLD

SEQ ID NO: 74830 - protein, 7 aa, Artificial sequence
  Protein classification predicting sequence
VMSKRKL

SEQ ID NO: 74831 - protein, 9 aa, Artificial sequence
  Protein classification predicting sequence
VDGWNDPRM

SEQ ID NO: 74832 - protein, 6 aa, Artificial sequence
  Protein classification predicting sequence
YRIKFA

SEQ ID NO: 74833 - protein, 10 aa, Artificial sequence
  Protein classification predicting sequence
QYEFSRLNLE

SEQ ID NO: 74834 - protein, 9 aa, Artificial sequence
  Protein classification predicting sequence
RIGVTKQDN

SEQ ID NO: 74835 - protein, 11 aa, Artificial sequence
  Protein classification predicting sequence
PADGRKVKGVI

SEQ ID NO: 74836 - protein, 7 aa, Artificial sequence
  Protein classification predicting sequence
SLVIKQG

SEQ ID NO: 74837 - protein, 6 aa, Artificial sequence
  Protein classification predicting sequence
WLGFEW

SEQ ID NO: 74838 - protein, 29 aa, Artificial sequence
  Protein classification predicting sequence
VEGWDDPRMPTISGLRRRGYTAASIREFC

SEQ ID NO: 74839 - protein, 14 aa, Artificial sequence
  Protein classification predicting sequence
REFCRRIGVTKQDN

SEQ ID NO: 74840 - protein, 6 aa, Artificial sequence
  Protein classification predicting sequence
LESCIR

SEQ ID NO: 74841 - protein, 12 aa, Artificial sequence
  Protein classification predicting sequence
DLNENAPRAMAV

SEQ ID NO: 74842 - protein, 7 aa, Artificial sequence
  Protein classification predicting sequence
RLYDRLF

SEQ ID NO: 74843 - protein, 12 aa, Artificial sequence
  Protein classification predicting sequence
HHQTGDKWCIYP

SEQ ID NO: 74844 - protein, 6 aa, Artificial sequence
  Protein classification predicting sequence
CTLEFE

SEQ ID NO: 74845 - protein, 7 aa, Artificial sequence
  Protein classification predicting sequence
HRPLYDW

SEQ ID NO: 74846 - protein, 9 aa, Artificial sequence
  Protein classification predicting sequence
QYEFSRLNL

SEQ ID NO: 74847 - protein, 10 aa, Artificial sequence
  Protein classification predicting sequence
LYRIRHAHHH

SEQ ID NO: 74848 - protein, 9 aa, Artificial sequence
  Protein classification predicting sequence
PEDRFQFER

SEQ ID NO: 74849 - protein, 8 aa, Artificial sequence
  Protein classification predicting sequence
TVMSKRKL

SEQ ID NO: 74850 - protein, 9 aa, Artificial sequence
  Protein classification predicting sequence
SKRKLLQLV

SEQ ID NO: 74851 - protein, 9 aa, Artificial sequence
  Protein classification predicting sequence
GWDDPRMPT

SEQ ID NO: 74852 - protein, 6 aa, Artificial sequence
  Protein classification predicting sequence
PGKNSP

SEQ ID NO: 74853 - protein, 55 aa, Artificial sequence
  Protein classification predicting sequence
GKEVRLRNAYVIKAERVEKDAEGNITTIFCTYDADTLSKDPADGRKVKGVIHWVS

SEQ ID NO: 74854 - protein, 16 aa, Artificial sequence
  Protein classification predicting sequence
DFLSVINPESLVIKQG

SEQ ID NO: 74855 - protein, 20 aa, Artificial sequence
  Protein classification predicting sequence
AVAGKAFQFEREGYFCLDSR

SEQ ID NO: 74856 - protein, 61 aa, Artificial sequence
  Protein classification predicting sequence
GKEVRLRNAYVIKAERVEKDAEGNITTIFCTYDADTLSKDPADGRKVKGVIHWVSAAHALP

SEQ ID NO: 74857 - protein, 7 aa, Artificial sequence
  Protein classification predicting sequence
RPSNFIR

SEQ ID NO: 74858 - protein, 10 aa, Artificial sequence
  Protein classification predicting sequence
ELINKGLAYV

SEQ ID NO: 74859 - protein, 7 aa, Artificial sequence
  Protein classification predicting sequence
REYRGTL

SEQ ID NO: 74860 - protein, 7 aa, Artificial sequence
  Protein classification predicting sequence
ASIREFC

SEQ ID NO: 74861 - protein, 8 aa, Artificial sequence
  Protein classification predicting sequence
TKQENMIE

SEQ ID NO: 74862 - protein, 8 aa, Artificial sequence
  Protein classification predicting sequence
NFIRQIID

SEQ ID NO: 74863 - protein, 8 aa, Artificial sequence
  Protein classification predicting sequence
REYRGTLT

SEQ ID NO: 74864 - protein, 9 aa, Artificial sequence
  Protein classification predicting sequence
KWCIYPMYD

SEQ ID NO: 74865 - protein, 6 aa, Artificial sequence
  Protein classification predicting sequence
EGITHS

SEQ ID NO: 74866 - protein, 13 aa, Artificial sequence
  Protein classification predicting sequence
IREFCKRIGVTKQ

SEQ ID NO: 74867 - protein, 9 aa, Artificial sequence
  Protein classification predicting sequence
DPVKLVIEN

SEQ ID NO: 74868 - protein, 9 aa, Artificial sequence
  Protein classification predicting sequence
NHPNKPEMG

SEQ ID NO: 74869 - protein, 8 aa, Artificial sequence
  Protein classification predicting sequence
AYVIKAER

SEQ ID NO: 74870 - protein, 13 aa, Artificial sequence
  Protein classification predicting sequence
GRKVKGVIHWVSA

SEQ ID NO: 74871 - protein, 6 aa, Artificial sequence
  Protein classification predicting sequence
GYFCAD

SEQ ID NO: 74872 - protein, 7 aa, Artificial sequence
  Protein classification predicting sequence
KEDIEYV

SEQ ID NO: 74873 - protein, 6 aa, Artificial sequence
  Protein classification predicting sequence
SIKNDV

SEQ ID NO: 74874 - protein, 9 aa, Artificial sequence
  Protein classification predicting sequence
KGLAYVDEL

SEQ ID NO: 74875 - protein, 9 aa, Artificial sequence
  Protein classification predicting sequence
LRAKIDMAS

SEQ ID NO: 74876 - protein, 9 aa, Artificial sequence
  Protein classification predicting sequence
DDTNPAKED

SEQ ID NO: 74877 - protein, 6 aa, Artificial sequence
  Protein classification predicting sequence
EFSRLN

SEQ ID NO: 74878 - protein, 6 aa, Artificial sequence
  Protein classification predicting sequence
FIRQII

SEQ ID NO: 74879 - protein, 6 aa, Artificial sequence
  Protein classification predicting sequence
WLGFHW

SEQ ID NO: 74880 - protein, 10 aa, Artificial sequence
  Protein classification predicting sequence
SDAIEGITHS

SEQ ID NO: 74881 - protein, 6 aa, Artificial sequence
  Protein classification predicting sequence
IHWVSA

SEQ ID NO: 74882 - protein, 17 aa, Artificial sequence
  Protein classification predicting sequence
TRFPPEPNGYLHIGHAK

SEQ ID NO: 74883 - protein, 8 aa, Artificial sequence
  Protein classification predicting sequence
PPKGWKRL

SEQ ID NO: 74884 - protein, 6 aa, Artificial sequence
  Protein classification predicting sequence
YDFTHC

SEQ ID NO: 74885 - protein, 31 aa, Artificial sequence
  Protein classification predicting sequence
ACLRAKIDMASPFIVMRDPVLYRIKFAEHHQ

SEQ ID NO: 74886 - protein, 6 aa, Artificial sequence
  Protein classification predicting sequence
MSKRKL

SEQ ID NO: 74887 - protein, 13 aa, Artificial sequence
  Protein classification predicting sequence
MSKRKLNQLVTEK

SEQ ID NO: 74888 - protein, 7 aa, Artificial sequence
  Protein classification predicting sequence
TMPNHPN

SEQ ID NO: 74889 - protein, 8 aa, Artificial sequence
  Protein classification predicting sequence
WFSETSLY

SEQ ID NO: 74890 - protein, 8 aa, Artificial sequence
  Protein classification predicting sequence
RVLIKNDG

SEQ ID NO: 74891 - protein, 8 aa, Artificial sequence
  Protein classification predicting sequence
RYFFAMRS

SEQ ID NO: 74892 - protein, 6 aa, Artificial sequence
  Protein classification predicting sequence
QYAHAR

SEQ ID NO: 74893 - protein, 9 aa, Artificial sequence
  Protein classification predicting sequence
QYAHARVCS

SEQ ID NO: 74894 - protein, 7 aa, Artificial sequence
  Protein classification predicting sequence
KMSKRTG

SEQ ID NO: 74895 - protein, 8 aa, Artificial sequence
  Protein classification predicting sequence
VIDYSSPN

SEQ ID NO: 74896 - protein, 6 aa, Artificial sequence
  Protein classification predicting sequence
TMIGNS

SEQ ID NO: 74897 - protein, 8 aa, Artificial sequence
  Protein classification predicting sequence
GDWGTQFG

SEQ ID NO: 74898 - protein, 11 aa, Artificial sequence
  Protein classification predicting sequence
GDWGTQFGKLI

SEQ ID NO: 74899 - protein, 6 aa, Artificial sequence
  Protein classification predicting sequence
AYKKWG

SEQ ID NO: 74900 - protein, 6 aa, Artificial sequence
  Protein classification predicting sequence
GEAFYN

SEQ ID NO: 74901 - protein, 6 aa, Artificial sequence
  Protein classification predicting sequence
KSDGAT

SEQ ID NO: 74902 - protein, 7 aa, Artificial sequence
  Protein classification predicting sequence
IYATRDL

SEQ ID NO: 74903 - protein, 8 aa, Artificial sequence
  Protein classification predicting sequence
AQSFNKYY

SEQ ID NO: 74904 - protein, 9 aa, Artificial sequence
  Protein classification predicting sequence
GHLRSTIIG

SEQ ID NO: 74905 - protein, 6 aa, Artificial sequence
  Protein classification predicting sequence
GESFYN

SEQ ID NO: 74906 - protein, 9 aa, Artificial sequence
  Protein classification predicting sequence
ARIQSILRK

SEQ ID NO: 74907 - protein, 9 aa, Artificial sequence
  Protein classification predicting sequence
SSPNIAKPF

SEQ ID NO: 74908 - protein, 9 aa, Artificial sequence
  Protein classification predicting sequence
LGDWGKQFG

SEQ ID NO: 74909 - protein, 7 aa, Artificial sequence
  Protein classification predicting sequence
VINVIGA

SEQ ID NO: 74910 - protein, 10 aa, Artificial sequence
  Protein classification predicting sequence
PYLQYTYARA

SEQ ID NO: 74911 - protein, 7 aa, Artificial sequence
  Protein classification predicting sequence
AGPGFIN

SEQ ID NO: 74912 - protein, 8 aa, Artificial sequence
  Protein classification predicting sequence
EYYINDAG

SEQ ID NO: 74913 - protein, 9 aa, Artificial sequence
  Protein classification predicting sequence
KSDGSYTYF

SEQ ID NO: 74914 - protein, 11 aa, Artificial sequence
  Protein classification predicting sequence
GDWGTQFGMLI

SEQ ID NO: 74915 - protein, 7 aa, Artificial sequence
  Protein classification predicting sequence
LLCEQSR

SEQ ID NO: 74916 - protein, 7 aa, Artificial sequence
  Protein classification predicting sequence
HVPFGLV

SEQ ID NO: 74917 - protein, 6 aa, Artificial sequence
  Protein classification predicting sequence
FKTRSG

SEQ ID NO: 74918 - protein, 8 aa, Artificial sequence
  Protein classification predicting sequence
AVKYADLS

SEQ ID NO: 74919 - protein, 11 aa, Artificial sequence
  Protein classification predicting sequence
AVKYADLSQNR

SEQ ID NO: 74920 - protein, 7 aa, Artificial sequence
  Protein classification predicting sequence
GLSLLGI

SEQ ID NO: 74921 - protein, 7 aa, Artificial sequence
  Protein classification predicting sequence
DGTYTYF

SEQ ID NO: 74922 - protein, 12 aa, Artificial sequence
  Protein classification predicting sequence
NPVYYVQYAHAR

SEQ ID NO: 74923 - protein, 7 aa, Artificial sequence
  Protein classification predicting sequence
EHTSANP

SEQ ID NO: 74924 - protein, 9 aa, Artificial sequence
  Protein classification predicting sequence
TLYITRDLA

SEQ ID NO: 74925 - protein, 7 aa, Artificial sequence
  Protein classification predicting sequence
HGDYSTN

SEQ ID NO: 74926 - protein, 13 aa, Artificial sequence
  Protein classification predicting sequence
AMQLARVAKKAPR

SEQ ID NO: 74927 - protein, 10 aa, Artificial sequence
  Protein classification predicting sequence
IAGPGFINFY

SEQ ID NO: 74928 - protein, 6 aa, Artificial sequence
  Protein classification predicting sequence
MPEDGY

SEQ ID NO: 74929 - protein, 8 aa, Artificial sequence
  Protein classification predicting sequence
AAIEALGY

SEQ ID NO: 74930 - protein, 11 aa, Artificial sequence
  Protein classification predicting sequence
LEVEIIQLVHL

SEQ ID NO: 74931 - protein, 14 aa, Artificial sequence
  Protein classification predicting sequence
VTMRDLIEEVGLDA

SEQ ID NO: 74932 - protein, 7 aa, Artificial sequence
  Protein classification predicting sequence
FYNAEKV

SEQ ID NO: 74933 - protein, 7 aa, Artificial sequence
  Protein classification predicting sequence
QVIANGL

SEQ ID NO: 74934 - protein, 8 aa, Artificial sequence
  Protein classification predicting sequence
PGFINIFL

SEQ ID NO: 74935 - protein, 7 aa, Artificial sequence
  Protein classification predicting sequence
SSPNIAK

SEQ ID NO: 74936 - protein, 6 aa, Artificial sequence
  Protein classification predicting sequence
YVVKLQ

SEQ ID NO: 74937 - protein, 13 aa, Artificial sequence
  Protein classification predicting sequence
GVIIQKKDGGYLY

SEQ ID NO: 74938 - protein, 6 aa, Artificial sequence
  Protein classification predicting sequence
TTDIAC

SEQ ID NO: 74939 - protein, 7 aa, Artificial sequence
  Protein classification predicting sequence
YYIDSRQ

SEQ ID NO: 74940 - protein, 7 aa, Artificial sequence
  Protein classification predicting sequence
QHLMQAW

SEQ ID NO: 74941 - protein, 6 aa, Artificial sequence
  Protein classification predicting sequence
KPFKTR

SEQ ID NO: 74942 - protein, 6 aa, Artificial sequence
  Protein classification predicting sequence
GNTAPY

SEQ ID NO: 74943 - protein, 6 aa, Artificial sequence
  Protein classification predicting sequence
QYAYTR

SEQ ID NO: 74944 - protein, 9 aa, Artificial sequence
  Protein classification predicting sequence
REFYYNDAG

SEQ ID NO: 74945 - protein, 8 aa, Artificial sequence
  Protein classification predicting sequence
YFLESSLY

SEQ ID NO: 74946 - protein, 12 aa, Artificial sequence
  Protein classification predicting sequence
GHTYEEGGALWL

SEQ ID NO: 74947 - protein, 9 aa, Artificial sequence
  Protein classification predicting sequence
VMRGGEEVK

SEQ ID NO: 74948 - protein, 25 aa, Artificial sequence
  Protein classification predicting sequence
NVEYVSANPTGPMHVGHCRGAVVGD

SEQ ID NO: 74949 - protein, 5 aa, Artificial sequence
  Protein classification predicting sequence
AKEMH

SEQ ID NO: 74950 - protein, 6 aa, Artificial sequence
  Protein classification predicting sequence
VIRANH

SEQ ID NO: 74951 - protein, 12 aa, Artificial sequence
  Protein classification predicting sequence
GDWGTQFGMLIA

SEQ ID NO: 74952 - protein, 8 aa, Artificial sequence
  Protein classification predicting sequence
DSRQHQHL

SEQ ID NO: 74953 - protein, 8 aa, Artificial sequence
  Protein classification predicting sequence
FEGNTAPY

SEQ ID NO: 74954 - protein, 7 aa, Artificial sequence
  Protein classification predicting sequence
LTAKTLK

SEQ ID NO: 74955 - protein, 7 aa, Artificial sequence
  Protein classification predicting sequence
GESFYNP

SEQ ID NO: 74956 - protein, 10 aa, Artificial sequence
  Protein classification predicting sequence
LEHHMFGMML

SEQ ID NO: 74957 - protein, 5 aa, Artificial sequence
  Protein classification predicting sequence
PHIMC

SEQ ID NO: 74958 - protein, 7 aa, Artificial sequence
  Protein classification predicting sequence
LTAKTIK

SEQ ID NO: 74959 - protein, 6 aa, Artificial sequence
  Protein classification predicting sequence
FLGHNV

SEQ ID NO: 74960 - protein, 8 aa, Artificial sequence
  Protein classification predicting sequence
LYFIDSRQ

SEQ ID NO: 74961 - protein, 11 aa, Artificial sequence
  Protein classification predicting sequence
GNTAPYMQYAY

SEQ ID NO: 74962 - protein, 19 aa, Artificial sequence
  Protein classification predicting sequence
STKEHFGHYQCNDAMKLAR

SEQ ID NO: 74963 - protein, 21 aa, Artificial sequence
  Protein classification predicting sequence
RLNHIGDWGTAFGMLITYLQE

SEQ ID NO: 74964 - protein, 7 aa, Artificial sequence
  Protein classification predicting sequence
EFKKRSQ

SEQ ID NO: 74965 - protein, 7 aa, Artificial sequence
  Protein classification predicting sequence
AKCVFHE

SEQ ID NO: 74966 - protein, 11 aa, Artificial sequence
  Protein classification predicting sequence
FSHVGFGLVLD

SEQ ID NO: 74967 - protein, 11 aa, Artificial sequence
  Protein classification predicting sequence
LCPHFLTDYLY

SEQ ID NO: 74968 - protein, 7 aa, Artificial sequence
  Protein classification predicting sequence
GMHLLGL

SEQ ID NO: 74969 - protein, 14 aa, Artificial sequence
  Protein classification predicting sequence
IEIAGAGFINFTFS

SEQ ID NO: 74970 - protein, 13 aa, Artificial sequence
  Protein classification predicting sequence
MHVGHLRSTIIGD

SEQ ID NO: 74971 - protein, 6 aa, Artificial sequence
  Protein classification predicting sequence
KTRSGE

SEQ ID NO: 74972 - protein, 7 aa, Artificial sequence
  Protein classification predicting sequence
REYYFND

SEQ ID NO: 74973 - protein, 10 aa, Artificial sequence
  Protein classification predicting sequence
EDDGAQVVFL

SEQ ID NO: 74974 - protein, 7 aa, Artificial sequence
  Protein classification predicting sequence
VVFLDEF

SEQ ID NO: 74975 - protein, 8 aa, Artificial sequence
  Protein classification predicting sequence
DGKPFKTR

SEQ ID NO: 74976 - protein, 8 aa, Artificial sequence
  Protein classification predicting sequence
AKVLRKAP

SEQ ID NO: 74977 - protein, 7 aa, Artificial sequence
  Protein classification predicting sequence
TRDLAAA

SEQ ID NO: 74978 - protein, 6 aa, Artificial sequence
  Protein classification predicting sequence
VGIGAV

SEQ ID NO: 74979 - protein, 8 aa, Artificial sequence
  Protein classification predicting sequence
IKKSDGAT

SEQ ID NO: 74980 - protein, 12 aa, Artificial sequence
  Protein classification predicting sequence
SLHEFGTDFDVY

SEQ ID NO: 74981 - protein, 14 aa, Artificial sequence
  Protein classification predicting sequence
FGDDKDRVVIKSDG

SEQ ID NO: 74982 - protein, 10 aa, Artificial sequence
  Protein classification predicting sequence
TLDDLVEAIG

SEQ ID NO: 74983 - protein, 8 aa, Artificial sequence
  Protein classification predicting sequence
NPVYYVQY

SEQ ID NO: 74984 - protein, 7 aa, Artificial sequence
  Protein classification predicting sequence
EIAGPGF

SEQ ID NO: 74985 - protein, 8 aa, Artificial sequence
  Protein classification predicting sequence
FGDDKDRV

SEQ ID NO: 74986 - protein, 9 aa, Artificial sequence
  Protein classification predicting sequence
TYFAADVAY

SEQ ID NO: 74987 - protein, 6 aa, Artificial sequence
  Protein classification predicting sequence
ENPVYY

SEQ ID NO: 74988 - protein, 13 aa, Artificial sequence
  Protein classification predicting sequence
RNGLTLLGVSAPE

SEQ ID NO: 74989 - protein, 15 aa, Artificial sequence
  Protein classification predicting sequence
AKEMHVGHLRSTIIG

SEQ ID NO: 74990 - protein, 7 aa, Artificial sequence
  Protein classification predicting sequence
EHTSVNP

SEQ ID NO: 74991 - protein, 9 aa, Artificial sequence
  Protein classification predicting sequence
VEVQNYIDD

SEQ ID NO: 74992 - protein, 15 aa, Artificial sequence
  Protein classification predicting sequence
NHVGDWGTQFGMLIA

SEQ ID NO: 74993 - protein, 9 aa, Artificial sequence
  Protein classification predicting sequence
LIVAYKKWG

SEQ ID NO: 74994 - protein, 28 aa, Artificial sequence
  Protein classification predicting sequence
KSDGATLYITRDLAAALYRKRTYDFAKS

SEQ ID NO: 74995 - protein, 7 aa, Artificial sequence
  Protein classification predicting sequence
YVVGNEQ

SEQ ID NO: 74996 - protein, 6 aa, Artificial sequence
  Protein classification predicting sequence
DWSDDM

SEQ ID NO: 74997 - protein, 7 aa, Artificial sequence
  Protein classification predicting sequence
FNKYYAH

SEQ ID NO: 74998 - protein, 7 aa, Artificial sequence
  Protein classification predicting sequence
FGDYQCN

SEQ ID NO: 74999 - protein, 7 aa, Artificial sequence
  Protein classification predicting sequence
VKYADLS

SEQ ID NO: 75000 - protein, 7 aa, Artificial sequence
  Protein classification predicting sequence
GADHHGY

SEQ ID NO: 75001 - protein, 6 aa, Artificial sequence
  Protein classification predicting sequence
LIGQMV

SEQ ID NO: 75002 - protein, 7 aa, Artificial sequence
  Protein classification predicting sequence
IDYSSPN

SEQ ID NO: 75003 - protein, 7 aa, Artificial sequence
  Protein classification predicting sequence
MWKKLVD

SEQ ID NO: 75004 - protein, 6 aa, Artificial sequence
  Protein classification predicting sequence
YDRLNV

SEQ ID NO: 75005 - protein, 7 aa, Artificial sequence
  Protein classification predicting sequence
EFKNKDG

SEQ ID NO: 75006 - protein, 12 aa, Artificial sequence
  Protein classification predicting sequence
DGGFLYTTTDIA

SEQ ID NO: 75007 - protein, 7 aa, Artificial sequence
  Protein classification predicting sequence
RKAGYVP

SEQ ID NO: 75008 - protein, 13 aa, Artificial sequence
  Protein classification predicting sequence
RTTDYVFDWDNML

SEQ ID NO: 75009 - protein, 8 aa, Artificial sequence
  Protein classification predicting sequence
KLLQFEEA

SEQ ID NO: 75010 - protein, 9 aa, Artificial sequence
  Protein classification predicting sequence
AKKHYDEDE

SEQ ID NO: 75011 - protein, 6 aa, Artificial sequence
  Protein classification predicting sequence
SRLKLA

SEQ ID NO: 75012 - protein, 7 aa, Artificial sequence
  Protein classification predicting sequence
TGPYVQY

SEQ ID NO: 75013 - protein, 10 aa, Artificial sequence
  Protein classification predicting sequence
PIDELLKLYV

SEQ ID NO: 75014 - protein, 9 aa, Artificial sequence
  Protein classification predicting sequence
KFYDLKTDR

SEQ ID NO: 75015 - protein, 7 aa, Artificial sequence
  Protein classification predicting sequence
NGYDFDL

SEQ ID NO: 75016 - protein, 11 aa, Artificial sequence
  Protein classification predicting sequence
VLKEALRLLGV

SEQ ID NO: 75017 - protein, 7 aa, Artificial sequence
  Protein classification predicting sequence
GPYVNFF

SEQ ID NO: 75018 - protein, 8 aa, Artificial sequence
  Protein classification predicting sequence
YRKRTYDF

SEQ ID NO: 75019 - protein, 9 aa, Artificial sequence
  Protein classification predicting sequence
HFKQLKAVL

SEQ ID NO: 75020 - protein, 12 aa, Artificial sequence
  Protein classification predicting sequence
LIGQMVNLVRDG

SEQ ID NO: 75021 - protein, 6 aa, Artificial sequence
  Protein classification predicting sequence
DHHGYI

SEQ ID NO: 75022 - protein, 7 aa, Artificial sequence
  Protein classification predicting sequence
DAPLDFD

SEQ ID NO: 75023 - protein, 8 aa, Artificial sequence
  Protein classification predicting sequence
IAGPGFIN

SEQ ID NO: 75024 - protein, 11 aa, Artificial sequence
  Protein classification predicting sequence
YTYFLPDIAYH

SEQ ID NO: 75025 - protein, 7 aa, Artificial sequence
  Protein classification predicting sequence
DLASSFH

SEQ ID NO: 75026 - protein, 6 aa, Artificial sequence
  Protein classification predicting sequence
GPYINF

SEQ ID NO: 75027 - protein, 13 aa, Artificial sequence
  Protein classification predicting sequence
LEHTSANPNGPLH

SEQ ID NO: 75028 - protein, 6 aa, Artificial sequence
  Protein classification predicting sequence
APYIQY

SEQ ID NO: 75029 - protein, 6 aa, Artificial sequence
  Protein classification predicting sequence
DIAYHL

SEQ ID NO: 75030 - protein, 6 aa, Artificial sequence
  Protein classification predicting sequence
GPGFIN

SEQ ID NO: 75031 - protein, 7 aa, Artificial sequence
  Protein classification predicting sequence
YYVNDMG

SEQ ID NO: 75032 - protein, 9 aa, Artificial sequence
  Protein classification predicting sequence
LPEGSMSTR

SEQ ID NO: 75033 - protein, 6 aa, Artificial sequence
  Protein classification predicting sequence
QYAYAR

SEQ ID NO: 75034 - protein, 6 aa, Artificial sequence
  Protein classification predicting sequence
QKSDGG

SEQ ID NO: 75035 - protein, 8 aa, Artificial sequence
  Protein classification predicting sequence
DGATWLRT

SEQ ID NO: 75036 - protein, 6 aa, Artificial sequence
  Protein classification predicting sequence
WLRTTD

SEQ ID NO: 75037 - protein, 7 aa, Artificial sequence
  Protein classification predicting sequence
VSANPTG

SEQ ID NO: 75038 - protein, 33 aa, Artificial sequence
  Protein classification predicting sequence
LREPHRVCRYLEDLAGDYHRFYDSCRVLPQGDE

SEQ ID NO: 75039 - protein, 9 aa, Artificial sequence
  Protein classification predicting sequence
REYYFNDHG

SEQ ID NO: 75040 - protein, 15 aa, Artificial sequence
  Protein classification predicting sequence
REYYFNDHGAQIDRF

SEQ ID NO: 75041 - protein, 14 aa, Artificial sequence
  Protein classification predicting sequence
AYIAGDLAYYLDKR

SEQ ID NO: 75042 - protein, 9 aa, Artificial sequence
  Protein classification predicting sequence
RGFDLCIYM

SEQ ID NO: 75043 - protein, 13 aa, Artificial sequence
  Protein classification predicting sequence
NHVGDWGTQFGML

SEQ ID NO: 75044 - protein, 6 aa, Artificial sequence
  Protein classification predicting sequence
SNDNPV

SEQ ID NO: 75045 - protein, 12 aa, Artificial sequence
  Protein classification predicting sequence
REYYINDAGNQI

SEQ ID NO: 75046 - protein, 8 aa, Artificial sequence
  Protein classification predicting sequence
QYAHARIC

SEQ ID NO: 75047 - protein, 7 aa, Artificial sequence
  Protein classification predicting sequence
NPREFAQ

SEQ ID NO: 75048 - protein, 6 aa, Artificial sequence
  Protein classification predicting sequence
DYSSPN

SEQ ID NO: 75049 - protein, 12 aa, Artificial sequence
  Protein classification predicting sequence
DVMGESLYNPML

SEQ ID NO: 75050 - protein, 8 aa, Artificial sequence
  Protein classification predicting sequence
IAAGAPAD

SEQ ID NO: 75051 - protein, 14 aa, Artificial sequence
  Protein classification predicting sequence
QTIVVDYSAPNVAK

SEQ ID NO: 75052 - protein, 19 aa, Artificial sequence
  Protein classification predicting sequence
VIRANHVGDWGTQFGMLIA

SEQ ID NO: 75053 - protein, 9 aa, Artificial sequence
  Protein classification predicting sequence
GDEYCRTMW

SEQ ID NO: 75054 - protein, 10 aa, Artificial sequence
  Protein classification predicting sequence
MWRKLVDITM

SEQ ID NO: 75055 - protein, 16 aa, Artificial sequence
  Protein classification predicting sequence
RLNHVGDWGTQFGMLI

SEQ ID NO: 75056 - protein, 8 aa, Artificial sequence
  Protein classification predicting sequence
PLPVIVQK

SEQ ID NO: 75057 - protein, 9 aa, Artificial sequence
  Protein classification predicting sequence
LLDEAVERA

SEQ ID NO: 75058 - protein, 6 aa, Artificial sequence
  Protein classification predicting sequence
VLRLNH

SEQ ID NO: 75059 - protein, 13 aa, Artificial sequence
  Protein classification predicting sequence
DGGFNYATTDLAA

SEQ ID NO: 75060 - protein, 9 aa, Artificial sequence
  Protein classification predicting sequence
NYATTDLAA

SEQ ID NO: 75061 - protein, 19 aa, Artificial sequence
  Protein classification predicting sequence
AVKYADLSQNRITNYQFSF

SEQ ID NO: 75062 - protein, 8 aa, Artificial sequence
  Protein classification predicting sequence
VFLEEFKN

SEQ ID NO: 75063 - protein, 6 aa, Artificial sequence
  Protein classification predicting sequence
ADRVLY

SEQ ID NO: 75064 - protein, 7 aa, Artificial sequence
  Protein classification predicting sequence
TRVASVF

SEQ ID NO: 75065 - protein, 9 aa, Artificial sequence
  Protein classification predicting sequence
VADLKAKGL

SEQ ID NO: 75066 - protein, 8 aa, Artificial sequence
  Protein classification predicting sequence
YATTDLAA

SEQ ID NO: 75067 - protein, 10 aa, Artificial sequence
  Protein classification predicting sequence
YLYDLAGLFS

SEQ ID NO: 75068 - protein, 8 aa, Artificial sequence
  Protein classification predicting sequence
EEFAERAR

SEQ ID NO: 75069 - protein, 7 aa, Artificial sequence
  Protein classification predicting sequence
LVKEKNP

SEQ ID NO: 75070 - protein, 7 aa, Artificial sequence
  Protein classification predicting sequence
YVNFFLD

SEQ ID NO: 75071 - protein, 6 aa, Artificial sequence
  Protein classification predicting sequence
INFYLD

SEQ ID NO: 75072 - protein, 25 aa, Artificial sequence
  Protein classification predicting sequence
GKKVIVEHTSVNPTKPLHMGHARNA

SEQ ID NO: 75073 - protein, 7 aa, Artificial sequence
  Protein classification predicting sequence
KKLEEGD

SEQ ID NO: 75074 - protein, 26 aa, Artificial sequence
  Protein classification predicting sequence
LVLRRSDGTATYTGKDIAYHLWKFGK

SEQ ID NO: 75075 - protein, 16 aa, Artificial sequence
  Protein classification predicting sequence
FSGRKGTWVGFTVDEV

SEQ ID NO: 75076 - protein, 11 aa, Artificial sequence
  Protein classification predicting sequence
FRWEDVLNFEG

SEQ ID NO: 75077 - protein, 7 aa, Artificial sequence
  Protein classification predicting sequence
AAHGDIA

SEQ ID NO: 75078 - protein, 13 aa, Artificial sequence
  Protein classification predicting sequence
VSANPTGPLHVGH

SEQ ID NO: 75079 - protein, 8 aa, Artificial sequence
  Protein classification predicting sequence
RQAALGDA

SEQ ID NO: 75080 - protein, 7 aa, Artificial sequence
  Protein classification predicting sequence
GDDKDRV

SEQ ID NO: 75081 - protein, 10 aa, Artificial sequence
  Protein classification predicting sequence
ARVRAGLQGL

SEQ ID NO: 75082 - protein, 8 aa, Artificial sequence
  Protein classification predicting sequence
ADTEFVFD

SEQ ID NO: 75083 - protein, 11 aa, Artificial sequence
  Protein classification predicting sequence
VEPPRDASHGD

SEQ ID NO: 75084 - protein, 9 aa, Artificial sequence
  Protein classification predicting sequence
IDAMMAMIR

SEQ ID NO: 75085 - protein, 13 aa, Artificial sequence
  Protein classification predicting sequence
DWEDREQTLFRST

SEQ ID NO: 75086 - protein, 17 aa, Artificial sequence
  Protein classification predicting sequence
IYVLGADHGGYVKRLEA

SEQ ID NO: 75087 - protein, 8 aa, Artificial sequence
  Protein classification predicting sequence
RFMMLYRK

SEQ ID NO: 75088 - protein, 24 aa, Artificial sequence
  Protein classification predicting sequence
PLDFDFAKVTEQSKDNPVFYVQYA

SEQ ID NO: 75089 - protein, 7 aa, Artificial sequence
  Protein classification predicting sequence
KLAEYPR

SEQ ID NO: 75090 - protein, 8 aa, Artificial sequence
  Protein classification predicting sequence
IPAGLYPG

SEQ ID NO: 75091 - protein, 5 aa, Artificial sequence
  Protein classification predicting sequence
RFMML

SEQ ID NO: 75092 - protein, 18 aa, Artificial sequence
  Protein classification predicting sequence
GIASKVEIAGPGFINIFL

SEQ ID NO: 75093 - protein, 12 aa, Artificial sequence
  Protein classification predicting sequence
EIAGPGFINIFL

SEQ ID NO: 75094 - protein, 23 aa, Artificial sequence
  Protein classification predicting sequence
SVPLEHHMFGMMLGKDGKPFKTR

SEQ ID NO: 75095 - protein, 15 aa, Artificial sequence
  Protein classification predicting sequence
FGMMLGKDGKPFKTR

SEQ ID NO: 75096 - protein, 90 aa, Artificial sequence
  Protein classification predicting sequence
GGTVKLADLLDEALERARRLVAEKNPDMPADELEKLANAVGIGAVKYADLSKNRTTDYIFDWDNMLAFEGNTAPYMQYAYTRVLSVFRKA

SEQ ID NO: 75097 - protein, 18 aa, Artificial sequence
  Protein classification predicting sequence
AGLFSGFYEHCPILSAEN

SEQ ID NO: 75098 - protein, 12 aa, Artificial sequence
  Protein classification predicting sequence
VQQALASDRLGV

SEQ ID NO: 75099 - protein, 30 aa, Artificial sequence
  Protein classification predicting sequence
VIRANHVGDWGTQFGMLIAWLEKQQQENAG

SEQ ID NO: 75100 - protein, 51 aa, Artificial sequence
  Protein classification predicting sequence
PMGVIIQKKDGGYLYTTTDIACAKYRYETLHADRVLYYIDSRQHQHLMQAW

SEQ ID NO: 75101 - protein, 36 aa, Artificial sequence
  Protein classification predicting sequence
EDREAQLAARLLQFEETLTVVAREGTPHVMCAYLYD

SEQ ID NO: 75102 - protein, 7 aa, Artificial sequence
  Protein classification predicting sequence
GFGTMNG

SEQ ID NO: 75103 - protein, 112 aa, Artificial sequence
  Protein classification predicting sequence
RQSAKVQFGDYQANGMMAVAKKLGMAPRQLAEQVLTHLDLNGIASKVEIAGPGFINIFLDPAFLAEHVQQALASDRLGVATPEKQTIVVDYSAPNVAKEMHVGHLRSTIIGD

SEQ ID NO: 75104 - protein, 16 aa, Artificial sequence
  Protein classification predicting sequence
AKEMHVGHLRSTIIGD

SEQ ID NO: 75105 - protein, 9 aa, Artificial sequence
  Protein classification predicting sequence
PKDTKNGDY

SEQ ID NO: 75106 - protein, 18 aa, Artificial sequence
  Protein classification predicting sequence
DIAGPGFINFYLDNQYLT

SEQ ID NO: 75107 - protein, 16 aa, Artificial sequence
  Protein classification predicting sequence
DGYNGKDIIEIGKDLA

SEQ ID NO: 75108 - protein, 19 aa, Artificial sequence
  Protein classification predicting sequence
KMKELGYTYEADGATWLRT

SEQ ID NO: 75109 - protein, 9 aa, Artificial sequence
  Protein classification predicting sequence
DDKDRVLIK

SEQ ID NO: 75110 - protein, 9 aa, Artificial sequence
  Protein classification predicting sequence
RGNDILIDL

SEQ ID NO: 75111 - protein, 8 aa, Artificial sequence
  Protein classification predicting sequence
GADHHGYI

SEQ ID NO: 75112 - protein, 13 aa, Artificial sequence
  Protein classification predicting sequence
RLEIQIMQMVRLM

SEQ ID NO: 75113 - protein, 19 aa, Artificial sequence
  Protein classification predicting sequence
DAARYFLTMRSPDSHFDFD

SEQ ID NO: 75114 - protein, 11 aa, Artificial sequence
  Protein classification predicting sequence
ELAKEQSQDNP

SEQ ID NO: 75115 - protein, 9 aa, Artificial sequence
  Protein classification predicting sequence
TIESAAEHR

SEQ ID NO: 75116 - protein, 14 aa, Artificial sequence
  Protein classification predicting sequence
FHKFYNAEKVLTDD

SEQ ID NO: 75117 - protein, 17 aa, Artificial sequence
  Protein classification predicting sequence
EKTKAHVAMIEAVRITL

SEQ ID NO: 75118 - protein, 9 aa, Artificial sequence
  Protein classification predicting sequence
IIDQVKQTL

SEQ ID NO: 75119 - protein, 23 aa, Artificial sequence
  Protein classification predicting sequence
NIAMVLTKIAKRNPREIAQAIVD

SEQ ID NO: 75120 - protein, 25 aa, Artificial sequence
  Protein classification predicting sequence
DIAGPGFINFYLDNQYLTAIIPEAI

SEQ ID NO: 75121 - protein, 21 aa, Artificial sequence
  Protein classification predicting sequence
LLEYVSANPTGDLHIGHARNA

SEQ ID NO: 75122 - protein, 27 aa, Artificial sequence
  Protein classification predicting sequence
AAGYNVTREYYINDAGNQITNLARSIE

SEQ ID NO: 75123 - protein, 8 aa, Artificial sequence
  Protein classification predicting sequence
KHPEIKDY

SEQ ID NO: 75124 - protein, 22 aa, Artificial sequence
  Protein classification predicting sequence
GADHHGYINRLKASLETFGVDS

SEQ ID NO: 75125 - protein, 22 aa, Artificial sequence
  Protein classification predicting sequence
EVKMSKRTGNAITLREIMDEVG

SEQ ID NO: 75126 - protein, 24 aa, Artificial sequence
  Protein classification predicting sequence
YYAQYAHARICSILKQAKEQGIEV

SEQ ID NO: 75127 - protein, 11 aa, Artificial sequence
  Protein classification predicting sequence
VAMIEAVRITL

SEQ ID NO: 75128 - protein, 8 aa, Artificial sequence
  Protein classification predicting sequence
LLETPKNS

SEQ ID NO: 75129 - protein, 13 aa, Artificial sequence
  Protein classification predicting sequence
AHFKQLKAVLKEM

SEQ ID NO: 75130 - protein, 9 aa, Artificial sequence
  Protein classification predicting sequence
AKFAINLAQ

SEQ ID NO: 75131 - protein, 23 aa, Artificial sequence
  Protein classification predicting sequence
EATELWQWFRDESLLEFNRLYDQ

SEQ ID NO: 75132 - protein, 46 aa, Artificial sequence
  Protein classification predicting sequence
FGLVTKGGAKLSTRKGNVILLEPTVAEAINRAASQIEAKNPNLADK

SEQ ID NO: 75133 - protein, 14 aa, Artificial sequence
  Protein classification predicting sequence
PNVAKEMHVGHLRS

SEQ ID NO: 75134 - protein, 11 aa, Artificial sequence
  Protein classification predicting sequence
AKEMHVGHLRS

SEQ ID NO: 75135 - protein, 6 aa, Artificial sequence
  Protein classification predicting sequence
KSDGGY

SEQ ID NO: 75136 - protein, 6 aa, Artificial sequence
  Protein classification predicting sequence
DYQANG

SEQ ID NO: 75137 - protein, 10 aa, Artificial sequence
  Protein classification predicting sequence
AVGPYINFFL

SEQ ID NO: 75138 - protein, 12 aa, Artificial sequence
  Protein classification predicting sequence
DEEAREWFRKLE

SEQ ID NO: 75139 - protein, 10 aa, Artificial sequence
  Protein classification predicting sequence
LWQWFRDESL

SEQ ID NO: 75140 - protein, 14 aa, Artificial sequence
  Protein classification predicting sequence
FDSYNGEAFYNDKM

SEQ ID NO: 75141 - protein, 38 aa, Artificial sequence
  Protein classification predicting sequence
ESKGAQVVNLEKYGIEHPALIKKSDGATLYITRDLAAA

SEQ ID NO: 75142 - protein, 6 aa, Artificial sequence
  Protein classification predicting sequence
FGLVTK

SEQ ID NO: 75143 - protein, 13 aa, Artificial sequence
  Protein classification predicting sequence
ESWEIIKLIQDFP

SEQ ID NO: 75144 - protein, 16 aa, Artificial sequence
  Protein classification predicting sequence
LAQSFNKYYAHTRILD

SEQ ID NO: 75145 - protein, 26 aa, Artificial sequence
  Protein classification predicting sequence
IDMSSPNIAKPFSIGHLRSTVIGDSL

SEQ ID NO: 75146 - protein, 7 aa, Artificial sequence
  Protein classification predicting sequence
NHLGDWG

SEQ ID NO: 75147 - protein, 19 aa, Artificial sequence
  Protein classification predicting sequence
AHPIDELLKLYVRINAEAE

SEQ ID NO: 75148 - protein, 12 aa, Artificial sequence
  Protein classification predicting sequence
GAIKFYDLKTDR

SEQ ID NO: 75149 - protein, 24 aa, Artificial sequence
  Protein classification predicting sequence
NGYDFDLEAMVSFEGETGPYVQYA

SEQ ID NO: 75150 - protein, 14 aa, Artificial sequence
  Protein classification predicting sequence
VVEHTSANPIHPLH

SEQ ID NO: 75151 - protein, 8 aa, Artificial sequence
  Protein classification predicting sequence
VEIAGPGF

SEQ ID NO: 75152 - protein, 11 aa, Artificial sequence
  Protein classification predicting sequence
QSRREFQKIYD

SEQ ID NO: 75153 - protein, 10 aa, Artificial sequence
  Protein classification predicting sequence
GNTAPYLLYA

SEQ ID NO: 75154 - protein, 7 aa, Artificial sequence
  Protein classification predicting sequence
YLFELSQ

SEQ ID NO: 75155 - protein, 6 aa, Artificial sequence
  Protein classification predicting sequence
CPILSA

SEQ ID NO: 75156 - protein, 11 aa, Artificial sequence
  Protein classification predicting sequence
LLYAYVRIQGI

SEQ ID NO: 75157 - protein, 18 aa, Artificial sequence
  Protein classification predicting sequence
VLRLNHVGDWGTQFGMLI

SEQ ID NO: 75158 - protein, 7 aa, Artificial sequence
  Protein classification predicting sequence
FSFDKML

SEQ ID NO: 75159 - protein, 7 aa, Artificial sequence
  Protein classification predicting sequence
LLPNRLC

SEQ ID NO: 75160 - protein, 6 aa, Artificial sequence
  Protein classification predicting sequence
SANPTG

SEQ ID NO: 75161 - protein, 6 aa, Artificial sequence
  Protein classification predicting sequence
YINDAG

SEQ ID NO: 75162 - protein, 7 aa, Artificial sequence
  Protein classification predicting sequence
IPRMKAA

SEQ ID NO: 75163 - protein, 9 aa, Artificial sequence
  Protein classification predicting sequence
GYIARLKAA

SEQ ID NO: 75164 - protein, 6 aa, Artificial sequence
  Protein classification predicting sequence
YLYDLA

SEQ ID NO: 75165 - protein, 24 aa, Artificial sequence
  Protein classification predicting sequence
GIASKTEIAGPGFINIFLSEEFLA

SEQ ID NO: 75166 - protein, 64 aa, Artificial sequence
  Protein classification predicting sequence
TIVADYSAPNVAKEMHVGHLRSTIIGDAVVRTLEFLGHKVIRANHIGDWGTQFGMLIANLERVQ

SEQ ID NO: 75167 - protein, 13 aa, Artificial sequence
  Protein classification predicting sequence
FYRESKKLYDEDE

SEQ ID NO: 75168 - protein, 10 aa, Artificial sequence
  Protein classification predicting sequence
DLKAKGLAVE

SEQ ID NO: 75169 - protein, 22 aa, Artificial sequence
  Protein classification predicting sequence
QKRDGGFLYTTTDIACAKYRYE

SEQ ID NO: 75170 - protein, 15 aa, Artificial sequence
  Protein classification predicting sequence
LYTTTDIACAKYRYE

SEQ ID NO: 75171 - protein, 30 aa, Artificial sequence
  Protein classification predicting sequence
LGADRVLYFIDSRQHQHLMQAWTIVRKAGY

SEQ ID NO: 75172 - protein, 21 aa, Artificial sequence
  Protein classification predicting sequence
IDSRQHQHLMQAWTIVRKAGY

SEQ ID NO: 75173 - protein, 9 aa, Artificial sequence
  Protein classification predicting sequence
FGMMLGKDG

SEQ ID NO: 75174 - protein, 10 aa, Artificial sequence
  Protein classification predicting sequence
PFKTRAGGTV

SEQ ID NO: 75175 - protein, 8 aa, Artificial sequence
  Protein classification predicting sequence
LADLLDEA

SEQ ID NO: 75176 - protein, 9 aa, Artificial sequence
  Protein classification predicting sequence
LIESKNPEL

SEQ ID NO: 75177 - protein, 24 aa, Artificial sequence
  Protein classification predicting sequence
FDWDNMLAFEGNTAPYMQYAYTRV

SEQ ID NO: 75178 - protein, 19 aa, Artificial sequence
  Protein classification predicting sequence
KQSRLKLAALTAKTIKQGL

SEQ ID NO: 75179 - protein, 11 aa, Artificial sequence
  Protein classification predicting sequence
MELADLEGFYR

SEQ ID NO: 75180 - protein, 9 aa, Artificial sequence
  Protein classification predicting sequence
TVAMAAVKY

SEQ ID NO: 75181 - protein, 5 aa, Artificial sequence
  Protein classification predicting sequence
QFGML

SEQ ID NO: 75182 - protein, 8 aa, Artificial sequence
  Protein classification predicting sequence
VSANPTGP

SEQ ID NO: 75183 - protein, 6 aa, Artificial sequence
  Protein classification predicting sequence
GADHHG

SEQ ID NO: 75184 - protein, 7 aa, Artificial sequence
  Protein classification predicting sequence
RVRAGLQ

SEQ ID NO: 75185 - protein, 9 aa, Artificial sequence
  Protein classification predicting sequence
SKRAGSYVT

SEQ ID NO: 75186 - protein, 7 aa, Artificial sequence
  Protein classification predicting sequence
QVLANGL

SEQ ID NO: 75187 - protein, 7 aa, Artificial sequence
  Protein classification predicting sequence
YTYFVPD

SEQ ID NO: 75188 - protein, 9 aa, Artificial sequence
  Protein classification predicting sequence
EIAGPGFIN

SEQ ID NO: 75189 - protein, 19 aa, Artificial sequence
  Protein classification predicting sequence
MHVGHLRSTIIGDAAVRTL

SEQ ID NO: 75190 - protein, 8 aa, Artificial sequence
  Protein classification predicting sequence
YDEDEEFA

SEQ ID NO: 75191 - protein, 20 aa, Artificial sequence
  Protein classification predicting sequence
IVADLKAKGLAVESEGATVV

SEQ ID NO: 75192 - protein, 12 aa, Artificial sequence
  Protein classification predicting sequence
AEKNPDMPADEL

SEQ ID NO: 75193 - protein, 14 aa, Artificial sequence
  Protein classification predicting sequence
RTTDYIFDWDNMLA

SEQ ID NO: 75194 - protein, 11 aa, Artificial sequence
  Protein classification predicting sequence
VAREGTPHVMC

SEQ ID NO: 75195 - protein, 6 aa, Artificial sequence
  Protein classification predicting sequence
LKSKRN

SEQ ID NO: 75196 - protein, 9 aa, Artificial sequence
  Protein classification predicting sequence
NVEIRKWGE

SEQ ID NO: 75197 - protein, 7 aa, Artificial sequence
  Protein classification predicting sequence
GRDTRGL

SEQ ID NO: 75198 - protein, 5 aa, Artificial sequence
  Protein classification predicting sequence
RQHQF

SEQ ID NO: 75199 - protein, 10 aa, Artificial sequence
  Protein classification predicting sequence
VKFAKPEESY

SEQ ID NO: 75200 - protein, 8 aa, Artificial sequence
  Protein classification predicting sequence
FQARRANI

SEQ ID NO: 75201 - protein, 9 aa, Artificial sequence
  Protein classification predicting sequence
LIPTAEVPL

SEQ ID NO: 75202 - protein, 13 aa, Artificial sequence
  Protein classification predicting sequence
LIPTAEVPLTNYY

SEQ ID NO: 75203 - protein, 6 aa, Artificial sequence
  Protein classification predicting sequence
TGDMGF

SEQ ID NO: 75204 - protein, 8 aa, Artificial sequence
  Protein classification predicting sequence
TGDMGFSA

SEQ ID NO: 75205 - protein, 6 aa, Artificial sequence
  Protein classification predicting sequence
LGILDF

SEQ ID NO: 75206 - protein, 8 aa, Artificial sequence
  Protein classification predicting sequence
DFDRAAKV

SEQ ID NO: 75207 - protein, 7 aa, Artificial sequence
  Protein classification predicting sequence
FMLDLHT

SEQ ID NO: 75208 - protein, 6 aa, Artificial sequence
  Protein classification predicting sequence
RSEAGS

SEQ ID NO: 75209 - protein, 9 aa, Artificial sequence
  Protein classification predicting sequence
GRDTRGLIR

SEQ ID NO: 75210 - protein, 5 aa, Artificial sequence
  Protein classification predicting sequence
HQFNK

SEQ ID NO: 75211 - protein, 7 aa, Artificial sequence
  Protein classification predicting sequence
FEPKPHW

SEQ ID NO: 75212 - protein, 6 aa, Artificial sequence
  Protein classification predicting sequence
FMLDLH

SEQ ID NO: 75213 - protein, 7 aa, Artificial sequence
  Protein classification predicting sequence
LPIYFTA

SEQ ID NO: 75214 - protein, 21 aa, Artificial sequence
  Protein classification predicting sequence
FRSEAGSAGRDTRGLIRLHQF

SEQ ID NO: 75215 - protein, 7 aa, Artificial sequence
  Protein classification predicting sequence
HQFNKVE

SEQ ID NO: 75216 - protein, 6 aa, Artificial sequence
  Protein classification predicting sequence
GRDTRG

SEQ ID NO: 75217 - protein, 7 aa, Artificial sequence
  Protein classification predicting sequence
GDLGFSA

SEQ ID NO: 75218 - protein, 6 aa, Artificial sequence
  Protein classification predicting sequence
YREISS

SEQ ID NO: 75219 - protein, 7 aa, Artificial sequence
  Protein classification predicting sequence
LVPYTGF

SEQ ID NO: 75220 - protein, 8 aa, Artificial sequence
  Protein classification predicting sequence
CFRREAGS

SEQ ID NO: 75221 - protein, 6 aa, Artificial sequence
  Protein classification predicting sequence
GIFRVH

SEQ ID NO: 75222 - protein, 8 aa, Artificial sequence
  Protein classification predicting sequence
EEFYQSLG

SEQ ID NO: 75223 - protein, 12 aa, Artificial sequence
  Protein classification predicting sequence
ELVSCSNCTDYQ

SEQ ID NO: 75224 - protein, 8 aa, Artificial sequence
  Protein classification predicting sequence
CCILENYQ

SEQ ID NO: 75225 - protein, 6 aa, Artificial sequence
  Protein classification predicting sequence
ILENYQ

SEQ ID NO: 75226 - protein, 8 aa, Artificial sequence
  Protein classification predicting sequence
FDFEIKDH

SEQ ID NO: 75227 - protein, 8 aa, Artificial sequence
  Protein classification predicting sequence
GTGQLPKF

SEQ ID NO: 75228 - protein, 6 aa, Artificial sequence
  Protein classification predicting sequence
VKPEDS

SEQ ID NO: 75229 - protein, 10 aa, Artificial sequence
  Protein classification predicting sequence
ALEELTGHAE

SEQ ID NO: 75230 - protein, 8 aa, Artificial sequence
  Protein classification predicting sequence
PEVLRPYM

SEQ ID NO: 75231 - protein, 9 aa, Artificial sequence
  Protein classification predicting sequence
LVLPPYMLR

SEQ ID NO: 75232 - protein, 7 aa, Artificial sequence
  Protein classification predicting sequence
TFKDAIY

SEQ ID NO: 75233 - protein, 15 aa, Artificial sequence
  Protein classification predicting sequence
KGIFRVHQFHKVEQF

SEQ ID NO: 75234 - protein, 10 aa, Artificial sequence
  Protein classification predicting sequence
RRNAASKEIG

SEQ ID NO: 75235 - protein, 6 aa, Artificial sequence
  Protein classification predicting sequence
EHGYTE

SEQ ID NO: 75236 - protein, 14 aa, Artificial sequence
  Protein classification predicting sequence
FRSEAGSAGRDTRG

SEQ ID NO: 75237 - protein, 6 aa, Artificial sequence
  Protein classification predicting sequence
EAGSAG

SEQ ID NO: 75238 - protein, 5 aa, Artificial sequence
  Protein classification predicting sequence
DTRGM

SEQ ID NO: 75239 - protein, 6 aa, Artificial sequence
  Protein classification predicting sequence
YDLEVW

SEQ ID NO: 75240 - protein, 10 aa, Artificial sequence
  Protein classification predicting sequence
YREISSCSNC

SEQ ID NO: 75241 - protein, 10 aa, Artificial sequence
  Protein classification predicting sequence
HQFNKVELVK

SEQ ID NO: 75242 - protein, 7 aa, Artificial sequence
  Protein classification predicting sequence
ELDKRRR

SEQ ID NO: 75243 - protein, 6 aa, Artificial sequence
  Protein classification predicting sequence
FDFEPK

SEQ ID NO: 75244 - protein, 7 aa, Artificial sequence
  Protein classification predicting sequence
CYRREAG

SEQ ID NO: 75245 - protein, 6 aa, Artificial sequence
  Protein classification predicting sequence
IRQHQF

SEQ ID NO: 75246 - protein, 7 aa, Artificial sequence
  Protein classification predicting sequence
HQFDKVE

SEQ ID NO: 75247 - protein, 7 aa, Artificial sequence
  Protein classification predicting sequence
YLIATAE

SEQ ID NO: 75248 - protein, 8 aa, Artificial sequence
  Protein classification predicting sequence
GIFRVHQF

SEQ ID NO: 75249 - protein, 13 aa, Artificial sequence
  Protein classification predicting sequence
AAAKKYDLEAWFP

SEQ ID NO: 75250 - protein, 18 aa, Artificial sequence
  Protein classification predicting sequence
FRELVSCSNCTDYQARRL

SEQ ID NO: 75251 - protein, 7 aa, Artificial sequence
  Protein classification predicting sequence
YLIATSE

SEQ ID NO: 75252 - protein, 20 aa, Artificial sequence
  Protein classification predicting sequence
EAGAHGKDTKGIFRVHQFNK

SEQ ID NO: 75253 - protein, 6 aa, Artificial sequence
  Protein classification predicting sequence
SWEWHE

SEQ ID NO: 75254 - protein, 6 aa, Artificial sequence
  Protein classification predicting sequence
CTGDLG

SEQ ID NO: 75255 - protein, 10 aa, Artificial sequence
  Protein classification predicting sequence
MAEVGGIGDE

SEQ ID NO: 75256 - protein, 11 aa, Artificial sequence
  Protein classification predicting sequence
RWGTPREFDFE

SEQ ID NO: 75257 - protein, 6 aa, Artificial sequence
  Protein classification predicting sequence
VPYLVN

SEQ ID NO: 75258 - protein, 10 aa, Artificial sequence
  Protein classification predicting sequence
IRQHQFDKVE

SEQ ID NO: 75259 - protein, 7 aa, Artificial sequence
  Protein classification predicting sequence
GHAEAIL

SEQ ID NO: 75260 - protein, 9 aa, Artificial sequence
  Protein classification predicting sequence
ELVHTLNGS

SEQ ID NO: 75261 - protein, 16 aa, Artificial sequence
  Protein classification predicting sequence
ELVHTLNGSGLAVGRT

SEQ ID NO: 75262 - protein, 8 aa, Artificial sequence
  Protein classification predicting sequence
LVHTLNGS

SEQ ID NO: 75263 - protein, 6 aa, Artificial sequence
  Protein classification predicting sequence
QQADGS

SEQ ID NO: 75264 - protein, 6 aa, Artificial sequence
  Protein classification predicting sequence
EPKPHW

SEQ ID NO: 75265 - protein, 8 aa, Artificial sequence
  Protein classification predicting sequence
LKREKKDA

SEQ ID NO: 75266 - protein, 10 aa, Artificial sequence
  Protein classification predicting sequence
PVGETEDDNV

SEQ ID NO: 75267 - protein, 12 aa, Artificial sequence
  Protein classification predicting sequence
GARLERALINFM

SEQ ID NO: 75268 - protein, 10 aa, Artificial sequence
  Protein classification predicting sequence
LPYRVMSMCT

SEQ ID NO: 75269 - protein, 23 aa, Artificial sequence
  Protein classification predicting sequence
SMCTADLGFTAAKKYDLEVWIPS

SEQ ID NO: 75270 - protein, 12 aa, Artificial sequence
  Protein classification predicting sequence
GRTVAAILENYQ

SEQ ID NO: 75271 - protein, 8 aa, Artificial sequence
  Protein classification predicting sequence
KRNEVSQQ

SEQ ID NO: 75272 - protein, 7 aa, Artificial sequence
  Protein classification predicting sequence
EFSFEPK

SEQ ID NO: 75273 - protein, 6 aa, Artificial sequence
  Protein classification predicting sequence
PPYMVN

SEQ ID NO: 75274 - protein, 15 aa, Artificial sequence
  Protein classification predicting sequence
GKPEHVHTLNGSGLA

SEQ ID NO: 75275 - protein, 9 aa, Artificial sequence
  Protein classification predicting sequence
HTLNGSGLA

SEQ ID NO: 75276 - protein, 6 aa, Artificial sequence
  Protein classification predicting sequence
LRPYMG

SEQ ID NO: 75277 - protein, 8 aa, Artificial sequence
  Protein classification predicting sequence
EELKSKRN

SEQ ID NO: 75278 - protein, 5 aa, Artificial sequence
  Protein classification predicting sequence
EVWMP

SEQ ID NO: 75279 - protein, 12 aa, Artificial sequence
  Protein classification predicting sequence
KPEYVHTLNGSG

SEQ ID NO: 75280 - protein, 8 aa, Artificial sequence
  Protein classification predicting sequence
VHTLNGSG

SEQ ID NO: 75281 - protein, 6 aa, Artificial sequence
  Protein classification predicting sequence
FMLDVH

SEQ ID NO: 75282 - protein, 7 aa, Artificial sequence
  Protein classification predicting sequence
AILENYQ

SEQ ID NO: 75283 - protein, 9 aa, Artificial sequence
  Protein classification predicting sequence
TYDLEVWLP

SEQ ID NO: 75284 - protein, 10 aa, Artificial sequence
  Protein classification predicting sequence
FQARRANIRF

SEQ ID NO: 75285 - protein, 9 aa, Artificial sequence
  Protein classification predicting sequence
LAVGRTLVA

SEQ ID NO: 75286 - protein, 7 aa, Artificial sequence
  Protein classification predicting sequence
GSRFYFL

SEQ ID NO: 75287 - protein, 9 aa, Artificial sequence
  Protein classification predicting sequence
RVHQFDKVE

SEQ ID NO: 75288 - protein, 8 aa, Artificial sequence
  Protein classification predicting sequence
QARRLNIR

SEQ ID NO: 75289 - protein, 8 aa, Artificial sequence
  Protein classification predicting sequence
HRALSQFM

SEQ ID NO: 75290 - protein, 7 aa, Artificial sequence
  Protein classification predicting sequence
AHTPCFR

SEQ ID NO: 75291 - protein, 9 aa, Artificial sequence
  Protein classification predicting sequence
LQLLELPYR

SEQ ID NO: 75292 - protein, 13 aa, Artificial sequence
  Protein classification predicting sequence
GRDTRGMIRQHQF

SEQ ID NO: 75293 - protein, 8 aa, Artificial sequence
  Protein classification predicting sequence
PKDHLELG

SEQ ID NO: 75294 - protein, 7 aa, Artificial sequence
  Protein classification predicting sequence
TAIATTR

SEQ ID NO: 75295 - protein, 6 aa, Artificial sequence
  Protein classification predicting sequence
EQFVYS

SEQ ID NO: 75296 - protein, 7 aa, Artificial sequence
  Protein classification predicting sequence
DLEAWFP

SEQ ID NO: 75297 - protein, 8 aa, Artificial sequence
  Protein classification predicting sequence
ALGYMDFE

SEQ ID NO: 75298 - protein, 6 aa, Artificial sequence
  Protein classification predicting sequence
MFGTGQ

SEQ ID NO: 75299 - protein, 7 aa, Artificial sequence
  Protein classification predicting sequence
REISSCS

SEQ ID NO: 75300 - protein, 6 aa, Artificial sequence
  Protein classification predicting sequence
YVPYLV

SEQ ID NO: 75301 - protein, 6 aa, Artificial sequence
  Protein classification predicting sequence
EVPLTN

SEQ ID NO: 75302 - protein, 8 aa, Artificial sequence
  Protein classification predicting sequence
GLIRLHQF

SEQ ID NO: 75303 - protein, 8 aa, Artificial sequence
  Protein classification predicting sequence
YVPYLVNH

SEQ ID NO: 75304 - protein, 11 aa, Artificial sequence
  Protein classification predicting sequence
LIPTAEVPLTN

SEQ ID NO: 75305 - protein, 6 aa, Artificial sequence
  Protein classification predicting sequence
PNLLRN

SEQ ID NO: 75306 - protein, 6 aa, Artificial sequence
  Protein classification predicting sequence
LARRGF

SEQ ID NO: 75307 - protein, 6 aa, Artificial sequence
  Protein classification predicting sequence
EVSRWG

SEQ ID NO: 75308 - protein, 6 aa, Artificial sequence
  Protein classification predicting sequence
GTGQLP

SEQ ID NO: 75309 - protein, 6 aa, Artificial sequence
  Protein classification predicting sequence
YMNGLE

SEQ ID NO: 75310 - protein, 8 aa, Artificial sequence
  Protein classification predicting sequence
NVEVRRWG

SEQ ID NO: 75311 - protein, 11 aa, Artificial sequence
  Protein classification predicting sequence
PCFRSEAGSYG

SEQ ID NO: 75312 - protein, 7 aa, Artificial sequence
  Protein classification predicting sequence
EMVGHAE

SEQ ID NO: 75313 - protein, 14 aa, Artificial sequence
  Protein classification predicting sequence
PAQNTYREISSCSN

SEQ ID NO: 75314 - protein, 7 aa, Artificial sequence
  Protein classification predicting sequence
GFSAAKT

SEQ ID NO: 75315 - protein, 7 aa, Artificial sequence
  Protein classification predicting sequence
KDHVDLG

SEQ ID NO: 75316 - protein, 8 aa, Artificial sequence
  Protein classification predicting sequence
LCTGDMGF

SEQ ID NO: 75317 - protein, 8 aa, Artificial sequence
  Protein classification predicting sequence
CGDFQARR

SEQ ID NO: 75318 - protein, 6 aa, Artificial sequence
  Protein classification predicting sequence
DFQSRR

SEQ ID NO: 75319 - protein, 7 aa, Artificial sequence
  Protein classification predicting sequence
LIPTAEV

SEQ ID NO: 75320 - protein, 11 aa, Artificial sequence
  Protein classification predicting sequence
AILENYQQEDG

SEQ ID NO: 75321 - protein, 10 aa, Artificial sequence
  Protein classification predicting sequence
IPTAEVPVTN

SEQ ID NO: 75322 - protein, 6 aa, Artificial sequence
  Protein classification predicting sequence
YDIEVW

SEQ ID NO: 75323 - protein, 6 aa, Artificial sequence
  Protein classification predicting sequence
ARLHRA

SEQ ID NO: 75324 - protein, 7 aa, Artificial sequence
  Protein classification predicting sequence
YLISTSE

SEQ ID NO: 75325 - protein, 9 aa, Artificial sequence
  Protein classification predicting sequence
YREISSCSN

SEQ ID NO: 75326 - protein, 9 aa, Artificial sequence
  Protein classification predicting sequence
FQARRMKAR

SEQ ID NO: 75327 - protein, 8 aa, Artificial sequence
  Protein classification predicting sequence
FEPKAHWD

SEQ ID NO: 75328 - protein, 8 aa, Artificial sequence
  Protein classification predicting sequence
ENYQQEDG

SEQ ID NO: 75329 - protein, 16 aa, Artificial sequence
  Protein classification predicting sequence
SMTGTGQLPKFEEDAF

SEQ ID NO: 75330 - protein, 8 aa, Artificial sequence
  Protein classification predicting sequence
DGTIIIPE

SEQ ID NO: 75331 - protein, 7 aa, Artificial sequence
  Protein classification predicting sequence
LRPYMGG

SEQ ID NO: 75332 - protein, 9 aa, Artificial sequence
  Protein classification predicting sequence
RGEDPALVD

SEQ ID NO: 75333 - protein, 7 aa, Artificial sequence
  Protein classification predicting sequence
SAARKFD

SEQ ID NO: 75334 - protein, 11 aa, Artificial sequence
  Protein classification predicting sequence
IEVPYRVIDVA

SEQ ID NO: 75335 - protein, 7 aa, Artificial sequence
  Protein classification predicting sequence
EAWVPTQ

SEQ ID NO: 75336 - protein, 8 aa, Artificial sequence
  Protein classification predicting sequence
AEKVLQLL

SEQ ID NO: 75337 - protein, 13 aa, Artificial sequence
  Protein classification predicting sequence
HTLNGSGLAVGRT

SEQ ID NO: 75338 - protein, 16 aa, Artificial sequence
  Protein classification predicting sequence
HTLNGSGLAVGRTLVA

SEQ ID NO: 75339 - protein, 8 aa, Artificial sequence
  Protein classification predicting sequence
ENYQQADG

SEQ ID NO: 75340 - protein, 6 aa, Artificial sequence
  Protein classification predicting sequence
EDDNVE

SEQ ID NO: 75341 - protein, 6 aa, Artificial sequence
  Protein classification predicting sequence
CTGDMG

SEQ ID NO: 75342 - protein, 7 aa, Artificial sequence
  Protein classification predicting sequence
DFERAAK

SEQ ID NO: 75343 - protein, 7 aa, Artificial sequence
  Protein classification predicting sequence
TGQLPKF

SEQ ID NO: 75344 - protein, 7 aa, Artificial sequence
  Protein classification predicting sequence
EVWLPGQ

SEQ ID NO: 75345 - protein, 7 aa, Artificial sequence
  Protein classification predicting sequence
ARLERAL

SEQ ID NO: 75346 - protein, 8 aa, Artificial sequence
  Protein classification predicting sequence
LIPTAEVP

SEQ ID NO: 75347 - protein, 7 aa, Artificial sequence
  Protein classification predicting sequence
DTRGLIR

SEQ ID NO: 75348 - protein, 10 aa, Artificial sequence
  Protein classification predicting sequence
LARRGFKLDV

SEQ ID NO: 75349 - protein, 9 aa, Artificial sequence
  Protein classification predicting sequence
EERRKVLQV

SEQ ID NO: 75350 - protein, 12 aa, Artificial sequence
  Protein classification predicting sequence
GLDFAAAVKLTG

SEQ ID NO: 75351 - protein, 7 aa, Artificial sequence
  Protein classification predicting sequence
HTQQHGY

SEQ ID NO: 75352 - protein, 5 aa, Artificial sequence
  Protein classification predicting sequence
QQHGY

SEQ ID NO: 75353 - protein, 10 aa, Artificial sequence
  Protein classification predicting sequence
KTYDLEVWLP

SEQ ID NO: 75354 - protein, 12 aa, Artificial sequence
  Protein classification predicting sequence
KTYDLEVWLPAQ

SEQ ID NO: 75355 - protein, 11 aa, Artificial sequence
  Protein classification predicting sequence
WDFQARRMQAR

SEQ ID NO: 75356 - protein, 24 aa, Artificial sequence
  Protein classification predicting sequence
DKKTRLVHTLNGSGLAVGRTLVAV

SEQ ID NO: 75357 - protein, 19 aa, Artificial sequence
  Protein classification predicting sequence
LVHTLNGSGLAVGRTLVAV

SEQ ID NO: 75358 - protein, 7 aa, Artificial sequence
  Protein classification predicting sequence
YVPYLVN

SEQ ID NO: 75359 - protein, 11 aa, Artificial sequence
  Protein classification predicting sequence
QNTYREISSCS

SEQ ID NO: 75360 - protein, 8 aa, Artificial sequence
  Protein classification predicting sequence
YREISSCS

SEQ ID NO: 75361 - protein, 18 aa, Artificial sequence
  Protein classification predicting sequence
KPELVHTLNGSGLAVGRT

SEQ ID NO: 75362 - protein, 7 aa, Artificial sequence
  Protein classification predicting sequence
SYDELEK

SEQ ID NO: 75363 - protein, 6 aa, Artificial sequence
  Protein classification predicting sequence
PHESVP

SEQ ID NO: 75364 - protein, 11 aa, Artificial sequence
  Protein classification predicting sequence
EAGSAGRDTRG

SEQ ID NO: 75365 - protein, 14 aa, Artificial sequence
  Protein classification predicting sequence
EAGSAGRDTRGLIR

SEQ ID NO: 75366 - protein, 24 aa, Artificial sequence
  Protein classification predicting sequence
EAGSAGRDTRGLIRQHQFNKVELV

SEQ ID NO: 75367 - protein, 29 aa, Artificial sequence
  Protein classification predicting sequence
PSYGTYREISSCSNFEAFQARRANIRFRR

SEQ ID NO: 75368 - protein, 10 aa, Artificial sequence
  Protein classification predicting sequence
VHTLNGSGLA

SEQ ID NO: 75369 - protein, 7 aa, Artificial sequence
  Protein classification predicting sequence
KLTGARF

SEQ ID NO: 75370 - protein, 7 aa, Artificial sequence
  Protein classification predicting sequence
GKDENDN

SEQ ID NO: 75371 - protein, 13 aa, Artificial sequence
  Protein classification predicting sequence
GRDTRGLIRLHQF

SEQ ID NO: 75372 - protein, 7 aa, Artificial sequence
  Protein classification predicting sequence
DLEVWLP

SEQ ID NO: 75373 - protein, 7 aa, Artificial sequence
  Protein classification predicting sequence
KQHFELG

SEQ ID NO: 75374 - protein, 9 aa, Artificial sequence
  Protein classification predicting sequence
RGMLRQHQF

SEQ ID NO: 75375 - protein, 8 aa, Artificial sequence
  Protein classification predicting sequence
AAKTFDLE

SEQ ID NO: 75376 - protein, 12 aa, Artificial sequence
  Protein classification predicting sequence
QNTYREISSCSN

SEQ ID NO: 75377 - protein, 19 aa, Artificial sequence
  Protein classification predicting sequence
TYREISSCSNMWDFQARRM

SEQ ID NO: 75378 - protein, 6 aa, Artificial sequence
  Protein classification predicting sequence
FQARRM

SEQ ID NO: 75379 - protein, 8 aa, Artificial sequence
  Protein classification predicting sequence
AKARGEDI

SEQ ID NO: 75380 - protein, 8 aa, Artificial sequence
  Protein classification predicting sequence
QFMLDLHT

SEQ ID NO: 75381 - protein, 27 aa, Artificial sequence
  Protein classification predicting sequence
YVPYLVNHATLYGTGQLPKFGEDLFHT

SEQ ID NO: 75382 - protein, 12 aa, Artificial sequence
  Protein classification predicting sequence
HQFDKVEMVQIV

SEQ ID NO: 75383 - protein, 10 aa, Artificial sequence
  Protein classification predicting sequence
TYREISSCSN

SEQ ID NO: 75384 - protein, 7 aa, Artificial sequence
  Protein classification predicting sequence
PNIPHES

SEQ ID NO: 75385 - protein, 9 aa, Artificial sequence
  Protein classification predicting sequence
PNIPHESVP

SEQ ID NO: 75386 - protein, 8 aa, Artificial sequence
  Protein classification predicting sequence
LDFERGAK

SEQ ID NO: 75387 - protein, 6 aa, Artificial sequence
  Protein classification predicting sequence
FRREAG

SEQ ID NO: 75388 - protein, 6 aa, Artificial sequence
  Protein classification predicting sequence
LVAIME

SEQ ID NO: 75389 - protein, 6 aa, Artificial sequence
  Protein classification predicting sequence
VRPEDS

SEQ ID NO: 75390 - protein, 7 aa, Artificial sequence
  Protein classification predicting sequence
HTLNGSG

SEQ ID NO: 75391 - protein, 5 aa, Artificial sequence
  Protein classification predicting sequence
PYMNG

SEQ ID NO: 75392 - protein, 7 aa, Artificial sequence
  Protein classification predicting sequence
PFMGGKT

SEQ ID NO: 75393 - protein, 18 aa, Artificial sequence
  Protein classification predicting sequence
LPIKMTAHTPCFRSEAGS

SEQ ID NO: 75394 - protein, 10 aa, Artificial sequence
  Protein classification predicting sequence
TPCFRSEAGS

SEQ ID NO: 75395 - protein, 6 aa, Artificial sequence
  Protein classification predicting sequence
HTLNGS

SEQ ID NO: 75396 - protein, 10 aa, Artificial sequence
  Protein classification predicting sequence
LQAERNSRSK

SEQ ID NO: 75397 - protein, 9 aa, Artificial sequence
  Protein classification predicting sequence
PNLPADEVP

SEQ ID NO: 75398 - protein, 8 aa, Artificial sequence
  Protein classification predicting sequence
KDHVDLGE

SEQ ID NO: 75399 - protein, 8 aa, Artificial sequence
  Protein classification predicting sequence
IARMHRAL

SEQ ID NO: 75400 - protein, 12 aa, Artificial sequence
  Protein classification predicting sequence
FMLDLHTDEHGY

SEQ ID NO: 75401 - protein, 14 aa, Artificial sequence
  Protein classification predicting sequence
GTGQLPKFGKDLFH

SEQ ID NO: 75402 - protein, 9 aa, Artificial sequence
  Protein classification predicting sequence
LQKLELPYR

SEQ ID NO: 75403 - protein, 9 aa, Artificial sequence
  Protein classification predicting sequence
LCTGDMGFG

SEQ ID NO: 75404 - protein, 12 aa, Artificial sequence
  Protein classification predicting sequence
HTLNGSGLAVGR

SEQ ID NO: 75405 - protein, 7 aa, Artificial sequence
  Protein classification predicting sequence
LVAVLEN

SEQ ID NO: 75406 - protein, 6 aa, Artificial sequence
  Protein classification predicting sequence
PKAHWD

SEQ ID NO: 75407 - protein, 8 aa, Artificial sequence
  Protein classification predicting sequence
LQKLGLPY

SEQ ID NO: 75408 - protein, 6 aa, Artificial sequence
  Protein classification predicting sequence
DFQARR

SEQ ID NO: 75409 - protein, 14 aa, Artificial sequence
  Protein classification predicting sequence
DFQARRAQIRYRDE

SEQ ID NO: 75410 - protein, 6 aa, Artificial sequence
  Protein classification predicting sequence
YKGAGA

SEQ ID NO: 75411 - protein, 6 aa, Artificial sequence
  Protein classification predicting sequence
IRYRDE

SEQ ID NO: 75412 - protein, 7 aa, Artificial sequence
  Protein classification predicting sequence
PNLPHES

SEQ ID NO: 75413 - protein, 13 aa, Artificial sequence
  Protein classification predicting sequence
FYKGAGARLERAL

SEQ ID NO: 75414 - protein, 8 aa, Artificial sequence
  Protein classification predicting sequence
GARLERAL

SEQ ID NO: 75415 - protein, 18 aa, Artificial sequence
  Protein classification predicting sequence
SMFGTGQYPKFKEDTFEL

SEQ ID NO: 75416 - protein, 16 aa, Artificial sequence
  Protein classification predicting sequence
FVLIPTAEVPLTNYYR

SEQ ID NO: 75417 - protein, 22 aa, Artificial sequence
  Protein classification predicting sequence
FVLIPTAEVPLTNYYRGEILDG

SEQ ID NO: 75418 - protein, 39 aa, Artificial sequence
  Protein classification predicting sequence
FTAMSPSFRSEAGSAGRDTRGLIRLHQFHKVEMVKFAKP

SEQ ID NO: 75419 - protein, 6 aa, Artificial sequence
  Protein classification predicting sequence
KLSGAR

SEQ ID NO: 75420 - protein, 8 aa, Artificial sequence
  Protein classification predicting sequence
TGQYPKFK

SEQ ID NO: 75421 - protein, 11 aa, Artificial sequence
  Protein classification predicting sequence
EAGSYGKDTRG

SEQ ID NO: 75422 - protein, 6 aa, Artificial sequence
  Protein classification predicting sequence
NGSGLA

SEQ ID NO: 75423 - protein, 32 aa, Artificial sequence
  Protein classification predicting sequence
MTAHTPCFRSEAGSYGRDTRGLIRMHQFDKVE

SEQ ID NO: 75424 - protein, 7 aa, Artificial sequence
  Protein classification predicting sequence
LGLPYRK

SEQ ID NO: 75425 - protein, 12 aa, Artificial sequence
  Protein classification predicting sequence
KTYDLEVWVPAQ

SEQ ID NO: 75426 - protein, 6 aa, Artificial sequence
  Protein classification predicting sequence
GSRFVV

SEQ ID NO: 75427 - protein, 6 aa, Artificial sequence
  Protein classification predicting sequence
AILENY

SEQ ID NO: 75428 - protein, 6 aa, Artificial sequence
  Protein classification predicting sequence
YKGLGA

SEQ ID NO: 75429 - protein, 10 aa, Artificial sequence
  Protein classification predicting sequence
MTGTGQLPKF

SEQ ID NO: 75430 - protein, 7 aa, Artificial sequence
  Protein classification predicting sequence
CFRREAG

SEQ ID NO: 75431 - protein, 12 aa, Artificial sequence
  Protein classification predicting sequence
IRQHQFNKVELV

SEQ ID NO: 75432 - protein, 6 aa, Artificial sequence
  Protein classification predicting sequence
LQNERN

SEQ ID NO: 75433 - protein, 9 aa, Artificial sequence
  Protein classification predicting sequence
DNVEIRRWG

SEQ ID NO: 75434 - protein, 10 aa, Artificial sequence
  Protein classification predicting sequence
DFEAAAKLSG

SEQ ID NO: 75435 - protein, 11 aa, Artificial sequence
  Protein classification predicting sequence
LIPTAEVPVTN

SEQ ID NO: 75436 - protein, 8 aa, Artificial sequence
  Protein classification predicting sequence
TNLVRDEI

SEQ ID NO: 75437 - protein, 9 aa, Artificial sequence
  Protein classification predicting sequence
VQIVRPEDS

SEQ ID NO: 75438 - protein, 7 aa, Artificial sequence
  Protein classification predicting sequence
ALVPFVG

SEQ ID NO: 75439 - protein, 6 aa, Artificial sequence
  Protein classification predicting sequence
GQFPKF

SEQ ID NO: 75440 - protein, 7 aa, Artificial sequence
  Protein classification predicting sequence
DTKGLIR

SEQ ID NO: 75441 - protein, 6 aa, Artificial sequence
  Protein classification predicting sequence
IRLHQF

SEQ ID NO: 75442 - protein, 15 aa, Artificial sequence
  Protein classification predicting sequence
RGAKVSGSRFYFLTG

SEQ ID NO: 75443 - protein, 14 aa, Artificial sequence
  Protein classification predicting sequence
GTGFLGAHAEEVYR

SEQ ID NO: 75444 - protein, 6 aa, Artificial sequence
  Protein classification predicting sequence
GKDTRG

SEQ ID NO: 75445 - protein, 13 aa, Artificial sequence
  Protein classification predicting sequence
GKPQIAATLNGTL

SEQ ID NO: 75446 - protein, 7 aa, Artificial sequence
  Protein classification predicting sequence
PEALVPF

SEQ ID NO: 75447 - protein, 6 aa, Artificial sequence
  Protein classification predicting sequence
KKWGTP

SEQ ID NO: 75448 - protein, 7 aa, Artificial sequence
  Protein classification predicting sequence
KVTGSRF

SEQ ID NO: 75449 - protein, 6 aa, Artificial sequence
  Protein classification predicting sequence
LTNYYR

SEQ ID NO: 75450 - protein, 8 aa, Artificial sequence
  Protein classification predicting sequence
EVWLPSYN

SEQ ID NO: 75451 - protein, 7 aa, Artificial sequence
  Protein classification predicting sequence
DGSITIP

SEQ ID NO: 75452 - protein, 7 aa, Artificial sequence
  Protein classification predicting sequence
GDFQGRR

SEQ ID NO: 75453 - protein, 9 aa, Artificial sequence
  Protein classification predicting sequence
RNSISKQIG

SEQ ID NO: 75454 - protein, 9 aa, Artificial sequence
  Protein classification predicting sequence
GTPREFDFE

SEQ ID NO: 75455 - protein, 6 aa, Artificial sequence
  Protein classification predicting sequence
RRWGTP

SEQ ID NO: 75456 - protein, 13 aa, Artificial sequence
  Protein classification predicting sequence
ARLHRALAQFMLD

SEQ ID NO: 75457 - protein, 6 aa, Artificial sequence
  Protein classification predicting sequence
FRSEAG

SEQ ID NO: 75458 - protein, 9 aa, Artificial sequence
  Protein classification predicting sequence
HQFDKVELV

SEQ ID NO: 75459 - protein, 12 aa, Artificial sequence
  Protein classification predicting sequence
GALLQLGLLQLA

SEQ ID NO: 75460 - protein, 8 aa, Artificial sequence
  Protein classification predicting sequence
LQHRGEDL

SEQ ID NO: 75461 - protein, 13 aa, Artificial sequence
  Protein classification predicting sequence
PTAEVPVTNYHRE

SEQ ID NO: 75462 - protein, 8 aa, Artificial sequence
  Protein classification predicting sequence
FVKPEDSY

SEQ ID NO: 75463 - protein, 29 aa, Artificial sequence
  Protein classification predicting sequence
LPYRVMSMCTGDLGFTAAKKYDIEVWIPS

SEQ ID NO: 75464 - protein, 7 aa, Artificial sequence
  Protein classification predicting sequence
PNLPHDS

SEQ ID NO: 75465 - protein, 6 aa, Artificial sequence
  Protein classification predicting sequence
PTAEVP

SEQ ID NO: 75466 - protein, 8 aa, Artificial sequence
  Protein classification predicting sequence
HQFNKVEL

SEQ ID NO: 75467 - protein, 7 aa, Artificial sequence
  Protein classification predicting sequence
KTYDLEV

SEQ ID NO: 75468 - protein, 18 aa, Artificial sequence
  Protein classification predicting sequence
LVHTLNGSGLAVGRTLVA

SEQ ID NO: 75469 - protein, 8 aa, Artificial sequence
  Protein classification predicting sequence
LHTEQHGY

SEQ ID NO: 75470 - protein, 11 aa, Artificial sequence
  Protein classification predicting sequence
LGEMAGGLDFA

SEQ ID NO: 75471 - protein, 9 aa, Artificial sequence
  Protein classification predicting sequence
GTGQLPKFG

SEQ ID NO: 75472 - protein, 10 aa, Artificial sequence
  Protein classification predicting sequence
DFQARRMQAR

SEQ ID NO: 75473 - protein, 39 aa, Artificial sequence
  Protein classification predicting sequence
DFQARRMQARFRRKGEKKPELVHTLNGSGLAVGRTMVAI

SEQ ID NO: 75474 - protein, 7 aa, Artificial sequence
  Protein classification predicting sequence
LINFMLD

SEQ ID NO: 75475 - protein, 6 aa, Artificial sequence
  Protein classification predicting sequence
HWEIGE

SEQ ID NO: 75476 - protein, 6 aa, Artificial sequence
  Protein classification predicting sequence
EHYTPY

SEQ ID NO: 75477 - protein, 8 aa, Artificial sequence
  Protein classification predicting sequence
SVPVGADE

SEQ ID NO: 75478 - protein, 10 aa, Artificial sequence
  Protein classification predicting sequence
NVEVRRWGTP

SEQ ID NO: 75479 - protein, 7 aa, Artificial sequence
  Protein classification predicting sequence
FEVKDHV

SEQ ID NO: 75480 - protein, 6 aa, Artificial sequence
  Protein classification predicting sequence
LELPYR

SEQ ID NO: 75481 - protein, 6 aa, Artificial sequence
  Protein classification predicting sequence
LIPTAE

SEQ ID NO: 75482 - protein, 10 aa, Artificial sequence
  Protein classification predicting sequence
DTFKDAIYKI

SEQ ID NO: 75483 - protein, 7 aa, Artificial sequence
  Protein classification predicting sequence
DEILELD

SEQ ID NO: 75484 - protein, 7 aa, Artificial sequence
  Protein classification predicting sequence
ELDKKWR

SEQ ID NO: 75485 - protein, 13 aa, Artificial sequence
  Protein classification predicting sequence
VILDLALIRFALD

SEQ ID NO: 75486 - protein, 29 aa, Artificial sequence
  Protein classification predicting sequence
LEIPYRVVNICTGDLGYVAAKKYDIEAWM

SEQ ID NO: 75487 - protein, 11 aa, Artificial sequence
  Protein classification predicting sequence
VHTLNSTAIAT

SEQ ID NO: 75488 - protein, 23 aa, Artificial sequence
  Protein classification predicting sequence
VHTLNSTAIATSRAIVAILENHQ

SEQ ID NO: 75489 - protein, 6 aa, Artificial sequence
  Protein classification predicting sequence
NVEVRR

SEQ ID NO: 75490 - protein, 14 aa, Artificial sequence
  Protein classification predicting sequence
AHSPCFRSEAGSYG

SEQ ID NO: 75491 - protein, 11 aa, Artificial sequence
  Protein classification predicting sequence
FQARRMQARFR

SEQ ID NO: 75492 - protein, 19 aa, Artificial sequence
  Protein classification predicting sequence
FQARRMQARFRNAQGKPEL

SEQ ID NO: 75493 - protein, 8 aa, Artificial sequence
  Protein classification predicting sequence
QLPKFEED

SEQ ID NO: 75494 - protein, 7 aa, Artificial sequence
  Protein classification predicting sequence
DGSITVP

SEQ ID NO: 75495 - protein, 8 aa, Artificial sequence
  Protein classification predicting sequence
KVEMFAFT

SEQ ID NO: 75496 - protein, 8 aa, Artificial sequence
  Protein classification predicting sequence
EVPYRVID

SEQ ID NO: 75497 - protein, 7 aa, Artificial sequence
  Protein classification predicting sequence
SNCTDYQ

SEQ ID NO: 75498 - protein, 11 aa, Artificial sequence
  Protein classification predicting sequence
SNCTDYQARRL

SEQ ID NO: 75499 - protein, 8 aa, Artificial sequence
  Protein classification predicting sequence
AKLSGARF

SEQ ID NO: 75500 - protein, 7 aa, Artificial sequence
  Protein classification predicting sequence
IKWIREN

SEQ ID NO: 75501 - protein, 11 aa, Artificial sequence
  Protein classification predicting sequence
GQLPKFAEESF

SEQ ID NO: 75502 - protein, 47 aa, Artificial sequence
  Protein classification predicting sequence
TENLQAERNSRSKSIGQAKARGEDIEPLRLEVNKLGEELDAAKAELD

SEQ ID NO: 75503 - protein, 42 aa, Artificial sequence
  Protein classification predicting sequence
AEIRDIALTIPNLPADEVPVGKDENDNVEVSRWGTPREFDFE

SEQ ID NO: 75504 - protein, 64 aa, Artificial sequence
  Protein classification predicting sequence
RDHVTLGEMHSGLDFAAAVKLTGSRFVVMKGQIARMHRALSQFMLDLHTEQHGYSENYVPYLVN

SEQ ID NO: 75505 - protein, 27 aa, Artificial sequence
  Protein classification predicting sequence
DTLYGTGQLPKFAGDLFHTRPLEEEAD

SEQ ID NO: 75506 - protein, 8 aa, Artificial sequence
  Protein classification predicting sequence
LPIKLTAH

SEQ ID NO: 75507 - protein, 8 aa, Artificial sequence
  Protein classification predicting sequence
CFRSEAGS

SEQ ID NO: 75508 - protein, 6 aa, Artificial sequence
  Protein classification predicting sequence
YDIEAW

SEQ ID NO: 75509 - protein, 9 aa, Artificial sequence
  Protein classification predicting sequence
QNTYREISS

SEQ ID NO: 75510 - protein, 8 aa, Artificial sequence
  Protein classification predicting sequence
ENYQNEDG

SEQ ID NO: 75511 - protein, 16 aa, Artificial sequence
  Protein classification predicting sequence
VKSKIELRGDDPKVVD

SEQ ID NO: 75512 - protein, 9 aa, Artificial sequence
  Protein classification predicting sequence
RNKVSEEIA

SEQ ID NO: 75513 - protein, 9 aa, Artificial sequence
  Protein classification predicting sequence
ADDVIAEMR

SEQ ID NO: 75514 - protein, 11 aa, Artificial sequence
  Protein classification predicting sequence
NVEVKKWGTPR

SEQ ID NO: 75515 - protein, 9 aa, Artificial sequence
  Protein classification predicting sequence
VEELKMADF

SEQ ID NO: 75516 - protein, 14 aa, Artificial sequence
  Protein classification predicting sequence
RAAKVSGARFVYLT

SEQ ID NO: 75517 - protein, 9 aa, Artificial sequence
  Protein classification predicting sequence
LERALMNYM

SEQ ID NO: 75518 - protein, 13 aa, Artificial sequence
  Protein classification predicting sequence
TKHTTQHGYTEMM

SEQ ID NO: 75519 - protein, 9 aa, Artificial sequence
  Protein classification predicting sequence
PQLVNADTM

SEQ ID NO: 75520 - protein, 35 aa, Artificial sequence
  Protein classification predicting sequence
GTGQLPKFEEDLFKVEKEGLYTIPTAEVPLTNFYR

SEQ ID NO: 75521 - protein, 10 aa, Artificial sequence
  Protein classification predicting sequence
EIIQPGVLPE

SEQ ID NO: 75522 - protein, 8 aa, Artificial sequence
  Protein classification predicting sequence
KRNKENAD

SEQ ID NO: 75523 - protein, 7 aa, Artificial sequence
  Protein classification predicting sequence
TVLPNTP

SEQ ID NO: 75524 - protein, 7 aa, Artificial sequence
  Protein classification predicting sequence
NVEVRRW

SEQ ID NO: 75525 - protein, 10 aa, Artificial sequence
  Protein classification predicting sequence
LCTGDMGFSA

SEQ ID NO: 75526 - protein, 9 aa, Artificial sequence
  Protein classification predicting sequence
DLGSSAARK

SEQ ID NO: 75527 - protein, 7 aa, Artificial sequence
  Protein classification predicting sequence
PEVLRPY

SEQ ID NO: 75528 - protein, 8 aa, Artificial sequence
  Protein classification predicting sequence
AEKLARRG

SEQ ID NO: 75529 - protein, 7 aa, Artificial sequence
  Protein classification predicting sequence
ILDWERG

SEQ ID NO: 75530 - protein, 16 aa, Artificial sequence
  Protein classification predicting sequence
ELEKMTANAENILQKL

SEQ ID NO: 75531 - protein, 50 aa, Artificial sequence
  Protein classification predicting sequence
LCTGDMGFSAAKTYDLEVWIPAQNTYREISSCSNTEDFQARRAQIRYRDE

SEQ ID NO: 75532 - protein, 8 aa, Artificial sequence
  Protein classification predicting sequence
AILENYQN

SEQ ID NO: 75533 - protein, 7 aa, Artificial sequence
  Protein classification predicting sequence
KRIRTDF

SEQ ID NO: 75534 - protein, 7 aa, Artificial sequence
  Protein classification predicting sequence
KAHWDLG

SEQ ID NO: 75535 - protein, 11 aa, Artificial sequence
  Protein classification predicting sequence
KVTGARFLFYK

SEQ ID NO: 75536 - protein, 22 aa, Artificial sequence
  Protein classification predicting sequence
VNHDSMFGTGQYPKFKEDTFEL

SEQ ID NO: 75537 - protein, 65 aa, Artificial sequence
  Protein classification predicting sequence
YREISSCSNTEDFQARRAQIRYRDEADGKVKLLHTLNGSGLAVGRTVAAILENYQNEDGSVTIPE

SEQ ID NO: 75538 - protein, 8 aa, Artificial sequence
  Protein classification predicting sequence
VPIRFWGK

SEQ ID NO: 75539 - protein, 6 aa, Artificial sequence
  Protein classification predicting sequence
FRKEAG

SEQ ID NO: 75540 - protein, 7 aa, Artificial sequence
  Protein classification predicting sequence
ARLHRAL

SEQ ID NO: 75541 - protein, 8 aa, Artificial sequence
  Protein classification predicting sequence
NMHRDEIL

SEQ ID NO: 75542 - protein, 7 aa, Artificial sequence
  Protein classification predicting sequence
KYDIEVW

SEQ ID NO: 75543 - protein, 10 aa, Artificial sequence
  Protein classification predicting sequence
RYVEISSCSN

SEQ ID NO: 75544 - protein, 10 aa, Artificial sequence
  Protein classification predicting sequence
CFRREAGSYG

SEQ ID NO: 75545 - protein, 8 aa, Artificial sequence
  Protein classification predicting sequence
PCFRREAG

SEQ ID NO: 75546 - protein, 7 aa, Artificial sequence
  Protein classification predicting sequence
TNLYRDE

SEQ ID NO: 75547 - protein, 5 aa, Artificial sequence
  Protein classification predicting sequence
SACFR

SEQ ID NO: 75548 - protein, 6 aa, Artificial sequence
  Protein classification predicting sequence
PREFDF

SEQ ID NO: 75549 - protein, 8 aa, Artificial sequence
  Protein classification predicting sequence
RREAGSYG

SEQ ID NO: 75550 - protein, 7 aa, Artificial sequence
  Protein classification predicting sequence
CTGDLGF

SEQ ID NO: 75551 - protein, 9 aa, Artificial sequence
  Protein classification predicting sequence
YKEISSCSN

SEQ ID NO: 75552 - protein, 7 aa, Artificial sequence
  Protein classification predicting sequence
EISSCSN

SEQ ID NO: 75553 - protein, 6 aa, Artificial sequence
  Protein classification predicting sequence
QARRAN

SEQ ID NO: 75554 - protein, 7 aa, Artificial sequence
  Protein classification predicting sequence
LGILDFE

SEQ ID NO: 75555 - protein, 7 aa, Artificial sequence
  Protein classification predicting sequence
GARLERA

SEQ ID NO: 75556 - protein, 11 aa, Artificial sequence
  Protein classification predicting sequence
GTGQLPKFEED

SEQ ID NO: 75557 - protein, 13 aa, Artificial sequence
  Protein classification predicting sequence
GTGQLPKFEEDAF

SEQ ID NO: 75558 - protein, 7 aa, Artificial sequence
  Protein classification predicting sequence
SYEELEK

SEQ ID NO: 75559 - protein, 7 aa, Artificial sequence
  Protein classification predicting sequence
GYHSDEI

SEQ ID NO: 75560 - protein, 6 aa, Artificial sequence
  Protein classification predicting sequence
FVYCTP

SEQ ID NO: 75561 - protein, 7 aa, Artificial sequence
  Protein classification predicting sequence
SASNCTD

SEQ ID NO: 75562 - protein, 9 aa, Artificial sequence
  Protein classification predicting sequence
CTTFQARRL

SEQ ID NO: 75563 - protein, 7 aa, Artificial sequence
  Protein classification predicting sequence
HQFHKVE

SEQ ID NO: 75564 - protein, 8 aa, Artificial sequence
  Protein classification predicting sequence
RFVVMKGQ

SEQ ID NO: 75565 - protein, 22 aa, Artificial sequence
  Protein classification predicting sequence
VMKGQFARLHRAIAQFMLDLHT

SEQ ID NO: 75566 - protein, 19 aa, Artificial sequence
  Protein classification predicting sequence
LSLIPTAEVPVTNLVRDTI

SEQ ID NO: 75567 - protein, 22 aa, Artificial sequence
  Protein classification predicting sequence
TYREISSCSNMWDFQARRMQAR

SEQ ID NO: 75568 - protein, 23 aa, Artificial sequence
  Protein classification predicting sequence
QFMLDLHTEEHGYTEMYVPYLVN

SEQ ID NO: 75569 - protein, 15 aa, Artificial sequence
  Protein classification predicting sequence
GTGQLPKFGEDLFHT

SEQ ID NO: 75570 - protein, 33 aa, Artificial sequence
  Protein classification predicting sequence
KMTAHTPCFRSEAGSYGRDTRGLIRMHQFDKVE

SEQ ID NO: 75571 - protein, 8 aa, Artificial sequence
  Protein classification predicting sequence
VAILENNQ

SEQ ID NO: 75572 - protein, 6 aa, Artificial sequence
  Protein classification predicting sequence
LPYRKV

SEQ ID NO: 75573 - protein, 6 aa, Artificial sequence
  Protein classification predicting sequence
EVKKWG

SEQ ID NO: 75574 - protein, 6 aa, Artificial sequence
  Protein classification predicting sequence
LPIKMT

SEQ ID NO: 75575 - protein, 9 aa, Artificial sequence
  Protein classification predicting sequence
LPYRKILLC

SEQ ID NO: 75576 - protein, 8 aa, Artificial sequence
  Protein classification predicting sequence
KTYDLEVW

SEQ ID NO: 75577 - protein, 8 aa, Artificial sequence
  Protein classification predicting sequence
ENYQNADG

SEQ ID NO: 75578 - protein, 9 aa, Artificial sequence
  Protein classification predicting sequence
GTGQLPKFE

SEQ ID NO: 75579 - protein, 9 aa, Artificial sequence
  Protein classification predicting sequence
LLHTLNGSG

SEQ ID NO: 75580 - protein, 8 aa, Artificial sequence
  Protein classification predicting sequence
DVPLGADE

SEQ ID NO: 75581 - protein, 9 aa, Artificial sequence
  Protein classification predicting sequence
ARLHRALAQ

SEQ ID NO: 75582 - protein, 8 aa, Artificial sequence
  Protein classification predicting sequence
GMIRQHQF

SEQ ID NO: 75583 - protein, 12 aa, Artificial sequence
  Protein classification predicting sequence
KPELVHTLNGSG

SEQ ID NO: 75584 - protein, 16 aa, Artificial sequence
  Protein classification predicting sequence
AKARGEDIEPLRLEVN

SEQ ID NO: 75585 - protein, 9 aa, Artificial sequence
  Protein classification predicting sequence
LDAAKAELD

SEQ ID NO: 75586 - protein, 13 aa, Artificial sequence
  Protein classification predicting sequence
TAHTPCFRSEAGS

SEQ ID NO: 75587 - protein, 31 aa, Artificial sequence
  Protein classification predicting sequence
TAHTPCFRSEAGSYGRDTRGLIRMHQFDKVE

SEQ ID NO: 75588 - protein, 9 aa, Artificial sequence
  Protein classification predicting sequence
KGTTTEDIA

SEQ ID NO: 75589 - protein, 9 aa, Artificial sequence
  Protein classification predicting sequence
KIKEFKLLS

SEQ ID NO: 75590 - protein, 8 aa, Artificial sequence
  Protein classification predicting sequence
TSGHWDHY

SEQ ID NO: 75591 - protein, 5 aa, Artificial sequence
  Protein classification predicting sequence
PMNCP

SEQ ID NO: 75592 - protein, 20 aa, Artificial sequence
  Protein classification predicting sequence
HSYRELPIRIAELGTMHRYE

SEQ ID NO: 75593 - protein, 7 aa, Artificial sequence
  Protein classification predicting sequence
SGALSGL

SEQ ID NO: 75594 - protein, 49 aa, Artificial sequence
  Protein classification predicting sequence
EAEGEAAFYGPKLDVQVKTAIGKEETLSTVQLDFLLPERFDLTYIGEDG

SEQ ID NO: 75595 - protein, 17 aa, Artificial sequence
  Protein classification predicting sequence
GEAAFYGPKLDVQVKTA

SEQ ID NO: 75596 - protein, 6 aa, Artificial sequence
  Protein classification predicting sequence
AFYGPK

SEQ ID NO: 75597 - protein, 14 aa, Artificial sequence
  Protein classification predicting sequence
GYKIREAQMQKIPY

SEQ ID NO: 75598 - protein, 10 aa, Artificial sequence
  Protein classification predicting sequence
GAYWRGDSKN

SEQ ID NO: 75599 - protein, 7 aa, Artificial sequence
  Protein classification predicting sequence
LHMLEEA

SEQ ID NO: 75600 - protein, 8 aa, Artificial sequence
  Protein classification predicting sequence
KRDHRKLG

SEQ ID NO: 75601 - protein, 7 aa, Artificial sequence
  Protein classification predicting sequence
SGHWDHY

SEQ ID NO: 75602 - protein, 6 aa, Artificial sequence
  Protein classification predicting sequence
RMAEFG

SEQ ID NO: 75603 - protein, 7 aa, Artificial sequence
  Protein classification predicting sequence
ELGLSYE

SEQ ID NO: 75604 - protein, 7 aa, Artificial sequence
  Protein classification predicting sequence
TIQLDFQ

SEQ ID NO: 75605 - protein, 10 aa, Artificial sequence
  Protein classification predicting sequence
TIQLDFQMPE

SEQ ID NO: 75606 - protein, 7 aa, Artificial sequence
  Protein classification predicting sequence
RPVVIHR

SEQ ID NO: 75607 - protein, 7 aa, Artificial sequence
  Protein classification predicting sequence
QVQIIPV

SEQ ID NO: 75608 - protein, 6 aa, Artificial sequence
  Protein classification predicting sequence
GYKIRE

SEQ ID NO: 75609 - protein, 7 aa, Artificial sequence
  Protein classification predicting sequence
LCYGPPI

SEQ ID NO: 75610 - protein, 23 aa, Artificial sequence
  Protein classification predicting sequence
TTVYRCGPLIDLCRGPHVRHTGK

SEQ ID NO: 75611 - protein, 7 aa, Artificial sequence
  Protein classification predicting sequence
YWEGKAD

SEQ ID NO: 75612 - protein, 6 aa, Artificial sequence
  Protein classification predicting sequence
KPMNCP

SEQ ID NO: 75613 - protein, 10 aa, Artificial sequence
  Protein classification predicting sequence
ADFGVLHRNE

SEQ ID NO: 75614 - protein, 8 aa, Artificial sequence
  Protein classification predicting sequence
QDDAHIFC

SEQ ID NO: 75615 - protein, 6 aa, Artificial sequence
  Protein classification predicting sequence
LQRIYG

SEQ ID NO: 75616 - protein, 7 aa, Artificial sequence
  Protein classification predicting sequence
LKPMNCP

SEQ ID NO: 75617 - protein, 9 aa, Artificial sequence
  Protein classification predicting sequence
LKPMNCPGH

SEQ ID NO: 75618 - protein, 6 aa, Artificial sequence
  Protein classification predicting sequence
WHSSAH

SEQ ID NO: 75619 - protein, 13 aa, Artificial sequence
  Protein classification predicting sequence
TTVYRCGPLIDLC

SEQ ID NO: 75620 - protein, 5 aa, Artificial sequence
  Protein classification predicting sequence
GPHVP

SEQ ID NO: 75621 - protein, 7 aa, Artificial sequence
  Protein classification predicting sequence
RDHRKIG

SEQ ID NO: 75622 - protein, 12 aa, Artificial sequence
  Protein classification predicting sequence
RDHRKIGRDQEL

SEQ ID NO: 75623 - protein, 9 aa, Artificial sequence
  Protein classification predicting sequence
EVITPNMYN

SEQ ID NO: 75624 - protein, 8 aa, Artificial sequence
  Protein classification predicting sequence
YSENMFSF

SEQ ID NO: 75625 - protein, 6 aa, Artificial sequence
  Protein classification predicting sequence
GLTRVR

SEQ ID NO: 75626 - protein, 17 aa, Artificial sequence
  Protein classification predicting sequence
GLTRVRRFQQDDAHIFC

SEQ ID NO: 75627 - protein, 9 aa, Artificial sequence
  Protein classification predicting sequence
ERMIAILTE

SEQ ID NO: 75628 - protein, 14 aa, Artificial sequence
  Protein classification predicting sequence
KKIRNAQLAQYNFI

SEQ ID NO: 75629 - protein, 7 aa, Artificial sequence
  Protein classification predicting sequence
HRAILGS

SEQ ID NO: 75630 - protein, 9 aa, Artificial sequence
  Protein classification predicting sequence
PIKVTLPDG

SEQ ID NO: 75631 - protein, 8 aa, Artificial sequence
  Protein classification predicting sequence
TVYRCGPL

SEQ ID NO: 75632 - protein, 7 aa, Artificial sequence
  Protein classification predicting sequence
LSTRPEK

SEQ ID NO: 75633 - protein, 9 aa, Artificial sequence
  Protein classification predicting sequence
GAFYGPKID

SEQ ID NO: 75634 - protein, 7 aa, Artificial sequence
  Protein classification predicting sequence
QLDFQLP

SEQ ID NO: 75635 - protein, 12 aa, Artificial sequence
  Protein classification predicting sequence
QLDFQLPIRFNL

SEQ ID NO: 75636 - protein, 6 aa, Artificial sequence
  Protein classification predicting sequence
GKWPFW

SEQ ID NO: 75637 - protein, 7 aa, Artificial sequence
  Protein classification predicting sequence
AQLAQYN

SEQ ID NO: 75638 - protein, 5 aa, Artificial sequence
  Protein classification predicting sequence
HIFCT

SEQ ID NO: 75639 - protein, 7 aa, Artificial sequence
  Protein classification predicting sequence
IGPGLAK

SEQ ID NO: 75640 - protein, 10 aa, Artificial sequence
  Protein classification predicting sequence
EIIRHSCAHL

SEQ ID NO: 75641 - protein, 16 aa, Artificial sequence
  Protein classification predicting sequence
HQEYVDMCRGPHVPNT

SEQ ID NO: 75642 - protein, 13 aa, Artificial sequence
  Protein classification predicting sequence
KNEQLQRIYGTAW

SEQ ID NO: 75643 - protein, 5 aa, Artificial sequence
  Protein classification predicting sequence
WQCGT

SEQ ID NO: 75644 - protein, 7 aa, Artificial sequence
  Protein classification predicting sequence
WQCGTIQ

SEQ ID NO: 75645 - protein, 6 aa, Artificial sequence
  Protein classification predicting sequence
WLAPVQ

SEQ ID NO: 75646 - protein, 7 aa, Artificial sequence
  Protein classification predicting sequence
WLAPVQA

SEQ ID NO: 75647 - protein, 8 aa, Artificial sequence
  Protein classification predicting sequence
VMNITDSQ

SEQ ID NO: 75648 - protein, 13 aa, Artificial sequence
  Protein classification predicting sequence
DLRNEKIGFKIRE

SEQ ID NO: 75649 - protein, 9 aa, Artificial sequence
  Protein classification predicting sequence
RALELIRHD

SEQ ID NO: 75650 - protein, 7 aa, Artificial sequence
  Protein classification predicting sequence
IRHDAAH

SEQ ID NO: 75651 - protein, 7 aa, Artificial sequence
  Protein classification predicting sequence
AEAVQEL

SEQ ID NO: 75652 - protein, 8 aa, Artificial sequence
  Protein classification predicting sequence
EAEKRDHR

SEQ ID NO: 75653 - protein, 11 aa, Artificial sequence
  Protein classification predicting sequence
EAEKRDHRRLG

SEQ ID NO: 75654 - protein, 24 aa, Artificial sequence
  Protein classification predicting sequence
YQEVNAPQVLDKSLWETSGHWGWY

SEQ ID NO: 75655 - protein, 6 aa, Artificial sequence
  Protein classification predicting sequence
GLKSYR

SEQ ID NO: 75656 - protein, 8 aa, Artificial sequence
  Protein classification predicting sequence
HRYEASGA

SEQ ID NO: 75657 - protein, 11 aa, Artificial sequence
  Protein classification predicting sequence
SGALHGLMRVR

SEQ ID NO: 75658 - protein, 6 aa, Artificial sequence
  Protein classification predicting sequence
FCTEEQ

SEQ ID NO: 75659 - protein, 9 aa, Artificial sequence
  Protein classification predicting sequence
RPEKRVGSD

SEQ ID NO: 75660 - protein, 34 aa, Artificial sequence
  Protein classification predicting sequence
QPVMIHRAICGSMERFLGILIENFAGHMPLWFAP

SEQ ID NO: 75661 - protein, 8 aa, Artificial sequence
  Protein classification predicting sequence
RNEKINYK

SEQ ID NO: 75662 - protein, 6 aa, Artificial sequence
  Protein classification predicting sequence
NKMLQR

SEQ ID NO: 75663 - protein, 7 aa, Artificial sequence
  Protein classification predicting sequence
VYKDFGF

SEQ ID NO: 75664 - protein, 7 aa, Artificial sequence
  Protein classification predicting sequence
GSDEIWD

SEQ ID NO: 75665 - protein, 6 aa, Artificial sequence
  Protein classification predicting sequence
HRAILG

SEQ ID NO: 75666 - protein, 7 aa, Artificial sequence
  Protein classification predicting sequence
GPHLPST

SEQ ID NO: 75667 - protein, 6 aa, Artificial sequence
  Protein classification predicting sequence
ISGAYW

SEQ ID NO: 75668 - protein, 7 aa, Artificial sequence
  Protein classification predicting sequence
LWETSGH

SEQ ID NO: 75669 - protein, 7 aa, Artificial sequence
  Protein classification predicting sequence
RSYKELP

SEQ ID NO: 75670 - protein, 7 aa, Artificial sequence
  Protein classification predicting sequence
GTVYRYE

SEQ ID NO: 75671 - protein, 8 aa, Artificial sequence
  Protein classification predicting sequence
DFNLPERF

SEQ ID NO: 75672 - protein, 7 aa, Artificial sequence
  Protein classification predicting sequence
WLSPTQV

SEQ ID NO: 75673 - protein, 8 aa, Artificial sequence
  Protein classification predicting sequence
RYYPKGRL

SEQ ID NO: 75674 - protein, 9 aa, Artificial sequence
  Protein classification predicting sequence
LKFEFNFVD

SEQ ID NO: 75675 - protein, 14 aa, Artificial sequence
  Protein classification predicting sequence
ALSTVQIDVENAER

SEQ ID NO: 75676 - protein, 6 aa, Artificial sequence
  Protein classification predicting sequence
QVTIGP

SEQ ID NO: 75677 - protein, 19 aa, Artificial sequence
  Protein classification predicting sequence
DLCRGPHVPSTGKLKVFKL

SEQ ID NO: 75678 - protein, 11 aa, Artificial sequence
  Protein classification predicting sequence
KVAGAYWRGDS

SEQ ID NO: 75679 - protein, 11 aa, Artificial sequence
  Protein classification predicting sequence
MLEEAEKRDHR

SEQ ID NO: 75680 - protein, 12 aa, Artificial sequence
  Protein classification predicting sequence
VDRSLWEKSGHW

SEQ ID NO: 75681 - protein, 6 aa, Artificial sequence
  Protein classification predicting sequence
KLSTRP

SEQ ID NO: 75682 - protein, 7 aa, Artificial sequence
  Protein classification predicting sequence
WQCGTLQ

SEQ ID NO: 75683 - protein, 7 aa, Artificial sequence
  Protein classification predicting sequence
RLGAEYV

SEQ ID NO: 75684 - protein, 6 aa, Artificial sequence
  Protein classification predicting sequence
KDAIGR

SEQ ID NO: 75685 - protein, 6 aa, Artificial sequence
  Protein classification predicting sequence
MERFVA

SEQ ID NO: 75686 - protein, 6 aa, Artificial sequence
  Protein classification predicting sequence
RNEKIG

SEQ ID NO: 75687 - protein, 11 aa, Artificial sequence
  Protein classification predicting sequence
MINITFPDGAV

SEQ ID NO: 75688 - protein, 8 aa, Artificial sequence
  Protein classification predicting sequence
ITFPDGAV

SEQ ID NO: 75689 - protein, 7 aa, Artificial sequence
  Protein classification predicting sequence
LRHSTAH

SEQ ID NO: 75690 - protein, 7 aa, Artificial sequence
  Protein classification predicting sequence
HVPSTGK

SEQ ID NO: 75691 - protein, 9 aa, Artificial sequence
  Protein classification predicting sequence
IERYIVDKE

SEQ ID NO: 75692 - protein, 8 aa, Artificial sequence
  Protein classification predicting sequence
GYQHVYTP

SEQ ID NO: 75693 - protein, 6 aa, Artificial sequence
  Protein classification predicting sequence
DMFPTM

SEQ ID NO: 75694 - protein, 16 aa, Artificial sequence
  Protein classification predicting sequence
NEELVLRPMNCPHHMM

SEQ ID NO: 75695 - protein, 12 aa, Artificial sequence
  Protein classification predicting sequence
VLRPMNCPHHMM

SEQ ID NO: 75696 - protein, 20 aa, Artificial sequence
  Protein classification predicting sequence
YSFRLSYRDPEDKEKYFDDD

SEQ ID NO: 75697 - protein, 16 aa, Artificial sequence
  Protein classification predicting sequence
YFEAEGEAAFYGPKLD

SEQ ID NO: 75698 - protein, 14 aa, Artificial sequence
  Protein classification predicting sequence
QLDFLLPERFDLTY

SEQ ID NO: 75699 - protein, 5 aa, Artificial sequence
  Protein classification predicting sequence
PYMLV

SEQ ID NO: 75700 - protein, 9 aa, Artificial sequence
  Protein classification predicting sequence
DLPAIEAKM

SEQ ID NO: 75701 - protein, 12 aa, Artificial sequence
  Protein classification predicting sequence
AESISKSLAKKA

SEQ ID NO: 75702 - protein, 30 aa, Artificial sequence
  Protein classification predicting sequence
FKLMKVAGAYWRGDANNPMLTRIYGTAFAN

SEQ ID NO: 75703 - protein, 9 aa, Artificial sequence
  Protein classification predicting sequence
KGWKMFQNL

SEQ ID NO: 75704 - protein, 8 aa, Artificial sequence
  Protein classification predicting sequence
ALKPMNCP

SEQ ID NO: 75705 - protein, 7 aa, Artificial sequence
  Protein classification predicting sequence
INDLILS

SEQ ID NO: 75706 - protein, 31 aa, Artificial sequence
  Protein classification predicting sequence
ILPGEGAFYGPKFEYTLKDAIGREWQCGTTQ

SEQ ID NO: 75707 - protein, 8 aa, Artificial sequence
  Protein classification predicting sequence
VNMRRLGS

SEQ ID NO: 75708 - protein, 10 aa, Artificial sequence
  Protein classification predicting sequence
SISKSLAKKA

SEQ ID NO: 75709 - protein, 7 aa, Artificial sequence
  Protein classification predicting sequence
TQVTIGP

SEQ ID NO: 75710 - protein, 9 aa, Artificial sequence
  Protein classification predicting sequence
EIIQRNKPF

SEQ ID NO: 75711 - protein, 7 aa, Artificial sequence
  Protein classification predicting sequence
YMRRRLD

SEQ ID NO: 75712 - protein, 11 aa, Artificial sequence
  Protein classification predicting sequence
FTQDDAHIFCT

SEQ ID NO: 75713 - protein, 6 aa, Artificial sequence
  Protein classification predicting sequence
RHSCAH

SEQ ID NO: 75714 - protein, 7 aa, Artificial sequence
  Protein classification predicting sequence
VTIGPVI

SEQ ID NO: 75715 - protein, 7 aa, Artificial sequence
  Protein classification predicting sequence
DLCRGPH

SEQ ID NO: 75716 - protein, 8 aa, Artificial sequence
  Protein classification predicting sequence
QRVYGTAW

SEQ ID NO: 75717 - protein, 7 aa, Artificial sequence
  Protein classification predicting sequence
RSYRELP

SEQ ID NO: 75718 - protein, 8 aa, Artificial sequence
  Protein classification predicting sequence
DAIGRTWQ

SEQ ID NO: 75719 - protein, 6 aa, Artificial sequence
  Protein classification predicting sequence
KAFKLT

SEQ ID NO: 75720 - protein, 6 aa, Artificial sequence
  Protein classification predicting sequence
QDDAHI

SEQ ID NO: 75721 - protein, 7 aa, Artificial sequence
  Protein classification predicting sequence
WQMSTIQ

SEQ ID NO: 75722 - protein, 6 aa, Artificial sequence
  Protein classification predicting sequence
WLSPVQ

SEQ ID NO: 75723 - protein, 6 aa, Artificial sequence
  Protein classification predicting sequence
IEDGFY

SEQ ID NO: 75724 - protein, 7 aa, Artificial sequence
  Protein classification predicting sequence
LYHMQEE

SEQ ID NO: 75725 - protein, 18 aa, Artificial sequence
  Protein classification predicting sequence
REYCIKPMNCPGHVQIFN

SEQ ID NO: 75726 - protein, 6 aa, Artificial sequence
  Protein classification predicting sequence
HVQIFN

SEQ ID NO: 75727 - protein, 6 aa, Artificial sequence
  Protein classification predicting sequence
IFNSRL

SEQ ID NO: 75728 - protein, 8 aa, Artificial sequence
  Protein classification predicting sequence
LKSYRDLP

SEQ ID NO: 75729 - protein, 10 aa, Artificial sequence
  Protein classification predicting sequence
VKLSTRPEKR

SEQ ID NO: 75730 - protein, 6 aa, Artificial sequence
  Protein classification predicting sequence
TIQLDF

SEQ ID NO: 75731 - protein, 7 aa, Artificial sequence
  Protein classification predicting sequence
YKEVKTP

SEQ ID NO: 75732 - protein, 6 aa, Artificial sequence
  Protein classification predicting sequence
GHWDNY

SEQ ID NO: 75733 - protein, 12 aa, Artificial sequence
  Protein classification predicting sequence
RMAEFGSCHRNE

SEQ ID NO: 75734 - protein, 6 aa, Artificial sequence
  Protein classification predicting sequence
HEEYID

SEQ ID NO: 75735 - protein, 7 aa, Artificial sequence
  Protein classification predicting sequence
PGMIFWH

SEQ ID NO: 75736 - protein, 5 aa, Artificial sequence
  Protein classification predicting sequence
KPMNC

SEQ ID NO: 75737 - protein, 7 aa, Artificial sequence
  Protein classification predicting sequence
VVSRDEA

SEQ ID NO: 75738 - protein, 9 aa, Artificial sequence
  Protein classification predicting sequence
EEAEKRDHR

SEQ ID NO: 75739 - protein, 8 aa, Artificial sequence
  Protein classification predicting sequence
APGMVFWH

SEQ ID NO: 75740 - protein, 6 aa, Artificial sequence
  Protein classification predicting sequence
DRSLWE

SEQ ID NO: 75741 - protein, 6 aa, Artificial sequence
  Protein classification predicting sequence
GHWQNY

SEQ ID NO: 75742 - protein, 10 aa, Artificial sequence
  Protein classification predicting sequence
KPMNCPGHVQ

SEQ ID NO: 75743 - protein, 16 aa, Artificial sequence
  Protein classification predicting sequence
ELPGEGAFYGPKIEYH

SEQ ID NO: 75744 - protein, 9 aa, Artificial sequence
  Protein classification predicting sequence
WQCGTLQLD

SEQ ID NO: 75745 - protein, 7 aa, Artificial sequence
  Protein classification predicting sequence
KIREHTL

SEQ ID NO: 75746 - protein, 7 aa, Artificial sequence
  Protein classification predicting sequence
CRGPHVP

SEQ ID NO: 75747 - protein, 9 aa, Artificial sequence
  Protein classification predicting sequence
AGAYLGGDE

SEQ ID NO: 75748 - protein, 18 aa, Artificial sequence
  Protein classification predicting sequence
IDEQEYGIKPMNCVGHIK

SEQ ID NO: 75749 - protein, 6 aa, Artificial sequence
  Protein classification predicting sequence
GMVFWH

SEQ ID NO: 75750 - protein, 10 aa, Artificial sequence
  Protein classification predicting sequence
GMVFWHPKGW

SEQ ID NO: 75751 - protein, 9 aa, Artificial sequence
  Protein classification predicting sequence
LPLRMAEFG

SEQ ID NO: 75752 - protein, 7 aa, Artificial sequence
  Protein classification predicting sequence
HGIMRVR

SEQ ID NO: 75753 - protein, 11 aa, Artificial sequence
  Protein classification predicting sequence
PVMLHRAILGS

SEQ ID NO: 75754 - protein, 6 aa, Artificial sequence
  Protein classification predicting sequence
GLMRVR

SEQ ID NO: 75755 - protein, 5 aa, Artificial sequence
  Protein classification predicting sequence
RTRDN

SEQ ID NO: 75756 - protein, 8 aa, Artificial sequence
  Protein classification predicting sequence
KLDLFSQQ

SEQ ID NO: 75757 - protein, 18 aa, Artificial sequence
  Protein classification predicting sequence
RTWQCGTIQLDMFLPERF

SEQ ID NO: 75758 - protein, 10 aa, Artificial sequence
  Protein classification predicting sequence
LAQAVLRLWP

SEQ ID NO: 75759 - protein, 10 aa, Artificial sequence
  Protein classification predicting sequence
QGEFFDLCRG

SEQ ID NO: 75760 - protein, 19 aa, Artificial sequence
  Protein classification predicting sequence
MLHRALFGSIERFLGILIE

SEQ ID NO: 75761 - protein, 9 aa, Artificial sequence
  Protein classification predicting sequence
ERFLGILIE

SEQ ID NO: 75762 - protein, 11 aa, Artificial sequence
  Protein classification predicting sequence
ERFLGILIENF

SEQ ID NO: 75763 - protein, 7 aa, Artificial sequence
  Protein classification predicting sequence
HLMAHAI

SEQ ID NO: 75764 - protein, 7 aa, Artificial sequence
  Protein classification predicting sequence
EFGTVYR

SEQ ID NO: 75765 - protein, 7 aa, Artificial sequence
  Protein classification predicting sequence
RGFTQDD

SEQ ID NO: 75766 - protein, 10 aa, Artificial sequence
  Protein classification predicting sequence
WQLGTVQVDY

SEQ ID NO: 75767 - protein, 6 aa, Artificial sequence
  Protein classification predicting sequence
PERFDL

SEQ ID NO: 75768 - protein, 8 aa, Artificial sequence
  Protein classification predicting sequence
IHRAPFGS

SEQ ID NO: 75769 - protein, 6 aa, Artificial sequence
  Protein classification predicting sequence
YTQGEF

SEQ ID NO: 75770 - protein, 7 aa, Artificial sequence
  Protein classification predicting sequence
IRHSTAH

SEQ ID NO: 75771 - protein, 7 aa, Artificial sequence
  Protein classification predicting sequence
LWERSGH

SEQ ID NO: 75772 - protein, 7 aa, Artificial sequence
  Protein classification predicting sequence
PVMLHRA

SEQ ID NO: 75773 - protein, 6 aa, Artificial sequence
  Protein classification predicting sequence
VVMNIT

SEQ ID NO: 75774 - protein, 12 aa, Artificial sequence
  Protein classification predicting sequence
DLRNEKIGYKIR

SEQ ID NO: 75775 - protein, 7 aa, Artificial sequence
  Protein classification predicting sequence
YIGADGE

SEQ ID NO: 75776 - protein, 8 aa, Artificial sequence
  Protein classification predicting sequence
EHYAGAFP

SEQ ID NO: 75777 - protein, 6 aa, Artificial sequence
  Protein classification predicting sequence
IAQSIS

SEQ ID NO: 75778 - protein, 7 aa, Artificial sequence
  Protein classification predicting sequence
PYKVELI

SEQ ID NO: 75779 - protein, 7 aa, Artificial sequence
  Protein classification predicting sequence
DLCAGPH

SEQ ID NO: 75780 - protein, 6 aa, Artificial sequence
  Protein classification predicting sequence
VGQGLP

SEQ ID NO: 75781 - protein, 12 aa, Artificial sequence
  Protein classification predicting sequence
EAAFYGPKLDIQ

SEQ ID NO: 75782 - protein, 8 aa, Artificial sequence
  Protein classification predicting sequence
VGEKEAEN

SEQ ID NO: 75783 - protein, 8 aa, Artificial sequence
  Protein classification predicting sequence
PERFDLTY

SEQ ID NO: 75784 - protein, 6 aa, Artificial sequence
  Protein classification predicting sequence
DDRNEK

SEQ ID NO: 75785 - protein, 7 aa, Artificial sequence
  Protein classification predicting sequence
ENKVAVR

SEQ ID NO: 75786 - protein, 8 aa, Artificial sequence
  Protein classification predicting sequence
IENGFYYD

SEQ ID NO: 75787 - protein, 7 aa, Artificial sequence
  Protein classification predicting sequence
PFTPEDL

SEQ ID NO: 75788 - protein, 9 aa, Artificial sequence
  Protein classification predicting sequence
SGLELVPDP

SEQ ID NO: 75789 - protein, 7 aa, Artificial sequence
  Protein classification predicting sequence
TVQLDFN

SEQ ID NO: 75790 - protein, 7 aa, Artificial sequence
  Protein classification predicting sequence
LEVIRHS

SEQ ID NO: 75791 - protein, 7 aa, Artificial sequence
  Protein classification predicting sequence
AVKELFP

SEQ ID NO: 75792 - protein, 6 aa, Artificial sequence
  Protein classification predicting sequence
VTIGPV

SEQ ID NO: 75793 - protein, 7 aa, Artificial sequence
  Protein classification predicting sequence
EDGFYYD

SEQ ID NO: 75794 - protein, 16 aa, Artificial sequence
  Protein classification predicting sequence
EDGFYYDFAFERSFTP

SEQ ID NO: 75795 - protein, 11 aa, Artificial sequence
  Protein classification predicting sequence
AGAYWRGDSNN

SEQ ID NO: 75796 - protein, 23 aa, Artificial sequence
  Protein classification predicting sequence
AGAYWRGDSNNEMLQRIYGTAWA

SEQ ID NO: 75797 - protein, 8 aa, Artificial sequence
  Protein classification predicting sequence
SYRDLPLR

SEQ ID NO: 75798 - protein, 8 aa, Artificial sequence
  Protein classification predicting sequence
CHRNEPSG

SEQ ID NO: 75799 - protein, 6 aa, Artificial sequence
  Protein classification predicting sequence
LHGLMR

SEQ ID NO: 75800 - protein, 11 aa, Artificial sequence
  Protein classification predicting sequence
VQDDAHIFCTE

SEQ ID NO: 75801 - protein, 9 aa, Artificial sequence
  Protein classification predicting sequence
KLSTRPEKR

SEQ ID NO: 75802 - protein, 5 aa, Artificial sequence
  Protein classification predicting sequence
DCLGR

SEQ ID NO: 75803 - protein, 7 aa, Artificial sequence
  Protein classification predicting sequence
WQCGTVQ

SEQ ID NO: 75804 - protein, 7 aa, Artificial sequence
  Protein classification predicting sequence
ERFLGIL

SEQ ID NO: 75805 - protein, 5 aa, Artificial sequence
  Protein classification predicting sequence
WQLGT

SEQ ID NO: 75806 - protein, 17 aa, Artificial sequence
  Protein classification predicting sequence
VSPMDVALDIGPGLAKA

SEQ ID NO: 75807 - protein, 7 aa, Artificial sequence
  Protein classification predicting sequence
RHSCAHL

SEQ ID NO: 75808 - protein, 10 aa, Artificial sequence
  Protein classification predicting sequence
DMCRGPHVPN

SEQ ID NO: 75809 - protein, 18 aa, Artificial sequence
  Protein classification predicting sequence
MNITDSQSEYVNELTQKL

SEQ ID NO: 75810 - protein, 12 aa, Artificial sequence
  Protein classification predicting sequence
AVRTRRGKDLGS

SEQ ID NO: 75811 - protein, 7 aa, Artificial sequence
  Protein classification predicting sequence
IRHDTAH

SEQ ID NO: 75812 - protein, 8 aa, Artificial sequence
  Protein classification predicting sequence
RDHRKIGK

SEQ ID NO: 75813 - protein, 9 aa, Artificial sequence
  Protein classification predicting sequence
SGHWDKFRE

SEQ ID NO: 75814 - protein, 8 aa, Artificial sequence
  Protein classification predicting sequence
DFVLPERL

SEQ ID NO: 75815 - protein, 7 aa, Artificial sequence
  Protein classification predicting sequence
NEKINYK

SEQ ID NO: 75816 - protein, 17 aa, Artificial sequence
  Protein classification predicting sequence
SISNSLAKKALAGKFNG

SEQ ID NO: 75817 - protein, 11 aa, Artificial sequence
  Protein classification predicting sequence
EIVTPDHEDAL

SEQ ID NO: 75818 - protein, 6 aa, Artificial sequence
  Protein classification predicting sequence
GVGPAI

SEQ ID NO: 75819 - protein, 7 aa, Artificial sequence
  Protein classification predicting sequence
FVDLCRG

SEQ ID NO: 75820 - protein, 16 aa, Artificial sequence
  Protein classification predicting sequence
IQVFKLLSVAGAYWRG

SEQ ID NO: 75821 - protein, 7 aa, Artificial sequence
  Protein classification predicting sequence
QRIYGTA

SEQ ID NO: 75822 - protein, 7 aa, Artificial sequence
  Protein classification predicting sequence
FDKKDLK

SEQ ID NO: 75823 - protein, 19 aa, Artificial sequence
  Protein classification predicting sequence
EEAKERDHRKLGKELDLFM

SEQ ID NO: 75824 - protein, 7 aa, Artificial sequence
  Protein classification predicting sequence
GLPFWLP

SEQ ID NO: 75825 - protein, 8 aa, Artificial sequence
  Protein classification predicting sequence
HVYTPIMA

SEQ ID NO: 75826 - protein, 13 aa, Artificial sequence
  Protein classification predicting sequence
VELYKTSGHWDHY

SEQ ID NO: 75827 - protein, 25 aa, Artificial sequence
  Protein classification predicting sequence
YKNDIHSYRELPIRIAELGMMHRYE

SEQ ID NO: 75828 - protein, 19 aa, Artificial sequence
  Protein classification predicting sequence
SYRELPIRIAELGMMHRYE

SEQ ID NO: 75829 - protein, 6 aa, Artificial sequence
  Protein classification predicting sequence
KYFDDD

SEQ ID NO: 75830 - protein, 6 aa, Artificial sequence
  Protein classification predicting sequence
IITAKD

SEQ ID NO: 75831 - protein, 9 aa, Artificial sequence
  Protein classification predicting sequence
LEKRMHELA

SEQ ID NO: 75832 - protein, 8 aa, Artificial sequence
  Protein classification predicting sequence
YLQRLEEA

SEQ ID NO: 75833 - protein, 9 aa, Artificial sequence
  Protein classification predicting sequence
KRDHRKIGK

SEQ ID NO: 75834 - protein, 7 aa, Artificial sequence
  Protein classification predicting sequence
GHWDNYK

SEQ ID NO: 75835 - protein, 23 aa, Artificial sequence
  Protein classification predicting sequence
LHGLMRVRGFTQDDAHIFCTEEQ

SEQ ID NO: 75836 - protein, 21 aa, Artificial sequence
  Protein classification predicting sequence
VYDMYSTFGFEKIVVKLSTRP

SEQ ID NO: 75837 - protein, 17 aa, Artificial sequence
  Protein classification predicting sequence
KRIGSDEMWDRAEADLA

SEQ ID NO: 75838 - protein, 9 aa, Artificial sequence
  Protein classification predicting sequence
YVNELTQKL

SEQ ID NO: 75839 - protein, 38 aa, Artificial sequence
  Protein classification predicting sequence
AGIRVKADLRNEKIGFKIREHTLRRVPYMLVCGDKEVE

SEQ ID NO: 75840 - protein, 57 aa, Artificial sequence
  Protein classification predicting sequence
AGIRVKADLRNEKIGFKIREHTLRRVPYMLVCGDKEVEAGKVAVRTRRGKDLGSLDV

SEQ ID NO: 75841 - protein, 11 aa, Artificial sequence
  Protein classification predicting sequence
KLQQEIRSRSL

SEQ ID NO: 75842 - protein, 8 aa, Artificial sequence
  Protein classification predicting sequence
RHSCAHLL

SEQ ID NO: 75843 - protein, 7 aa, Artificial sequence
  Protein classification predicting sequence
AGAYWRG

SEQ ID NO: 75844 - protein, 8 aa, Artificial sequence
  Protein classification predicting sequence
TPEQVEEE

SEQ ID NO: 75845 - protein, 7 aa, Artificial sequence
  Protein classification predicting sequence
RPENRIG

SEQ ID NO: 75846 - protein, 8 aa, Artificial sequence
  Protein classification predicting sequence
ISNSLAKK

SEQ ID NO: 75847 - protein, 6 aa, Artificial sequence
  Protein classification predicting sequence
GFYYDF

SEQ ID NO: 75848 - protein, 9 aa, Artificial sequence
  Protein classification predicting sequence
NKMLQRIYG

SEQ ID NO: 75849 - protein, 7 aa, Artificial sequence
  Protein classification predicting sequence
GKELELF

SEQ ID NO: 75850 - protein, 11 aa, Artificial sequence
  Protein classification predicting sequence
NPGDGAFYGPK

SEQ ID NO: 75851 - protein, 8 aa, Artificial sequence
  Protein classification predicting sequence
DGEKHRPV

SEQ ID NO: 75852 - protein, 5 aa, Artificial sequence
  Protein classification predicting sequence
AHLMA

SEQ ID NO: 75853 - protein, 7 aa, Artificial sequence
  Protein classification predicting sequence
AHLMAQA

SEQ ID NO: 75854 - protein, 10 aa, Artificial sequence
  Protein classification predicting sequence
AIKRLYGNVK

SEQ ID NO: 75855 - protein, 6 aa, Artificial sequence
  Protein classification predicting sequence
GAYWRG

SEQ ID NO: 75856 - protein, 7 aa, Artificial sequence
  Protein classification predicting sequence
HVYTPVL

SEQ ID NO: 75857 - protein, 5 aa, Artificial sequence
  Protein classification predicting sequence
MFPPM

SEQ ID NO: 75858 - protein, 7 aa, Artificial sequence
  Protein classification predicting sequence
SGALTGL

SEQ ID NO: 75859 - protein, 12 aa, Artificial sequence
  Protein classification predicting sequence
GLQRVRGMTLND

SEQ ID NO: 75860 - protein, 8 aa, Artificial sequence
  Protein classification predicting sequence
FVRPDQIK

SEQ ID NO: 75861 - protein, 10 aa, Artificial sequence
  Protein classification predicting sequence
YSFRLSYRDP

SEQ ID NO: 75862 - protein, 8 aa, Artificial sequence
  Protein classification predicting sequence
FRLSYRDP

SEQ ID NO: 75863 - protein, 7 aa, Artificial sequence
  Protein classification predicting sequence
RDHRKLG

SEQ ID NO: 75864 - protein, 7 aa, Artificial sequence
  Protein classification predicting sequence
ELDLFSF

SEQ ID NO: 75865 - protein, 5 aa, Artificial sequence
  Protein classification predicting sequence
WHPKG

SEQ ID NO: 75866 - protein, 7 aa, Artificial sequence
  Protein classification predicting sequence
SGHYDNY

SEQ ID NO: 75867 - protein, 6 aa, Artificial sequence
  Protein classification predicting sequence
ENMYFT

SEQ ID NO: 75868 - protein, 9 aa, Artificial sequence
  Protein classification predicting sequence
YEMELSTRP

SEQ ID NO: 75869 - protein, 11 aa, Artificial sequence
  Protein classification predicting sequence
GDGAFYGPKID

SEQ ID NO: 75870 - protein, 6 aa, Artificial sequence
  Protein classification predicting sequence
QCATIQ

SEQ ID NO: 75871 - protein, 6 aa, Artificial sequence
  Protein classification predicting sequence
GFKIRE

SEQ ID NO: 75872 - protein, 6 aa, Artificial sequence
  Protein classification predicting sequence
KIREAQ

SEQ ID NO: 75873 - protein, 8 aa, Artificial sequence
  Protein classification predicting sequence
ARLSFRDP

SEQ ID NO: 75874 - protein, 6 aa, Artificial sequence
  Protein classification predicting sequence
PFTPED

SEQ ID NO: 75875 - protein, 8 aa, Artificial sequence
  Protein classification predicting sequence
RTPQLVDR

SEQ ID NO: 75876 - protein, 12 aa, Artificial sequence
  Protein classification predicting sequence
KPMNCPCHVQIF

SEQ ID NO: 75877 - protein, 8 aa, Artificial sequence
  Protein classification predicting sequence
EPSGALHG

SEQ ID NO: 75878 - protein, 8 aa, Artificial sequence
  Protein classification predicting sequence
LKAAGLQV

SEQ ID NO: 75879 - protein, 6 aa, Artificial sequence
  Protein classification predicting sequence
KMAIGP

SEQ ID NO: 75880 - protein, 6 aa, Artificial sequence
  Protein classification predicting sequence
NGFYYD

SEQ ID NO: 75881 - protein, 15 aa, Artificial sequence
  Protein classification predicting sequence
LQRIYGTAWADKKQL

SEQ ID NO: 75882 - protein, 8 aa, Artificial sequence
  Protein classification predicting sequence
MMDRVLWE

SEQ ID NO: 75883 - protein, 6 aa, Artificial sequence
  Protein classification predicting sequence
SENREY

SEQ ID NO: 75884 - protein, 15 aa, Artificial sequence
  Protein classification predicting sequence
RMAEFGSCHRNEPSG

SEQ ID NO: 75885 - protein, 21 aa, Artificial sequence
  Protein classification predicting sequence
LHGLMRVRGFTQDDAHIFCTE

SEQ ID NO: 75886 - protein, 6 aa, Artificial sequence
  Protein classification predicting sequence
YSTFGF

SEQ ID NO: 75887 - protein, 29 aa, Artificial sequence
  Protein classification predicting sequence
TPVMIHRAILGSIERFIGIITEEYAGFFP

SEQ ID NO: 75888 - protein, 8 aa, Artificial sequence
  Protein classification predicting sequence
IGAGLAKA

SEQ ID NO: 75889 - protein, 8 aa, Artificial sequence
  Protein classification predicting sequence
WQEARDTF

SEQ ID NO: 75890 - protein, 8 aa, Artificial sequence
  Protein classification predicting sequence
YVAEDNSR

SEQ ID NO: 75891 - protein, 8 aa, Artificial sequence
  Protein classification predicting sequence
QGEFEDLC

SEQ ID NO: 75892 - protein, 5 aa, Artificial sequence
  Protein classification predicting sequence
RDHRK

SEQ ID NO: 75893 - protein, 8 aa, Artificial sequence
  Protein classification predicting sequence
SAAYWRGD

SEQ ID NO: 75894 - protein, 6 aa, Artificial sequence
  Protein classification predicting sequence
DFGFED

SEQ ID NO: 75895 - protein, 7 aa, Artificial sequence
  Protein classification predicting sequence
DALGRSW

SEQ ID NO: 75896 - protein, 7 aa, Artificial sequence
  Protein classification predicting sequence
PVMIHRA

SEQ ID NO: 75897 - protein, 7 aa, Artificial sequence
  Protein classification predicting sequence
FPTWLAP

SEQ ID NO: 75898 - protein, 6 aa, Artificial sequence
  Protein classification predicting sequence
VPYMLV

SEQ ID NO: 75899 - protein, 31 aa, Artificial sequence
  Protein classification predicting sequence
IDEGGGAFYGPKIDIKITDALKRKWQCGTIQ

SEQ ID NO: 75900 - protein, 10 aa, Artificial sequence
  Protein classification predicting sequence
FKLTKLAGAY

SEQ ID NO: 75901 - protein, 7 aa, Artificial sequence
  Protein classification predicting sequence
GLPLWLP

SEQ ID NO: 75902 - protein, 6 aa, Artificial sequence
  Protein classification predicting sequence
GHAVKQ

SEQ ID NO: 75903 - protein, 11 aa, Artificial sequence
  Protein classification predicting sequence
DMCRGPHVPNM

SEQ ID NO: 75904 - protein, 8 aa, Artificial sequence
  Protein classification predicting sequence
LQRIYGTA

SEQ ID NO: 75905 - protein, 7 aa, Artificial sequence
  Protein classification predicting sequence
YQEVKGP

SEQ ID NO: 75906 - protein, 13 aa, Artificial sequence
  Protein classification predicting sequence
KPMNCPGHVQIFN

SEQ ID NO: 75907 - protein, 6 aa, Artificial sequence
  Protein classification predicting sequence
CIKMVY

SEQ ID NO: 75908 - protein, 8 aa, Artificial sequence
  Protein classification predicting sequence
YVGEDNER

SEQ ID NO: 75909 - protein, 11 aa, Artificial sequence
  Protein classification predicting sequence
PVMIHRAILGS

SEQ ID NO: 75910 - protein, 9 aa, Artificial sequence
  Protein classification predicting sequence
GILIEEYAG

SEQ ID NO: 75911 - protein, 17 aa, Artificial sequence
  Protein classification predicting sequence
ADLRNEKIGFKIREHTL

SEQ ID NO: 75912 - protein, 14 aa, Artificial sequence
  Protein classification predicting sequence
EAEGEAAFYGPKLD

SEQ ID NO: 75913 - protein, 9 aa, Artificial sequence
  Protein classification predicting sequence
DGEEHRPVM

SEQ ID NO: 75914 - protein, 11 aa, Artificial sequence
  Protein classification predicting sequence
YKGAFPTWLAP

SEQ ID NO: 75915 - protein, 7 aa, Artificial sequence
  Protein classification predicting sequence
VNVRRYG

SEQ ID NO: 75916 - protein, 13 aa, Artificial sequence
  Protein classification predicting sequence
LRHSAAHLFAQAA

SEQ ID NO: 75917 - protein, 12 aa, Artificial sequence
  Protein classification predicting sequence
NDPYKLELIEEH

SEQ ID NO: 75918 - protein, 7 aa, Artificial sequence
  Protein classification predicting sequence
SGHWQHY

SEQ ID NO: 75919 - protein, 11 aa, Artificial sequence
  Protein classification predicting sequence
ELRPMNCPSHI

SEQ ID NO: 75920 - protein, 12 aa, Artificial sequence
  Protein classification predicting sequence
GMMHRYEKSGAL

SEQ ID NO: 75921 - protein, 27 aa, Artificial sequence
  Protein classification predicting sequence
GMMHRYEKSGALSGLQRVREMTLNDGH

SEQ ID NO: 75922 - protein, 11 aa, Artificial sequence
  Protein classification predicting sequence
DYSFRLSYRDP

SEQ ID NO: 75923 - protein, 13 aa, Artificial sequence
  Protein classification predicting sequence
HRPVMIHRGVIST

SEQ ID NO: 75924 - protein, 7 aa, Artificial sequence
  Protein classification predicting sequence
KIPYQIV

SEQ ID NO: 75925 - protein, 13 aa, Artificial sequence
  Protein classification predicting sequence
WQCGTIQVDFSMP

SEQ ID NO: 75926 - protein, 8 aa, Artificial sequence
  Protein classification predicting sequence
PYLLVVGD

SEQ ID NO: 75927 - protein, 8 aa, Artificial sequence
  Protein classification predicting sequence
GFYYDFDV

SEQ ID NO: 75928 - protein, 8 aa, Artificial sequence
  Protein classification predicting sequence
VNTPHITK

SEQ ID NO: 75929 - protein, 8 aa, Artificial sequence
  Protein classification predicting sequence
TEEQIRDE

SEQ ID NO: 75930 - protein, 7 aa, Artificial sequence
  Protein classification predicting sequence
GPVIDNG

SEQ ID NO: 75931 - protein, 6 aa, Artificial sequence
  Protein classification predicting sequence
FWHPKG

SEQ ID NO: 75932 - protein, 6 aa, Artificial sequence
  Protein classification predicting sequence
GKFPLW

SEQ ID NO: 75933 - protein, 7 aa, Artificial sequence
  Protein classification predicting sequence
KKALAGK

SEQ ID NO: 75934 - protein, 5 aa, Artificial sequence
  Protein classification predicting sequence
AGAYW

SEQ ID NO: 75935 - protein, 6 aa, Artificial sequence
  Protein classification predicting sequence
EFKRVV

SEQ ID NO: 75936 - protein, 8 aa, Artificial sequence
  Protein classification predicting sequence
IDNGFYYD

SEQ ID NO: 75937 - protein, 11 aa, Artificial sequence
  Protein classification predicting sequence
LLIHSDYIEYE

SEQ ID NO: 75938 - protein, 7 aa, Artificial sequence
  Protein classification predicting sequence
DYEPGSD

SEQ ID NO: 75939 - protein, 7 aa, Artificial sequence
  Protein classification predicting sequence
RFPARQY

SEQ ID NO: 75940 - protein, 6 aa, Artificial sequence
  Protein classification predicting sequence
TRYSFR

SEQ ID NO: 75941 - protein, 11 aa, Artificial sequence
  Protein classification predicting sequence
LHCSPSGAIER

SEQ ID NO: 75942 - protein, 8 aa, Artificial sequence
  Protein classification predicting sequence
IGPGLAKA

SEQ ID NO: 75943 - protein, 12 aa, Artificial sequence
  Protein classification predicting sequence
NEMLQRIYGTAW

SEQ ID NO: 75944 - protein, 10 aa, Artificial sequence
  Protein classification predicting sequence
MLQRIYGTAW

SEQ ID NO: 75945 - protein, 9 aa, Artificial sequence
  Protein classification predicting sequence
YAIKPMNCP

SEQ ID NO: 75946 - protein, 7 aa, Artificial sequence
  Protein classification predicting sequence
LLIHSDY

SEQ ID NO: 75947 - protein, 10 aa, Artificial sequence
  Protein classification predicting sequence
LRFAACFGQF

SEQ ID NO: 75948 - protein, 8 aa, Artificial sequence
  Protein classification predicting sequence
FTMPDMHT

SEQ ID NO: 75949 - protein, 9 aa, Artificial sequence
  Protein classification predicting sequence
RLRAFTMPD

SEQ ID NO: 75950 - protein, 8 aa, Artificial sequence
  Protein classification predicting sequence
KFGERQYR

SEQ ID NO: 75951 - protein, 7 aa, Artificial sequence
  Protein classification predicting sequence
QVRVLPI

SEQ ID NO: 75952 - protein, 7 aa, Artificial sequence
  Protein classification predicting sequence
AVQELFP

SEQ ID NO: 75953 - protein, 7 aa, Artificial sequence
  Protein classification predicting sequence
DDAHIFC

SEQ ID NO: 75954 - protein, 8 aa, Artificial sequence
  Protein classification predicting sequence
QLIVGDKE

SEQ ID NO: 75955 - protein, 23 aa, Artificial sequence
  Protein classification predicting sequence
LFPQAKLGIGPPITDGFYYDFDV

SEQ ID NO: 75956 - protein, 7 aa, Artificial sequence
  Protein classification predicting sequence
LLGDYGL

SEQ ID NO: 75957 - protein, 13 aa, Artificial sequence
  Protein classification predicting sequence
EHYAGAFPAWLAP

SEQ ID NO: 75958 - protein, 10 aa, Artificial sequence
  Protein classification predicting sequence
SDDRMAKKIV

SEQ ID NO: 75959 - protein, 9 aa, Artificial sequence
  Protein classification predicting sequence
LRDLSWVPD

SEQ ID NO: 75960 - protein, 8 aa, Artificial sequence
  Protein classification predicting sequence
GRSVIRHS

SEQ ID NO: 75961 - protein, 6 aa, Artificial sequence
  Protein classification predicting sequence
RHSAAH

SEQ ID NO: 75962 - protein, 19 aa, Artificial sequence
  Protein classification predicting sequence
NASLQRIYGTAWESQEALD

SEQ ID NO: 75963 - protein, 7 aa, Artificial sequence
  Protein classification predicting sequence
QLDFLLP

SEQ ID NO: 75964 - protein, 7 aa, Artificial sequence
  Protein classification predicting sequence
DGSKQTP

SEQ ID NO: 75965 - protein, 7 aa, Artificial sequence
  Protein classification predicting sequence
QIITPKD

SEQ ID NO: 75966 - protein, 13 aa, Artificial sequence
  Protein classification predicting sequence
NEMLQRIYGTAWA

SEQ ID NO: 75967 - protein, 6 aa, Artificial sequence
  Protein classification predicting sequence
VIMNIT

SEQ ID NO: 75968 - protein, 8 aa, Artificial sequence
  Protein classification predicting sequence
GKQLDLFH

SEQ ID NO: 75969 - protein, 5 aa, Artificial sequence
  Protein classification predicting sequence
EQYMR

SEQ ID NO: 75970 - protein, 7 aa, Artificial sequence
  Protein classification predicting sequence
LEVLRHS

SEQ ID NO: 75971 - protein, 6 aa, Artificial sequence
  Protein classification predicting sequence
GFYYDI

SEQ ID NO: 75972 - protein, 10 aa, Artificial sequence
  Protein classification predicting sequence
KLELIDAIPE

SEQ ID NO: 75973 - protein, 10 aa, Artificial sequence
  Protein classification predicting sequence
RIAELGTMHR

SEQ ID NO: 75974 - protein, 5 aa, Artificial sequence
  Protein classification predicting sequence
DEMWE

SEQ ID NO: 75975 - protein, 10 aa, Artificial sequence
  Protein classification predicting sequence
MWEKAQAMLK

SEQ ID NO: 75976 - protein, 8 aa, Artificial sequence
  Protein classification predicting sequence
GYKIREAQ

SEQ ID NO: 75977 - protein, 6 aa, Artificial sequence
  Protein classification predicting sequence
QTQKVP

SEQ ID NO: 75978 - protein, 6 aa, Artificial sequence
  Protein classification predicting sequence
GDKEME

SEQ ID NO: 75979 - protein, 7 aa, Artificial sequence
  Protein classification predicting sequence
AHVLAQA

SEQ ID NO: 75980 - protein, 15 aa, Artificial sequence
  Protein classification predicting sequence
KLMKTAGAYWRGDSN

SEQ ID NO: 75981 - protein, 6 aa, Artificial sequence
  Protein classification predicting sequence
MLTRIY

SEQ ID NO: 75982 - protein, 15 aa, Artificial sequence
  Protein classification predicting sequence
AIKPMNCPGCMLYYK

SEQ ID NO: 75983 - protein, 6 aa, Artificial sequence
  Protein classification predicting sequence
PLRIAE

SEQ ID NO: 75984 - protein, 6 aa, Artificial sequence
  Protein classification predicting sequence
EPSGSL

SEQ ID NO: 75985 - protein, 8 aa, Artificial sequence
  Protein classification predicting sequence
IAGRVNGE

SEQ ID NO: 75986 - protein, 24 aa, Artificial sequence
  Protein classification predicting sequence
EDGLEIIRHSCAHLLGHAIKQLFP

SEQ ID NO: 75987 - protein, 8 aa, Artificial sequence
  Protein classification predicting sequence
TLPDGSQR

SEQ ID NO: 75988 - protein, 9 aa, Artificial sequence
  Protein classification predicting sequence
AGAYWRGDS

SEQ ID NO: 75989 - protein, 7 aa, Artificial sequence
  Protein classification predicting sequence
QEEAPGM

SEQ ID NO: 75990 - protein, 14 aa, Artificial sequence
  Protein classification predicting sequence
FWHNDGWTIFRELE

SEQ ID NO: 75991 - protein, 6 aa, Artificial sequence
  Protein classification predicting sequence
GHWENY

SEQ ID NO: 75992 - protein, 30 aa, Artificial sequence
  Protein classification predicting sequence
QIFNQGLKSYRDLPLRMAEFGSCHRNEPSG

SEQ ID NO: 75993 - protein, 8 aa, Artificial sequence
  Protein classification predicting sequence
YVGENNER

SEQ ID NO: 75994 - protein, 18 aa, Artificial sequence
  Protein classification predicting sequence
KADLRNEKIGFKIREHTL

SEQ ID NO: 75995 - protein, 16 aa, Artificial sequence
  Protein classification predicting sequence
DLRNEKIGFKIREHTL

SEQ ID NO: 75996 - protein, 11 aa, Artificial sequence
  Protein classification predicting sequence
VRTRRGKDLGS

SEQ ID NO: 75997 - protein, 19 aa, Artificial sequence
  Protein classification predicting sequence
FGIGPAIENGFYYDVDPGE

SEQ ID NO: 75998 - protein, 7 aa, Artificial sequence
  Protein classification predicting sequence
ITTYTQG

SEQ ID NO: 75999 - protein, 11 aa, Artificial sequence
  Protein classification predicting sequence
FPKKKMLDEYL

SEQ ID NO: 76000 - protein, 9 aa, Artificial sequence
  Protein classification predicting sequence
RDHRKIGKE

SEQ ID NO: 76001 - protein, 9 aa, Artificial sequence
  Protein classification predicting sequence
TSGHYAKYG

SEQ ID NO: 76002 - protein, 9 aa, Artificial sequence
  Protein classification predicting sequence
LKPMNCPHH

SEQ ID NO: 76003 - protein, 8 aa, Artificial sequence
  Protein classification predicting sequence
RYEQSGEL

SEQ ID NO: 76004 - protein, 6 aa, Artificial sequence
  Protein classification predicting sequence
FCRPDQ

SEQ ID NO: 76005 - protein, 20 aa, Artificial sequence
  Protein classification predicting sequence
NFEAQISLRDKVNREKYIGS

SEQ ID NO: 76006 - protein, 20 aa, Artificial sequence
  Protein classification predicting sequence
IEYGEAAFYGPKLDFMVKDA

SEQ ID NO: 76007 - protein, 8 aa, Artificial sequence
  Protein classification predicting sequence
GRKIRDNE

SEQ ID NO: 76008 - protein, 11 aa, Artificial sequence
  Protein classification predicting sequence
KRIPYMLIVGE

SEQ ID NO: 76009 - protein, 9 aa, Artificial sequence
  Protein classification predicting sequence
WKDLCRGPH

SEQ ID NO: 76010 - protein, 14 aa, Artificial sequence
  Protein classification predicting sequence
YRYEKSGVVHGLTR

SEQ ID NO: 76011 - protein, 7 aa, Artificial sequence
  Protein classification predicting sequence
AGAVSFR

SEQ ID NO: 76012 - protein, 7 aa, Artificial sequence
  Protein classification predicting sequence
VNGELVD

SEQ ID NO: 76013 - protein, 10 aa, Artificial sequence
  Protein classification predicting sequence
GAYWRGDSNN

SEQ ID NO: 76014 - protein, 18 aa, Artificial sequence
  Protein classification predicting sequence
PGEGAFYGPKIEFSLKDC

SEQ ID NO: 76015 - protein, 7 aa, Artificial sequence
  Protein classification predicting sequence
WLSPIQV

SEQ ID NO: 76016 - protein, 7 aa, Artificial sequence
  Protein classification predicting sequence
FWHAKGW

SEQ ID NO: 76017 - protein, 8 aa, Artificial sequence
  Protein classification predicting sequence
AIKPMNCP

SEQ ID NO: 76018 - protein, 6 aa, Artificial sequence
  Protein classification predicting sequence
AEFGSC

SEQ ID NO: 76019 - protein, 6 aa, Artificial sequence
  Protein classification predicting sequence
RNEPSG

SEQ ID NO: 76020 - protein, 12 aa, Artificial sequence
  Protein classification predicting sequence
PGEGAFYGPKIE

SEQ ID NO: 76021 - protein, 10 aa, Artificial sequence
  Protein classification predicting sequence
DLRNEKIGFK

SEQ ID NO: 76022 - protein, 9 aa, Artificial sequence
  Protein classification predicting sequence
REHTLQRVP

SEQ ID NO: 76023 - protein, 9 aa, Artificial sequence
  Protein classification predicting sequence
GLAKATIAG

SEQ ID NO: 76024 - protein, 7 aa, Artificial sequence
  Protein classification predicting sequence
LFHIQEE

SEQ ID NO: 76025 - protein, 6 aa, Artificial sequence
  Protein classification predicting sequence
DKSLWE

SEQ ID NO: 76026 - protein, 19 aa, Artificial sequence
  Protein classification predicting sequence
GLYFHEEYVDMCRGPHVPN

SEQ ID NO: 76027 - protein, 7 aa, Artificial sequence
  Protein classification predicting sequence
DFGFTDI

SEQ ID NO: 76028 - protein, 7 aa, Artificial sequence
  Protein classification predicting sequence
LPERLDA

SEQ ID NO: 76029 - protein, 7 aa, Artificial sequence
  Protein classification predicting sequence
DLGSMPV

SEQ ID NO: 76030 - protein, 7 aa, Artificial sequence
  Protein classification predicting sequence
KNEQLQR

SEQ ID NO: 76031 - protein, 9 aa, Artificial sequence
  Protein classification predicting sequence
YGTAWADKK

SEQ ID NO: 76032 - protein, 6 aa, Artificial sequence
  Protein classification predicting sequence
LVDACD

SEQ ID NO: 76033 - protein, 7 aa, Artificial sequence
  Protein classification predicting sequence
DYDVIKK

SEQ ID NO: 76034 - protein, 18 aa, Artificial sequence
  Protein classification predicting sequence
DYDVIKKVTPRAEVIEVF

SEQ ID NO: 76035 - protein, 7 aa, Artificial sequence
  Protein classification predicting sequence
EDYKLRL

SEQ ID NO: 76036 - protein, 18 aa, Artificial sequence
  Protein classification predicting sequence
EYVDMCRGPHVPNTRFLK

SEQ ID NO: 76037 - protein, 9 aa, Artificial sequence
  Protein classification predicting sequence
LPLRLAEFG

SEQ ID NO: 76038 - protein, 9 aa, Artificial sequence
  Protein classification predicting sequence
GHPLSELSR

SEQ ID NO: 76039 - protein, 15 aa, Artificial sequence
  Protein classification predicting sequence
FVYPFAHLSSELAKP

SEQ ID NO: 76040 - protein, 7 aa, Artificial sequence
  Protein classification predicting sequence
SCKGHPL

SEQ ID NO: 76041 - protein, 26 aa, Artificial sequence
  Protein classification predicting sequence
PLILHCSPSGAIERVMYAILEKQAKL

SEQ ID NO: 76042 - protein, 6 aa, Artificial sequence
  Protein classification predicting sequence
PLWLSP

SEQ ID NO: 76043 - protein, 9 aa, Artificial sequence
  Protein classification predicting sequence
SIGAGLAKA

SEQ ID NO: 76044 - protein, 12 aa, Artificial sequence
  Protein classification predicting sequence
DLCRGPHVPSTG

SEQ ID NO: 76045 - protein, 6 aa, Artificial sequence
  Protein classification predicting sequence
HVPSTG

SEQ ID NO: 76046 - protein, 15 aa, Artificial sequence
  Protein classification predicting sequence
FKLMKVAGAYWRGDS

SEQ ID NO: 76047 - protein, 12 aa, Artificial sequence
  Protein classification predicting sequence
CHRNEPSGALHG

SEQ ID NO: 76048 - protein, 7 aa, Artificial sequence
  Protein classification predicting sequence
EYHIKDA

SEQ ID NO: 76049 - protein, 7 aa, Artificial sequence
  Protein classification predicting sequence
DLRNEKI

SEQ ID NO: 76050 - protein, 26 aa, Artificial sequence
  Protein classification predicting sequence
PGTQVTIGPVIENGFYYDFARNEPFT

SEQ ID NO: 76051 - protein, 11 aa, Artificial sequence
  Protein classification predicting sequence
PVIEKKMREII

SEQ ID NO: 76052 - protein, 12 aa, Artificial sequence
  Protein classification predicting sequence
RNKPFTKEVWSR

SEQ ID NO: 76053 - protein, 12 aa, Artificial sequence
  Protein classification predicting sequence
YKLELIDAIPED

SEQ ID NO: 76054 - protein, 32 aa, Artificial sequence
  Protein classification predicting sequence
LGREMDLFHFQEEGPGVVFWHAKGWKMFQNLV

SEQ ID NO: 76055 - protein, 9 aa, Artificial sequence
  Protein classification predicting sequence
GLKSYRDLP

SEQ ID NO: 76056 - protein, 10 aa, Artificial sequence
  Protein classification predicting sequence
PGEGAFYGPK

SEQ ID NO: 76057 - protein, 7 aa, Artificial sequence
  Protein classification predicting sequence
LKDAIGR

SEQ ID NO: 76058 - protein, 6 aa, Artificial sequence
  Protein classification predicting sequence
PVMVHR

SEQ ID NO: 76059 - protein, 9 aa, Artificial sequence
  Protein classification predicting sequence
QVVVATITS

SEQ ID NO: 76060 - protein, 10 aa, Artificial sequence
  Protein classification predicting sequence
DLRNEKINYK

SEQ ID NO: 76061 - protein, 10 aa, Artificial sequence
  Protein classification predicting sequence
RRLGSRDQES

SEQ ID NO: 76062 - protein, 28 aa, Artificial sequence
  Protein classification predicting sequence
GQDLKIYYQGDWFDLCRGPHMASTGQIG

SEQ ID NO: 76063 - protein, 8 aa, Artificial sequence
  Protein classification predicting sequence
KPMNCPGH

SEQ ID NO: 76064 - protein, 12 aa, Artificial sequence
  Protein classification predicting sequence
KPMNCPGHIQIF

SEQ ID NO: 76065 - protein, 11 aa, Artificial sequence
  Protein classification predicting sequence
QIFKHGLKSYR

SEQ ID NO: 76066 - protein, 8 aa, Artificial sequence
  Protein classification predicting sequence
EQMAAECL

SEQ ID NO: 76067 - protein, 5 aa, Artificial sequence
  Protein classification predicting sequence
WDRAE

SEQ ID NO: 76068 - protein, 9 aa, Artificial sequence
  Protein classification predicting sequence
PGTQVTIGP

SEQ ID NO: 76069 - protein, 8 aa, Artificial sequence
  Protein classification predicting sequence
KPFTKEVW

SEQ ID NO: 76070 - protein, 8 aa, Artificial sequence
  Protein classification predicting sequence
DLFHFQEE

SEQ ID NO: 76071 - protein, 15 aa, Artificial sequence
  Protein classification predicting sequence
HGLMRVRGFTQDDAH

SEQ ID NO: 76072 - protein, 21 aa, Artificial sequence
  Protein classification predicting sequence
WQCGTTQVDFNLPERFGAFYI

SEQ ID NO: 76073 - protein, 6 aa, Artificial sequence
  Protein classification predicting sequence
GSMERF

SEQ ID NO: 76074 - protein, 9 aa, Artificial sequence
  Protein classification predicting sequence
FIDLCRGPH

SEQ ID NO: 76075 - protein, 5 aa, Artificial sequence
  Protein classification predicting sequence
CHRNE

SEQ ID NO: 76076 - protein, 8 aa, Artificial sequence
  Protein classification predicting sequence
IIRHDAAH

SEQ ID NO: 76077 - protein, 11 aa, Artificial sequence
  Protein classification predicting sequence
NAISMSLAKAA

SEQ ID NO: 76078 - protein, 6 aa, Artificial sequence
  Protein classification predicting sequence
VKFSDR

SEQ ID NO: 76079 - protein, 8 aa, Artificial sequence
  Protein classification predicting sequence
IGPAIENG

SEQ ID NO: 76080 - protein, 10 aa, Artificial sequence
  Protein classification predicting sequence
GAFYGPKLEF

SEQ ID NO: 76081 - protein, 7 aa, Artificial sequence
  Protein classification predicting sequence
IAGRVNG

SEQ ID NO: 76082 - protein, 7 aa, Artificial sequence
  Protein classification predicting sequence
DLIENDA

SEQ ID NO: 76083 - protein, 39 aa, Artificial sequence
  Protein classification predicting sequence
IITAKDEEGLEIIRHSCAHLLGHAIKQLWPHTKMAIGPV

SEQ ID NO: 76084 - protein, 6 aa, Artificial sequence
  Protein classification predicting sequence
ILDENI

SEQ ID NO: 76085 - protein, 15 aa, Artificial sequence
  Protein classification predicting sequence
ILDENIAHDDKPGLY

SEQ ID NO: 76086 - protein, 13 aa, Artificial sequence
  Protein classification predicting sequence
AEFGSCHRNEPSG

SEQ ID NO: 76087 - protein, 8 aa, Artificial sequence
  Protein classification predicting sequence
WLAPVQVV

SEQ ID NO: 76088 - protein, 12 aa, Artificial sequence
  Protein classification predicting sequence
IAGRVNGELVDA

SEQ ID NO: 76089 - protein, 7 aa, Artificial sequence
  Protein classification predicting sequence
DNGFYYD

SEQ ID NO: 76090 - protein, 83 aa, Artificial sequence
  Protein classification predicting sequence
KRIGSDEMWDRAEADLAVALEENNIPFEYQLGEGAFYGPKIEFTLYDCLDRAWQCGTVQLDFSLPSRLSASYVGEDNERKVPV

SEQ ID NO: 76091 - protein, 34 aa, Artificial sequence
  Protein classification predicting sequence
IHRAILGSMERFIGILTEEFAGFFPTWLAPVQVV

SEQ ID NO: 76092 - protein, 50 aa, Artificial sequence
  Protein classification predicting sequence
DNGFYYDVDLDRTLTQEDVEALEKRMHELAEKNYDVIKKKVSWHEARETF

SEQ ID NO: 76093 - protein, 23 aa, Artificial sequence
  Protein classification predicting sequence
RGESYKVSILDENIAHDDKPGLY

SEQ ID NO: 76094 - protein, 44 aa, Artificial sequence
  Protein classification predicting sequence
DNGFYYDVDLDRTLTQEDVEALEKRMHELAEKNYDVIKKKVSWH

SEQ ID NO: 76095 - protein, 7 aa, Artificial sequence
  Protein classification predicting sequence
EALEKRM

SEQ ID NO: 76096 - protein, 7 aa, Artificial sequence
  Protein classification predicting sequence
LYHHEEY

SEQ ID NO: 76097 - protein, 14 aa, Artificial sequence
  Protein classification predicting sequence
DMCRGPHVPNMRFC

SEQ ID NO: 76098 - protein, 11 aa, Artificial sequence
  Protein classification predicting sequence
NKMLQRIYGTA

SEQ ID NO: 76099 - protein, 16 aa, Artificial sequence
  Protein classification predicting sequence
NKMLQRIYGTAWADKK

SEQ ID NO: 76100 - protein, 24 aa, Artificial sequence
  Protein classification predicting sequence
YQEVKGPLMMDRVLWERSGHWDKY

SEQ ID NO: 76101 - protein, 15 aa, Artificial sequence
  Protein classification predicting sequence
PGEGAFYGPKIEFTL

SEQ ID NO: 76102 - protein, 15 aa, Artificial sequence
  Protein classification predicting sequence
DCLDRAWQCGTVQLD

SEQ ID NO: 76103 - protein, 9 aa, Artificial sequence
  Protein classification predicting sequence
QVVVMNITD

SEQ ID NO: 76104 - protein, 5 aa, Artificial sequence
  Protein classification predicting sequence
WDKAE

SEQ ID NO: 76105 - protein, 9 aa, Artificial sequence
  Protein classification predicting sequence
DGSIEIVTP

SEQ ID NO: 76106 - protein, 10 aa, Artificial sequence
  Protein classification predicting sequence
QINIQFPDGN

SEQ ID NO: 76107 - protein, 20 aa, Artificial sequence
  Protein classification predicting sequence
TPGSEEALEVLRHSTAHLMA

SEQ ID NO: 76108 - protein, 10 aa, Artificial sequence
  Protein classification predicting sequence
LRHSTAHLMA

SEQ ID NO: 76109 - protein, 17 aa, Artificial sequence
  Protein classification predicting sequence
LRHSTAHLMAQALKRLY

SEQ ID NO: 76110 - protein, 12 aa, Artificial sequence
  Protein classification predicting sequence
IEKTMKQIVNEN

SEQ ID NO: 76111 - protein, 6 aa, Artificial sequence
  Protein classification predicting sequence
YKLELI

SEQ ID NO: 76112 - protein, 7 aa, Artificial sequence
  Protein classification predicting sequence
FTDLCRG

SEQ ID NO: 76113 - protein, 7 aa, Artificial sequence
  Protein classification predicting sequence
RIYGTAF

SEQ ID NO: 76114 - protein, 14 aa, Artificial sequence
  Protein classification predicting sequence
VLRPMNCPHHMMIY

SEQ ID NO: 76115 - protein, 8 aa, Artificial sequence
  Protein classification predicting sequence
DLHYDYAR

SEQ ID NO: 76116 - protein, 12 aa, Artificial sequence
  Protein classification predicting sequence
LQDELKSQGVRV

SEQ ID NO: 76117 - protein, 35 aa, Artificial sequence
  Protein classification predicting sequence
FDKGTTTEDIAQSISPGLRKKAVAGKFNGQLVDLT

SEQ ID NO: 76118 - protein, 63 aa, Artificial sequence
  Protein classification predicting sequence
QLVGAGLPLWLPNGATIRREIERYIVDKEVSMGYDHVYTPVLANVDLYKTSGHWDHYQEDMFP

SEQ ID NO: 76119 - protein, 62 aa, Artificial sequence
  Protein classification predicting sequence
NKPHSYRELPIRIAELGTMHRYEASGAVSGLQRVRGMTLNDSHIFVRPDQIKEEFKRVVNMI

SEQ ID NO: 76120 - protein, 52 aa, Artificial sequence
  Protein classification predicting sequence
YEEAIGEAAFYGPKLDVQVKTAMGKEETLSTAQLDFLLPERFDLTYIGQDGE

SEQ ID NO: 76121 - protein, 35 aa, Artificial sequence
  Protein classification predicting sequence
HRPVVIHRGVVSTMERFVAFLTEETKGAFPTWLAP

SEQ ID NO: 76122 - protein, 19 aa, Artificial sequence
  Protein classification predicting sequence
VLRHSAAHLFAQAAKRLFP

SEQ ID NO: 76123 - protein, 18 aa, Artificial sequence
  Protein classification predicting sequence
KEEALELFKDDPYKVELI

SEQ ID NO: 76124 - protein, 15 aa, Artificial sequence
  Protein classification predicting sequence
YGTAWFDKKDLKAYL

SEQ ID NO: 76125 - protein, 11 aa, Artificial sequence
  Protein classification predicting sequence
WLPNGATIRRE

SEQ ID NO: 76126 - protein, 8 aa, Artificial sequence
  Protein classification predicting sequence
ERYIVDKE

SEQ ID NO: 76127 - protein, 8 aa, Artificial sequence
  Protein classification predicting sequence
GLQRVREM

SEQ ID NO: 76128 - protein, 14 aa, Artificial sequence
  Protein classification predicting sequence
HKYYDNDEMWENAQ

SEQ ID NO: 76129 - protein, 17 aa, Artificial sequence
  Protein classification predicting sequence
DYFEAEGEAAFYGPKLD

SEQ ID NO: 76130 - protein, 17 aa, Artificial sequence
  Protein classification predicting sequence
VIPISNEAHIDYAWEVA

SEQ ID NO: 76131 - protein, 7 aa, Artificial sequence
  Protein classification predicting sequence
VDDRNEK

SEQ ID NO: 76132 - protein, 12 aa, Artificial sequence
  Protein classification predicting sequence
ILADIARKSRPD

SEQ ID NO: 76133 - protein, 24 aa, Artificial sequence
  Protein classification predicting sequence
TTFEIAQSISNSLAKKALAGKFNG

SEQ ID NO: 76134 - protein, 44 aa, Artificial sequence
  Protein classification predicting sequence
GLTVYRQGEFVDLCRGPHVPSTGRIQVFHLLNVAGAYWRGNSDN

SEQ ID NO: 76135 - protein, 57 aa, Artificial sequence
  Protein classification predicting sequence
DYFEAEGEAAFYGPKLDIQVKTALGNEETLSTIQLDFLLPERFDLKYIGADGEEHRP

SEQ ID NO: 76136 - protein, 6 aa, Artificial sequence
  Protein classification predicting sequence
EHYAGA

SEQ ID NO: 76137 - protein, 12 aa, Artificial sequence
  Protein classification predicting sequence
ITFPDGAVREFE

SEQ ID NO: 76138 - protein, 19 aa, Artificial sequence
  Protein classification predicting sequence
IAESISKSLAKKALAGKFN

SEQ ID NO: 76139 - protein, 29 aa, Artificial sequence
  Protein classification predicting sequence
REEVTKDEAREIFKNDPYKLELIEEHSED

SEQ ID NO: 76140 - protein, 27 aa, Artificial sequence
  Protein classification predicting sequence
GGLTIYRQGEYVDLCRGPHVPSTGRIQ

SEQ ID NO: 76141 - protein, 8 aa, Artificial sequence
  Protein classification predicting sequence
VDLCRGPH

SEQ ID NO: 76142 - protein, 17 aa, Artificial sequence
  Protein classification predicting sequence
MMQRIYGTAWFDKKDLK

SEQ ID NO: 76143 - protein, 8 aa, Artificial sequence
  Protein classification predicting sequence
ERYITDKE

SEQ ID NO: 76144 - protein, 7 aa, Artificial sequence
  Protein classification predicting sequence
MDMGDGE

SEQ ID NO: 76145 - protein, 12 aa, Artificial sequence
  Protein classification predicting sequence
FVLRPMNCPHHI

SEQ ID NO: 76146 - protein, 16 aa, Artificial sequence
  Protein classification predicting sequence
FVLRPMNCPHHIEVYK

SEQ ID NO: 76147 - protein, 11 aa, Artificial sequence
  Protein classification predicting sequence
SYRELPIRIAE

SEQ ID NO: 76148 - protein, 8 aa, Artificial sequence
  Protein classification predicting sequence
LQLIIDVY

SEQ ID NO: 76149 - protein, 14 aa, Artificial sequence
  Protein classification predicting sequence
FRLSYRDPNDTHKY

SEQ ID NO: 76150 - protein, 6 aa, Artificial sequence
  Protein classification predicting sequence
STMERF

SEQ ID NO: 76151 - protein, 37 aa, Artificial sequence
  Protein classification predicting sequence
LIETYKGAFPTWLAPHQVTVIPISNEAHIDYAWEVAK

SEQ ID NO: 76152 - protein, 8 aa, Artificial sequence
  Protein classification predicting sequence
DYAWEVAK

SEQ ID NO: 76153 - protein, 10 aa, Artificial sequence
  Protein classification predicting sequence
PYQLIVGDKE

SEQ ID NO: 76154 - protein, 12 aa, Artificial sequence
  Protein classification predicting sequence
SLAKKALAGKFN

SEQ ID NO: 76155 - protein, 12 aa, Artificial sequence
  Protein classification predicting sequence
GQISNEDLPRIE

SEQ ID NO: 76156 - protein, 11 aa, Artificial sequence
  Protein classification predicting sequence
LYKTSGHWDHY

SEQ ID NO: 76157 - protein, 8 aa, Artificial sequence
  Protein classification predicting sequence
GFYYDTDN

SEQ ID NO: 76158 - protein, 6 aa, Artificial sequence
  Protein classification predicting sequence
EMQKIV

SEQ ID NO: 76159 - protein, 8 aa, Artificial sequence
  Protein classification predicting sequence
VAGAYWRG

SEQ ID NO: 76160 - protein, 12 aa, Artificial sequence
  Protein classification predicting sequence
VAGAYWRGNSDN

SEQ ID NO: 76161 - protein, 33 aa, Artificial sequence
  Protein classification predicting sequence
EEAKERDHRKLGKELDLFMISQEVGQGLPFWLP

SEQ ID NO: 76162 - protein, 16 aa, Artificial sequence
  Protein classification predicting sequence
EAEGEAAFYGPKLDIQ

SEQ ID NO: 76163 - protein, 15 aa, Artificial sequence
  Protein classification predicting sequence
YKGAFPTWLAPHQVT

SEQ ID NO: 76164 - protein, 7 aa, Artificial sequence
  Protein classification predicting sequence
HLFAQAA

SEQ ID NO: 76165 - protein, 32 aa, Artificial sequence
  Protein classification predicting sequence
SGYQHVYTPPLASVELYKTSGHWDHYQEDMFP

SEQ ID NO: 76166 - protein, 22 aa, Artificial sequence
  Protein classification predicting sequence
FVTPEQIQEEFQRALQLIIDVY

SEQ ID NO: 76167 - protein, 27 aa, Artificial sequence
  Protein classification predicting sequence
AALDEMGVDYFEAEGEAAFYGPKLDIQ

SEQ ID NO: 76168 - protein, 13 aa, Artificial sequence
  Protein classification predicting sequence
KIPYQLIVGDKEM

SEQ ID NO: 76169 - protein, 18 aa, Artificial sequence
  Protein classification predicting sequence
EFVENILADIARKSRPDA

SEQ ID NO: 76170 - protein, 9 aa, Artificial sequence
  Protein classification predicting sequence
RVRGFTQDD

SEQ ID NO: 76171 - protein, 6 aa, Artificial sequence
  Protein classification predicting sequence
DQIKDE

SEQ ID NO: 76172 - protein, 6 aa, Artificial sequence
  Protein classification predicting sequence
GSIERF

SEQ ID NO: 76173 - protein, 11 aa, Artificial sequence
  Protein classification predicting sequence
GEAAFYGPKLD

SEQ ID NO: 76174 - protein, 10 aa, Artificial sequence
  Protein classification predicting sequence
QVDYNLPERF

SEQ ID NO: 76175 - protein, 6 aa, Artificial sequence
  Protein classification predicting sequence
FVRPDQ

SEQ ID NO: 76176 - protein, 8 aa, Artificial sequence
  Protein classification predicting sequence
RPVMIHRA

SEQ ID NO: 76177 - protein, 5 aa, Artificial sequence
  Protein classification predicting sequence
VFWHP

SEQ ID NO: 76178 - protein, 6 aa, Artificial sequence
  Protein classification predicting sequence
GSLERF

SEQ ID NO: 76179 - protein, 13 aa, Artificial sequence
  Protein classification predicting sequence
GFYYDFDVAEPFT

SEQ ID NO: 76180 - protein, 6 aa, Artificial sequence
  Protein classification predicting sequence
EPYKLE

SEQ ID NO: 76181 - protein, 9 aa, Artificial sequence
  Protein classification predicting sequence
WWDLCAGPH

SEQ ID NO: 76182 - protein, 9 aa, Artificial sequence
  Protein classification predicting sequence
VAGAYWRGD

SEQ ID NO: 76183 - protein, 7 aa, Artificial sequence
  Protein classification predicting sequence
GAYWRGD

SEQ ID NO: 76184 - protein, 9 aa, Artificial sequence
  Protein classification predicting sequence
GEAAFYGPK

SEQ ID NO: 76185 - protein, 7 aa, Artificial sequence
  Protein classification predicting sequence
GLRAEVD

SEQ ID NO: 76186 - protein, 7 aa, Artificial sequence
  Protein classification predicting sequence
SGHYAKY

SEQ ID NO: 76187 - protein, 8 aa, Artificial sequence
  Protein classification predicting sequence
LHGLMRVR

SEQ ID NO: 76188 - protein, 7 aa, Artificial sequence
  Protein classification predicting sequence
HRAPFGS

SEQ ID NO: 76189 - protein, 6 aa, Artificial sequence
  Protein classification predicting sequence
IGRTWQ

SEQ ID NO: 76190 - protein, 7 aa, Artificial sequence
  Protein classification predicting sequence
ERFIGIL

SEQ ID NO: 76191 - protein, 8 aa, Artificial sequence
  Protein classification predicting sequence
IPYMLIVG

SEQ ID NO: 76192 - protein, 6 aa, Artificial sequence
  Protein classification predicting sequence
TIQVDF

SEQ ID NO: 76193 - protein, 9 aa, Artificial sequence
  Protein classification predicting sequence
IFKQGIKSY

SEQ ID NO: 76194 - protein, 6 aa, Artificial sequence
  Protein classification predicting sequence
LHGIMR

SEQ ID NO: 76195 - protein, 9 aa, Artificial sequence
  Protein classification predicting sequence
GEGAFYGPK

SEQ ID NO: 76196 - protein, 7 aa, Artificial sequence
  Protein classification predicting sequence
RMNAKIR

SEQ ID NO: 76197 - protein, 6 aa, Artificial sequence
  Protein classification predicting sequence
YQLIVG

SEQ ID NO: 76198 - protein, 8 aa, Artificial sequence
  Protein classification predicting sequence
YWRGNSDN

SEQ ID NO: 76199 - protein, 9 aa, Artificial sequence
  Protein classification predicting sequence
DHRKLGKEL

SEQ ID NO: 76200 - protein, 7 aa, Artificial sequence
  Protein classification predicting sequence
DLCKGPH

SEQ ID NO: 76201 - protein, 9 aa, Artificial sequence
  Protein classification predicting sequence
ITLPDGSQR

SEQ ID NO: 76202 - protein, 9 aa, Artificial sequence
  Protein classification predicting sequence
DMCRGPHVP

SEQ ID NO: 76203 - protein, 11 aa, Artificial sequence
  Protein classification predicting sequence
AGAYWRGNSDN

SEQ ID NO: 76204 - protein, 28 aa, Artificial sequence
  Protein classification predicting sequence
AGAYWRGNSDNKMLQRIYGTAFHDKKAL

SEQ ID NO: 76205 - protein, 16 aa, Artificial sequence
  Protein classification predicting sequence
SENREYAIKPMNCPGH

SEQ ID NO: 76206 - protein, 12 aa, Artificial sequence
  Protein classification predicting sequence
GEGAFYGPKIEF

SEQ ID NO: 76207 - protein, 14 aa, Artificial sequence
  Protein classification predicting sequence
GEGAFYGPKIEFTL

SEQ ID NO: 76208 - protein, 37 aa, Artificial sequence
  Protein classification predicting sequence
PVMIHRAILGSLERFIGILIEEYAGFFPTWLAPEQAV

SEQ ID NO: 76209 - protein, 27 aa, Artificial sequence
  Protein classification predicting sequence
KDEVDGLEIVRHSCAHLLGHALKQLYP

SEQ ID NO: 76210 - protein, 5 aa, Artificial sequence
  Protein classification predicting sequence
FCQHF

SEQ ID NO: 76211 - protein, 7 aa, Artificial sequence
  Protein classification predicting sequence
RVPYMLV

SEQ ID NO: 76212 - protein, 7 aa, Artificial sequence
  Protein classification predicting sequence
AIKQLWP

SEQ ID NO: 76213 - protein, 11 aa, Artificial sequence
  Protein classification predicting sequence
PGMVFWHHNGW

SEQ ID NO: 76214 - protein, 8 aa, Artificial sequence
  Protein classification predicting sequence
EGAFYGPK

SEQ ID NO: 76215 - protein, 10 aa, Artificial sequence
  Protein classification predicting sequence
FTQDDAHIFC

SEQ ID NO: 76216 - protein, 9 aa, Artificial sequence
  Protein classification predicting sequence
NEKISYKIR

SEQ ID NO: 76217 - protein, 13 aa, Artificial sequence
  Protein classification predicting sequence
FKLMKVAGAYWRG

SEQ ID NO: 76218 - protein, 7 aa, Artificial sequence
  Protein classification predicting sequence
VKFSDRP

SEQ ID NO: 76219 - protein, 5 aa, Artificial sequence
  Protein classification predicting sequence
KRDHR

SEQ ID NO: 76220 - protein, 6 aa, Artificial sequence
  Protein classification predicting sequence
QEEAPG

SEQ ID NO: 76221 - protein, 9 aa, Artificial sequence
  Protein classification predicting sequence
LVDASDLIE

SEQ ID NO: 76222 - protein, 10 aa, Artificial sequence
  Protein classification predicting sequence
AGAFPAWLAP

SEQ ID NO: 76223 - protein, 9 aa, Artificial sequence
  Protein classification predicting sequence
IIRHSCAHL

SEQ ID NO: 76224 - protein, 8 aa, Artificial sequence
  Protein classification predicting sequence
KMVIGPVI

SEQ ID NO: 76225 - protein, 20 aa, Artificial sequence
  Protein classification predicting sequence
HQEYVDMCRGPHVPNTRFLK

SEQ ID NO: 76226 - protein, 35 aa, Artificial sequence
  Protein classification predicting sequence
HQEYVDMCRGPHVPNTRFLKAFKLTRISGAYWRGD

SEQ ID NO: 76227 - protein, 20 aa, Artificial sequence
  Protein classification predicting sequence
RCPQILDVSLWQKSGHWDNY

SEQ ID NO: 76228 - protein, 16 aa, Artificial sequence
  Protein classification predicting sequence
EFGACHRNEPSGALHG

SEQ ID NO: 76229 - protein, 10 aa, Artificial sequence
  Protein classification predicting sequence
ERFIGILIEH

SEQ ID NO: 76230 - protein, 6 aa, Artificial sequence
  Protein classification predicting sequence
GILIEH

SEQ ID NO: 76231 - protein, 11 aa, Artificial sequence
  Protein classification predicting sequence
LTRISGAYWRG

SEQ ID NO: 76232 - protein, 51 aa, Artificial sequence
  Protein classification predicting sequence
SEKRTYAVKPMNCPGHVQVFNQGLHSYRDLPIRYGEFGACHRNEPSGALHG

SEQ ID NO: 76233 - protein, 9 aa, Artificial sequence
  Protein classification predicting sequence
IQIKIALRP

SEQ ID NO: 76234 - protein, 33 aa, Artificial sequence
  Protein classification predicting sequence
VEWQELPGEGAFYGPKIEYHLKDAIGRTWQLGT

SEQ ID NO: 76235 - protein, 7 aa, Artificial sequence
  Protein classification predicting sequence
ANITDAQ

SEQ ID NO: 76236 - protein, 33 aa, Artificial sequence
  Protein classification predicting sequence
DLRNEKIGYKIREHTLQRVPYLLVVGDREKENG

SEQ ID NO: 76237 - protein, 9 aa, Artificial sequence
  Protein classification predicting sequence
PGLYHHEEY

SEQ ID NO: 76238 - protein, 19 aa, Artificial sequence
  Protein classification predicting sequence
DMCRGPHVPNMRFCHHFKL

SEQ ID NO: 76239 - protein, 12 aa, Artificial sequence
  Protein classification predicting sequence
NKMLQRIYGTAW

SEQ ID NO: 76240 - protein, 50 aa, Artificial sequence
  Protein classification predicting sequence
LNAYLQRLEEAAKRDHRKIGKQLDLYHMQEEAPGMVFWHNDGWTIFRELE

SEQ ID NO: 76241 - protein, 28 aa, Artificial sequence
  Protein classification predicting sequence
LDLYHMQEEAPGMVFWHNDGWTIFRELE

SEQ ID NO: 76242 - protein, 11 aa, Artificial sequence
  Protein classification predicting sequence
MFTTSSENREY

SEQ ID NO: 76243 - protein, 52 aa, Artificial sequence
  Protein classification predicting sequence
MFTTSSENREYCIKPMNCPGHVQIFNQGLKSYRDLPLRMAEFGSCHRNEPSG

SEQ ID NO: 76244 - protein, 7 aa, Artificial sequence
  Protein classification predicting sequence
FTQDDAH

SEQ ID NO: 76245 - protein, 6 aa, Artificial sequence
  Protein classification predicting sequence
GSDELW

SEQ ID NO: 76246 - protein, 6 aa, Artificial sequence
  Protein classification predicting sequence
RLSASY

SEQ ID NO: 76247 - protein, 14 aa, Artificial sequence
  Protein classification predicting sequence
AGFFPTWLAPVQVV

SEQ ID NO: 76248 - protein, 7 aa, Artificial sequence
  Protein classification predicting sequence
EIRSRSL

SEQ ID NO: 76249 - protein, 7 aa, Artificial sequence
  Protein classification predicting sequence
AVQKLFP

SEQ ID NO: 76250 - protein, 6 aa, Artificial sequence
  Protein classification predicting sequence
DLFHLQ

SEQ ID NO: 76251 - protein, 6 aa, Artificial sequence
  Protein classification predicting sequence
DIIRTW

SEQ ID NO: 76252 - protein, 6 aa, Artificial sequence
  Protein classification predicting sequence
ATTRPE

SEQ ID NO: 76253 - protein, 6 aa, Artificial sequence
  Protein classification predicting sequence
DVLDTW

SEQ ID NO: 76254 - protein, 7 aa, Artificial sequence
  Protein classification predicting sequence
LVTGYDI

SEQ ID NO: 76255 - protein, 7 aa, Artificial sequence
  Protein classification predicting sequence
DERYKHL

SEQ ID NO: 76256 - protein, 14 aa, Artificial sequence
  Protein classification predicting sequence
WCISRQLWWGHRIP

SEQ ID NO: 76257 - protein, 7 aa, Artificial sequence
  Protein classification predicting sequence
PPPNVTG

SEQ ID NO: 76258 - protein, 6 aa, Artificial sequence
  Protein classification predicting sequence
WGHRIP

SEQ ID NO: 76259 - protein, 8 aa, Artificial sequence
  Protein classification predicting sequence
TGCVKITP

SEQ ID NO: 76260 - protein, 6 aa, Artificial sequence
  Protein classification predicting sequence
FWEKNG

SEQ ID NO: 76261 - protein, 6 aa, Artificial sequence
  Protein classification predicting sequence
LTDQWY

SEQ ID NO: 76262 - protein, 6 aa, Artificial sequence
  Protein classification predicting sequence
SKQWFV

SEQ ID NO: 76263 - protein, 7 aa, Artificial sequence
  Protein classification predicting sequence
DILFFWV

SEQ ID NO: 76264 - protein, 8 aa, Artificial sequence
  Protein classification predicting sequence
DHAGIATQ

SEQ ID NO: 76265 - protein, 6 aa, Artificial sequence
  Protein classification predicting sequence
PEDERY

SEQ ID NO: 76266 - protein, 10 aa, Artificial sequence
  Protein classification predicting sequence
SKSKGNVIDP

SEQ ID NO: 76267 - protein, 10 aa, Artificial sequence
  Protein classification predicting sequence
GTDHAGIATQ

SEQ ID NO: 76268 - protein, 8 aa, Artificial sequence
  Protein classification predicting sequence
QWFVKMKP

SEQ ID NO: 76269 - protein, 9 aa, Artificial sequence
  Protein classification predicting sequence
ISRQLWWGH

SEQ ID NO: 76270 - protein, 6 aa, Artificial sequence
  Protein classification predicting sequence
DTWFSS

SEQ ID NO: 76271 - protein, 16 aa, Artificial sequence
  Protein classification predicting sequence
VSGFDIIFFWIARMIM

SEQ ID NO: 76272 - protein, 8 aa, Artificial sequence
  Protein classification predicting sequence
VATTRPET

SEQ ID NO: 76273 - protein, 8 aa, Artificial sequence
  Protein classification predicting sequence
VKITPAHD

SEQ ID NO: 76274 - protein, 7 aa, Artificial sequence
  Protein classification predicting sequence
LITGFDI

SEQ ID NO: 76275 - protein, 6 aa, Artificial sequence
  Protein classification predicting sequence
WGHQIP

SEQ ID NO: 76276 - protein, 9 aa, Artificial sequence
  Protein classification predicting sequence
GDTAVAVHP

SEQ ID NO: 76277 - protein, 9 aa, Artificial sequence
  Protein classification predicting sequence
TPAHDPNDF

SEQ ID NO: 76278 - protein, 6 aa, Artificial sequence
  Protein classification predicting sequence
FWVARM

SEQ ID NO: 76279 - protein, 7 aa, Artificial sequence
  Protein classification predicting sequence
VHPDDER

SEQ ID NO: 76280 - protein, 8 aa, Artificial sequence
  Protein classification predicting sequence
DRWILSRL

SEQ ID NO: 76281 - protein, 6 aa, Artificial sequence
  Protein classification predicting sequence
LWPFST

SEQ ID NO: 76282 - protein, 8 aa, Artificial sequence
  Protein classification predicting sequence
TPAHDFND

SEQ ID NO: 76283 - protein, 12 aa, Artificial sequence
  Protein classification predicting sequence
DWCISRQLWWGH

SEQ ID NO: 76284 - protein, 7 aa, Artificial sequence
  Protein classification predicting sequence
SDIEVEY

SEQ ID NO: 76285 - protein, 9 aa, Artificial sequence
  Protein classification predicting sequence
DVLDTWFSS

SEQ ID NO: 76286 - protein, 12 aa, Artificial sequence
  Protein classification predicting sequence
DVLDTWFSSGLW

SEQ ID NO: 76287 - protein, 7 aa, Artificial sequence
  Protein classification predicting sequence
LHMGHAF

SEQ ID NO: 76288 - protein, 8 aa, Artificial sequence
  Protein classification predicting sequence
VDPEFGTG

SEQ ID NO: 76289 - protein, 7 aa, Artificial sequence
  Protein classification predicting sequence
GREKFLE

SEQ ID NO: 76290 - protein, 9 aa, Artificial sequence
  Protein classification predicting sequence
DEGLSRAVR

SEQ ID NO: 76291 - protein, 7 aa, Artificial sequence
  Protein classification predicting sequence
KRYYPTD

SEQ ID NO: 76292 - protein, 8 aa, Artificial sequence
  Protein classification predicting sequence
TPAHDPND

SEQ ID NO: 76293 - protein, 5 aa, Artificial sequence
  Protein classification predicting sequence
FCDWY

SEQ ID NO: 76294 - protein, 9 aa, Artificial sequence
  Protein classification predicting sequence
GTDHAGIAT

SEQ ID NO: 76295 - protein, 5 aa, Artificial sequence
  Protein classification predicting sequence
TPAHD

SEQ ID NO: 76296 - protein, 12 aa, Artificial sequence
  Protein classification predicting sequence
FVQSHVPEHAQL

SEQ ID NO: 76297 - protein, 6 aa, Artificial sequence
  Protein classification predicting sequence
ADILLY

SEQ ID NO: 76298 - protein, 6 aa, Artificial sequence
  Protein classification predicting sequence
KSAVTD

SEQ ID NO: 76299 - protein, 8 aa, Artificial sequence
  Protein classification predicting sequence
SNLLTIYS

SEQ ID NO: 76300 - protein, 6 aa, Artificial sequence
  Protein classification predicting sequence
FVQSHV

SEQ ID NO: 76301 - protein, 10 aa, Artificial sequence
  Protein classification predicting sequence
YPVLMAADIL

SEQ ID NO: 76302 - protein, 7 aa, Artificial sequence
  Protein classification predicting sequence
LMAADIL

SEQ ID NO: 76303 - protein, 11 aa, Artificial sequence
  Protein classification predicting sequence
LKKDTAEAVVE

SEQ ID NO: 76304 - protein, 8 aa, Artificial sequence
  Protein classification predicting sequence
EQTREIVR

SEQ ID NO: 76305 - protein, 8 aa, Artificial sequence
  Protein classification predicting sequence
PGRVEGNP

SEQ ID NO: 76306 - protein, 7 aa, Artificial sequence
  Protein classification predicting sequence
GGLGDVK

SEQ ID NO: 76307 - protein, 6 aa, Artificial sequence
  Protein classification predicting sequence
AVGFDP

SEQ ID NO: 76308 - protein, 7 aa, Artificial sequence
  Protein classification predicting sequence
LGNYLGA

SEQ ID NO: 76309 - protein, 7 aa, Artificial sequence
  Protein classification predicting sequence
KPALLHS

SEQ ID NO: 76310 - protein, 7 aa, Artificial sequence
  Protein classification predicting sequence
FFPALQG

SEQ ID NO: 76311 - protein, 6 aa, Artificial sequence
  Protein classification predicting sequence
FSGIQP

SEQ ID NO: 76312 - protein, 6 aa, Artificial sequence
  Protein classification predicting sequence
GLLTYP

SEQ ID NO: 76313 - protein, 7 aa, Artificial sequence
  Protein classification predicting sequence
AADILLY

SEQ ID NO: 76314 - protein, 24 aa, Artificial sequence
  Protein classification predicting sequence
FKPLVFSGVQPTGNLHLGNYLGAI

SEQ ID NO: 76315 - protein, 8 aa, Artificial sequence
  Protein classification predicting sequence
RDIAQKFN

SEQ ID NO: 76316 - protein, 7 aa, Artificial sequence
  Protein classification predicting sequence
SGVQPTG

SEQ ID NO: 76317 - protein, 8 aa, Artificial sequence
  Protein classification predicting sequence
DPEKATLF

SEQ ID NO: 76318 - protein, 6 aa, Artificial sequence
  Protein classification predicting sequence
TLFVQS

SEQ ID NO: 76319 - protein, 7 aa, Artificial sequence
  Protein classification predicting sequence
QSEVPAH

SEQ ID NO: 76320 - protein, 7 aa, Artificial sequence
  Protein classification predicting sequence
YEGKGYG

SEQ ID NO: 76321 - protein, 9 aa, Artificial sequence
  Protein classification predicting sequence
CIVDQHAIT

SEQ ID NO: 76322 - protein, 11 aa, Artificial sequence
  Protein classification predicting sequence
GIVKFDKENKP

SEQ ID NO: 76323 - protein, 6 aa, Artificial sequence
  Protein classification predicting sequence
RMTQFK

SEQ ID NO: 76324 - protein, 8 aa, Artificial sequence
  Protein classification predicting sequence
KPGISNLL

SEQ ID NO: 76325 - protein, 6 aa, Artificial sequence
  Protein classification predicting sequence
AMGLGR

SEQ ID NO: 76326 - protein, 10 aa, Artificial sequence
  Protein classification predicting sequence
HAITVPQDRL

SEQ ID NO: 76327 - protein, 8 aa, Artificial sequence
  Protein classification predicting sequence
KPGVSNLL

SEQ ID NO: 76328 - protein, 7 aa, Artificial sequence
  Protein classification predicting sequence
FKGDLAE

SEQ ID NO: 76329 - protein, 8 aa, Artificial sequence
  Protein classification predicting sequence
IVFSGAQP

SEQ ID NO: 76330 - protein, 7 aa, Artificial sequence
  Protein classification predicting sequence
CIYCIVD

SEQ ID NO: 76331 - protein, 7 aa, Artificial sequence
  Protein classification predicting sequence
QSHVPEH

SEQ ID NO: 76332 - protein, 8 aa, Artificial sequence
  Protein classification predicting sequence
NRAHAYKA

SEQ ID NO: 76333 - protein, 8 aa, Artificial sequence
  Protein classification predicting sequence
LTGDRPTG

SEQ ID NO: 76334 - protein, 6 aa, Artificial sequence
  Protein classification predicting sequence
GHYVGS

SEQ ID NO: 76335 - protein, 5 aa, Artificial sequence
  Protein classification predicting sequence
YPVLM

SEQ ID NO: 76336 - protein, 8 aa, Artificial sequence
  Protein classification predicting sequence
KANLVPVG

SEQ ID NO: 76337 - protein, 33 aa, Artificial sequence
  Protein classification predicting sequence
EEHRQFGGNCDVDVSFMYLTFFLEDDDKLEQIR

SEQ ID NO: 76338 - protein, 10 aa, Artificial sequence
  Protein classification predicting sequence
KAGKDRENAS

SEQ ID NO: 76339 - protein, 16 aa, Artificial sequence
  Protein classification predicting sequence
GLFDYPVLMAADILLY

SEQ ID NO: 76340 - protein, 12 aa, Artificial sequence
  Protein classification predicting sequence
YPVLMAADILLY

SEQ ID NO: 76341 - protein, 9 aa, Artificial sequence
  Protein classification predicting sequence
LMAADILLY

SEQ ID NO: 76342 - protein, 6 aa, Artificial sequence
  Protein classification predicting sequence
YPILMA

SEQ ID NO: 76343 - protein, 11 aa, Artificial sequence
  Protein classification predicting sequence
LDTLALYLACG

SEQ ID NO: 76344 - protein, 10 aa, Artificial sequence
  Protein classification predicting sequence
GELSRMTQFK

SEQ ID NO: 76345 - protein, 13 aa, Artificial sequence
  Protein classification predicting sequence
DILLYQTNLVPVG

SEQ ID NO: 76346 - protein, 7 aa, Artificial sequence
  Protein classification predicting sequence
ELTRDIA

SEQ ID NO: 76347 - protein, 6 aa, Artificial sequence
  Protein classification predicting sequence
TIFIQS

SEQ ID NO: 76348 - protein, 13 aa, Artificial sequence
  Protein classification predicting sequence
IILTGDRPTGKLH

SEQ ID NO: 76349 - protein, 8 aa, Artificial sequence
  Protein classification predicting sequence
ADQQALTD

SEQ ID NO: 76350 - protein, 7 aa, Artificial sequence
  Protein classification predicting sequence
SIPAGFL

SEQ ID NO: 76351 - protein, 8 aa, Artificial sequence
  Protein classification predicting sequence
REIVRSFN

SEQ ID NO: 76352 - protein, 8 aa, Artificial sequence
  Protein classification predicting sequence
GELSRMTQ

SEQ ID NO: 76353 - protein, 7 aa, Artificial sequence
  Protein classification predicting sequence
HAITVRQ

SEQ ID NO: 76354 - protein, 9 aa, Artificial sequence
  Protein classification predicting sequence
RDIATRFNN

SEQ ID NO: 76355 - protein, 7 aa, Artificial sequence
  Protein classification predicting sequence
VPVGEDQ

SEQ ID NO: 76356 - protein, 7 aa, Artificial sequence
  Protein classification predicting sequence
QHLELTR

SEQ ID NO: 76357 - protein, 7 aa, Artificial sequence
  Protein classification predicting sequence
IKSAVTD

SEQ ID NO: 76358 - protein, 7 aa, Artificial sequence
  Protein classification predicting sequence
QHIELTR

SEQ ID NO: 76359 - protein, 7 aa, Artificial sequence
  Protein classification predicting sequence
HAITVPQ

SEQ ID NO: 76360 - protein, 6 aa, Artificial sequence
  Protein classification predicting sequence
FIQSEV

SEQ ID NO: 76361 - protein, 10 aa, Artificial sequence
  Protein classification predicting sequence
IEYNKEEKPG

SEQ ID NO: 76362 - protein, 7 aa, Artificial sequence
  Protein classification predicting sequence
KPGITNL

SEQ ID NO: 76363 - protein, 7 aa, Artificial sequence
  Protein classification predicting sequence
KLPEPLI

SEQ ID NO: 76364 - protein, 8 aa, Artificial sequence
  Protein classification predicting sequence
FCVVDLHA

SEQ ID NO: 76365 - protein, 7 aa, Artificial sequence
  Protein classification predicting sequence
GARVMSL

SEQ ID NO: 76366 - protein, 12 aa, Artificial sequence
  Protein classification predicting sequence
KMSKSDPSDLSR

SEQ ID NO: 76367 - protein, 6 aa, Artificial sequence
  Protein classification predicting sequence
NLLTIY

SEQ ID NO: 76368 - protein, 7 aa, Artificial sequence
  Protein classification predicting sequence
VFSGVQP

SEQ ID NO: 76369 - protein, 6 aa, Artificial sequence
  Protein classification predicting sequence
QDDYDC

SEQ ID NO: 76370 - protein, 9 aa, Artificial sequence
  Protein classification predicting sequence
LNCYTYFGE

SEQ ID NO: 76371 - protein, 6 aa, Artificial sequence
  Protein classification predicting sequence
ARVMSL

SEQ ID NO: 76372 - protein, 8 aa, Artificial sequence
  Protein classification predicting sequence
TDSDEPPV

SEQ ID NO: 76373 - protein, 10 aa, Artificial sequence
  Protein classification predicting sequence
FEGKMYGHLK

SEQ ID NO: 76374 - protein, 18 aa, Artificial sequence
  Protein classification predicting sequence
SRMTQFKDKSARYAENIN

SEQ ID NO: 76375 - protein, 7 aa, Artificial sequence
  Protein classification predicting sequence
KGYGDFK

SEQ ID NO: 76376 - protein, 8 aa, Artificial sequence
  Protein classification predicting sequence
HAITVRQD

SEQ ID NO: 76377 - protein, 15 aa, Artificial sequence
  Protein classification predicting sequence
LQERYHRFRNDEAFL

SEQ ID NO: 76378 - protein, 12 aa, Artificial sequence
  Protein classification predicting sequence
ILTGDRPTGKLH

SEQ ID NO: 76379 - protein, 7 aa, Artificial sequence
  Protein classification predicting sequence
GHYVGSL

SEQ ID NO: 76380 - protein, 8 aa, Artificial sequence
  Protein classification predicting sequence
DPEKSTIF

SEQ ID NO: 76381 - protein, 11 aa, Artificial sequence
  Protein classification predicting sequence
IEGNMVFHYLD

SEQ ID NO: 76382 - protein, 6 aa, Artificial sequence
  Protein classification predicting sequence
VQSHVP

SEQ ID NO: 76383 - protein, 11 aa, Artificial sequence
  Protein classification predicting sequence
ELTRDLAERFN

SEQ ID NO: 76384 - protein, 10 aa, Artificial sequence
  Protein classification predicting sequence
VPVGEDQKQH

SEQ ID NO: 76385 - protein, 10 aa, Artificial sequence
  Protein classification predicting sequence
KKIKSAVTDS

SEQ ID NO: 76386 - protein, 6 aa, Artificial sequence
  Protein classification predicting sequence
LTRDIA

SEQ ID NO: 76387 - protein, 9 aa, Artificial sequence
  Protein classification predicting sequence
EDFVDPWTV

SEQ ID NO: 76388 - protein, 14 aa, Artificial sequence
  Protein classification predicting sequence
TSSAKGIDYDKLIV

SEQ ID NO: 76389 - protein, 10 aa, Artificial sequence
  Protein classification predicting sequence
DYDKLIVQFG

SEQ ID NO: 76390 - protein, 24 aa, Artificial sequence
  Protein classification predicting sequence
LDAYENKKPFYLYTGRGPSSEAMH

SEQ ID NO: 76391 - protein, 20 aa, Artificial sequence
  Protein classification predicting sequence
PFIFTKWLQDVFNVPLVIQM

SEQ ID NO: 76392 - protein, 12 aa, Artificial sequence
  Protein classification predicting sequence
DDEKYLWKDLTL

SEQ ID NO: 76393 - protein, 33 aa, Artificial sequence
  Protein classification predicting sequence
NVVKIQKHVTFNQVKGIFGFTDSDCIGKISFPA

SEQ ID NO: 76394 - protein, 11 aa, Artificial sequence
  Protein classification predicting sequence
QAAPSFSNSFP

SEQ ID NO: 76395 - protein, 13 aa, Artificial sequence
  Protein classification predicting sequence
KVNKHAFSGGRDT

SEQ ID NO: 76396 - protein, 10 aa, Artificial sequence
  Protein classification predicting sequence
EEHRQFGGNC

SEQ ID NO: 76397 - protein, 16 aa, Artificial sequence
  Protein classification predicting sequence
VDVSFMYLTFFLEDDD

SEQ ID NO: 76398 - protein, 14 aa, Artificial sequence
  Protein classification predicting sequence
VLQPLIAEHQARRK

SEQ ID NO: 76399 - protein, 8 aa, Artificial sequence
  Protein classification predicting sequence
VKEFMTPR

SEQ ID NO: 76400 - protein, 6 aa, Artificial sequence
  Protein classification predicting sequence
TIFVQS

SEQ ID NO: 76401 - protein, 8 aa, Artificial sequence
  Protein classification predicting sequence
VGDDQKQH

SEQ ID NO: 76402 - protein, 8 aa, Artificial sequence
  Protein classification predicting sequence
VPVGNDQK

SEQ ID NO: 76403 - protein, 6 aa, Artificial sequence
  Protein classification predicting sequence
DILLYQ

SEQ ID NO: 76404 - protein, 7 aa, Artificial sequence
  Protein classification predicting sequence
ALYLACG

SEQ ID NO: 76405 - protein, 7 aa, Artificial sequence
  Protein classification predicting sequence
KKRVLTG

SEQ ID NO: 76406 - protein, 13 aa, Artificial sequence
  Protein classification predicting sequence
PHLGNYVGAIRPA

SEQ ID NO: 76407 - protein, 6 aa, Artificial sequence
  Protein classification predicting sequence
EMARDI

SEQ ID NO: 76408 - protein, 7 aa, Artificial sequence
  Protein classification predicting sequence
TFYRQSD

SEQ ID NO: 76409 - protein, 8 aa, Artificial sequence
  Protein classification predicting sequence
ADILMFNA

SEQ ID NO: 76410 - protein, 9 aa, Artificial sequence
  Protein classification predicting sequence
ILDQGRDKA

SEQ ID NO: 76411 - protein, 6 aa, Artificial sequence
  Protein classification predicting sequence
QLAWVL

SEQ ID NO: 76412 - protein, 34 aa, Artificial sequence
  Protein classification predicting sequence
KKIKRAVTDSDEPPVVRYDVQNKAGVSNLLDILS

SEQ ID NO: 76413 - protein, 7 aa, Artificial sequence
  Protein classification predicting sequence
FVQSHVP

SEQ ID NO: 76414 - protein, 7 aa, Artificial sequence
  Protein classification predicting sequence
LLEDPKS

SEQ ID NO: 76415 - protein, 6 aa, Artificial sequence
  Protein classification predicting sequence
MYGHLK

SEQ ID NO: 76416 - protein, 15 aa, Artificial sequence
  Protein classification predicting sequence
VADAVSGMLTELQER

SEQ ID NO: 76417 - protein, 10 aa, Artificial sequence
  Protein classification predicting sequence
PTGNLHLGNY

SEQ ID NO: 76418 - protein, 7 aa, Artificial sequence
  Protein classification predicting sequence
RPEADNL

SEQ ID NO: 76419 - protein, 7 aa, Artificial sequence
  Protein classification predicting sequence
GSKIMSL

SEQ ID NO: 76420 - protein, 17 aa, Artificial sequence
  Protein classification predicting sequence
TGTPHLGNYAGAIRPAI

SEQ ID NO: 76421 - protein, 7 aa, Artificial sequence
  Protein classification predicting sequence
SFYFLAD

SEQ ID NO: 76422 - protein, 9 aa, Artificial sequence
  Protein classification predicting sequence
DGSFRFRLL

SEQ ID NO: 76423 - protein, 7 aa, Artificial sequence
  Protein classification predicting sequence
GWGDAKQ

SEQ ID NO: 76424 - protein, 9 aa, Artificial sequence
  Protein classification predicting sequence
LREAVGLRS

SEQ ID NO: 76425 - protein, 23 aa, Artificial sequence
  Protein classification predicting sequence
ARFVSFRDEDGSFRFRLLAADGE

SEQ ID NO: 76426 - protein, 6 aa, Artificial sequence
  Protein classification predicting sequence
AATWLA

SEQ ID NO: 76427 - protein, 15 aa, Artificial sequence
  Protein classification predicting sequence
FNAHQVPVGRDQIQH

SEQ ID NO: 76428 - protein, 10 aa, Artificial sequence
  Protein classification predicting sequence
VPVGRDQIQH

SEQ ID NO: 76429 - protein, 7 aa, Artificial sequence
  Protein classification predicting sequence
ARFVSFR

SEQ ID NO: 76430 - protein, 14 aa, Artificial sequence
  Protein classification predicting sequence
DGSFRFRLLAADGE

SEQ ID NO: 76431 - protein, 8 aa, Artificial sequence
  Protein classification predicting sequence
LYTGRGPS

SEQ ID NO: 76432 - protein, 13 aa, Artificial sequence
  Protein classification predicting sequence
LIPCAIDQDPYFR

SEQ ID NO: 76433 - protein, 11 aa, Artificial sequence
  Protein classification predicting sequence
PIAKKINFSMA

SEQ ID NO: 76434 - protein, 9 aa, Artificial sequence
  Protein classification predicting sequence
EQSKIGMIF

SEQ ID NO: 76435 - protein, 7 aa, Artificial sequence
  Protein classification predicting sequence
PAIQAAP

SEQ ID NO: 76436 - protein, 10 aa, Artificial sequence
  Protein classification predicting sequence
FGSSKIDKEL

SEQ ID NO: 76437 - protein, 13 aa, Artificial sequence
  Protein classification predicting sequence
AEHQARRKEVTDE

SEQ ID NO: 76438 - protein, 6 aa, Artificial sequence
  Protein classification predicting sequence
CVVDLH

SEQ ID NO: 76439 - protein, 10 aa, Artificial sequence
  Protein classification predicting sequence
FNCVARIGWM

SEQ ID NO: 76440 - protein, 7 aa, Artificial sequence
  Protein classification predicting sequence
MTQFKDK

SEQ ID NO: 76441 - protein, 16 aa, Artificial sequence
  Protein classification predicting sequence
KKMSKSDPSDLSRINL

SEQ ID NO: 76442 - protein, 6 aa, Artificial sequence
  Protein classification predicting sequence
QSDIPE

SEQ ID NO: 76443 - protein, 6 aa, Artificial sequence
  Protein classification predicting sequence
VLSGVQ

SEQ ID NO: 76444 - protein, 6 aa, Artificial sequence
  Protein classification predicting sequence
DLHAIT

SEQ ID NO: 76445 - protein, 39 aa, Artificial sequence
  Protein classification predicting sequence
KAGVSNLLDILSAVTGQSIPELEKQFEGKMYGHLKGEVA

SEQ ID NO: 76446 - protein, 17 aa, Artificial sequence
  Protein classification predicting sequence
ELQERYHRFRNDEAFLQ

SEQ ID NO: 76447 - protein, 7 aa, Artificial sequence
  Protein classification predicting sequence
KPIVLSG

SEQ ID NO: 76448 - protein, 22 aa, Artificial sequence
  Protein classification predicting sequence
SGAQPSGELTIGNYMGALRQWV

SEQ ID NO: 76449 - protein, 5 aa, Artificial sequence
  Protein classification predicting sequence
LNCYT

SEQ ID NO: 76450 - protein, 20 aa, Artificial sequence
  Protein classification predicting sequence
LNCYTQMGELSRMTQFKDKS

SEQ ID NO: 76451 - protein, 13 aa, Artificial sequence
  Protein classification predicting sequence
GELSRMTQFKDKS

SEQ ID NO: 76452 - protein, 9 aa, Artificial sequence
  Protein classification predicting sequence
RMTQFKDKS

SEQ ID NO: 76453 - protein, 6 aa, Artificial sequence
  Protein classification predicting sequence
PEPFIP

SEQ ID NO: 76454 - protein, 6 aa, Artificial sequence
  Protein classification predicting sequence
VMSLQD

SEQ ID NO: 76455 - protein, 16 aa, Artificial sequence
  Protein classification predicting sequence
GLFGYPVLMAADILLY

SEQ ID NO: 76456 - protein, 6 aa, Artificial sequence
  Protein classification predicting sequence
LMAADI

SEQ ID NO: 76457 - protein, 8 aa, Artificial sequence
  Protein classification predicting sequence
KMSKSDDN

SEQ ID NO: 76458 - protein, 8 aa, Artificial sequence
  Protein classification predicting sequence
PQDRLKLR

SEQ ID NO: 76459 - protein, 9 aa, Artificial sequence
  Protein classification predicting sequence
RQLAAIYLA

SEQ ID NO: 76460 - protein, 15 aa, Artificial sequence
  Protein classification predicting sequence
YNTNIVPVGDDQKQH

SEQ ID NO: 76461 - protein, 10 aa, Artificial sequence
  Protein classification predicting sequence
VPVGDDQKQH

SEQ ID NO: 76462 - protein, 16 aa, Artificial sequence
  Protein classification predicting sequence
RMPKVGGRVMSLQDPT

SEQ ID NO: 76463 - protein, 9 aa, Artificial sequence
  Protein classification predicting sequence
RVMSLQDPT

SEQ ID NO: 76464 - protein, 14 aa, Artificial sequence
  Protein classification predicting sequence
KYEGEGYGKFKGDL

SEQ ID NO: 76465 - protein, 7 aa, Artificial sequence
  Protein classification predicting sequence
KTLKKME

SEQ ID NO: 76466 - protein, 23 aa, Artificial sequence
  Protein classification predicting sequence
TLFIQSEVPAHVQAGWMLTTIAS

SEQ ID NO: 76467 - protein, 22 aa, Artificial sequence
  Protein classification predicting sequence
ELTRNLVDRFNSRYNDVLVKPE

SEQ ID NO: 76468 - protein, 21 aa, Artificial sequence
  Protein classification predicting sequence
VAAKKIKSAVTDSDGIIKFDR

SEQ ID NO: 76469 - protein, 15 aa, Artificial sequence
  Protein classification predicting sequence
FVFLADQQALTDHAK

SEQ ID NO: 76470 - protein, 11 aa, Artificial sequence
  Protein classification predicting sequence
ESIGNVALDYL

SEQ ID NO: 76471 - protein, 11 aa, Artificial sequence
  Protein classification predicting sequence
LVEPEGIYPEN

SEQ ID NO: 76472 - protein, 17 aa, Artificial sequence
  Protein classification predicting sequence
AGRLPGLDGNAKMSKSL

SEQ ID NO: 76473 - protein, 14 aa, Artificial sequence
  Protein classification predicting sequence
PIRERRLEYAKDMG

SEQ ID NO: 76474 - protein, 15 aa, Artificial sequence
  Protein classification predicting sequence
KPIILTGDRPTGKLH

SEQ ID NO: 76475 - protein, 11 aa, Artificial sequence
  Protein classification predicting sequence
LTGDRPTGKLH

SEQ ID NO: 76476 - protein, 11 aa, Artificial sequence
  Protein classification predicting sequence
GHYVGSLKNRV

SEQ ID NO: 76477 - protein, 7 aa, Artificial sequence
  Protein classification predicting sequence
LQNENKY

SEQ ID NO: 76478 - protein, 19 aa, Artificial sequence
  Protein classification predicting sequence
MFVFLADQQALTDHAKESE

SEQ ID NO: 76479 - protein, 13 aa, Artificial sequence
  Protein classification predicting sequence
NVALDYLSVGLDP

SEQ ID NO: 76480 - protein, 9 aa, Artificial sequence
  Protein classification predicting sequence
LVEPEGIYP

SEQ ID NO: 76481 - protein, 22 aa, Artificial sequence
  Protein classification predicting sequence
LSDDADTVRKKVMSMYTDPNHI

SEQ ID NO: 76482 - protein, 18 aa, Artificial sequence
  Protein classification predicting sequence
EDPGQIEGNMVFHYLDIF

SEQ ID NO: 76483 - protein, 10 aa, Artificial sequence
  Protein classification predicting sequence
YLLDILEREL

SEQ ID NO: 76484 - protein, 9 aa, Artificial sequence
  Protein classification predicting sequence
QKGFGESIP

SEQ ID NO: 76485 - protein, 17 aa, Artificial sequence
  Protein classification predicting sequence
DQKPMIEQTREIVRSFN

SEQ ID NO: 76486 - protein, 16 aa, Artificial sequence
  Protein classification predicting sequence
YQRGGLGDVKTKRYLL

SEQ ID NO: 76487 - protein, 6 aa, Artificial sequence
  Protein classification predicting sequence
FFSHRD

SEQ ID NO: 76488 - protein, 6 aa, Artificial sequence
  Protein classification predicting sequence
RCLIPA

SEQ ID NO: 76489 - protein, 12 aa, Artificial sequence
  Protein classification predicting sequence
IDQDPYWRLQRD

SEQ ID NO: 76490 - protein, 8 aa, Artificial sequence
  Protein classification predicting sequence
AESLGYYK

SEQ ID NO: 76491 - protein, 5 aa, Artificial sequence
  Protein classification predicting sequence
WLLNC

SEQ ID NO: 76492 - protein, 13 aa, Artificial sequence
  Protein classification predicting sequence
VPVGEDQKQHLEL

SEQ ID NO: 76493 - protein, 8 aa, Artificial sequence
  Protein classification predicting sequence
DQKQHLEL

SEQ ID NO: 76494 - protein, 8 aa, Artificial sequence
  Protein classification predicting sequence
DQDPHLRL

SEQ ID NO: 76495 - protein, 7 aa, Artificial sequence
  Protein classification predicting sequence
RPTGKLH

SEQ ID NO: 76496 - protein, 6 aa, Artificial sequence
  Protein classification predicting sequence
HIELTR

SEQ ID NO: 76497 - protein, 6 aa, Artificial sequence
  Protein classification predicting sequence
GNYLGA

SEQ ID NO: 76498 - protein, 13 aa, Artificial sequence
  Protein classification predicting sequence
TYFGELSRMTQFK

SEQ ID NO: 76499 - protein, 6 aa, Artificial sequence
  Protein classification predicting sequence
GLFTYP

SEQ ID NO: 76500 - protein, 7 aa, Artificial sequence
  Protein classification predicting sequence
IYDLQDP

SEQ ID NO: 76501 - protein, 7 aa, Artificial sequence
  Protein classification predicting sequence
KPGVSNL

SEQ ID NO: 76502 - protein, 39 aa, Artificial sequence
  Protein classification predicting sequence
ALHEATLDALAICLAVGVDPKKSTLFVQSHVPEHAQLGW

SEQ ID NO: 76503 - protein, 14 aa, Artificial sequence
  Protein classification predicting sequence
FVQSHVPEHAQLGW

SEQ ID NO: 76504 - protein, 28 aa, Artificial sequence
  Protein classification predicting sequence
LNCYTQMGELSRMTQFKDKSARYANDVN

SEQ ID NO: 76505 - protein, 11 aa, Artificial sequence
  Protein classification predicting sequence
NLMGLYSAATG

SEQ ID NO: 76506 - protein, 15 aa, Artificial sequence
  Protein classification predicting sequence
GVEMYGPFKKDVGEA

SEQ ID NO: 76507 - protein, 15 aa, Artificial sequence
  Protein classification predicting sequence
GELSRMTQFKDKSAR

SEQ ID NO: 76508 - protein, 30 aa, Artificial sequence
  Protein classification predicting sequence
VNARVMSLQDATKKMSKSDDNRKNVITLLE

SEQ ID NO: 76509 - protein, 9 aa, Artificial sequence
  Protein classification predicting sequence
KKINKAQTD

SEQ ID NO: 76510 - protein, 7 aa, Artificial sequence
  Protein classification predicting sequence
CVVDLHA

SEQ ID NO: 76511 - protein, 44 aa, Artificial sequence
  Protein classification predicting sequence
YPVLMAADILLYGAHQVPVGSDQKQHLELARDIATRFNNIYSPE

SEQ ID NO: 76512 - protein, 6 aa, Artificial sequence
  Protein classification predicting sequence
YPVLMA

SEQ ID NO: 76513 - protein, 6 aa, Artificial sequence
  Protein classification predicting sequence
FYRQSD

SEQ ID NO: 76514 - protein, 7 aa, Artificial sequence
  Protein classification predicting sequence
TDSRAPG

SEQ ID NO: 76515 - protein, 7 aa, Artificial sequence
  Protein classification predicting sequence
LRDAVGL

SEQ ID NO: 76516 - protein, 16 aa, Artificial sequence
  Protein classification predicting sequence
VATLPGLDGRKMSKSY

SEQ ID NO: 76517 - protein, 14 aa, Artificial sequence
  Protein classification predicting sequence
YPVLMAADILLFNA

SEQ ID NO: 76518 - protein, 9 aa, Artificial sequence
  Protein classification predicting sequence
PTKKMSKSD

SEQ ID NO: 76519 - protein, 15 aa, Artificial sequence
  Protein classification predicting sequence
LLEDPKSVVKKIKRA

SEQ ID NO: 76520 - protein, 10 aa, Artificial sequence
  Protein classification predicting sequence
VTGQSIPELE

SEQ ID NO: 76521 - protein, 9 aa, Artificial sequence
  Protein classification predicting sequence
VADAVSGML

SEQ ID NO: 76522 - protein, 9 aa, Artificial sequence
  Protein classification predicting sequence
VYEAIGFVA

SEQ ID NO: 76523 - protein, 7 aa, Artificial sequence
  Protein classification predicting sequence
FLRDVGK

SEQ ID NO: 76524 - protein, 11 aa, Artificial sequence
  Protein classification predicting sequence
LITRNLQEVLG

SEQ ID NO: 76525 - protein, 9 aa, Artificial sequence
  Protein classification predicting sequence
AGAEVVKQV

SEQ ID NO: 76526 - protein, 8 aa, Artificial sequence
  Protein classification predicting sequence
HLMNPMVP

SEQ ID NO: 76527 - protein, 8 aa, Artificial sequence
  Protein classification predicting sequence
DPTAPSLH

SEQ ID NO: 76528 - protein, 7 aa, Artificial sequence
  Protein classification predicting sequence
QIGGSDQ

SEQ ID NO: 76529 - protein, 6 aa, Artificial sequence
  Protein classification predicting sequence
DQWGNI

SEQ ID NO: 76530 - protein, 13 aa, Artificial sequence
  Protein classification predicting sequence
IGDFTAMIGDPTG

SEQ ID NO: 76531 - protein, 9 aa, Artificial sequence
  Protein classification predicting sequence
GISFTEFSY

SEQ ID NO: 76532 - protein, 10 aa, Artificial sequence
  Protein classification predicting sequence
GGATGMIGDP

SEQ ID NO: 76533 - protein, 7 aa, Artificial sequence
  Protein classification predicting sequence
FLRDIGK

SEQ ID NO: 76534 - protein, 7 aa, Artificial sequence
  Protein classification predicting sequence
GKTESGT

SEQ ID NO: 76535 - protein, 11 aa, Artificial sequence
  Protein classification predicting sequence
EGISYTEFSYL

SEQ ID NO: 76536 - protein, 8 aa, Artificial sequence
  Protein classification predicting sequence
ALVGGATG

SEQ ID NO: 76537 - protein, 11 aa, Artificial sequence
  Protein classification predicting sequence
GKTESGTIWLD

SEQ ID NO: 76538 - protein, 7 aa, Artificial sequence
  Protein classification predicting sequence
GHLVPLL

SEQ ID NO: 76539 - protein, 15 aa, Artificial sequence
  Protein classification predicting sequence
DQGISFTEFSYNLLQ

SEQ ID NO: 76540 - protein, 9 aa, Artificial sequence
  Protein classification predicting sequence
GGSDQWGNI

SEQ ID NO: 76541 - protein, 8 aa, Artificial sequence
  Protein classification predicting sequence
FYQFWINT

SEQ ID NO: 76542 - protein, 11 aa, Artificial sequence
  Protein classification predicting sequence
YPLLQGYDSVA

SEQ ID NO: 76543 - protein, 9 aa, Artificial sequence
  Protein classification predicting sequence
LQIGGSDQW

SEQ ID NO: 76544 - protein, 10 aa, Artificial sequence
  Protein classification predicting sequence
DPTAPDLHLG

SEQ ID NO: 76545 - protein, 7 aa, Artificial sequence
  Protein classification predicting sequence
IGDPSGK

SEQ ID NO: 76546 - protein, 18 aa, Artificial sequence
  Protein classification predicting sequence
SRTDEREFFLASYNRKKE

SEQ ID NO: 76547 - protein, 23 aa, Artificial sequence
  Protein classification predicting sequence
GEGNVWIAKSSAGAKGEGILISS

SEQ ID NO: 76548 - protein, 18 aa, Artificial sequence
  Protein classification predicting sequence
NIYLYREGVLRTASEPYH

SEQ ID NO: 76549 - protein, 7 aa, Artificial sequence
  Protein classification predicting sequence
SVFPPPD

SEQ ID NO: 76550 - protein, 10 aa, Artificial sequence
  Protein classification predicting sequence
SRTDEREFFL

SEQ ID NO: 76551 - protein, 8 aa, Artificial sequence
  Protein classification predicting sequence
SVEPAIST

SEQ ID NO: 76552 - protein, 31 aa, Artificial sequence
  Protein classification predicting sequence
LKVWLIEVNGAPACAQKLYAELCQGIVDIAI

SEQ ID NO: 76553 - protein, 17 aa, Artificial sequence
  Protein classification predicting sequence
ENSSVYAEVSRLLLATG

SEQ ID NO: 76554 - protein, 16 aa, Artificial sequence
  Protein classification predicting sequence
WKRLRRDNPRFNLMLG

SEQ ID NO: 76555 - protein, 15 aa, Artificial sequence
  Protein classification predicting sequence
RNRLPFGRLGHEPGL

SEQ ID NO: 76556 - protein, 21 aa, Artificial sequence
  Protein classification predicting sequence
QLVNYYRGADKLCRKASLVKL

SEQ ID NO: 76557 - protein, 8 aa, Artificial sequence
  Protein classification predicting sequence
WFPESYVI

SEQ ID NO: 76558 - protein, 10 aa, Artificial sequence
  Protein classification predicting sequence
FHWQATIMGP

SEQ ID NO: 76559 - protein, 9 aa, Artificial sequence
  Protein classification predicting sequence
YQGGVFFLT

SEQ ID NO: 76560 - protein, 10 aa, Artificial sequence
  Protein classification predicting sequence
DPNPDDPLVP

SEQ ID NO: 76561 - protein, 120 aa, Artificial sequence
  Protein classification predicting sequence
DLARDPPAQCSAGPVGDDMFHWQATIMGPNDSPYQGGVFFLTIHFPTDYPFKPPKVAFTTRIYHPNINSNGSICLDILRSQWSPALTISKVLLSICSLLCDPNPDDPLVPEIARIYKTDR

SEQ ID NO: 76562 - protein, 12 aa, Artificial sequence
  Protein classification predicting sequence
DPPAQCSAGPVG

SEQ ID NO: 76563 - protein, 12 aa, Artificial sequence
  Protein classification predicting sequence
DMFHWQATIMGP

SEQ ID NO: 76564 - protein, 11 aa, Artificial sequence
  Protein classification predicting sequence
IYKTDRDKYNR

SEQ ID NO: 76565 - protein, 44 aa, Artificial sequence
  Protein classification predicting sequence
ITLDPPPNCSAGPKGDNIYEWRSTILGPPGSVYEGGVFFLDITF

SEQ ID NO: 76566 - protein, 8 aa, Artificial sequence
  Protein classification predicting sequence
TNRAEHDR

SEQ ID NO: 76567 - protein, 7 aa, Artificial sequence
  Protein classification predicting sequence
KRLQQEL

SEQ ID NO: 76568 - protein, 7 aa, Artificial sequence
  Protein classification predicting sequence
ICLDILK

SEQ ID NO: 76569 - protein, 5 aa, Artificial sequence
  Protein classification predicting sequence
MFHPN

SEQ ID NO: 76570 - protein, 7 aa, Artificial sequence
  Protein classification predicting sequence
TKIYHPN

SEQ ID NO: 76571 - protein, 6 aa, Artificial sequence
  Protein classification predicting sequence
YPFKPP

SEQ ID NO: 76572 - protein, 6 aa, Artificial sequence
  Protein classification predicting sequence
QNPEMF

SEQ ID NO: 76573 - protein, 6 aa, Artificial sequence
  Protein classification predicting sequence
LLNEPN

SEQ ID NO: 76574 - protein, 7 aa, Artificial sequence
  Protein classification predicting sequence
VCISILH

SEQ ID NO: 76575 - protein, 8 aa, Artificial sequence
  Protein classification predicting sequence
GSICLDIL

SEQ ID NO: 76576 - protein, 6 aa, Artificial sequence
  Protein classification predicting sequence
ICLDIL

SEQ ID NO: 76577 - protein, 20 aa, Artificial sequence
  Protein classification predicting sequence
CSAGPVAEDMFHWQATIMGP

SEQ ID NO: 76578 - protein, 14 aa, Artificial sequence
  Protein classification predicting sequence
IHFPPDYPFKPPKV

SEQ ID NO: 76579 - protein, 15 aa, Artificial sequence
  Protein classification predicting sequence
HPNINSNGSICLDIL

SEQ ID NO: 76580 - protein, 15 aa, Artificial sequence
  Protein classification predicting sequence
TILLSLQSLLGEPNN

SEQ ID NO: 76581 - protein, 6 aa, Artificial sequence
  Protein classification predicting sequence
PPTVRF

SEQ ID NO: 76582 - protein, 16 aa, Artificial sequence
  Protein classification predicting sequence
TKIYHPNVDKLGRICL

SEQ ID NO: 76583 - protein, 9 aa, Artificial sequence
  Protein classification predicting sequence
DPLANDVAE

SEQ ID NO: 76584 - protein, 7 aa, Artificial sequence
  Protein classification predicting sequence
DTLYEGG

SEQ ID NO: 76585 - protein, 7 aa, Artificial sequence
  Protein classification predicting sequence
ISVISML

SEQ ID NO: 76586 - protein, 8 aa, Artificial sequence
  Protein classification predicting sequence
PNDESPAN

SEQ ID NO: 76587 - protein, 8 aa, Artificial sequence
  Protein classification predicting sequence
SLLCDPNP

SEQ ID NO: 76588 - protein, 9 aa, Artificial sequence
  Protein classification predicting sequence
RRRLMRDFK

SEQ ID NO: 76589 - protein, 6 aa, Artificial sequence
  Protein classification predicting sequence
LQEDPP

SEQ ID NO: 76590 - protein, 10 aa, Artificial sequence
  Protein classification predicting sequence
EEYPNKPPTV

SEQ ID NO: 76591 - protein, 29 aa, Artificial sequence
  Protein classification predicting sequence
SKMFHPNVYADGSICLDILQNRWSPTYDV

SEQ ID NO: 76592 - protein, 9 aa, Artificial sequence
  Protein classification predicting sequence
ILTSIQSLL

SEQ ID NO: 76593 - protein, 20 aa, Artificial sequence
  Protein classification predicting sequence
ILTSIQSLLDEPNPNSPANS

SEQ ID NO: 76594 - protein, 8 aa, Artificial sequence
  Protein classification predicting sequence
AAQLYQEN

SEQ ID NO: 76595 - protein, 7 aa, Artificial sequence
  Protein classification predicting sequence
CSAGPVG

SEQ ID NO: 76596 - protein, 6 aa, Artificial sequence
  Protein classification predicting sequence
GGVFFL

SEQ ID NO: 76597 - protein, 7 aa, Artificial sequence
  Protein classification predicting sequence
PLVPEIA

SEQ ID NO: 76598 - protein, 17 aa, Artificial sequence
  Protein classification predicting sequence
HPNISSVTGAICLDILK

SEQ ID NO: 76599 - protein, 15 aa, Artificial sequence
  Protein classification predicting sequence
RDPPAQCSAGPVGDD

SEQ ID NO: 76600 - protein, 8 aa, Artificial sequence
  Protein classification predicting sequence
TPFEDGTF

SEQ ID NO: 76601 - protein, 10 aa, Artificial sequence
  Protein classification predicting sequence
RLMRDFKRLQ

SEQ ID NO: 76602 - protein, 11 aa, Artificial sequence
  Protein classification predicting sequence
ARRRLMRDFKR

SEQ ID NO: 76603 - protein, 15 aa, Artificial sequence
  Protein classification predicting sequence
CLDILQNRWSPTYDV

SEQ ID NO: 76604 - protein, 21 aa, Artificial sequence
  Protein classification predicting sequence
LWNAVIFGPDDTPWDGGTFKL

SEQ ID NO: 76605 - protein, 6 aa, Artificial sequence
  Protein classification predicting sequence
YPNKPP

SEQ ID NO: 76606 - protein, 6 aa, Artificial sequence
  Protein classification predicting sequence
DFKRLQ

SEQ ID NO: 76607 - protein, 12 aa, Artificial sequence
  Protein classification predicting sequence
GISGAPQDNNIM

SEQ ID NO: 76608 - protein, 11 aa, Artificial sequence
  Protein classification predicting sequence
DTPWDGGTFKL

SEQ ID NO: 76609 - protein, 35 aa, Artificial sequence
  Protein classification predicting sequence
VRFVSRMFHPNIYADGSICLDILQNQWSPIYDVAA

SEQ ID NO: 76610 - protein, 6 aa, Artificial sequence
  Protein classification predicting sequence
DHPFGF

SEQ ID NO: 76611 - protein, 13 aa, Artificial sequence
  Protein classification predicting sequence
PAITIKQILLGIQ

SEQ ID NO: 76612 - protein, 11 aa, Artificial sequence
  Protein classification predicting sequence
VEYEKRVRAQA

SEQ ID NO: 76613 - protein, 6 aa, Artificial sequence
  Protein classification predicting sequence
CISILH

SEQ ID NO: 76614 - protein, 10 aa, Artificial sequence
  Protein classification predicting sequence
CSAGPVGDDL

SEQ ID NO: 76615 - protein, 19 aa, Artificial sequence
  Protein classification predicting sequence
QWSPALTISKVLLSICSLL

SEQ ID NO: 76616 - protein, 6 aa, Artificial sequence
  Protein classification predicting sequence
KIYHPN

SEQ ID NO: 76617 - protein, 11 aa, Artificial sequence
  Protein classification predicting sequence
DPPTSCSAGPV

SEQ ID NO: 76618 - protein, 6 aa, Artificial sequence
  Protein classification predicting sequence
IYKTDR

SEQ ID NO: 76619 - protein, 16 aa, Artificial sequence
  Protein classification predicting sequence
VCLDVINQTWSPMFDL

SEQ ID NO: 76620 - protein, 14 aa, Artificial sequence
  Protein classification predicting sequence
FLPQLLLYPNPSDP

SEQ ID NO: 76621 - protein, 7 aa, Artificial sequence
  Protein classification predicting sequence
GPPDTPY

SEQ ID NO: 76622 - protein, 7 aa, Artificial sequence
  Protein classification predicting sequence
FPKDYPL

SEQ ID NO: 76623 - protein, 7 aa, Artificial sequence
  Protein classification predicting sequence
YPYKSPS

SEQ ID NO: 76624 - protein, 9 aa, Artificial sequence
  Protein classification predicting sequence
WRKDHPFGF

SEQ ID NO: 76625 - protein, 8 aa, Artificial sequence
  Protein classification predicting sequence
NWECAIPG

SEQ ID NO: 76626 - protein, 24 aa, Artificial sequence
  Protein classification predicting sequence
PPKCKFEPPLFHPNVYPSGTVCLS

SEQ ID NO: 76627 - protein, 6 aa, Artificial sequence
  Protein classification predicting sequence
IYCQNR

SEQ ID NO: 76628 - protein, 9 aa, Artificial sequence
  Protein classification predicting sequence
HPNVYPSGT

SEQ ID NO: 76629 - protein, 7 aa, Artificial sequence
  Protein classification predicting sequence
DWRPAIT

SEQ ID NO: 76630 - protein, 7 aa, Artificial sequence
  Protein classification predicting sequence
PNPNSPA

SEQ ID NO: 76631 - protein, 94 aa, Artificial sequence
  Protein classification predicting sequence
DSPYQGGVFFLTIHFPTDYPFKPPKVAFTTRIYHPNINSNGSICLDILRSQWSPALTISKVLLSICSLLCDPNPDDPLVPEIARIYKTDREKYN

SEQ ID NO: 76632 - protein, 20 aa, Artificial sequence
  Protein classification predicting sequence
STILGPPGSVYEGGVFFLDI

SEQ ID NO: 76633 - protein, 68 aa, Artificial sequence
  Protein classification predicting sequence
YPFKPPKVTFRTRIYHCNINSQGVICLDILKDNWSPALTISKVLLSICSLLTDCNPADPLVGSIATQY

SEQ ID NO: 76634 - protein, 12 aa, Artificial sequence
  Protein classification predicting sequence
LPRRIIKETQRL

SEQ ID NO: 76635 - protein, 7 aa, Artificial sequence
  Protein classification predicting sequence
NARYFHV

SEQ ID NO: 76636 - protein, 7 aa, Artificial sequence
  Protein classification predicting sequence
DSPFEGG

SEQ ID NO: 76637 - protein, 9 aa, Artificial sequence
  Protein classification predicting sequence
FKLELFLPE

SEQ ID NO: 76638 - protein, 23 aa, Artificial sequence
  Protein classification predicting sequence
LLSIQALLSAPNPDDPLANDVAE

SEQ ID NO: 76639 - protein, 9 aa, Artificial sequence
  Protein classification predicting sequence
RIKREFKEV

SEQ ID NO: 76640 - protein, 18 aa, Artificial sequence
  Protein classification predicting sequence
TELRGEIAGPPDTPYEGG

SEQ ID NO: 76641 - protein, 15 aa, Artificial sequence
  Protein classification predicting sequence
PETYPFNPPKVRFIT

SEQ ID NO: 76642 - protein, 20 aa, Artificial sequence
  Protein classification predicting sequence
IWHPNISSVTGAICLDILKD

SEQ ID NO: 76643 - protein, 8 aa, Artificial sequence
  Protein classification predicting sequence
ICLDILKD

SEQ ID NO: 76644 - protein, 32 aa, Artificial sequence
  Protein classification predicting sequence
WAAAMTLRTVLLSLQALLAAAEPDDPQDAVVA

SEQ ID NO: 76645 - protein, 8 aa, Artificial sequence
  Protein classification predicting sequence
WNAVIFGP

SEQ ID NO: 76646 - protein, 10 aa, Artificial sequence
  Protein classification predicting sequence
YPNKPPTVRF

SEQ ID NO: 76647 - protein, 9 aa, Artificial sequence
  Protein classification predicting sequence
PNPNSPANS

SEQ ID NO: 76648 - protein, 5 aa, Artificial sequence
  Protein classification predicting sequence
HPNIY

SEQ ID NO: 76649 - protein, 10 aa, Artificial sequence
  Protein classification predicting sequence
DSPANVDAAK

SEQ ID NO: 76650 - protein, 12 aa, Artificial sequence
  Protein classification predicting sequence
LLSVISLLNEPN

SEQ ID NO: 76651 - protein, 12 aa, Artificial sequence
  Protein classification predicting sequence
GVSGAPSENNIM

SEQ ID NO: 76652 - protein, 20 aa, Artificial sequence
  Protein classification predicting sequence
WNAVIFGPEGTPFEDGTFKL

SEQ ID NO: 76653 - protein, 10 aa, Artificial sequence
  Protein classification predicting sequence
VCLDVINQTW

SEQ ID NO: 76654 - protein, 12 aa, Artificial sequence
  Protein classification predicting sequence
GIQELLNEPNIQ

SEQ ID NO: 76655 - protein, 20 aa, Artificial sequence
  Protein classification predicting sequence
PAQAEAYTIYCQNRVEYEKR

SEQ ID NO: 76656 - protein, 7 aa, Artificial sequence
  Protein classification predicting sequence
RAQAKKF

SEQ ID NO: 76657 - protein, 30 aa, Artificial sequence
  Protein classification predicting sequence
EPDVCIIELGGTVGDIESAPFVEALRQFQF

SEQ ID NO: 76658 - protein, 9 aa, Artificial sequence
  Protein classification predicting sequence
GKILRRELR

SEQ ID NO: 76659 - protein, 10 aa, Artificial sequence
  Protein classification predicting sequence
RIGAIHSVVF

SEQ ID NO: 76660 - protein, 6 aa, Artificial sequence
  Protein classification predicting sequence
FWAEQA

SEQ ID NO: 76661 - protein, 6 aa, Artificial sequence
  Protein classification predicting sequence
APTAIR

SEQ ID NO: 76662 - protein, 7 aa, Artificial sequence
  Protein classification predicting sequence
PKTRSGK

SEQ ID NO: 76663 - protein, 6 aa, Artificial sequence
  Protein classification predicting sequence
GHRLGT

SEQ ID NO: 76664 - protein, 7 aa, Artificial sequence
  Protein classification predicting sequence
SHPAVAE

SEQ ID NO: 76665 - protein, 7 aa, Artificial sequence
  Protein classification predicting sequence
ACARIGA

SEQ ID NO: 76666 - protein, 5 aa, Artificial sequence
  Protein classification predicting sequence
MSPYQ

SEQ ID NO: 76667 - protein, 7 aa, Artificial sequence
  Protein classification predicting sequence
GICLGQQ

SEQ ID NO: 76668 - protein, 6 aa, Artificial sequence
  Protein classification predicting sequence
PVFGIC

SEQ ID NO: 76669 - protein, 7 aa, Artificial sequence
  Protein classification predicting sequence
ALEKRSI

SEQ ID NO: 76670 - protein, 6 aa, Artificial sequence
  Protein classification predicting sequence
HIKQAV

SEQ ID NO: 76671 - protein, 6 aa, Artificial sequence
  Protein classification predicting sequence
IDNYLE

SEQ ID NO: 76672 - protein, 7 aa, Artificial sequence
  Protein classification predicting sequence
LPIFGIC

SEQ ID NO: 76673 - protein, 6 aa, Artificial sequence
  Protein classification predicting sequence
PLFGIC

SEQ ID NO: 76674 - protein, 7 aa, Artificial sequence
  Protein classification predicting sequence
VPVAFVV

SEQ ID NO: 76675 - protein, 6 aa, Artificial sequence
  Protein classification predicting sequence
LPLFHI

SEQ ID NO: 76676 - protein, 8 aa, Artificial sequence
  Protein classification predicting sequence
DGWFKTGD

SEQ ID NO: 76677 - protein, 6 aa, Artificial sequence
  Protein classification predicting sequence
GAGLAM

SEQ ID NO: 76678 - protein, 11 aa, Artificial sequence
  Protein classification predicting sequence
YTSGTTGKPKG

SEQ ID NO: 76679 - protein, 12 aa, Artificial sequence
  Protein classification predicting sequence
YTSGTTGKPKGV

SEQ ID NO: 76680 - protein, 6 aa, Artificial sequence
  Protein classification predicting sequence
HEYQAK

SEQ ID NO: 76681 - protein, 6 aa, Artificial sequence
  Protein classification predicting sequence
GGMDIE

SEQ ID NO: 76682 - protein, 8 aa, Artificial sequence
  Protein classification predicting sequence
DPREAQAA

SEQ ID NO: 76683 - protein, 7 aa, Artificial sequence
  Protein classification predicting sequence
IAIITNI

SEQ ID NO: 76684 - protein, 6 aa, Artificial sequence
  Protein classification predicting sequence
AIVTNI

SEQ ID NO: 76685 - protein, 6 aa, Artificial sequence
  Protein classification predicting sequence
VAIVTN

SEQ ID NO: 76686 - protein, 6 aa, Artificial sequence
  Protein classification predicting sequence
LPGEHN

SEQ ID NO: 76687 - protein, 6 aa, Artificial sequence
  Protein classification predicting sequence
HNALNA

SEQ ID NO: 76688 - protein, 7 aa, Artificial sequence
  Protein classification predicting sequence
SQALAWL

SEQ ID NO: 76689 - protein, 6 aa, Artificial sequence
  Protein classification predicting sequence
YHGSFE

SEQ ID NO: 76690 - protein, 7 aa, Artificial sequence
  Protein classification predicting sequence
IGGTGKA

SEQ ID NO: 76691 - protein, 7 aa, Artificial sequence
  Protein classification predicting sequence
EGFRQFL

SEQ ID NO: 76692 - protein, 7 aa, Artificial sequence
  Protein classification predicting sequence
DYAHTPD

SEQ ID NO: 76693 - protein, 8 aa, Artificial sequence
  Protein classification predicting sequence
GKTTTTAM

SEQ ID NO: 76694 - protein, 8 aa, Artificial sequence
  Protein classification predicting sequence
HNIANALA

SEQ ID NO: 76695 - protein, 7 aa, Artificial sequence
  Protein classification predicting sequence
ITGSNGK

SEQ ID NO: 76696 - protein, 5 aa, Artificial sequence
  Protein classification predicting sequence
HLDYH

SEQ ID NO: 76697 - protein, 7 aa, Artificial sequence
  Protein classification predicting sequence
LNISPDH

SEQ ID NO: 76698 - protein, 6 aa, Artificial sequence
  Protein classification predicting sequence
GLGKTG

SEQ ID NO: 76699 - protein, 7 aa, Artificial sequence
  Protein classification predicting sequence
NGKTTTT

SEQ ID NO: 76700 - protein, 6 aa, Artificial sequence
  Protein classification predicting sequence
TGSNGK

SEQ ID NO: 76701 - protein, 6 aa, Artificial sequence
  Protein classification predicting sequence
TFSGVK

SEQ ID NO: 76702 - protein, 7 aa, Artificial sequence
  Protein classification predicting sequence
HKTFENY

SEQ ID NO: 76703 - protein, 8 aa, Artificial sequence
  Protein classification predicting sequence
AITGSNGK

SEQ ID NO: 76704 - protein, 6 aa, Artificial sequence
  Protein classification predicting sequence
LTPDHL

SEQ ID NO: 76705 - protein, 6 aa, Artificial sequence
  Protein classification predicting sequence
DADVMA

SEQ ID NO: 76706 - protein, 7 aa, Artificial sequence
  Protein classification predicting sequence
ITGTNGK

SEQ ID NO: 76707 - protein, 10 aa, Artificial sequence
  Protein classification predicting sequence
TGTNGKTTTT

SEQ ID NO: 76708 - protein, 6 aa, Artificial sequence
  Protein classification predicting sequence
DYAHTP

SEQ ID NO: 76709 - protein, 8 aa, Artificial sequence
  Protein classification predicting sequence
PVTLALPG

SEQ ID NO: 76710 - protein, 6 aa, Artificial sequence
  Protein classification predicting sequence
AVFTNL

SEQ ID NO: 76711 - protein, 6 aa, Artificial sequence
  Protein classification predicting sequence
HLDYHG

SEQ ID NO: 76712 - protein, 7 aa, Artificial sequence
  Protein classification predicting sequence
VTGTNGK

SEQ ID NO: 76713 - protein, 11 aa, Artificial sequence
  Protein classification predicting sequence
VTGTNGKTTTT

SEQ ID NO: 76714 - protein, 9 aa, Artificial sequence
  Protein classification predicting sequence
GVTGTNGKT

SEQ ID NO: 76715 - protein, 8 aa, Artificial sequence
  Protein classification predicting sequence
TGTNGKTT

SEQ ID NO: 76716 - protein, 7 aa, Artificial sequence
  Protein classification predicting sequence
TGTNGKT

SEQ ID NO: 76717 - protein, 7 aa, Artificial sequence
  Protein classification predicting sequence
NALAVIA

SEQ ID NO: 76718 - protein, 6 aa, Artificial sequence
  Protein classification predicting sequence
SPGIAL

SEQ ID NO: 76719 - protein, 7 aa, Artificial sequence
  Protein classification predicting sequence
GHSYIVY

SEQ ID NO: 76720 - protein, 6 aa, Artificial sequence
  Protein classification predicting sequence
RDADGY

SEQ ID NO: 76721 - protein, 6 aa, Artificial sequence
  Protein classification predicting sequence
DDVINV

SEQ ID NO: 76722 - protein, 6 aa, Artificial sequence
  Protein classification predicting sequence
HSRRVS

SEQ ID NO: 76723 - protein, 6 aa, Artificial sequence
  Protein classification predicting sequence
NALAVI

SEQ ID NO: 76724 - protein, 11 aa, Artificial sequence
  Protein classification predicting sequence
KILVANRGEIA

SEQ ID NO: 76725 - protein, 7 aa, Artificial sequence
  Protein classification predicting sequence
GKGVTVA

SEQ ID NO: 76726 - protein, 8 aa, Artificial sequence
  Protein classification predicting sequence
VCITEGIP

SEQ ID NO: 76727 - protein, 9 aa, Artificial sequence
  Protein classification predicting sequence
ECKIGIMPG

SEQ ID NO: 76728 - protein, 13 aa, Artificial sequence
  Protein classification predicting sequence
GIVSRSGTLTYEA

SEQ ID NO: 76729 - protein, 8 aa, Artificial sequence
  Protein classification predicting sequence
CVGIGGDP

SEQ ID NO: 76730 - protein, 8 aa, Artificial sequence
  Protein classification predicting sequence
RMGHAGAI

SEQ ID NO: 76731 - protein, 6 aa, Artificial sequence
  Protein classification predicting sequence
QGTFHS

SEQ ID NO: 76732 - protein, 11 aa, Artificial sequence
  Protein classification predicting sequence
KTRLIGPNCPG

SEQ ID NO: 76733 - protein, 6 aa, Artificial sequence
  Protein classification predicting sequence
GIGGDP

SEQ ID NO: 76734 - protein, 6 aa, Artificial sequence
  Protein classification predicting sequence
VCITEG

SEQ ID NO: 76735 - protein, 14 aa, Artificial sequence
  Protein classification predicting sequence
VSRSGTLTYEAVHQ

SEQ ID NO: 76736 - protein, 6 aa, Artificial sequence
  Protein classification predicting sequence
TPGKGG

SEQ ID NO: 76737 - protein, 11 aa, Artificial sequence
  Protein classification predicting sequence
QGFTGKQGTFH

SEQ ID NO: 76738 - protein, 7 aa, Artificial sequence
  Protein classification predicting sequence
DAKINFD

SEQ ID NO: 76739 - protein, 8 aa, Artificial sequence
  Protein classification predicting sequence
VNGAGLAM

SEQ ID NO: 76740 - protein, 7 aa, Artificial sequence
  Protein classification predicting sequence
AGGRGKG

SEQ ID NO: 76741 - protein, 10 aa, Artificial sequence
  Protein classification predicting sequence
DAKINFDDNA

SEQ ID NO: 76742 - protein, 6 aa, Artificial sequence
  Protein classification predicting sequence
PANFLD

SEQ ID NO: 76743 - protein, 6 aa, Artificial sequence
  Protein classification predicting sequence
NIHEYQ

SEQ ID NO: 76744 - protein, 6 aa, Artificial sequence
  Protein classification predicting sequence
NFDDNA

SEQ ID NO: 76745 - protein, 6 aa, Artificial sequence
  Protein classification predicting sequence
QEDPRE

SEQ ID NO: 76746 - protein, 14 aa, Artificial sequence
  Protein classification predicting sequence
VNIFGGIMKCDVIA

SEQ ID NO: 76747 - protein, 6 aa, Artificial sequence
  Protein classification predicting sequence
VVRLEG

SEQ ID NO: 76748 - protein, 7 aa, Artificial sequence
  Protein classification predicting sequence
EGGVEIE

SEQ ID NO: 76749 - protein, 13 aa, Artificial sequence
  Protein classification predicting sequence
ILVNIFGGIMRCD

SEQ ID NO: 76750 - protein, 7 aa, Artificial sequence
  Protein classification predicting sequence
LVTKQTG

SEQ ID NO: 76751 - protein, 17 aa, Artificial sequence
  Protein classification predicting sequence
VGLKVPLVVRLEGTNVE

SEQ ID NO: 76752 - protein, 12 aa, Artificial sequence
  Protein classification predicting sequence
PLVVRLEGTNVE

SEQ ID NO: 76753 - protein, 6 aa, Artificial sequence
  Protein classification predicting sequence
AMATMD

SEQ ID NO: 76754 - protein, 7 aa, Artificial sequence
  Protein classification predicting sequence
KPANFLD

SEQ ID NO: 76755 - protein, 6 aa, Artificial sequence
  Protein classification predicting sequence
NIFGGI

SEQ ID NO: 76756 - protein, 11 aa, Artificial sequence
  Protein classification predicting sequence
PANFLDVGGGA

SEQ ID NO: 76757 - protein, 9 aa, Artificial sequence
  Protein classification predicting sequence
VPVVVRLEG

SEQ ID NO: 76758 - protein, 5 aa, Artificial sequence
  Protein classification predicting sequence
EPANF

SEQ ID NO: 76759 - protein, 6 aa, Artificial sequence
  Protein classification predicting sequence
EINPLV

SEQ ID NO: 76760 - protein, 6 aa, Artificial sequence
  Protein classification predicting sequence
TMDIIK

SEQ ID NO: 76761 - protein, 11 aa, Artificial sequence
  Protein classification predicting sequence
PLVVRLEGTNV

SEQ ID NO: 76762 - protein, 10 aa, Artificial sequence
  Protein classification predicting sequence
NIFGGIVRCD

SEQ ID NO: 76763 - protein, 16 aa, Artificial sequence
  Protein classification predicting sequence
IGCMVNGAGLAMATMD

SEQ ID NO: 76764 - protein, 8 aa, Artificial sequence
  Protein classification predicting sequence
ANFLDVGG

SEQ ID NO: 76765 - protein, 12 aa, Artificial sequence
  Protein classification predicting sequence
EPANFLDVGGGA

SEQ ID NO: 76766 - protein, 7 aa, Artificial sequence
  Protein classification predicting sequence
NGAGLAM

SEQ ID NO: 76767 - protein, 5 aa, Artificial sequence
  Protein classification predicting sequence
MATMD

SEQ ID NO: 76768 - protein, 12 aa, Artificial sequence
  Protein classification predicting sequence
VNGAGLAMATMD

SEQ ID NO: 76769 - protein, 10 aa, Artificial sequence
  Protein classification predicting sequence
NIFGGIMKCD

SEQ ID NO: 76770 - protein, 6 aa, Artificial sequence
  Protein classification predicting sequence
QTGPEG

SEQ ID NO: 76771 - protein, 7 aa, Artificial sequence
  Protein classification predicting sequence
VPLVVRL

SEQ ID NO: 76772 - protein, 7 aa, Artificial sequence
  Protein classification predicting sequence
VNIFGGI

SEQ ID NO: 76773 - protein, 11 aa, Artificial sequence
  Protein classification predicting sequence
VNIFGGIVRCD

SEQ ID NO: 76774 - protein, 6 aa, Artificial sequence
  Protein classification predicting sequence
GPNCPG

SEQ ID NO: 76775 - protein, 9 aa, Artificial sequence
  Protein classification predicting sequence
GEIGGTAEE

SEQ ID NO: 76776 - protein, 9 aa, Artificial sequence
  Protein classification predicting sequence
KPVVAFIAG

SEQ ID NO: 76777 - protein, 8 aa, Artificial sequence
  Protein classification predicting sequence
GVTPGKGG

SEQ ID NO: 76778 - protein, 6 aa, Artificial sequence
  Protein classification predicting sequence
IFVPAP

SEQ ID NO: 76779 - protein, 7 aa, Artificial sequence
  Protein classification predicting sequence
MIGEIGG

SEQ ID NO: 76780 - protein, 10 aa, Artificial sequence
  Protein classification predicting sequence
VGGVTPGKGG

SEQ ID NO: 76781 - protein, 14 aa, Artificial sequence
  Protein classification predicting sequence
GIVSRSGTLTYEAV

SEQ ID NO: 76782 - protein, 6 aa, Artificial sequence
  Protein classification predicting sequence
ITEGIP

SEQ ID NO: 76783 - protein, 8 aa, Artificial sequence
  Protein classification predicting sequence
PGECKIGI

SEQ ID NO: 76784 - protein, 7 aa, Artificial sequence
  Protein classification predicting sequence
IAGITAP

SEQ ID NO: 76785 - protein, 14 aa, Artificial sequence
  Protein classification predicting sequence
TAPPGKRMGHAGAI

SEQ ID NO: 76786 - protein, 6 aa, Artificial sequence
  Protein classification predicting sequence
SGTLTY

SEQ ID NO: 76787 - protein, 7 aa, Artificial sequence
  Protein classification predicting sequence
MGHAGAI

SEQ ID NO: 76788 - protein, 10 aa, Artificial sequence
  Protein classification predicting sequence
TKVICQGFTG

SEQ ID NO: 76789 - protein, 6 aa, Artificial sequence
  Protein classification predicting sequence
GLGQST

SEQ ID NO: 76790 - protein, 7 aa, Artificial sequence
  Protein classification predicting sequence
VGIGGDP

SEQ ID NO: 76791 - protein, 6 aa, Artificial sequence
  Protein classification predicting sequence
LAGIMG

SEQ ID NO: 76792 - protein, 6 aa, Artificial sequence
  Protein classification predicting sequence
YTPLPK

SEQ ID NO: 76793 - protein, 7 aa, Artificial sequence
  Protein classification predicting sequence
PAIAEGF

SEQ ID NO: 76794 - protein, 6 aa, Artificial sequence
  Protein classification predicting sequence
EKKDFI

SEQ ID NO: 76795 - protein, 6 aa, Artificial sequence
  Protein classification predicting sequence
QGVDSV

SEQ ID NO: 76796 - protein, 5 aa, Artificial sequence
  Protein classification predicting sequence
FDFSH

SEQ ID NO: 76797 - protein, 6 aa, Artificial sequence
  Protein classification predicting sequence
HSAAHL

SEQ ID NO: 76798 - protein, 6 aa, Artificial sequence
  Protein classification predicting sequence
GGKDIF

SEQ ID NO: 76799 - protein, 6 aa, Artificial sequence
  Protein classification predicting sequence
TYSPTE

SEQ ID NO: 76800 - protein, 7 aa, Artificial sequence
  Protein classification predicting sequence
GEVSMEL

SEQ ID NO: 76801 - protein, 5 aa, Artificial sequence
  Protein classification predicting sequence
KDMQR

SEQ ID NO: 76802 - protein, 6 aa, Artificial sequence
  Protein classification predicting sequence
DLERTD

SEQ ID NO: 76803 - protein, 6 aa, Artificial sequence
  Protein classification predicting sequence
VLDTKN

SEQ ID NO: 76804 - protein, 7 aa, Artificial sequence
  Protein classification predicting sequence
DVALRFD

SEQ ID NO: 76805 - protein, 5 aa, Artificial sequence
  Protein classification predicting sequence
IRANH

SEQ ID NO: 76806 - protein, 6 aa, Artificial sequence
  Protein classification predicting sequence
TLEQGL

SEQ ID NO: 76807 - protein, 5 aa, Artificial sequence
  Protein classification predicting sequence
RETNT

SEQ ID NO: 76808 - protein, 6 aa, Artificial sequence
  Protein classification predicting sequence
GIEIKD

SEQ ID NO: 76809 - protein, 7 aa, Artificial sequence
  Protein classification predicting sequence
LEEIETQ

SEQ ID NO: 76810 - protein, 6 aa, Artificial sequence
  Protein classification predicting sequence
EAITWA

SEQ ID NO: 76811 - protein, 6 aa, Artificial sequence
  Protein classification predicting sequence
ETIDVT

SEQ ID NO: 76812 - protein, 7 aa, Artificial sequence
  Protein classification predicting sequence
LGIDGKL

SEQ ID NO: 76813 - protein, 6 aa, Artificial sequence
  Protein classification predicting sequence
VLGDHV

SEQ ID NO: 76814 - protein, 10 aa, Artificial sequence
  Protein classification predicting sequence
GEKMSKSLGN

SEQ ID NO: 76815 - protein, 8 aa, Artificial sequence
  Protein classification predicting sequence
KMSKSLGN

SEQ ID NO: 76816 - protein, 7 aa, Artificial sequence
  Protein classification predicting sequence
GNVLSMP

SEQ ID NO: 76817 - protein, 6 aa, Artificial sequence
  Protein classification predicting sequence
AYTGDG

SEQ ID NO: 76818 - protein, 6 aa, Artificial sequence
  Protein classification predicting sequence
HIGHAR

SEQ ID NO: 76819 - protein, 9 aa, Artificial sequence
  Protein classification predicting sequence
EKMSKSLGN

SEQ ID NO: 76820 - protein, 7 aa, Artificial sequence
  Protein classification predicting sequence
MSKSLGN

SEQ ID NO: 76821 - protein, 6 aa, Artificial sequence
  Protein classification predicting sequence
GYAYES

SEQ ID NO: 76822 - protein, 9 aa, Artificial sequence
  Protein classification predicting sequence
KMSKSLGNF

SEQ ID NO: 76823 - protein, 7 aa, Artificial sequence
  Protein classification predicting sequence
EKMSKSL

SEQ ID NO: 76824 - protein, 7 aa, Artificial sequence
  Protein classification predicting sequence
GIEIKDT

SEQ ID NO: 76825 - protein, 8 aa, Artificial sequence
  Protein classification predicting sequence
KMSKSLNN

SEQ ID NO: 76826 - protein, 7 aa, Artificial sequence
  Protein classification predicting sequence
EIIKLIQ

SEQ ID NO: 76827 - protein, 7 aa, Artificial sequence
  Protein classification predicting sequence
RLNVLRA

SEQ ID NO: 76828 - protein, 6 aa, Artificial sequence
  Protein classification predicting sequence
KMSKSL

SEQ ID NO: 76829 - protein, 6 aa, Artificial sequence
  Protein classification predicting sequence
EKMSKS

SEQ ID NO: 76830 - protein, 6 aa, Artificial sequence
  Protein classification predicting sequence
HLGHAR

SEQ ID NO: 76831 - protein, 7 aa, Artificial sequence
  Protein classification predicting sequence
HLGHARS

SEQ ID NO: 76832 - protein, 8 aa, Artificial sequence
  Protein classification predicting sequence
KMSKSLKN

SEQ ID NO: 76833 - protein, 6 aa, Artificial sequence
  Protein classification predicting sequence
GHARTY

SEQ ID NO: 76834 - protein, 6 aa, Artificial sequence
  Protein classification predicting sequence
LGINPL

SEQ ID NO: 76835 - protein, 6 aa, Artificial sequence
  Protein classification predicting sequence
HVGHLR

SEQ ID NO: 76836 - protein, 6 aa, Artificial sequence
  Protein classification predicting sequence
FKVVSE

SEQ ID NO: 76837 - protein, 7 aa, Artificial sequence
  Protein classification predicting sequence
GEKMSKS

SEQ ID NO: 76838 - protein, 6 aa, Artificial sequence
  Protein classification predicting sequence
FKIVSE

SEQ ID NO: 76839 - protein, 6 aa, Artificial sequence
  Protein classification predicting sequence
IIQFIE

SEQ ID NO: 76840 - protein, 6 aa, Artificial sequence
  Protein classification predicting sequence
LEAFYR

SEQ ID NO: 76841 - protein, 6 aa, Artificial sequence
  Protein classification predicting sequence
IRFVED

SEQ ID NO: 76842 - protein, 6 aa, Artificial sequence
  Protein classification predicting sequence
RYEKSG

SEQ ID NO: 76843 - protein, 6 aa, Artificial sequence
  Protein classification predicting sequence
VMNITD

SEQ ID NO: 76844 - protein, 6 aa, Artificial sequence
  Protein classification predicting sequence
SAMDEM

SEQ ID NO: 76845 - protein, 6 aa, Artificial sequence
  Protein classification predicting sequence
VSDKQL

SEQ ID NO: 76846 - protein, 7 aa, Artificial sequence
  Protein classification predicting sequence
LEAEREA

SEQ ID NO: 76847 - protein, 7 aa, Artificial sequence
  Protein classification predicting sequence
GPVFRAE

SEQ ID NO: 76848 - protein, 6 aa, Artificial sequence
  Protein classification predicting sequence
SIRDVI

SEQ ID NO: 76849 - protein, 8 aa, Artificial sequence
  Protein classification predicting sequence
GFIEVETP

SEQ ID NO: 76850 - protein, 7 aa, Artificial sequence
  Protein classification predicting sequence
FLEVETP

SEQ ID NO: 76851 - protein, 7 aa, Artificial sequence
  Protein classification predicting sequence
DRLVMLL

SEQ ID NO: 76852 - protein, 7 aa, Artificial sequence
  Protein classification predicting sequence
LRPEGTA

SEQ ID NO: 76853 - protein, 6 aa, Artificial sequence
  Protein classification predicting sequence
DVILFP

SEQ ID NO: 76854 - protein, 6 aa, Artificial sequence
  Protein classification predicting sequence
DRLIML

SEQ ID NO: 76855 - protein, 5 aa, Artificial sequence
  Protein classification predicting sequence
GWVHR

SEQ ID NO: 76856 - protein, 7 aa, Artificial sequence
  Protein classification predicting sequence
GLDRLVM

SEQ ID NO: 76857 - protein, 6 aa, Artificial sequence
  Protein classification predicting sequence
RFDIEI

SEQ ID NO: 76858 - protein, 6 aa, Artificial sequence
  Protein classification predicting sequence
LGFTKE

SEQ ID NO: 76859 - protein, 5 aa, Artificial sequence
  Protein classification predicting sequence
RKQID

SEQ ID NO: 76860 - protein, 7 aa, Artificial sequence
  Protein classification predicting sequence
SGKVEII

SEQ ID NO: 76861 - protein, 7 aa, Artificial sequence
  Protein classification predicting sequence
RDVIPFP

SEQ ID NO: 76862 - protein, 7 aa, Artificial sequence
  Protein classification predicting sequence
DIMDLTE

SEQ ID NO: 76863 - protein, 6 aa, Artificial sequence
  Protein classification predicting sequence
NIRDVI

SEQ ID NO: 76864 - protein, 6 aa, Artificial sequence
  Protein classification predicting sequence
AYLSQS

SEQ ID NO: 76865 - protein, 6 aa, Artificial sequence
  Protein classification predicting sequence
IFKIRS

SEQ ID NO: 76866 - protein, 6 aa, Artificial sequence
  Protein classification predicting sequence
LLTNAP

SEQ ID NO: 76867 - protein, 6 aa, Artificial sequence
  Protein classification predicting sequence
RHLTEF

SEQ ID NO: 76868 - protein, 7 aa, Artificial sequence
  Protein classification predicting sequence
GIKLLDT

SEQ ID NO: 76869 - protein, 6 aa, Artificial sequence
  Protein classification predicting sequence
IDVTLP

SEQ ID NO: 76870 - protein, 5 aa, Artificial sequence
  Protein classification predicting sequence
PFPRM

SEQ ID NO: 76871 - protein, 6 aa, Artificial sequence
  Protein classification predicting sequence
IGLDRF

SEQ ID NO: 76872 - protein, 7 aa, Artificial sequence
  Protein classification predicting sequence
GTENIRD

SEQ ID NO: 76873 - protein, 8 aa, Artificial sequence
  Protein classification predicting sequence
IRETVLFP

SEQ ID NO: 76874 - protein, 6 aa, Artificial sequence
  Protein classification predicting sequence
TGRIQV

SEQ ID NO: 76875 - protein, 7 aa, Artificial sequence
  Protein classification predicting sequence
GFEKVFE

SEQ ID NO: 76876 - protein, 6 aa, Artificial sequence
  Protein classification predicting sequence
DAWQEW

SEQ ID NO: 76877 - protein, 6 aa, Artificial sequence
  Protein classification predicting sequence
GQEITL

SEQ ID NO: 76878 - protein, 6 aa, Artificial sequence
  Protein classification predicting sequence
DEAVDR

SEQ ID NO: 76879 - protein, 6 aa, Artificial sequence
  Protein classification predicting sequence
FEEDAF

SEQ ID NO: 76880 - protein, 6 aa, Artificial sequence
  Protein classification predicting sequence
NIREVI

SEQ ID NO: 76881 - protein, 6 aa, Artificial sequence
  Protein classification predicting sequence
ETENVE

SEQ ID NO: 76882 - protein, 6 aa, Artificial sequence
  Protein classification predicting sequence
AMLKYG

SEQ ID NO: 76883 - protein, 6 aa, Artificial sequence
  Protein classification predicting sequence
YDAETV

SEQ ID NO: 76884 - protein, 6 aa, Artificial sequence
  Protein classification predicting sequence
VMKETK

SEQ ID NO: 76885 - protein, 6 aa, Artificial sequence
  Protein classification predicting sequence
DRPDTR

SEQ ID NO: 76886 - protein, 7 aa, Artificial sequence
  Protein classification predicting sequence
KELGLID

SEQ ID NO: 76887 - protein, 7 aa, Artificial sequence
  Protein classification predicting sequence
FLEIETP

SEQ ID NO: 76888 - protein, 7 aa, Artificial sequence
  Protein classification predicting sequence
PFPRITY

SEQ ID NO: 76889 - protein, 6 aa, Artificial sequence
  Protein classification predicting sequence
FPRITY

SEQ ID NO: 76890 - protein, 6 aa, Artificial sequence
  Protein classification predicting sequence
GAGEKK

SEQ ID NO: 76891 - protein, 6 aa, Artificial sequence
  Protein classification predicting sequence
EDGVKG

SEQ ID NO: 76892 - protein, 6 aa, Artificial sequence
  Protein classification predicting sequence
WLGLDW

SEQ ID NO: 76893 - protein, 6 aa, Artificial sequence
  Protein classification predicting sequence
EAAFWW

SEQ ID NO: 76894 - protein, 5 aa, Artificial sequence
  Protein classification predicting sequence
PEPWN

SEQ ID NO: 76895 - protein, 6 aa, Artificial sequence
  Protein classification predicting sequence
YEEAIG

SEQ ID NO: 76896 - protein, 7 aa, Artificial sequence
  Protein classification predicting sequence
TRFPPEP

SEQ ID NO: 76897 - protein, 7 aa, Artificial sequence
  Protein classification predicting sequence
RFDDTNP

SEQ ID NO: 76898 - protein, 6 aa, Artificial sequence
  Protein classification predicting sequence
YSSDYF

SEQ ID NO: 76899 - protein, 7 aa, Artificial sequence
  Protein classification predicting sequence
GNARPAI

SEQ ID NO: 76900 - protein, 6 aa, Artificial sequence
  Protein classification predicting sequence
ALFNYL

SEQ ID NO: 76901 - protein, 6 aa, Artificial sequence
  Protein classification predicting sequence
IQRSNG

SEQ ID NO: 76902 - protein, 6 aa, Artificial sequence
  Protein classification predicting sequence
ANVVDD

SEQ ID NO: 76903 - protein, 7 aa, Artificial sequence
  Protein classification predicting sequence
QYSKEEL

SEQ ID NO: 76904 - protein, 6 aa, Artificial sequence
  Protein classification predicting sequence
KMKTNP

SEQ ID NO: 76905 - protein, 6 aa, Artificial sequence
  Protein classification predicting sequence
QDPYFR

SEQ ID NO: 76906 - protein, 6 aa, Artificial sequence
  Protein classification predicting sequence
KLSKRD

SEQ ID NO: 76907 - protein, 8 aa, Artificial sequence
  Protein classification predicting sequence
ALGKDETL

SEQ ID NO: 76908 - protein, 6 aa, Artificial sequence
  Protein classification predicting sequence
TIDDSV

SEQ ID NO: 76909 - protein, 6 aa, Artificial sequence
  Protein classification predicting sequence
GWDDPR

SEQ ID NO: 76910 - protein, 6 aa, Artificial sequence
  Protein classification predicting sequence
AKPFIT

SEQ ID NO: 76911 - protein, 6 aa, Artificial sequence
  Protein classification predicting sequence
VRGKIT

SEQ ID NO: 76912 - protein, 6 aa, Artificial sequence
  Protein classification predicting sequence
YRELPI

SEQ ID NO: 76913 - protein, 6 aa, Artificial sequence
  Protein classification predicting sequence
ALLNYL

SEQ ID NO: 76914 - protein, 8 aa, Artificial sequence
  Protein classification predicting sequence
LINKGLAY

SEQ ID NO: 76915 - protein, 6 aa, Artificial sequence
  Protein classification predicting sequence
TRSTPE

SEQ ID NO: 76916 - protein, 7 aa, Artificial sequence
  Protein classification predicting sequence
EELDTRR

SEQ ID NO: 76917 - protein, 6 aa, Artificial sequence
  Protein classification predicting sequence
IQKKDG

SEQ ID NO: 76918 - protein, 5 aa, Artificial sequence
  Protein classification predicting sequence
NDAED

SEQ ID NO: 76919 - protein, 6 aa, Artificial sequence
  Protein classification predicting sequence
GPIHLG

SEQ ID NO: 76920 - protein, 6 aa, Artificial sequence
  Protein classification predicting sequence
PNEEKP

SEQ ID NO: 76921 - protein, 6 aa, Artificial sequence
  Protein classification predicting sequence
IMYKAF

SEQ ID NO: 76922 - protein, 6 aa, Artificial sequence
  Protein classification predicting sequence
RQALID

SEQ ID NO: 76923 - protein, 6 aa, Artificial sequence
  Protein classification predicting sequence
LNEFFE

SEQ ID NO: 76924 - protein, 7 aa, Artificial sequence
  Protein classification predicting sequence
GIERLAM

SEQ ID NO: 76925 - protein, 6 aa, Artificial sequence
  Protein classification predicting sequence
AIHPLT

SEQ ID NO: 76926 - protein, 7 aa, Artificial sequence
  Protein classification predicting sequence
FGIGIER

SEQ ID NO: 76927 - protein, 6 aa, Artificial sequence
  Protein classification predicting sequence
GIGIDR

SEQ ID NO: 76928 - protein, 6 aa, Artificial sequence
  Protein classification predicting sequence
GMGIER

SEQ ID NO: 76929 - protein, 6 aa, Artificial sequence
  Protein classification predicting sequence
ERVTML

SEQ ID NO: 76930 - protein, 6 aa, Artificial sequence
  Protein classification predicting sequence
GMGVER

SEQ ID NO: 76931 - protein, 6 aa, Artificial sequence
  Protein classification predicting sequence
VKLRWR

SEQ ID NO: 76932 - protein, 6 aa, Artificial sequence
  Protein classification predicting sequence
GDLGFS

SEQ ID NO: 76933 - protein, 6 aa, Artificial sequence
  Protein classification predicting sequence
GLGVER

SEQ ID NO: 76934 - protein, 7 aa, Artificial sequence
  Protein classification predicting sequence
GIDRLAM

SEQ ID NO: 76935 - protein, 6 aa, Artificial sequence
  Protein classification predicting sequence
DDGKKL

SEQ ID NO: 76936 - protein, 6 aa, Artificial sequence
  Protein classification predicting sequence
IARCFR

SEQ ID NO: 76937 - protein, 6 aa, Artificial sequence
  Protein classification predicting sequence
YVSNFT

SEQ ID NO: 76938 - protein, 6 aa, Artificial sequence
  Protein classification predicting sequence
GKKSIA

SEQ ID NO: 76939 - protein, 7 aa, Artificial sequence
  Protein classification predicting sequence
HPDADKL

SEQ ID NO: 76940 - protein, 7 aa, Artificial sequence
  Protein classification predicting sequence
ALMRRLQ

SEQ ID NO: 76941 - protein, 7 aa, Artificial sequence
  Protein classification predicting sequence
ENILKRL

SEQ ID NO: 76942 - protein, 5 aa, Artificial sequence
  Protein classification predicting sequence
NNTPR

SEQ ID NO: 76943 - protein, 5 aa, Artificial sequence
  Protein classification predicting sequence
MAEFG

SEQ ID NO: 76944 - protein, 8 aa, Artificial sequence
  Protein classification predicting sequence
AADELGLS

SEQ ID NO: 76945 - protein, 6 aa, Artificial sequence
  Protein classification predicting sequence
AIERAT

SEQ ID NO: 76946 - protein, 6 aa, Artificial sequence
  Protein classification predicting sequence
PWGKGR

SEQ ID NO: 76947 - protein, 6 aa, Artificial sequence
  Protein classification predicting sequence
EIGRIF

SEQ ID NO: 76948 - protein, 5 aa, Artificial sequence
  Protein classification predicting sequence
ISDDH

SEQ ID NO: 76949 - protein, 6 aa, Artificial sequence
  Protein classification predicting sequence
AGVMGG

SEQ ID NO: 76950 - protein, 5 aa, Artificial sequence
  Protein classification predicting sequence
TYVFE

SEQ ID NO: 76951 - protein, 7 aa, Artificial sequence
  Protein classification predicting sequence
AADGEEL

SEQ ID NO: 76952 - protein, 6 aa, Artificial sequence
  Protein classification predicting sequence
TVRYFL

SEQ ID NO: 76953 - protein, 6 aa, Artificial sequence
  Protein classification predicting sequence
PWGPGR

SEQ ID NO: 76954 - protein, 7 aa, Artificial sequence
  Protein classification predicting sequence
KLRGVES

SEQ ID NO: 76955 - protein, 6 aa, Artificial sequence
  Protein classification predicting sequence
QISNED

SEQ ID NO: 76956 - protein, 8 aa, Artificial sequence
  Protein classification predicting sequence
SGVKVTAL

SEQ ID NO: 76957 - protein, 6 aa, Artificial sequence
  Protein classification predicting sequence
DLIEEV

SEQ ID NO: 76958 - protein, 7 aa, Artificial sequence
  Protein classification predicting sequence
FRLSYRD

SEQ ID NO: 76959 - protein, 6 aa, Artificial sequence
  Protein classification predicting sequence
KSDLER

SEQ ID NO: 76960 - protein, 6 aa, Artificial sequence
  Protein classification predicting sequence
NFTEKA

SEQ ID NO: 76961 - protein, 6 aa, Artificial sequence
  Protein classification predicting sequence
NLARSI

SEQ ID NO: 76962 - protein, 6 aa, Artificial sequence
  Protein classification predicting sequence
YLTAII

SEQ ID NO: 76963 - protein, 6 aa, Artificial sequence
  Protein classification predicting sequence
FGKPFE

SEQ ID NO: 76964 - protein, 6 aa, Artificial sequence
  Protein classification predicting sequence
DSDGII

SEQ ID NO: 76965 - protein, 7 aa, Artificial sequence
  Protein classification predicting sequence
YEIGRVF

SEQ ID NO: 76966 - protein, 7 aa, Artificial sequence
  Protein classification predicting sequence
YEIGKVF

SEQ ID NO: 76967 - protein, 6 aa, Artificial sequence
  Protein classification predicting sequence
EIGRVF

SEQ ID NO: 76968 - protein, 7 aa, Artificial sequence
  Protein classification predicting sequence
AELSRTI

SEQ ID NO: 76969 - protein, 6 aa, Artificial sequence
  Protein classification predicting sequence
DLFSFP

SEQ ID NO: 76970 - protein, 7 aa, Artificial sequence
  Protein classification predicting sequence
LTMSGSK

SEQ ID NO: 76971 - protein, 6 aa, Artificial sequence
  Protein classification predicting sequence
LVDRGY

SEQ ID NO: 76972 - protein, 6 aa, Artificial sequence
  Protein classification predicting sequence
PIIEVI

SEQ ID NO: 76973 - protein, 5 aa, Artificial sequence
  Protein classification predicting sequence
WIADY

SEQ ID NO: 76974 - protein, 6 aa, Artificial sequence
  Protein classification predicting sequence
PYDIPA

SEQ ID NO: 76975 - protein, 7 aa, Artificial sequence
  Protein classification predicting sequence
SLQEIGI

SEQ ID NO: 76976 - protein, 6 aa, Artificial sequence
  Protein classification predicting sequence
GYVTVN

SEQ ID NO: 76977 - protein, 6 aa, Artificial sequence
  Protein classification predicting sequence
LQGYMG

SEQ ID NO: 76978 - protein, 7 aa, Artificial sequence
  Protein classification predicting sequence
DLNLEDF

SEQ ID NO: 76979 - protein, 7 aa, Artificial sequence
  Protein classification predicting sequence
KVLAASI

SEQ ID NO: 76980 - protein, 6 aa, Artificial sequence
  Protein classification predicting sequence
AQSFNK

SEQ ID NO: 76981 - protein, 5 aa, Artificial sequence
  Protein classification predicting sequence
LVEWP

SEQ ID NO: 76982 - protein, 7 aa, Artificial sequence
  Protein classification predicting sequence
RDNRLAL

SEQ ID NO: 76983 - protein, 5 aa, Artificial sequence
  Protein classification predicting sequence
RKPMR

SEQ ID NO: 76984 - protein, 6 aa, Artificial sequence
  Protein classification predicting sequence
WEASGH

SEQ ID NO: 76985 - protein, 6 aa, Artificial sequence
  Protein classification predicting sequence
HETLED

SEQ ID NO: 76986 - protein, 7 aa, Artificial sequence
  Protein classification predicting sequence
HETLEDG

SEQ ID NO: 76987 - protein, 6 aa, Artificial sequence
  Protein classification predicting sequence
DGTVTI

SEQ ID NO: 76988 - protein, 6 aa, Artificial sequence
  Protein classification predicting sequence
IIREVE

SEQ ID NO: 76989 - protein, 6 aa, Artificial sequence
  Protein classification predicting sequence
KWQEFW

SEQ ID NO: 76990 - protein, 5 aa, Artificial sequence
  Protein classification predicting sequence
DIRHF

SEQ ID NO: 76991 - protein, 5 aa, Artificial sequence
  Protein classification predicting sequence
VNMQD

SEQ ID NO: 76992 - protein, 7 aa, Artificial sequence
  Protein classification predicting sequence
EALLNYL

SEQ ID NO: 76993 - protein, 5 aa, Artificial sequence
  Protein classification predicting sequence
ECSVM

SEQ ID NO: 76994 - protein, 6 aa, Artificial sequence
  Protein classification predicting sequence
RFIAIL

SEQ ID NO: 76995 - protein, 5 aa, Artificial sequence
  Protein classification predicting sequence
QHHQF

SEQ ID NO: 76996 - protein, 6 aa, Artificial sequence
  Protein classification predicting sequence
RILDSK

SEQ ID NO: 76997 - protein, 5 aa, Artificial sequence
  Protein classification predicting sequence
KAQFK

SEQ ID NO: 76998 - protein, 6 aa, Artificial sequence
  Protein classification predicting sequence
RPEGTA

SEQ ID NO: 76999 - protein, 7 aa, Artificial sequence
  Protein classification predicting sequence
LTVPLAR

SEQ ID NO: 77000 - protein, 6 aa, Artificial sequence
  Protein classification predicting sequence
TSGVQI

SEQ ID NO: 77001 - protein, 6 aa, Artificial sequence
  Protein classification predicting sequence
ASELRN

SEQ ID NO: 77002 - protein, 5 aa, Artificial sequence
  Protein classification predicting sequence
FWQMG

SEQ ID NO: 77003 - protein, 6 aa, Artificial sequence
  Protein classification predicting sequence
PYKLEL

SEQ ID NO: 77004 - protein, 6 aa, Artificial sequence
  Protein classification predicting sequence
ADNTVV

SEQ ID NO: 77005 - protein, 6 aa, Artificial sequence
  Protein classification predicting sequence
DALNIP

SEQ ID NO: 77006 - protein, 6 aa, Artificial sequence
  Protein classification predicting sequence
TYSFVD

SEQ ID NO: 77007 - protein, 7 aa, Artificial sequence
  Protein classification predicting sequence
ASKIAEL

SEQ ID NO: 77008 - protein, 6 aa, Artificial sequence
  Protein classification predicting sequence
ASEFVG

SEQ ID NO: 77009 - protein, 5 aa, Artificial sequence
  Protein classification predicting sequence
RMQAR

SEQ ID NO: 77010 - protein, 6 aa, Artificial sequence
  Protein classification predicting sequence
WCISRQ

SEQ ID NO: 77011 - protein, 5 aa, Artificial sequence
  Protein classification predicting sequence
LHMGH

SEQ ID NO: 77012 - protein, 8 aa, Artificial sequence
  Protein classification predicting sequence
DRLVMLLT

SEQ ID NO: 77013 - protein, 7 aa, Artificial sequence
  Protein classification predicting sequence
KQLGTNP

SEQ ID NO: 77014 - protein, 9 aa, Artificial sequence
  Protein classification predicting sequence
SIRDVIAFP

SEQ ID NO: 77015 - protein, 6 aa, Artificial sequence
  Protein classification predicting sequence
ERVYEI

SEQ ID NO: 77016 - protein, 6 aa, Artificial sequence
  Protein classification predicting sequence
MLLTDS

SEQ ID NO: 77017 - protein, 7 aa, Artificial sequence
  Protein classification predicting sequence
GEETTLS

SEQ ID NO: 77018 - protein, 6 aa, Artificial sequence
  Protein classification predicting sequence
SKSKGN

SEQ ID NO: 77019 - protein, 6 aa, Artificial sequence
  Protein classification predicting sequence
QIEAKN

SEQ ID NO: 77020 - protein, 6 aa, Artificial sequence
  Protein classification predicting sequence
EPAKQL

SEQ ID NO: 77021 - protein, 5 aa, Artificial sequence
  Protein classification predicting sequence
LCQGM

SEQ ID NO: 77022 - protein, 7 aa, Artificial sequence
  Protein classification predicting sequence
EVETPVL

SEQ ID NO: 77023 - protein, 5 aa, Artificial sequence
  Protein classification predicting sequence
WWPIN

SEQ ID NO: 77024 - protein, 7 aa, Artificial sequence
  Protein classification predicting sequence
AVAKKLG

SEQ ID NO: 77025 - protein, 6 aa, Artificial sequence
  Protein classification predicting sequence
DRIKLR

SEQ ID NO: 77026 - protein, 8 aa, Artificial sequence
  Protein classification predicting sequence
GFLEVETP

SEQ ID NO: 77027 - protein, 7 aa, Artificial sequence
  Protein classification predicting sequence
GIGIDRL

SEQ ID NO: 77028 - protein, 6 aa, Artificial sequence
  Protein classification predicting sequence
KSVVKK

SEQ ID NO: 77029 - protein, 6 aa, Artificial sequence
  Protein classification predicting sequence
IMDLTE

SEQ ID NO: 77030 - protein, 7 aa, Artificial sequence
  Protein classification predicting sequence
NRLSSEL

SEQ ID NO: 77031 - protein, 7 aa, Artificial sequence
  Protein classification predicting sequence
ILSVYKD

SEQ ID NO: 77032 - protein, 7 aa, Artificial sequence
  Protein classification predicting sequence
GYNVLFP

SEQ ID NO: 77033 - protein, 6 aa, Artificial sequence
  Protein classification predicting sequence
EYIDMC

SEQ ID NO: 77034 - protein, 5 aa, Artificial sequence
  Protein classification predicting sequence
VNWCP

SEQ ID NO: 77035 - protein, 6 aa, Artificial sequence
  Protein classification predicting sequence
KRMQGY

SEQ ID NO: 77036 - protein, 5 aa, Artificial sequence
  Protein classification predicting sequence
DPIDQ

SEQ ID NO: 77037 - protein, 6 aa, Artificial sequence
  Protein classification predicting sequence
KWQKYW

SEQ ID NO: 77038 - protein, 5 aa, Artificial sequence
  Protein classification predicting sequence
WLPVD

SEQ ID NO: 77039 - protein, 6 aa, Artificial sequence
  Protein classification predicting sequence
EKGLAY

SEQ ID NO: 77040 - protein, 7 aa, Artificial sequence
  Protein classification predicting sequence
EFDADAA

SEQ ID NO: 77041 - protein, 6 aa, Artificial sequence
  Protein classification predicting sequence
VEKDEF

SEQ ID NO: 77042 - protein, 5 aa, Artificial sequence
  Protein classification predicting sequence
PYPSG

SEQ ID NO: 77043 - protein, 5 aa, Artificial sequence
  Protein classification predicting sequence
REKYY

SEQ ID NO: 77044 - protein, 6 aa, Artificial sequence
  Protein classification predicting sequence
EKINYK

SEQ ID NO: 77045 - protein, 6 aa, Artificial sequence
  Protein classification predicting sequence
KMSKSK

SEQ ID NO: 77046 - protein, 6 aa, Artificial sequence
  Protein classification predicting sequence
RDLGYL

SEQ ID NO: 77047 - protein, 6 aa, Artificial sequence
  Protein classification predicting sequence
LARYYR

SEQ ID NO: 77048 - protein, 5 aa, Artificial sequence
  Protein classification predicting sequence
EKKWQ

SEQ ID NO: 77049 - protein, 6 aa, Artificial sequence
  Protein classification predicting sequence
FKAVED

SEQ ID NO: 77050 - protein, 8 aa, Artificial sequence
  Protein classification predicting sequence
KMSKSKGN

SEQ ID NO: 77051 - protein, 6 aa, Artificial sequence
  Protein classification predicting sequence
EWQNYW

SEQ ID NO: 77052 - protein, 6 aa, Artificial sequence
  Protein classification predicting sequence
GNVVDP

SEQ ID NO: 77053 - protein, 5 aa, Artificial sequence
  Protein classification predicting sequence
GWHIE

SEQ ID NO: 77054 - protein, 7 aa, Artificial sequence
  Protein classification predicting sequence
KGLVYKK

SEQ ID NO: 77055 - protein, 6 aa, Artificial sequence
  Protein classification predicting sequence
MVYCPE

SEQ ID NO: 77056 - protein, 7 aa, Artificial sequence
  Protein classification predicting sequence
ARPDGTP

SEQ ID NO: 77057 - protein, 6 aa, Artificial sequence
  Protein classification predicting sequence
GVQSPI

SEQ ID NO: 77058 - protein, 6 aa, Artificial sequence
  Protein classification predicting sequence
IEQTRE

SEQ ID NO: 77059 - protein, 5 aa, Artificial sequence
  Protein classification predicting sequence
HAIKQ

SEQ ID NO: 77060 - protein, 6 aa, Artificial sequence
  Protein classification predicting sequence
LIDRYG

SEQ ID NO: 77061 - protein, 7 aa, Artificial sequence
  Protein classification predicting sequence
IIVEKNL

SEQ ID NO: 77062 - protein, 6 aa, Artificial sequence
  Protein classification predicting sequence
AGIRPI

SEQ ID NO: 77063 - protein, 6 aa, Artificial sequence
  Protein classification predicting sequence
NPTGPL

SEQ ID NO: 77064 - protein, 6 aa, Artificial sequence
  Protein classification predicting sequence
DVFARY

SEQ ID NO: 77065 - protein, 6 aa, Artificial sequence
  Protein classification predicting sequence
GKSLKN

SEQ ID NO: 77066 - protein, 7 aa, Artificial sequence
  Protein classification predicting sequence
NEKMSKS

SEQ ID NO: 77067 - protein, 7 aa, Artificial sequence
  Protein classification predicting sequence
ETDIDTA

SEQ ID NO: 77068 - protein, 6 aa, Artificial sequence
  Protein classification predicting sequence
ELPIRI

SEQ ID NO: 77069 - protein, 6 aa, Artificial sequence
  Protein classification predicting sequence
KIKEFK

SEQ ID NO: 77070 - protein, 5 aa, Artificial sequence
  Protein classification predicting sequence
VNWDP

SEQ ID NO: 77071 - protein, 7 aa, Artificial sequence
  Protein classification predicting sequence
EKMSKSK

SEQ ID NO: 77072 - protein, 8 aa, Artificial sequence
  Protein classification predicting sequence
AKAREALA

SEQ ID NO: 77073 - protein, 7 aa, Artificial sequence
  Protein classification predicting sequence
DVLVKPE

SEQ ID NO: 77074 - protein, 7 aa, Artificial sequence
  Protein classification predicting sequence
SRQRFWG

SEQ ID NO: 77075 - protein, 6 aa, Artificial sequence
  Protein classification predicting sequence
GKRYRR

SEQ ID NO: 77076 - protein, 5 aa, Artificial sequence
  Protein classification predicting sequence
SSWYF

SEQ ID NO: 77077 - protein, 5 aa, Artificial sequence
  Protein classification predicting sequence
WQNYW

SEQ ID NO: 77078 - protein, 6 aa, Artificial sequence
  Protein classification predicting sequence
IEPKWQ

SEQ ID NO: 77079 - protein, 7 aa, Artificial sequence
  Protein classification predicting sequence
VLAEAVQ

SEQ ID NO: 77080 - protein, 5 aa, Artificial sequence
  Protein classification predicting sequence
RMQGY

SEQ ID NO: 77081 - protein, 6 aa, Artificial sequence
  Protein classification predicting sequence
QDLDQL

SEQ ID NO: 77082 - protein, 6 aa, Artificial sequence
  Protein classification predicting sequence
IEPKSV

SEQ ID NO: 77083 - protein, 5 aa, Artificial sequence
  Protein classification predicting sequence
ANYWM

SEQ ID NO: 77084 - protein, 6 aa, Artificial sequence
  Protein classification predicting sequence
MQGYNV

SEQ ID NO: 77085 - protein, 8 aa, Artificial sequence
  Protein classification predicting sequence
DVGEAEPR

SEQ ID NO: 77086 - protein, 6 aa, Artificial sequence
  Protein classification predicting sequence
GLKDLS

SEQ ID NO: 77087 - protein, 6 aa, Artificial sequence
  Protein classification predicting sequence
FDALNI

SEQ ID NO: 77088 - protein, 7 aa, Artificial sequence
  Protein classification predicting sequence
GVESRGM

SEQ ID NO: 77089 - protein, 7 aa, Artificial sequence
  Protein classification predicting sequence
GAKMSKS

SEQ ID NO: 77090 - protein, 6 aa, Artificial sequence
  Protein classification predicting sequence
YADRLL

SEQ ID NO: 77091 - protein, 7 aa, Artificial sequence
  Protein classification predicting sequence
KMSKSKG

SEQ ID NO: 77092 - protein, 6 aa, Artificial sequence
  Protein classification predicting sequence
IEIGSK

SEQ ID NO: 77093 - protein, 6 aa, Artificial sequence
  Protein classification predicting sequence
DFSHFG

SEQ ID NO: 77094 - protein, 9 aa, Artificial sequence
  Protein classification predicting sequence
PRTVVSGLV

SEQ ID NO: 77095 - protein, 11 aa, Artificial sequence
  Protein classification predicting sequence
RLVVVLCNLKP

SEQ ID NO: 77096 - protein, 7 aa, Artificial sequence
  Protein classification predicting sequence
LVNEVRE

SEQ ID NO: 77097 - protein, 6 aa, Artificial sequence
  Protein classification predicting sequence
ITPKEH

SEQ ID NO: 77098 - protein, 6 aa, Artificial sequence
  Protein classification predicting sequence
IHLGHM

SEQ ID NO: 77099 - protein, 5 aa, Artificial sequence
  Protein classification predicting sequence
DIWVR

SEQ ID NO: 77100 - protein, 6 aa, Artificial sequence
  Protein classification predicting sequence
SQGMLL

SEQ ID NO: 77101 - protein, 7 aa, Artificial sequence
  Protein classification predicting sequence
RVNGELV

SEQ ID NO: 77102 - protein, 7 aa, Artificial sequence
  Protein classification predicting sequence
GVESNGM

SEQ ID NO: 77103 - protein, 9 aa, Artificial sequence
  Protein classification predicting sequence
KMSKSKGNV

SEQ ID NO: 77104 - protein, 9 aa, Artificial sequence
  Protein classification predicting sequence
VNGEKMSKS

SEQ ID NO: 77105 - protein, 7 aa, Artificial sequence
  Protein classification predicting sequence
KMSKSRG

SEQ ID NO: 77106 - protein, 6 aa, Artificial sequence
  Protein classification predicting sequence
GHLRST

SEQ ID NO: 77107 - protein, 6 aa, Artificial sequence
  Protein classification predicting sequence
WGTPIP

SEQ ID NO: 77108 - protein, 6 aa, Artificial sequence
  Protein classification predicting sequence
LINAIE

SEQ ID NO: 77109 - protein, 5 aa, Artificial sequence
  Protein classification predicting sequence
PHIGH

SEQ ID NO: 77110 - protein, 9 aa, Artificial sequence
  Protein classification predicting sequence
LLAPILVHT

SEQ ID NO: 77111 - protein, 6 aa, Artificial sequence
  Protein classification predicting sequence
LDNFKE

SEQ ID NO: 77112 - protein, 5 aa, Artificial sequence
  Protein classification predicting sequence
GHMVE

SEQ ID NO: 77113 - protein, 6 aa, Artificial sequence
  Protein classification predicting sequence
HIGHAY

SEQ ID NO: 77114 - protein, 6 aa, Artificial sequence
  Protein classification predicting sequence
EWNEEE

SEQ ID NO: 77115 - protein, 6 aa, Artificial sequence
  Protein classification predicting sequence
SKSLGN

SEQ ID NO: 77116 - protein, 6 aa, Artificial sequence
  Protein classification predicting sequence
DTFYIT

SEQ ID NO: 77117 - protein, 5 aa, Artificial sequence
  Protein classification predicting sequence
WYFLR

SEQ ID NO: 77118 - protein, 5 aa, Artificial sequence
  Protein classification predicting sequence
FRDED

SEQ ID NO: 77119 - protein, 7 aa, Artificial sequence
  Protein classification predicting sequence
VELVQFV

SEQ ID NO: 77120 - protein, 5 aa, Artificial sequence
  Protein classification predicting sequence
DFSHF

SEQ ID NO: 77121 - protein, 6 aa, Artificial sequence
  Protein classification predicting sequence
ITIKED

SEQ ID NO: 77122 - protein, 6 aa, Artificial sequence
  Protein classification predicting sequence
WYLDLR

SEQ ID NO: 77123 - protein, 6 aa, Artificial sequence
  Protein classification predicting sequence
PILTGS

SEQ ID NO: 77124 - protein, 6 aa, Artificial sequence
  Protein classification predicting sequence
GIVKED

SEQ ID NO: 77125 - protein, 6 aa, Artificial sequence
  Protein classification predicting sequence
IARIRN

SEQ ID NO: 77126 - protein, 6 aa, Artificial sequence
  Protein classification predicting sequence
NPEDPR

SEQ ID NO: 77127 - protein, 6 aa, Artificial sequence
  Protein classification predicting sequence
RIRNTA

SEQ ID NO: 77128 - protein, 8 aa, Artificial sequence
  Protein classification predicting sequence
GFGLGLER

SEQ ID NO: 77129 - protein, 6 aa, Artificial sequence
  Protein classification predicting sequence
LKNVVN

SEQ ID NO: 77130 - protein, 6 aa, Artificial sequence
  Protein classification predicting sequence
AADILL

SEQ ID NO: 77131 - protein, 5 aa, Artificial sequence
  Protein classification predicting sequence
GFKIR

SEQ ID NO: 77132 - protein, 6 aa, Artificial sequence
  Protein classification predicting sequence
LREIMD

SEQ ID NO: 77133 - protein, 7 aa, Artificial sequence
  Protein classification predicting sequence
SYRDLPL

SEQ ID NO: 77134 - protein, 6 aa, Artificial sequence
  Protein classification predicting sequence
LYQIAT

SEQ ID NO: 77135 - protein, 6 aa, Artificial sequence
  Protein classification predicting sequence
SYRELP

SEQ ID NO: 77136 - protein, 6 aa, Artificial sequence
  Protein classification predicting sequence
TPAAMR

SEQ ID NO: 77137 - protein, 8 aa, Artificial sequence
  Protein classification predicting sequence
KGLAYVDE

SEQ ID NO: 77138 - protein, 7 aa, Artificial sequence
  Protein classification predicting sequence
KGLAYVD

SEQ ID NO: 77139 - protein, 6 aa, Artificial sequence
  Protein classification predicting sequence
APNAAA

SEQ ID NO: 77140 - protein, 7 aa, Artificial sequence
  Protein classification predicting sequence
RSVEENL

SEQ ID NO: 77141 - protein, 6 aa, Artificial sequence
  Protein classification predicting sequence
KGLAYV

SEQ ID NO: 77142 - protein, 6 aa, Artificial sequence
  Protein classification predicting sequence
FNVPNP

SEQ ID NO: 77143 - protein, 6 aa, Artificial sequence
  Protein classification predicting sequence
SILRKA

SEQ ID NO: 77144 - protein, 7 aa, Artificial sequence
  Protein classification predicting sequence
AENNPEL

SEQ ID NO: 77145 - protein, 6 aa, Artificial sequence
  Protein classification predicting sequence
FATQHY

SEQ ID NO: 77146 - protein, 7 aa, Artificial sequence
  Protein classification predicting sequence
ARLRETG

SEQ ID NO: 77147 - protein, 8 aa, Artificial sequence
  Protein classification predicting sequence
ASGADTQS

SEQ ID NO: 77148 - protein, 7 aa, Artificial sequence
  Protein classification predicting sequence
QQSRLRL

SEQ ID NO: 77149 - protein, 7 aa, Artificial sequence
  Protein classification predicting sequence
VMKDGAE

SEQ ID NO: 77150 - protein, 7 aa, Artificial sequence
  Protein classification predicting sequence
LGADHSG

SEQ ID NO: 77151 - protein, 7 aa, Artificial sequence
  Protein classification predicting sequence
EQVQQAL

SEQ ID NO: 77152 - protein, 6 aa, Artificial sequence
  Protein classification predicting sequence
LAADND

SEQ ID NO: 77153 - protein, 6 aa, Artificial sequence
  Protein classification predicting sequence
QFEKVE

SEQ ID NO: 77154 - protein, 8 aa, Artificial sequence
  Protein classification predicting sequence
LGEDGKRL

SEQ ID NO: 77155 - protein, 8 aa, Artificial sequence
  Protein classification predicting sequence
RKKIAEVI

SEQ ID NO: 77156 - protein, 7 aa, Artificial sequence
  Protein classification predicting sequence
DLIEEVG

SEQ ID NO: 77157 - protein, 6 aa, Artificial sequence
  Protein classification predicting sequence
KKLKTR

SEQ ID NO: 77158 - protein, 5 aa, Artificial sequence
  Protein classification predicting sequence
VQYAH

SEQ ID NO: 77159 - protein, 6 aa, Artificial sequence
  Protein classification predicting sequence
AEHPLA

SEQ ID NO: 77160 - protein, 6 aa, Artificial sequence
  Protein classification predicting sequence
LTPSFR

SEQ ID NO: 77161 - protein, 6 aa, Artificial sequence
  Protein classification predicting sequence
ELERMT

SEQ ID NO: 77162 - protein, 5 aa, Artificial sequence
  Protein classification predicting sequence
GDMGF

SEQ ID NO: 77163 - protein, 5 aa, Artificial sequence
  Protein classification predicting sequence
HENEI

SEQ ID NO: 77164 - protein, 6 aa, Artificial sequence
  Protein classification predicting sequence
KKYDIE

SEQ ID NO: 77165 - protein, 6 aa, Artificial sequence
  Protein classification predicting sequence
TVPTVL

SEQ ID NO: 77166 - protein, 6 aa, Artificial sequence
  Protein classification predicting sequence
APAGGE

SEQ ID NO: 77167 - protein, 7 aa, Artificial sequence
  Protein classification predicting sequence
ESAVGAG

SEQ ID NO: 77168 - protein, 7 aa, Artificial sequence
  Protein classification predicting sequence
ELENNKI

SEQ ID NO: 77169 - protein, 7 aa, Artificial sequence
  Protein classification predicting sequence
ARSKAVG

SEQ ID NO: 77170 - protein, 5 aa, Artificial sequence
  Protein classification predicting sequence
FYGPK

SEQ ID NO: 77171 - protein, 5 aa, Artificial sequence
  Protein classification predicting sequence
SPCFR

SEQ ID NO: 77172 - protein, 6 aa, Artificial sequence
  Protein classification predicting sequence
ESAAEH

SEQ ID NO: 77173 - protein, 6 aa, Artificial sequence
  Protein classification predicting sequence
DFFYAK

SEQ ID NO: 77174 - protein, 6 aa, Artificial sequence
  Protein classification predicting sequence
SYRDLP

SEQ ID NO: 77175 - protein, 6 aa, Artificial sequence
  Protein classification predicting sequence
TTPFEI

SEQ ID NO: 77176 - protein, 6 aa, Artificial sequence
  Protein classification predicting sequence
DMYHKL

SEQ ID NO: 77177 - protein, 6 aa, Artificial sequence
  Protein classification predicting sequence
FEKLTM

SEQ ID NO: 77178 - protein, 7 aa, Artificial sequence
  Protein classification predicting sequence
LERALIN

SEQ ID NO: 77179 - protein, 6 aa, Artificial sequence
  Protein classification predicting sequence
YDVIKK

SEQ ID NO: 77180 - protein, 6 aa, Artificial sequence
  Protein classification predicting sequence
GHWFNY

SEQ ID NO: 77181 - protein, 7 aa, Artificial sequence
  Protein classification predicting sequence
AEIIEAI

SEQ ID NO: 77182 - protein, 6 aa, Artificial sequence
  Protein classification predicting sequence
GFVKLL

SEQ ID NO: 77183 - protein, 7 aa, Artificial sequence
  Protein classification predicting sequence
EEIAASI

SEQ ID NO: 77184 - protein, 6 aa, Artificial sequence
  Protein classification predicting sequence
SPVQVR

SEQ ID NO: 77185 - protein, 6 aa, Artificial sequence
  Protein classification predicting sequence
KARGED

SEQ ID NO: 77186 - protein, 7 aa, Artificial sequence
  Protein classification predicting sequence
FPAWLAP

SEQ ID NO: 77187 - protein, 8 aa, Artificial sequence
  Protein classification predicting sequence
NPDEVVEK

SEQ ID NO: 77188 - protein, 7 aa, Artificial sequence
  Protein classification predicting sequence
KSYRDLP

SEQ ID NO: 77189 - protein, 5 aa, Artificial sequence
  Protein classification predicting sequence
FYAES

SEQ ID NO: 77190 - protein, 7 aa, Artificial sequence
  Protein classification predicting sequence
LAEAEIE

SEQ ID NO: 77191 - protein, 6 aa, Artificial sequence
  Protein classification predicting sequence
GYSIDW

SEQ ID NO: 77192 - protein, 7 aa, Artificial sequence
  Protein classification predicting sequence
RSGAVVE

SEQ ID NO: 77193 - protein, 7 aa, Artificial sequence
  Protein classification predicting sequence
DWCISRQ

SEQ ID NO: 77194 - protein, 7 aa, Artificial sequence
  Protein classification predicting sequence
LQVFVKK

SEQ ID NO: 77195 - protein, 6 aa, Artificial sequence
  Protein classification predicting sequence
LTWVNN

SEQ ID NO: 77196 - protein, 6 aa, Artificial sequence
  Protein classification predicting sequence
GYIYRG

SEQ ID NO: 77197 - protein, 6 aa, Artificial sequence
  Protein classification predicting sequence
VVAKQE

SEQ ID NO: 77198 - protein, 5 aa, Artificial sequence
  Protein classification predicting sequence
KRMQG

SEQ ID NO: 77199 - protein, 6 aa, Artificial sequence
  Protein classification predicting sequence
MVSGFD

SEQ ID NO: 77200 - protein, 7 aa, Artificial sequence
  Protein classification predicting sequence
IKIFDEK

SEQ ID NO: 77201 - protein, 6 aa, Artificial sequence
  Protein classification predicting sequence
TESIMV

SEQ ID NO: 77202 - protein, 6 aa, Artificial sequence
  Protein classification predicting sequence
GTGAVM

SEQ ID NO: 77203 - protein, 7 aa, Artificial sequence
  Protein classification predicting sequence
YGADALR

SEQ ID NO: 77204 - protein, 6 aa, Artificial sequence
  Protein classification predicting sequence
LHMGHA

SEQ ID NO: 77205 - protein, 6 aa, Artificial sequence
  Protein classification predicting sequence
VPARMH

SEQ ID NO: 77206 - protein, 5 aa, Artificial sequence
  Protein classification predicting sequence
QWFIK

SEQ ID NO: 77207 - protein, 6 aa, Artificial sequence
  Protein classification predicting sequence
TVSGQL

SEQ ID NO: 77208 - protein, 6 aa, Artificial sequence
  Protein classification predicting sequence
VRFQRM

SEQ ID NO: 77209 - protein, 6 aa, Artificial sequence
  Protein classification predicting sequence
GNVVNP

SEQ ID NO: 77210 - protein, 7 aa, Artificial sequence
  Protein classification predicting sequence
LTLAGSA

SEQ ID NO: 77211 - protein, 8 aa, Artificial sequence
  Protein classification predicting sequence
KMSKSANN

SEQ ID NO: 77212 - protein, 5 aa, Artificial sequence
  Protein classification predicting sequence
DWSRE

SEQ ID NO: 77213 - protein, 8 aa, Artificial sequence
  Protein classification predicting sequence
MVERYGAD

SEQ ID NO: 77214 - protein, 6 aa, Artificial sequence
  Protein classification predicting sequence
KPSGTG

SEQ ID NO: 77215 - protein, 7 aa, Artificial sequence
  Protein classification predicting sequence
VDAERAR

SEQ ID NO: 77216 - protein, 5 aa, Artificial sequence
  Protein classification predicting sequence
MVQFK

SEQ ID NO: 77217 - protein, 6 aa, Artificial sequence
  Protein classification predicting sequence
PSGALH

SEQ ID NO: 77218 - protein, 7 aa, Artificial sequence
  Protein classification predicting sequence
KMSKSDP

SEQ ID NO: 77219 - protein, 7 aa, Artificial sequence
  Protein classification predicting sequence
DEKTVKK

SEQ ID NO: 77220 - protein, 7 aa, Artificial sequence
  Protein classification predicting sequence
KAEKLVE

SEQ ID NO: 77221 - protein, 8 aa, Artificial sequence
  Protein classification predicting sequence
KMSKSYGN

SEQ ID NO: 77222 - protein, 6 aa, Artificial sequence
  Protein classification predicting sequence
KKMSKS

SEQ ID NO: 77223 - protein, 6 aa, Artificial sequence
  Protein classification predicting sequence
REMWRK

SEQ ID NO: 77224 - protein, 6 aa, Artificial sequence
  Protein classification predicting sequence
NYLFAR

SEQ ID NO: 77225 - protein, 9 aa, Artificial sequence
  Protein classification predicting sequence
DGRKMSKSY

SEQ ID NO: 77226 - protein, 5 aa, Artificial sequence
  Protein classification predicting sequence
TELMW

SEQ ID NO: 77227 - protein, 7 aa, Artificial sequence
  Protein classification predicting sequence
EEVTSLV

SEQ ID NO: 77228 - protein, 5 aa, Artificial sequence
  Protein classification predicting sequence
KMSAS

SEQ ID NO: 77229 - protein, 9 aa, Artificial sequence
  Protein classification predicting sequence
KMSASDPNS

SEQ ID NO: 77230 - protein, 6 aa, Artificial sequence
  Protein classification predicting sequence
YFLRLS

SEQ ID NO: 77231 - protein, 8 aa, Artificial sequence
  Protein classification predicting sequence
YPLGTALA

SEQ ID NO: 77232 - protein, 5 aa, Artificial sequence
  Protein classification predicting sequence
WFTPL

SEQ ID NO: 77233 - protein, 6 aa, Artificial sequence
  Protein classification predicting sequence
DAKEEF

SEQ ID NO: 77234 - protein, 6 aa, Artificial sequence
  Protein classification predicting sequence
YSTFEE

SEQ ID NO: 77235 - protein, 8 aa, Artificial sequence
  Protein classification predicting sequence
PVALLNSL

SEQ ID NO: 77236 - protein, 7 aa, Artificial sequence
  Protein classification predicting sequence
IDAKEEF

SEQ ID NO: 77237 - protein, 7 aa, Artificial sequence
  Protein classification predicting sequence
EAGVELS

SEQ ID NO: 77238 - protein, 6 aa, Artificial sequence
  Protein classification predicting sequence
LAADQE

SEQ ID NO: 77239 - protein, 7 aa, Artificial sequence
  Protein classification predicting sequence
VIKADGL

SEQ ID NO: 77240 - protein, 7 aa, Artificial sequence
  Protein classification predicting sequence
GVTVALE

SEQ ID NO: 77241 - protein, 6 aa, Artificial sequence
  Protein classification predicting sequence
FGICFG

SEQ ID NO: 77242 - protein, 6 aa, Artificial sequence
  Protein classification predicting sequence
TRRLTR

SEQ ID NO: 77243 - protein, 6 aa, Artificial sequence
  Protein classification predicting sequence
PIFGIC

SEQ ID NO: 77244 - protein, 7 aa, Artificial sequence
  Protein classification predicting sequence
FGGETYK

SEQ ID NO: 77245 - protein, 6 aa, Artificial sequence
  Protein classification predicting sequence
GDGGAD

SEQ ID NO: 77246 - protein, 6 aa, Artificial sequence
  Protein classification predicting sequence
ECGVLE

SEQ ID NO: 77247 - protein, 7 aa, Artificial sequence
  Protein classification predicting sequence
DAFRAAG

SEQ ID NO: 77248 - protein, 6 aa, Artificial sequence
  Protein classification predicting sequence
LNIVHV

SEQ ID NO: 77249 - protein, 5 aa, Artificial sequence
  Protein classification predicting sequence
AEYIW

SEQ ID NO: 77250 - protein, 7 aa, Artificial sequence
  Protein classification predicting sequence
EVQLTDF

SEQ ID NO: 77251 - protein, 6 aa, Artificial sequence
  Protein classification predicting sequence
GDGKGA

SEQ ID NO: 77252 - protein, 5 aa, Artificial sequence
  Protein classification predicting sequence
DPFME

SEQ ID NO: 77253 - protein, 6 aa, Artificial sequence
  Protein classification predicting sequence
LYDLPP

SEQ ID NO: 77254 - protein, 6 aa, Artificial sequence
  Protein classification predicting sequence
EAPVYI

SEQ ID NO: 77255 - protein, 6 aa, Artificial sequence
  Protein classification predicting sequence
ENFIEI

SEQ ID NO: 77256 - protein, 6 aa, Artificial sequence
  Protein classification predicting sequence
TLLDID

SEQ ID NO: 77257 - protein, 6 aa, Artificial sequence
  Protein classification predicting sequence
AGLDGI

SEQ ID NO: 77258 - protein, 6 aa, Artificial sequence
  Protein classification predicting sequence
AKRVRV

SEQ ID NO: 77259 - protein, 6 aa, Artificial sequence
  Protein classification predicting sequence
LQQVEL

SEQ ID NO: 77260 - protein, 6 aa, Artificial sequence
  Protein classification predicting sequence
GLIFVG

SEQ ID NO: 77261 - protein, 6 aa, Artificial sequence
  Protein classification predicting sequence
GDKRVL

SEQ ID NO: 77262 - protein, 6 aa, Artificial sequence
  Protein classification predicting sequence
GGVATG

SEQ ID NO: 77263 - protein, 6 aa, Artificial sequence
  Protein classification predicting sequence
DQGVAI

SEQ ID NO: 77264 - protein, 7 aa, Artificial sequence
  Protein classification predicting sequence
AVARIRE

SEQ ID NO: 77265 - protein, 6 aa, Artificial sequence
  Protein classification predicting sequence
SGGQDS

SEQ ID NO: 77266 - protein, 7 aa, Artificial sequence
  Protein classification predicting sequence
GICYGMQ

SEQ ID NO: 77267 - protein, 6 aa, Artificial sequence
  Protein classification predicting sequence
CYGMQL

SEQ ID NO: 77268 - protein, 5 aa, Artificial sequence
  Protein classification predicting sequence
QYHPE

SEQ ID NO: 77269 - protein, 6 aa, Artificial sequence
  Protein classification predicting sequence
LGICYG

SEQ ID NO: 77270 - protein, 8 aa, Artificial sequence
  Protein classification predicting sequence
LGICYGMQ

SEQ ID NO: 77271 - protein, 7 aa, Artificial sequence
  Protein classification predicting sequence
GYAELLT

SEQ ID NO: 77272 - protein, 8 aa, Artificial sequence
  Protein classification predicting sequence
GLSGGVDS

SEQ ID NO: 77273 - protein, 7 aa, Artificial sequence
  Protein classification predicting sequence
GVQYHPE

SEQ ID NO: 77274 - protein, 9 aa, Artificial sequence
  Protein classification predicting sequence
LGICYGMQL

SEQ ID NO: 77275 - protein, 7 aa, Artificial sequence
  Protein classification predicting sequence
QVEIARK

SEQ ID NO: 77276 - protein, 6 aa, Artificial sequence
  Protein classification predicting sequence
TFENVQ

SEQ ID NO: 77277 - protein, 6 aa, Artificial sequence
  Protein classification predicting sequence
GVVSSL

SEQ ID NO: 77278 - protein, 6 aa, Artificial sequence
  Protein classification predicting sequence
RSDILA

SEQ ID NO: 77279 - protein, 6 aa, Artificial sequence
  Protein classification predicting sequence
YLFDDF

SEQ ID NO: 77280 - protein, 6 aa, Artificial sequence
  Protein classification predicting sequence
DAAVVR

SEQ ID NO: 77281 - protein, 6 aa, Artificial sequence
  Protein classification predicting sequence
NTIIKP

SEQ ID NO: 77282 - protein, 6 aa, Artificial sequence
  Protein classification predicting sequence
KISVRI

SEQ ID NO: 77283 - protein, 6 aa, Artificial sequence
  Protein classification predicting sequence
EEFSLM

SEQ ID NO: 77284 - protein, 6 aa, Artificial sequence
  Protein classification predicting sequence
ATIQVI

SEQ ID NO: 77285 - protein, 7 aa, Artificial sequence
  Protein classification predicting sequence
GLDVRSR

SEQ ID NO: 77286 - protein, 6 aa, Artificial sequence
  Protein classification predicting sequence
GKMFDG

SEQ ID NO: 77287 - protein, 7 aa, Artificial sequence
  Protein classification predicting sequence
ALSRPLI

SEQ ID NO: 77288 - protein, 6 aa, Artificial sequence
  Protein classification predicting sequence
VIDQFK

SEQ ID NO: 77289 - protein, 6 aa, Artificial sequence
  Protein classification predicting sequence
PGISPY

SEQ ID NO: 77290 - protein, 6 aa, Artificial sequence
  Protein classification predicting sequence
GRLDLV

SEQ ID NO: 77291 - protein, 6 aa, Artificial sequence
  Protein classification predicting sequence
KWINAT

SEQ ID NO: 77292 - protein, 6 aa, Artificial sequence
  Protein classification predicting sequence
DFNKGN

SEQ ID NO: 77293 - protein, 7 aa, Artificial sequence
  Protein classification predicting sequence
KQGDTFV

SEQ ID NO: 77294 - protein, 6 aa, Artificial sequence
  Protein classification predicting sequence
DTRKLT

SEQ ID NO: 77295 - protein, 6 aa, Artificial sequence
  Protein classification predicting sequence
LYQGRW

SEQ ID NO: 77296 - protein, 5 aa, Artificial sequence
  Protein classification predicting sequence
EAHYR

SEQ ID NO: 77297 - protein, 8 aa, Artificial sequence
  Protein classification predicting sequence
SGGQDSTL

SEQ ID NO: 77298 - protein, 7 aa, Artificial sequence
  Protein classification predicting sequence
LSGGLDS

SEQ ID NO: 77299 - protein, 6 aa, Artificial sequence
  Protein classification predicting sequence
LTVNIK

SEQ ID NO: 77300 - protein, 6 aa, Artificial sequence
  Protein classification predicting sequence
VQYHPE

SEQ ID NO: 77301 - protein, 7 aa, Artificial sequence
  Protein classification predicting sequence
LTEAGLL

SEQ ID NO: 77302 - protein, 7 aa, Artificial sequence
  Protein classification predicting sequence
EIVRDSD

SEQ ID NO: 77303 - protein, 8 aa, Artificial sequence
  Protein classification predicting sequence
TVVLASKG

SEQ ID NO: 77304 - protein, 6 aa, Artificial sequence
  Protein classification predicting sequence
GIPTVG

SEQ ID NO: 77305 - protein, 6 aa, Artificial sequence
  Protein classification predicting sequence
GVPTVG

SEQ ID NO: 77306 - protein, 6 aa, Artificial sequence
  Protein classification predicting sequence
GIPYTG

SEQ ID NO: 77307 - protein, 6 aa, Artificial sequence
  Protein classification predicting sequence
GLIENV

SEQ ID NO: 77308 - protein, 6 aa, Artificial sequence
  Protein classification predicting sequence
GIAEGC

SEQ ID NO: 77309 - protein, 6 aa, Artificial sequence
  Protein classification predicting sequence
IGGETA

SEQ ID NO: 77310 - protein, 6 aa, Artificial sequence
  Protein classification predicting sequence
RKDEGD

SEQ ID NO: 77311 - protein, 6 aa, Artificial sequence
  Protein classification predicting sequence
GEADQV

SEQ ID NO: 77312 - protein, 6 aa, Artificial sequence
  Protein classification predicting sequence
GMSSLA

SEQ ID NO: 77313 - protein, 6 aa, Artificial sequence
  Protein classification predicting sequence
MIRVGN

SEQ ID NO: 77314 - protein, 8 aa, Artificial sequence
  Protein classification predicting sequence
LEELAPQK

SEQ ID NO: 77315 - protein, 7 aa, Artificial sequence
  Protein classification predicting sequence
HLLPSGI

SEQ ID NO: 77316 - protein, 7 aa, Artificial sequence
  Protein classification predicting sequence
AIEDKKR

SEQ ID NO: 77317 - protein, 6 aa, Artificial sequence
  Protein classification predicting sequence
ASVVVV

SEQ ID NO: 77318 - protein, 6 aa, Artificial sequence
  Protein classification predicting sequence
MIADTT

SEQ ID NO: 77319 - protein, 6 aa, Artificial sequence
  Protein classification predicting sequence
INPTPA

SEQ ID NO: 77320 - protein, 6 aa, Artificial sequence
  Protein classification predicting sequence
TTGRGI

SEQ ID NO: 77321 - protein, 6 aa, Artificial sequence
  Protein classification predicting sequence
GVVSGI

SEQ ID NO: 77322 - protein, 6 aa, Artificial sequence
  Protein classification predicting sequence
PYEGGK

SEQ ID NO: 77323 - protein, 5 aa, Artificial sequence
  Protein classification predicting sequence
HYGNC

SEQ ID NO: 77324 - protein, 8 aa, Artificial sequence
  Protein classification predicting sequence
QPGDAVLL

SEQ ID NO: 77325 - protein, 7 aa, Artificial sequence
  Protein classification predicting sequence
LEGVDGI

SEQ ID NO: 77326 - protein, 5 aa, Artificial sequence
  Protein classification predicting sequence
QLTCI

SEQ ID NO: 77327 - protein, 6 aa, Artificial sequence
  Protein classification predicting sequence
QLVNYY

SEQ ID NO: 77328 - protein, 6 aa, Artificial sequence
  Protein classification predicting sequence
DVDMFH

SEQ ID NO: 77329 - protein, 7 aa, Artificial sequence
  Protein classification predicting sequence
DGTPFEG

SEQ ID NO: 77330 - protein, 7 aa, Artificial sequence
  Protein classification predicting sequence
KGYLNNP

SEQ ID NO: 77331 - protein, 6 aa, Artificial sequence
  Protein classification predicting sequence
IFRSKL

SEQ ID NO: 77332 - protein, 5 aa, Artificial sequence
  Protein classification predicting sequence
MPHPE

SEQ ID NO: 77333 - protein, 6 aa, Artificial sequence
  Protein classification predicting sequence
TLKIID

SEQ ID NO: 77334 - protein, 6 aa, Artificial sequence
  Protein classification predicting sequence
LTDFQK

SEQ ID NO: 77335 - protein, 7 aa, Artificial sequence
  Protein classification predicting sequence
DVSGQIQ

SEQ ID NO: 77336 - protein, 6 aa, Artificial sequence
  Protein classification predicting sequence
DRNGDS

SEQ ID NO: 77337 - protein, 5 aa, Artificial sequence
  Protein classification predicting sequence
QCDNC

SEQ ID NO: 77338 - protein, 6 aa, Artificial sequence
  Protein classification predicting sequence
DPPILT

SEQ ID NO: 77339 - protein, 6 aa, Artificial sequence
  Protein classification predicting sequence
KDFGFE

SEQ ID NO: 77340 - protein, 5 aa, Artificial sequence
  Protein classification predicting sequence
DDHYM

SEQ ID NO: 77341 - protein, 4 aa, Artificial sequence
  Protein classification predicting sequence
WEWY

SEQ ID NO: 77342 - protein, 9 aa, Artificial sequence
  Protein classification predicting sequence
AEIEAALIE

SEQ ID NO: 77343 - protein, 6 aa, Artificial sequence
  Protein classification predicting sequence
LMKVAG

SEQ ID NO: 77344 - protein, 6 aa, Artificial sequence
  Protein classification predicting sequence
RQDVDS

SEQ ID NO: 77345 - protein, 6 aa, Artificial sequence
  Protein classification predicting sequence
VEDPDT

SEQ ID NO: 77346 - protein, 6 aa, Artificial sequence
  Protein classification predicting sequence
KDAGDD

SEQ ID NO: 77347 - protein, 7 aa, Artificial sequence
  Protein classification predicting sequence
YTSGSTG

SEQ ID NO: 77348 - protein, 6 aa, Artificial sequence
  Protein classification predicting sequence
QSKVII

SEQ ID NO: 77349 - protein, 5 aa, Artificial sequence
  Protein classification predicting sequence
GYYWI

SEQ ID NO: 77350 - protein, 6 aa, Artificial sequence
  Protein classification predicting sequence
KGDTVA

SEQ ID NO: 77351 - protein, 5 aa, Artificial sequence
  Protein classification predicting sequence
EHCPI

SEQ ID NO: 77352 - protein, 6 aa, Artificial sequence
  Protein classification predicting sequence
RFVLTY

SEQ ID NO: 77353 - protein, 6 aa, Artificial sequence
  Protein classification predicting sequence
QPAECE

SEQ ID NO: 77354 - protein, 6 aa, Artificial sequence
  Protein classification predicting sequence
PRLLNR

SEQ ID NO: 77355 - protein, 6 aa, Artificial sequence
  Protein classification predicting sequence
EEISFV

SEQ ID NO: 77356 - protein, 5 aa, Artificial sequence
  Protein classification predicting sequence
DNYHS

SEQ ID NO: 77357 - protein, 6 aa, Artificial sequence
  Protein classification predicting sequence
TTSDCE

SEQ ID NO: 77358 - protein, 5 aa, Artificial sequence
  Protein classification predicting sequence
MFASP

SEQ ID NO: 77359 - protein, 6 aa, Artificial sequence
  Protein classification predicting sequence
QEQFGF

SEQ ID NO: 77360 - protein, 6 aa, Artificial sequence
  Protein classification predicting sequence
TASDCE

SEQ ID NO: 77361 - protein, 5 aa, Artificial sequence
  Protein classification predicting sequence
AQRFN

SEQ ID NO: 77362 - protein, 6 aa, Artificial sequence
  Protein classification predicting sequence
REVAHL

SEQ ID NO: 77363 - protein, 7 aa, Artificial sequence
  Protein classification predicting sequence
DLTKPLE

SEQ ID NO: 77364 - protein, 6 aa, Artificial sequence
  Protein classification predicting sequence
LEREQH

SEQ ID NO: 77365 - protein, 6 aa, Artificial sequence
  Protein classification predicting sequence
VKVTNV

SEQ ID NO: 77366 - protein, 7 aa, Artificial sequence
  Protein classification predicting sequence
WREKIGL

SEQ ID NO: 77367 - protein, 7 aa, Artificial sequence
  Protein classification predicting sequence
AKGFVQL

SEQ ID NO: 77368 - protein, 6 aa, Artificial sequence
  Protein classification predicting sequence
PVALNG

SEQ ID NO: 77369 - protein, 6 aa, Artificial sequence
  Protein classification predicting sequence
DLREEF

SEQ ID NO: 77370 - protein, 7 aa, Artificial sequence
  Protein classification predicting sequence
GELAYDG

SEQ ID NO: 77371 - protein, 6 aa, Artificial sequence
  Protein classification predicting sequence
IKVIAP

SEQ ID NO: 77372 - protein, 6 aa, Artificial sequence
  Protein classification predicting sequence
RVTKVN

SEQ ID NO: 77373 - protein, 7 aa, Artificial sequence
  Protein classification predicting sequence
AKGFIQL

SEQ ID NO: 77374 - protein, 6 aa, Artificial sequence
  Protein classification predicting sequence
ALRLKL

SEQ ID NO: 77375 - protein, 6 aa, Artificial sequence
  Protein classification predicting sequence
SETSLY

SEQ ID NO: 77376 - protein, 6 aa, Artificial sequence
  Protein classification predicting sequence
LYPEAK

SEQ ID NO: 77377 - protein, 6 aa, Artificial sequence
  Protein classification predicting sequence
VNGEKM

SEQ ID NO: 77378 - protein, 9 aa, Artificial sequence
  Protein classification predicting sequence
AIHPGYGFL

SEQ ID NO: 77379 - protein, 8 aa, Artificial sequence
  Protein classification predicting sequence
RPRHIEVQ

SEQ ID NO: 77380 - protein, 12 aa, Artificial sequence
  Protein classification predicting sequence
NTRLQVEHPVTE

SEQ ID NO: 77381 - protein, 7 aa, Artificial sequence
  Protein classification predicting sequence
LALDTPV

SEQ ID NO: 77382 - protein, 8 aa, Artificial sequence
  Protein classification predicting sequence
SKNLLIEL

SEQ ID NO: 77383 - protein, 5 aa, Artificial sequence
  Protein classification predicting sequence
RHTEY

SEQ ID NO: 77384 - protein, 5 aa, Artificial sequence
  Protein classification predicting sequence
CIGWI

SEQ ID NO: 77385 - protein, 7 aa, Artificial sequence
  Protein classification predicting sequence
TTKELKE

SEQ ID NO: 77386 - protein, 6 aa, Artificial sequence
  Protein classification predicting sequence
MLTHRN

SEQ ID NO: 77387 - protein, 6 aa, Artificial sequence
  Protein classification predicting sequence
LFDKFI

SEQ ID NO: 77388 - protein, 6 aa, Artificial sequence
  Protein classification predicting sequence
MEITHV

SEQ ID NO: 77389 - protein, 6 aa, Artificial sequence
  Protein classification predicting sequence
QNIVGI

SEQ ID NO: 77390 - protein, 6 aa, Artificial sequence
  Protein classification predicting sequence
EAEGEA

SEQ ID NO: 77391 - protein, 6 aa, Artificial sequence
  Protein classification predicting sequence
FDFTHF

SEQ ID NO: 77392 - protein, 8 aa, Artificial sequence
  Protein classification predicting sequence
ILSAATAD

SEQ ID NO: 77393 - protein, 5 aa, Artificial sequence
  Protein classification predicting sequence
LHDGP

SEQ ID NO: 77394 - protein, 6 aa, Artificial sequence
  Protein classification predicting sequence
DKGTMK

SEQ ID NO: 77395 - protein, 6 aa, Artificial sequence
  Protein classification predicting sequence
IKAVQK

SEQ ID NO: 77396 - protein, 6 aa, Artificial sequence
  Protein classification predicting sequence
AFPAFS

SEQ ID NO: 77397 - protein, 6 aa, Artificial sequence
  Protein classification predicting sequence
DNIQEL

SEQ ID NO: 77398 - protein, 6 aa, Artificial sequence
  Protein classification predicting sequence
GSVVGE

SEQ ID NO: 77399 - protein, 7 aa, Artificial sequence
  Protein classification predicting sequence
DVESDGI

SEQ ID NO: 77400 - protein, 7 aa, Artificial sequence
  Protein classification predicting sequence
KGAMKGA

SEQ ID NO: 77401 - protein, 7 aa, Artificial sequence
  Protein classification predicting sequence
GYQEAIT

SEQ ID NO: 77402 - protein, 5 aa, Artificial sequence
  Protein classification predicting sequence
GMMHR

SEQ ID NO: 77403 - protein, 6 aa, Artificial sequence
  Protein classification predicting sequence
LTVPLA

SEQ ID NO: 77404 - protein, 7 aa, Artificial sequence
  Protein classification predicting sequence
EGISVRH

SEQ ID NO: 77405 - protein, 6 aa, Artificial sequence
  Protein classification predicting sequence
RHAAEF

SEQ ID NO: 77406 - protein, 6 aa, Artificial sequence
  Protein classification predicting sequence
ILIEEY

SEQ ID NO: 77407 - protein, 6 aa, Artificial sequence
  Protein classification predicting sequence
KYGDEV

SEQ ID NO: 77408 - protein, 6 aa, Artificial sequence
  Protein classification predicting sequence
VMVERY

SEQ ID NO: 77409 - protein, 7 aa, Artificial sequence
  Protein classification predicting sequence
QVMVERY

SEQ ID NO: 77410 - protein, 6 aa, Artificial sequence
  Protein classification predicting sequence
YEIDLF

SEQ ID NO: 77411 - protein, 6 aa, Artificial sequence
  Protein classification predicting sequence
LPVELP

SEQ ID NO: 77412 - protein, 8 aa, Artificial sequence
  Protein classification predicting sequence
ATMIETAL

SEQ ID NO: 77413 - protein, 6 aa, Artificial sequence
  Protein classification predicting sequence
VALGVT

SEQ ID NO: 77414 - protein, 6 aa, Artificial sequence
  Protein classification predicting sequence
CYKVDE

SEQ ID NO: 77415 - protein, 6 aa, Artificial sequence
  Protein classification predicting sequence
RLIEYA

SEQ ID NO: 77416 - protein, 7 aa, Artificial sequence
  Protein classification predicting sequence
YKKNPKL

SEQ ID NO: 77417 - protein, 6 aa, Artificial sequence
  Protein classification predicting sequence
GEFPLE

SEQ ID NO: 77418 - protein, 6 aa, Artificial sequence
  Protein classification predicting sequence
IINAYG

SEQ ID NO: 77419 - protein, 6 aa, Artificial sequence
  Protein classification predicting sequence
VFSGIK

SEQ ID NO: 77420 - protein, 6 aa, Artificial sequence
  Protein classification predicting sequence
KIIAEY

SEQ ID NO: 77421 - protein, 7 aa, Artificial sequence
  Protein classification predicting sequence
PGVGISI

SEQ ID NO: 77422 - protein, 6 aa, Artificial sequence
  Protein classification predicting sequence
FTLLTK

SEQ ID NO: 77423 - protein, 5 aa, Artificial sequence
  Protein classification predicting sequence
PITPH

SEQ ID NO: 77424 - protein, 6 aa, Artificial sequence
  Protein classification predicting sequence
FRFDKG

SEQ ID NO: 77425 - protein, 6 aa, Artificial sequence
  Protein classification predicting sequence
KISSRI

SEQ ID NO: 77426 - protein, 5 aa, Artificial sequence
  Protein classification predicting sequence
MVPFK

SEQ ID NO: 77427 - protein, 6 aa, Artificial sequence
  Protein classification predicting sequence
MLGGKF

SEQ ID NO: 77428 - protein, 6 aa, Artificial sequence
  Protein classification predicting sequence
LGVRIL

SEQ ID NO: 77429 - protein, 7 aa, Artificial sequence
  Protein classification predicting sequence
IAGAKKV

SEQ ID NO: 77430 - protein, 6 aa, Artificial sequence
  Protein classification predicting sequence
FKIKKA

SEQ ID NO: 77431 - protein, 7 aa, Artificial sequence
  Protein classification predicting sequence
TQNVRTI

SEQ ID NO: 77432 - protein, 6 aa, Artificial sequence
  Protein classification predicting sequence
ARRGLR

SEQ ID NO: 77433 - protein, 6 aa, Artificial sequence
  Protein classification predicting sequence
ATQFAL

SEQ ID NO: 77434 - protein, 6 aa, Artificial sequence
  Protein classification predicting sequence
DFLGRV

SEQ ID NO: 77435 - protein, 6 aa, Artificial sequence
  Protein classification predicting sequence
VYSSPH

SEQ ID NO: 77436 - protein, 6 aa, Artificial sequence
  Protein classification predicting sequence
ITALGY

SEQ ID NO: 77437 - protein, 6 aa, Artificial sequence
  Protein classification predicting sequence
KALFNR

SEQ ID NO: 77438 - protein, 5 aa, Artificial sequence
  Protein classification predicting sequence
TGAIM

SEQ ID NO: 77439 - protein, 6 aa, Artificial sequence
  Protein classification predicting sequence
KYADLS

SEQ ID NO: 77440 - protein, 5 aa, Artificial sequence
  Protein classification predicting sequence
KTSGH

SEQ ID NO: 77441 - protein, 5 aa, Artificial sequence
  Protein classification predicting sequence
GDHIW

SEQ ID NO: 77442 - protein, 6 aa, Artificial sequence
  Protein classification predicting sequence
FQVAPA

SEQ ID NO: 77443 - protein, 5 aa, Artificial sequence
  Protein classification predicting sequence
YVWID

SEQ ID NO: 77444 - protein, 6 aa, Artificial sequence
  Protein classification predicting sequence
KYEEGN

SEQ ID NO: 77445 - protein, 6 aa, Artificial sequence
  Protein classification predicting sequence
AVIRVP

SEQ ID NO: 77446 - protein, 6 aa, Artificial sequence
  Protein classification predicting sequence
TVDGAK

SEQ ID NO: 77447 - protein, 6 aa, Artificial sequence
  Protein classification predicting sequence
FSESWL

SEQ ID NO: 77448 - protein, 6 aa, Artificial sequence
  Protein classification predicting sequence
LPSYND

SEQ ID NO: 77449 - protein, 6 aa, Artificial sequence
  Protein classification predicting sequence
NFAVVV

SEQ ID NO: 77450 - protein, 6 aa, Artificial sequence
  Protein classification predicting sequence
KVFKDT

SEQ ID NO: 77451 - protein, 7 aa, Artificial sequence
  Protein classification predicting sequence
LGTPLPW

SEQ ID NO: 77452 - protein, 6 aa, Artificial sequence
  Protein classification predicting sequence
ERGESF

SEQ ID NO: 77453 - protein, 6 aa, Artificial sequence
  Protein classification predicting sequence
QFDADT

SEQ ID NO: 77454 - protein, 5 aa, Artificial sequence
  Protein classification predicting sequence
KSFRN

SEQ ID NO: 77455 - protein, 6 aa, Artificial sequence
  Protein classification predicting sequence
GGAGVF

SEQ ID NO: 77456 - protein, 6 aa, Artificial sequence
  Protein classification predicting sequence
NLAAGG

SEQ ID NO: 77457 - protein, 6 aa, Artificial sequence
  Protein classification predicting sequence
GELSVK

SEQ ID NO: 77458 - protein, 7 aa, Artificial sequence
  Protein classification predicting sequence
ARVVAKT

SEQ ID NO: 77459 - protein, 5 aa, Artificial sequence
  Protein classification predicting sequence
CTRIG

SEQ ID NO: 77460 - protein, 6 aa, Artificial sequence
  Protein classification predicting sequence
PTLKAK

SEQ ID NO: 77461 - protein, 7 aa, Artificial sequence
  Protein classification predicting sequence
IKIAKDT

SEQ ID NO: 77462 - protein, 7 aa, Artificial sequence
  Protein classification predicting sequence
EGGVAAG

SEQ ID NO: 77463 - protein, 6 aa, Artificial sequence
  Protein classification predicting sequence
SVVFGG

SEQ ID NO: 77464 - protein, 7 aa, Artificial sequence
  Protein classification predicting sequence
IYVVDNG

SEQ ID NO: 77465 - protein, 6 aa, Artificial sequence
  Protein classification predicting sequence
MTAHTP

SEQ ID NO: 77466 - protein, 6 aa, Artificial sequence
  Protein classification predicting sequence
LVQGTI

SEQ ID NO: 77467 - protein, 5 aa, Artificial sequence
  Protein classification predicting sequence
VWMSH

SEQ ID NO: 77468 - protein, 7 aa, Artificial sequence
  Protein classification predicting sequence
LVDASDL

SEQ ID NO: 77469 - protein, 4 aa, Artificial sequence
  Protein classification predicting sequence
WMSH

SEQ ID NO: 77470 - protein, 6 aa, Artificial sequence
  Protein classification predicting sequence
REYGKA

SEQ ID NO: 77471 - protein, 6 aa, Artificial sequence
  Protein classification predicting sequence
GEITEE

SEQ ID NO: 77472 - protein, 6 aa, Artificial sequence
  Protein classification predicting sequence
LIDICG

SEQ ID NO: 77473 - protein, 7 aa, Artificial sequence
  Protein classification predicting sequence
PRGEILI

SEQ ID NO: 77474 - protein, 5 aa, Artificial sequence
  Protein classification predicting sequence
CTEDQ

SEQ ID NO: 77475 - protein, 6 aa, Artificial sequence
  Protein classification predicting sequence
FEGTPA

SEQ ID NO: 77476 - protein, 6 aa, Artificial sequence
  Protein classification predicting sequence
FLPLAH

SEQ ID NO: 77477 - protein, 7 aa, Artificial sequence
  Protein classification predicting sequence
AQAIHPG

SEQ ID NO: 77478 - protein, 7 aa, Artificial sequence
  Protein classification predicting sequence
DVTIEPS

SEQ ID NO: 77479 - protein, 6 aa, Artificial sequence
  Protein classification predicting sequence
GLSTML

SEQ ID NO: 77480 - protein, 5 aa, Artificial sequence
  Protein classification predicting sequence
PNDFR

SEQ ID NO: 77481 - protein, 6 aa, Artificial sequence
  Protein classification predicting sequence
IMPGHI

SEQ ID NO: 77482 - protein, 6 aa, Artificial sequence
  Protein classification predicting sequence
GIAEVL

SEQ ID NO: 77483 - protein, 6 aa, Artificial sequence
  Protein classification predicting sequence
LRSTII

SEQ ID NO: 77484 - protein, 6 aa, Artificial sequence
  Protein classification predicting sequence
FLDIET

SEQ ID NO: 77485 - protein, 7 aa, Artificial sequence
  Protein classification predicting sequence
LVAGLKK

SEQ ID NO: 77486 - protein, 5 aa, Artificial sequence
  Protein classification predicting sequence
GWPDK

SEQ ID NO: 77487 - protein, 7 aa, Artificial sequence
  Protein classification predicting sequence
NAKLGQG

SEQ ID NO: 77488 - protein, 6 aa, Artificial sequence
  Protein classification predicting sequence
DTSYLI

SEQ ID NO: 77489 - protein, 6 aa, Artificial sequence
  Protein classification predicting sequence
FVGIKG

SEQ ID NO: 77490 - protein, 7 aa, Artificial sequence
  Protein classification predicting sequence
IFDSQIK

SEQ ID NO: 77491 - protein, 6 aa, Artificial sequence
  Protein classification predicting sequence
TISGLR

SEQ ID NO: 77492 - protein, 5 aa, Artificial sequence
  Protein classification predicting sequence
HIGHA

SEQ ID NO: 77493 - protein, 6 aa, Artificial sequence
  Protein classification predicting sequence
LAAQHL

SEQ ID NO: 77494 - protein, 6 aa, Artificial sequence
  Protein classification predicting sequence
HDPETN

SEQ ID NO: 77495 - protein, 5 aa, Artificial sequence
  Protein classification predicting sequence
PKPHW

SEQ ID NO: 77496 - protein, 6 aa, Artificial sequence
  Protein classification predicting sequence
ASIREF

SEQ ID NO: 77497 - protein, 7 aa, Artificial sequence
  Protein classification predicting sequence
AKALVSR

SEQ ID NO: 77498 - protein, 6 aa, Artificial sequence
  Protein classification predicting sequence
LQNLLM

SEQ ID NO: 77499 - protein, 4 aa, Artificial sequence
  Protein classification predicting sequence
SCWY

SEQ ID NO: 77500 - protein, 5 aa, Artificial sequence
  Protein classification predicting sequence
HERYL

SEQ ID NO: 77501 - protein, 7 aa, Artificial sequence
  Protein classification predicting sequence
APVGTSF

SEQ ID NO: 77502 - protein, 6 aa, Artificial sequence
  Protein classification predicting sequence
MPADEL

SEQ ID NO: 77503 - protein, 6 aa, Artificial sequence
  Protein classification predicting sequence
TQYVGE

SEQ ID NO: 77504 - protein, 8 aa, Artificial sequence
  Protein classification predicting sequence
AAAAAGVP

SEQ ID NO: 77505 - protein, 6 aa, Artificial sequence
  Protein classification predicting sequence
VVVLGT

SEQ ID NO: 77506 - protein, 7 aa, Artificial sequence
  Protein classification predicting sequence
LCSAREL

SEQ ID NO: 77507 - protein, 6 aa, Artificial sequence
  Protein classification predicting sequence
NRADAL

SEQ ID NO: 77508 - protein, 6 aa, Artificial sequence
  Protein classification predicting sequence
SAGRDT

SEQ ID NO: 77509 - protein, 8 aa, Artificial sequence
  Protein classification predicting sequence
AAADAARD

SEQ ID NO: 77510 - protein, 6 aa, Artificial sequence
  Protein classification predicting sequence
PVDLYI

SEQ ID NO: 77511 - protein, 6 aa, Artificial sequence
  Protein classification predicting sequence
YYVLEM

SEQ ID NO: 77512 - protein, 6 aa, Artificial sequence
  Protein classification predicting sequence
GVVFID

SEQ ID NO: 77513 - protein, 6 aa, Artificial sequence
  Protein classification predicting sequence
ALSGLQ

SEQ ID NO: 77514 - protein, 6 aa, Artificial sequence
  Protein classification predicting sequence
ALTKSG

SEQ ID NO: 77515 - protein, 6 aa, Artificial sequence
  Protein classification predicting sequence
AMQLAR

SEQ ID NO: 77516 - protein, 6 aa, Artificial sequence
  Protein classification predicting sequence
KYGERV

SEQ ID NO: 77517 - protein, 5 aa, Artificial sequence
  Protein classification predicting sequence
RPYMG

SEQ ID NO: 77518 - protein, 6 aa, Artificial sequence
  Protein classification predicting sequence
DMGVTH

SEQ ID NO: 77519 - protein, 7 aa, Artificial sequence
  Protein classification predicting sequence
YRAAKLR

SEQ ID NO: 77520 - protein, 6 aa, Artificial sequence
  Protein classification predicting sequence
MALGRV

SEQ ID NO: 77521 - protein, 6 aa, Artificial sequence
  Protein classification predicting sequence
DYSAPN

SEQ ID NO: 77522 - protein, 7 aa, Artificial sequence
  Protein classification predicting sequence
GLVSTVC

SEQ ID NO: 77523 - protein, 6 aa, Artificial sequence
  Protein classification predicting sequence
YFQTKR

SEQ ID NO: 77524 - protein, 6 aa, Artificial sequence
  Protein classification predicting sequence
LLGERC

SEQ ID NO: 77525 - protein, 6 aa, Artificial sequence
  Protein classification predicting sequence
YTGFAF

SEQ ID NO: 77526 - protein, 6 aa, Artificial sequence
  Protein classification predicting sequence
GGLRTA

SEQ ID NO: 77527 - protein, 6 aa, Artificial sequence
  Protein classification predicting sequence
DRTHLI

SEQ ID NO: 77528 - protein, 5 aa, Artificial sequence
  Protein classification predicting sequence
RMNSW

SEQ ID NO: 77529 - protein, 6 aa, Artificial sequence
  Protein classification predicting sequence
DPFGLR

SEQ ID NO: 77530 - protein, 6 aa, Artificial sequence
  Protein classification predicting sequence
NYPKDI

SEQ ID NO: 77531 - protein, 6 aa, Artificial sequence
  Protein classification predicting sequence
AYAINP

SEQ ID NO: 77532 - protein, 7 aa, Artificial sequence
  Protein classification predicting sequence
KSDANLK

SEQ ID NO: 77533 - protein, 6 aa, Artificial sequence
  Protein classification predicting sequence
IHRGVV

SEQ ID NO: 77534 - protein, 5 aa, Artificial sequence
  Protein classification predicting sequence
MNDDF

SEQ ID NO: 77535 - protein, 6 aa, Artificial sequence
  Protein classification predicting sequence
ARRIAF

SEQ ID NO: 77536 - protein, 6 aa, Artificial sequence
  Protein classification predicting sequence
FDDFWK

SEQ ID NO: 77537 - protein, 7 aa, Artificial sequence
  Protein classification predicting sequence
SGTTGKP

SEQ ID NO: 77538 - protein, 6 aa, Artificial sequence
  Protein classification predicting sequence
PAPFAA

SEQ ID NO: 77539 - protein, 6 aa, Artificial sequence
  Protein classification predicting sequence
RHDLGR

SEQ ID NO: 77540 - protein, 6 aa, Artificial sequence
  Protein classification predicting sequence
LSTSPE

SEQ ID NO: 77541 - protein, 6 aa, Artificial sequence
  Protein classification predicting sequence
WRIIQR

SEQ ID NO: 77542 - protein, 6 aa, Artificial sequence
  Protein classification predicting sequence
LNLRSE

SEQ ID NO: 77543 - protein, 5 aa, Artificial sequence
  Protein classification predicting sequence
FPIEL

SEQ ID NO: 77544 - protein, 5 aa, Artificial sequence
  Protein classification predicting sequence
LHVGH

SEQ ID NO: 77545 - protein, 8 aa, Artificial sequence
  Protein classification predicting sequence
LDEDVEKL

SEQ ID NO: 77546 - protein, 7 aa, Artificial sequence
  Protein classification predicting sequence
LSAEERP

SEQ ID NO: 77547 - protein, 7 aa, Artificial sequence
  Protein classification predicting sequence
ANRGEIA

SEQ ID NO: 77548 - protein, 7 aa, Artificial sequence
  Protein classification predicting sequence
HPGYGFL

SEQ ID NO: 77549 - protein, 6 aa, Artificial sequence
  Protein classification predicting sequence
NTIPGF

SEQ ID NO: 77550 - protein, 6 aa, Artificial sequence
  Protein classification predicting sequence
NKRHAA

SEQ ID NO: 77551 - protein, 6 aa, Artificial sequence
  Protein classification predicting sequence
VNVRLG

SEQ ID NO: 77552 - protein, 7 aa, Artificial sequence
  Protein classification predicting sequence
QVVVANI

SEQ ID NO: 77553 - protein, 6 aa, Artificial sequence
  Protein classification predicting sequence
RALMQE

SEQ ID NO: 77554 - protein, 6 aa, Artificial sequence
  Protein classification predicting sequence
GFDLCI

SEQ ID NO: 77555 - protein, 5 aa, Artificial sequence
  Protein classification predicting sequence
YRQFH

SEQ ID NO: 77556 - protein, 7 aa, Artificial sequence
  Protein classification predicting sequence
ADGLSFE

SEQ ID NO: 77557 - protein, 6 aa, Artificial sequence
  Protein classification predicting sequence
LWDAGI

SEQ ID NO: 77558 - protein, 6 aa, Artificial sequence
  Protein classification predicting sequence
ELPLVL

SEQ ID NO: 77559 - protein, 7 aa, Artificial sequence
  Protein classification predicting sequence
GFEKIVV

SEQ ID NO: 77560 - protein, 6 aa, Artificial sequence
  Protein classification predicting sequence
GDIVTN

SEQ ID NO: 77561 - protein, 7 aa, Artificial sequence
  Protein classification predicting sequence
GTATETK

SEQ ID NO: 77562 - protein, 5 aa, Artificial sequence
  Protein classification predicting sequence
WKAAQ

SEQ ID NO: 77563 - protein, 6 aa, Artificial sequence
  Protein classification predicting sequence
FAISDG

SEQ ID NO: 77564 - protein, 6 aa, Artificial sequence
  Protein classification predicting sequence
AKLANK

SEQ ID NO: 77565 - protein, 6 aa, Artificial sequence
  Protein classification predicting sequence
IGQMVN

SEQ ID NO: 77566 - protein, 5 aa, Artificial sequence
  Protein classification predicting sequence
KNAYA

SEQ ID NO: 77567 - protein, 6 aa, Artificial sequence
  Protein classification predicting sequence
AAQTCF

SEQ ID NO: 77568 - protein, 6 aa, Artificial sequence
  Protein classification predicting sequence
ILLYQT

SEQ ID NO: 77569 - protein, 6 aa, Artificial sequence
  Protein classification predicting sequence
RRDLGG

SEQ ID NO: 77570 - protein, 7 aa, Artificial sequence
  Protein classification predicting sequence
RNAASGS

SEQ ID NO: 77571 - protein, 7 aa, Artificial sequence
  Protein classification predicting sequence
VLNRLKQ

SEQ ID NO: 77572 - protein, 6 aa, Artificial sequence
  Protein classification predicting sequence
SPVLVF

SEQ ID NO: 77573 - protein, 6 aa, Artificial sequence
  Protein classification predicting sequence
GVDPAL

SEQ ID NO: 77574 - protein, 6 aa, Artificial sequence
  Protein classification predicting sequence
ELQQLK

SEQ ID NO: 77575 - protein, 6 aa, Artificial sequence
  Protein classification predicting sequence
THHNAL

SEQ ID NO: 77576 - protein, 6 aa, Artificial sequence
  Protein classification predicting sequence
NVLRSV

SEQ ID NO: 77577 - protein, 7 aa, Artificial sequence
  Protein classification predicting sequence
LDIKRRE

SEQ ID NO: 77578 - protein, 6 aa, Artificial sequence
  Protein classification predicting sequence
TFFEML

SEQ ID NO: 77579 - protein, 6 aa, Artificial sequence
  Protein classification predicting sequence
NPKEAG

SEQ ID NO: 77580 - protein, 7 aa, Artificial sequence
  Protein classification predicting sequence
KRIEELT

SEQ ID NO: 77581 - protein, 6 aa, Artificial sequence
  Protein classification predicting sequence
DVVARY

SEQ ID NO: 77582 - protein, 5 aa, Artificial sequence
  Protein classification predicting sequence
PRYIN

SEQ ID NO: 77583 - protein, 6 aa, Artificial sequence
  Protein classification predicting sequence
ITEYPA

SEQ ID NO: 77584 - protein, 7 aa, Artificial sequence
  Protein classification predicting sequence
EYHDKRS

SEQ ID NO: 77585 - protein, 6 aa, Artificial sequence
  Protein classification predicting sequence
FTELGI

SEQ ID NO: 77586 - protein, 6 aa, Artificial sequence
  Protein classification predicting sequence
LKKFPT

SEQ ID NO: 77587 - protein, 5 aa, Artificial sequence
  Protein classification predicting sequence
GAPPH

SEQ ID NO: 77588 - protein, 7 aa, Artificial sequence
  Protein classification predicting sequence
ALLDEEL

SEQ ID NO: 77589 - protein, 7 aa, Artificial sequence
  Protein classification predicting sequence
QTAFEEA

SEQ ID NO: 77590 - protein, 6 aa, Artificial sequence
  Protein classification predicting sequence
SSPNIA

SEQ ID NO: 77591 - protein, 6 aa, Artificial sequence
  Protein classification predicting sequence
AVPRSE

SEQ ID NO: 77592 - protein, 6 aa, Artificial sequence
  Protein classification predicting sequence
VGNDQK

SEQ ID NO: 77593 - protein, 6 aa, Artificial sequence
  Protein classification predicting sequence
GIIKFD

SEQ ID NO: 77594 - protein, 6 aa, Artificial sequence
  Protein classification predicting sequence
YLGSLK

SEQ ID NO: 77595 - protein, 7 aa, Artificial sequence
  Protein classification predicting sequence
GERVIQG

SEQ ID NO: 77596 - protein, 7 aa, Artificial sequence
  Protein classification predicting sequence
RRQDEIG

SEQ ID NO: 77597 - protein, 6 aa, Artificial sequence
  Protein classification predicting sequence
FSFGDY

SEQ ID NO: 77598 - protein, 5 aa, Artificial sequence
  Protein classification predicting sequence
WQTET

SEQ ID NO: 77599 - protein, 12 aa, Artificial sequence
  Protein classification predicting sequence
LVANRGEIAVRV

SEQ ID NO: 77600 - protein, 6 aa, Artificial sequence
  Protein classification predicting sequence
RLQVEH

SEQ ID NO: 77601 - protein, 6 aa, Artificial sequence
  Protein classification predicting sequence
LVGKYV

SEQ ID NO: 77602 - protein, 6 aa, Artificial sequence
  Protein classification predicting sequence
CHHFKL

SEQ ID NO: 77603 - protein, 7 aa, Artificial sequence
  Protein classification predicting sequence
IAAAKEH

SEQ ID NO: 77604 - protein, 5 aa, Artificial sequence
  Protein classification predicting sequence
GTMNP

SEQ ID NO: 77605 - protein, 6 aa, Artificial sequence
  Protein classification predicting sequence
CRERNI

SEQ ID NO: 77606 - protein, 5 aa, Artificial sequence
  Protein classification predicting sequence
IPHIT

SEQ ID NO: 77607 - protein, 6 aa, Artificial sequence
  Protein classification predicting sequence
GLKNRV

SEQ ID NO: 77608 - protein, 7 aa, Artificial sequence
  Protein classification predicting sequence
SDDKVKA

SEQ ID NO: 77609 - protein, 6 aa, Artificial sequence
  Protein classification predicting sequence
PLAVTD

SEQ ID NO: 77610 - protein, 5 aa, Artificial sequence
  Protein classification predicting sequence
FQARR

SEQ ID NO: 77611 - protein, 6 aa, Artificial sequence
  Protein classification predicting sequence
VDIDAG

SEQ ID NO: 77612 - protein, 7 aa, Artificial sequence
  Protein classification predicting sequence
FADAGIP

SEQ ID NO: 77613 - protein, 6 aa, Artificial sequence
  Protein classification predicting sequence
VAEKNP

SEQ ID NO: 77614 - protein, 7 aa, Artificial sequence
  Protein classification predicting sequence
EAKELFS

SEQ ID NO: 77615 - protein, 6 aa, Artificial sequence
  Protein classification predicting sequence
AKVSFD

SEQ ID NO: 77616 - protein, 8 aa, Artificial sequence
  Protein classification predicting sequence
KVLVAEAV

SEQ ID NO: 77617 - protein, 7 aa, Artificial sequence
  Protein classification predicting sequence
RALEEGL

SEQ ID NO: 77618 - protein, 6 aa, Artificial sequence
  Protein classification predicting sequence
EGVKAF

SEQ ID NO: 77619 - protein, 6 aa, Artificial sequence
  Protein classification predicting sequence
TEAGFG

SEQ ID NO: 77620 - protein, 6 aa, Artificial sequence
  Protein classification predicting sequence
SAASKT

SEQ ID NO: 77621 - protein, 7 aa, Artificial sequence
  Protein classification predicting sequence
GDRVAIY

SEQ ID NO: 77622 - protein, 6 aa, Artificial sequence
  Protein classification predicting sequence
GHQILA

SEQ ID NO: 77623 - protein, 6 aa, Artificial sequence
  Protein classification predicting sequence
ERFIRT

SEQ ID NO: 77624 - protein, 7 aa, Artificial sequence
  Protein classification predicting sequence
IKRIEEL

SEQ ID NO: 77625 - protein, 6 aa, Artificial sequence
  Protein classification predicting sequence
VIRTEE

SEQ ID NO: 77626 - protein, 5 aa, Artificial sequence
  Protein classification predicting sequence
WKGSG

SEQ ID NO: 77627 - protein, 6 aa, Artificial sequence
  Protein classification predicting sequence
DIENVG

SEQ ID NO: 77628 - protein, 6 aa, Artificial sequence
  Protein classification predicting sequence
RRDAIR

SEQ ID NO: 77629 - protein, 6 aa, Artificial sequence
  Protein classification predicting sequence
LHDEGV

SEQ ID NO: 77630 - protein, 6 aa, Artificial sequence
  Protein classification predicting sequence
GGSQLE

SEQ ID NO: 77631 - protein, 7 aa, Artificial sequence
  Protein classification predicting sequence
EDYQILG

SEQ ID NO: 77632 - protein, 6 aa, Artificial sequence
  Protein classification predicting sequence
TGDIGL

SEQ ID NO: 77633 - protein, 6 aa, Artificial sequence
  Protein classification predicting sequence
TATAQT

SEQ ID NO: 77634 - protein, 6 aa, Artificial sequence
  Protein classification predicting sequence
EALTGK

SEQ ID NO: 77635 - protein, 5 aa, Artificial sequence
  Protein classification predicting sequence
WQAGA

SEQ ID NO: 77636 - protein, 6 aa, Artificial sequence
  Protein classification predicting sequence
GGVKVV

SEQ ID NO: 77637 - protein, 7 aa, Artificial sequence
  Protein classification predicting sequence
ACSRIGA

SEQ ID NO: 77638 - protein, 7 aa, Artificial sequence
  Protein classification predicting sequence
GTKVLVA

SEQ ID NO: 77639 - protein, 6 aa, Artificial sequence
  Protein classification predicting sequence
LQSAKN

SEQ ID NO: 77640 - protein, 6 aa, Artificial sequence
  Protein classification predicting sequence
AESVMR

SEQ ID NO: 77641 - protein, 5 aa, Artificial sequence
  Protein classification predicting sequence
WPGEV

SEQ ID NO: 77642 - protein, 6 aa, Artificial sequence
  Protein classification predicting sequence
AGARVE

SEQ ID NO: 77643 - protein, 8 aa, Artificial sequence
  Protein classification predicting sequence
FVPADPQR

SEQ ID NO: 77644 - protein, 6 aa, Artificial sequence
  Protein classification predicting sequence
ADEIRD

SEQ ID NO: 77645 - protein, 6 aa, Artificial sequence
  Protein classification predicting sequence
DFDALN

SEQ ID NO: 77646 - protein, 6 aa, Artificial sequence
  Protein classification predicting sequence
TTDFSE

SEQ ID NO: 77647 - protein, 5 aa, Artificial sequence
  Protein classification predicting sequence
KPPAT

SEQ ID NO: 77648 - protein, 6 aa, Artificial sequence
  Protein classification predicting sequence
AYELDG

SEQ ID NO: 77649 - protein, 6 aa, Artificial sequence
  Protein classification predicting sequence
QQQEIS

SEQ ID NO: 77650 - protein, 7 aa, Artificial sequence
  Protein classification predicting sequence
VTYVPKL

SEQ ID NO: 77651 - protein, 7 aa, Artificial sequence
  Protein classification predicting sequence
DKMYKII

SEQ ID NO: 77652 - protein, 6 aa, Artificial sequence
  Protein classification predicting sequence
NHQEIE

SEQ ID NO: 77653 - protein, 6 aa, Artificial sequence
  Protein classification predicting sequence
VFKLAK

SEQ ID NO: 77654 - protein, 6 aa, Artificial sequence
  Protein classification predicting sequence
TSGGRV

SEQ ID NO: 77655 - protein, 6 aa, Artificial sequence
  Protein classification predicting sequence
SENMRL

SEQ ID NO: 77656 - protein, 6 aa, Artificial sequence
  Protein classification predicting sequence
NGGLVK

SEQ ID NO: 77657 - protein, 6 aa, Artificial sequence
  Protein classification predicting sequence
PQAIFK

SEQ ID NO: 77658 - protein, 7 aa, Artificial sequence
  Protein classification predicting sequence
EIARKVG

SEQ ID NO: 77659 - protein, 6 aa, Artificial sequence
  Protein classification predicting sequence
LQETFR

SEQ ID NO: 77660 - protein, 6 aa, Artificial sequence
  Protein classification predicting sequence
FDPVYQ

SEQ ID NO: 77661 - protein, 6 aa, Artificial sequence
  Protein classification predicting sequence
VKGVDL

SEQ ID NO: 77662 - protein, 5 aa, Artificial sequence
  Protein classification predicting sequence
PLYFL

SEQ ID NO: 77663 - protein, 6 aa, Artificial sequence
  Protein classification predicting sequence
ADIDTR

SEQ ID NO: 77664 - protein, 6 aa, Artificial sequence
  Protein classification predicting sequence
IETPVL

SEQ ID NO: 77665 - protein, 7 aa, Artificial sequence
  Protein classification predicting sequence
VDVSDLL

SEQ ID NO: 77666 - protein, 6 aa, Artificial sequence
  Protein classification predicting sequence
ARLGSS

SEQ ID NO: 77667 - protein, 6 aa, Artificial sequence
  Protein classification predicting sequence
STILGP

SEQ ID NO: 77668 - protein, 7 aa, Artificial sequence
  Protein classification predicting sequence
AGMTSGV

SEQ ID NO: 77669 - protein, 7 aa, Artificial sequence
  Protein classification predicting sequence
LGHTVAE

SEQ ID NO: 77670 - protein, 7 aa, Artificial sequence
  Protein classification predicting sequence
FKGYLKD

SEQ ID NO: 77671 - protein, 5 aa, Artificial sequence
  Protein classification predicting sequence
FRYHD

SEQ ID NO: 77672 - protein, 7 aa, Artificial sequence
  Protein classification predicting sequence
FNKITSK

SEQ ID NO: 77673 - protein, 6 aa, Artificial sequence
  Protein classification predicting sequence
RDVFSM

SEQ ID NO: 77674 - protein, 6 aa, Artificial sequence
  Protein classification predicting sequence
AIIDSL

SEQ ID NO: 77675 - protein, 6 aa, Artificial sequence
  Protein classification predicting sequence
FPTDYP

SEQ ID NO: 77676 - protein, 8 aa, Artificial sequence
  Protein classification predicting sequence
GKELLPEL

SEQ ID NO: 77677 - protein, 7 aa, Artificial sequence
  Protein classification predicting sequence
TIKQILL

SEQ ID NO: 77678 - protein, 6 aa, Artificial sequence
  Protein classification predicting sequence
IDIVRE

SEQ ID NO: 77679 - protein, 5 aa, Artificial sequence
  Protein classification predicting sequence
YYEYG

SEQ ID NO: 77680 - protein, 6 aa, Artificial sequence
  Protein classification predicting sequence
LSDNQI

SEQ ID NO: 77681 - protein, 6 aa, Artificial sequence
  Protein classification predicting sequence
YHIALD

SEQ ID NO: 77682 - protein, 7 aa, Artificial sequence
  Protein classification predicting sequence
MELKQFI

SEQ ID NO: 77683 - protein, 6 aa, Artificial sequence
  Protein classification predicting sequence
PKPLFG

SEQ ID NO: 77684 - protein, 6 aa, Artificial sequence
  Protein classification predicting sequence
YAEELL

SEQ ID NO: 77685 - protein, 6 aa, Artificial sequence
  Protein classification predicting sequence
LFINHL

SEQ ID NO: 77686 - protein, 6 aa, Artificial sequence
  Protein classification predicting sequence
LKFICR

SEQ ID NO: 77687 - protein, 6 aa, Artificial sequence
  Protein classification predicting sequence
SDALLR

SEQ ID NO: 77688 - protein, 6 aa, Artificial sequence
  Protein classification predicting sequence
LWQGAG

SEQ ID NO: 77689 - protein, 6 aa, Artificial sequence
  Protein classification predicting sequence
SVEKAY

SEQ ID NO: 77690 - protein, 5 aa, Artificial sequence
  Protein classification predicting sequence
VFRRD

SEQ ID NO: 77691 - protein, 7 aa, Artificial sequence
  Protein classification predicting sequence
IKYGINN

SEQ ID NO: 77692 - protein, 7 aa, Artificial sequence
  Protein classification predicting sequence
VAEGIAA

SEQ ID NO: 77693 - protein, 6 aa, Artificial sequence
  Protein classification predicting sequence
IGGSGM

SEQ ID NO: 77694 - protein, 5 aa, Artificial sequence
  Protein classification predicting sequence
DYYNF

SEQ ID NO: 77695 - protein, 6 aa, Artificial sequence
  Protein classification predicting sequence
YPQAIF

SEQ ID NO: 77696 - protein, 8 aa, Artificial sequence
  Protein classification predicting sequence
ALIAVGSS

SEQ ID NO: 77697 - protein, 7 aa, Artificial sequence
  Protein classification predicting sequence
EVDGIYI

SEQ ID NO: 77698 - protein, 7 aa, Artificial sequence
  Protein classification predicting sequence
RMLASRG

SEQ ID NO: 77699 - protein, 7 aa, Artificial sequence
  Protein classification predicting sequence
DGKTYEL

SEQ ID NO: 77700 - protein, 6 aa, Artificial sequence
  Protein classification predicting sequence
DCSGLV

SEQ ID NO: 77701 - protein, 6 aa, Artificial sequence
  Protein classification predicting sequence
ELNSDV

SEQ ID NO: 77702 - protein, 6 aa, Artificial sequence
  Protein classification predicting sequence
GVAVPE

SEQ ID NO: 77703 - protein, 5 aa, Artificial sequence
  Protein classification predicting sequence
LCQGA

SEQ ID NO: 77704 - protein, 6 aa, Artificial sequence
  Protein classification predicting sequence
DFKLEF

SEQ ID NO: 77705 - protein, 6 aa, Artificial sequence
  Protein classification predicting sequence
GEKITR

SEQ ID NO: 77706 - protein, 7 aa, Artificial sequence
  Protein classification predicting sequence
YDAIPRR

SEQ ID NO: 77707 - protein, 6 aa, Artificial sequence
  Protein classification predicting sequence
DINPFS

SEQ ID NO: 77708 - protein, 7 aa, Artificial sequence
  Protein classification predicting sequence
LVKEVSI

SEQ ID NO: 77709 - protein, 6 aa, Artificial sequence
  Protein classification predicting sequence
DASKRF

SEQ ID NO: 77710 - protein, 6 aa, Artificial sequence
  Protein classification predicting sequence
AHDLSE

SEQ ID NO: 77711 - protein, 6 aa, Artificial sequence
  Protein classification predicting sequence
IAVRLP

SEQ ID NO: 77712 - protein, 6 aa, Artificial sequence
  Protein classification predicting sequence
FSTTQR

SEQ ID NO: 77713 - protein, 6 aa, Artificial sequence
  Protein classification predicting sequence
VDLLTE

SEQ ID NO: 77714 - protein, 6 aa, Artificial sequence
  Protein classification predicting sequence
GNEKVL

SEQ ID NO: 77715 - protein, 7 aa, Artificial sequence
  Protein classification predicting sequence
QILALAS

SEQ ID NO: 77716 - protein, 6 aa, Artificial sequence
  Protein classification predicting sequence
HRYTAR

SEQ ID NO: 77717 - protein, 6 aa, Artificial sequence
  Protein classification predicting sequence
LPLSKK

SEQ ID NO: 77718 - protein, 6 aa, Artificial sequence
  Protein classification predicting sequence
PKIAEA

SEQ ID NO: 77719 - protein, 7 aa, Artificial sequence
  Protein classification predicting sequence
RNRLPFG

SEQ ID NO: 77720 - protein, 6 aa, Artificial sequence
  Protein classification predicting sequence
LNISED

SEQ ID NO: 77721 - protein, 6 aa, Artificial sequence
  Protein classification predicting sequence
IGSGGR

SEQ ID NO: 77722 - protein, 6 aa, Artificial sequence
  Protein classification predicting sequence
ADAEVI

SEQ ID NO: 77723 - protein, 7 aa, Artificial sequence
  Protein classification predicting sequence
ESRAAYR

SEQ ID NO: 77724 - protein, 6 aa, Artificial sequence
  Protein classification predicting sequence
FINFLH

SEQ ID NO: 77725 - protein, 6 aa, Artificial sequence
  Protein classification predicting sequence
DRLSPL

SEQ ID NO: 77726 - protein, 5 aa, Artificial sequence
  Protein classification predicting sequence
FNKGN

SEQ ID NO: 77727 - protein, 6 aa, Artificial sequence
  Protein classification predicting sequence
YQTNVD

SEQ ID NO: 77728 - protein, 6 aa, Artificial sequence
  Protein classification predicting sequence
EASKLK

SEQ ID NO: 77729 - protein, 6 aa, Artificial sequence
  Protein classification predicting sequence
DLLPEQ

SEQ ID NO: 77730 - protein, 5 aa, Artificial sequence
  Protein classification predicting sequence
TVFEW

SEQ ID NO: 77731 - protein, 7 aa, Artificial sequence
  Protein classification predicting sequence
PETQAVL

SEQ ID NO: 77732 - protein, 7 aa, Artificial sequence
  Protein classification predicting sequence
ADAEVIA

SEQ ID NO: 77733 - protein, 6 aa, Artificial sequence
  Protein classification predicting sequence
AAQQVV

SEQ ID NO: 77734 - protein, 6 aa, Artificial sequence
  Protein classification predicting sequence
EEFATF

SEQ ID NO: 77735 - protein, 6 aa, Artificial sequence
  Protein classification predicting sequence
VYEIGR

SEQ ID NO: 77736 - protein, 6 aa, Artificial sequence
  Protein classification predicting sequence
AQIEGS

SEQ ID NO: 77737 - protein, 7 aa, Artificial sequence
  Protein classification predicting sequence
ELEIPDV

SEQ ID NO: 77738 - protein, 5 aa, Artificial sequence
  Protein classification predicting sequence
RVHMV

SEQ ID NO: 77739 - protein, 5 aa, Artificial sequence
  Protein classification predicting sequence
TAHWA

SEQ ID NO: 77740 - protein, 5 aa, Artificial sequence
  Protein classification predicting sequence
PETQP

SEQ ID NO: 77741 - protein, 6 aa, Artificial sequence
  Protein classification predicting sequence
AHYGLG

SEQ ID NO: 77742 - protein, 7 aa, Artificial sequence
  Protein classification predicting sequence
LREEGID

SEQ ID NO: 77743 - protein, 6 aa, Artificial sequence
  Protein classification predicting sequence
GRGIGP

SEQ ID NO: 77744 - protein, 6 aa, Artificial sequence
  Protein classification predicting sequence
RDRGKR

SEQ ID NO: 77745 - protein, 5 aa, Artificial sequence
  Protein classification predicting sequence
VRHIH

SEQ ID NO: 77746 - protein, 6 aa, Artificial sequence
  Protein classification predicting sequence
ILKDQW

SEQ ID NO: 77747 - protein, 5 aa, Artificial sequence
  Protein classification predicting sequence
CDNCG

SEQ ID NO: 77748 - protein, 6 aa, Artificial sequence
  Protein classification predicting sequence
TNILES

SEQ ID NO: 77749 - protein, 5 aa, Artificial sequence
  Protein classification predicting sequence
RIPWD

SEQ ID NO: 77750 - protein, 6 aa, Artificial sequence
  Protein classification predicting sequence
LDWPES

SEQ ID NO: 77751 - protein, 7 aa, Artificial sequence
  Protein classification predicting sequence
EAKLVDD

SEQ ID NO: 77752 - protein, 9 aa, Artificial sequence
  Protein classification predicting sequence
TPQEAFEAA

SEQ ID NO: 77753 - protein, 5 aa, Artificial sequence
  Protein classification predicting sequence
PVDLY

SEQ ID NO: 77754 - protein, 6 aa, Artificial sequence
  Protein classification predicting sequence
AEIESA

SEQ ID NO: 77755 - protein, 7 aa, Artificial sequence
  Protein classification predicting sequence
IEDVREE

SEQ ID NO: 77756 - protein, 6 aa, Artificial sequence
  Protein classification predicting sequence
DDKVKA

SEQ ID NO: 77757 - protein, 6 aa, Artificial sequence
  Protein classification predicting sequence
GELKTK

SEQ ID NO: 77758 - protein, 6 aa, Artificial sequence
  Protein classification predicting sequence
PFDYLA

SEQ ID NO: 77759 - protein, 6 aa, Artificial sequence
  Protein classification predicting sequence
RGGNNI

SEQ ID NO: 77760 - protein, 7 aa, Artificial sequence
  Protein classification predicting sequence
PESFIGR

SEQ ID NO: 77761 - protein, 6 aa, Artificial sequence
  Protein classification predicting sequence
ILKNFA

SEQ ID NO: 77762 - protein, 6 aa, Artificial sequence
  Protein classification predicting sequence
TEISIL

SEQ ID NO: 77763 - protein, 7 aa, Artificial sequence
  Protein classification predicting sequence
AEFDESI

SEQ ID NO: 77764 - protein, 5 aa, Artificial sequence
  Protein classification predicting sequence
PHRYT

SEQ ID NO: 77765 - protein, 6 aa, Artificial sequence
  Protein classification predicting sequence
RTPEAD

SEQ ID NO: 77766 - protein, 7 aa, Artificial sequence
  Protein classification predicting sequence
RHKDVVE

SEQ ID NO: 77767 - protein, 6 aa, Artificial sequence
  Protein classification predicting sequence
DKSNVK

SEQ ID NO: 77768 - protein, 7 aa, Artificial sequence
  Protein classification predicting sequence
KAKRPEL

SEQ ID NO: 77769 - protein, 6 aa, Artificial sequence
  Protein classification predicting sequence
LDVGEG

SEQ ID NO: 77770 - protein, 7 aa, Artificial sequence
  Protein classification predicting sequence
PRYVEAD

SEQ ID NO: 77771 - protein, 6 aa, Artificial sequence
  Protein classification predicting sequence
NTFSWG

SEQ ID NO: 77772 - protein, 6 aa, Artificial sequence
  Protein classification predicting sequence
DNYTLV

SEQ ID NO: 77773 - protein, 6 aa, Artificial sequence
  Protein classification predicting sequence
PAETNL

SEQ ID NO: 77774 - protein, 6 aa, Artificial sequence
  Protein classification predicting sequence
EYGTTT

SEQ ID NO: 77775 - protein, 7 aa, Artificial sequence
  Protein classification predicting sequence
DTEAEIA

SEQ ID NO: 77776 - protein, 7 aa, Artificial sequence
  Protein classification predicting sequence
GSDAKES

SEQ ID NO: 77777 - protein, 6 aa, Artificial sequence
  Protein classification predicting sequence
ARYKRL

SEQ ID NO: 77778 - protein, 6 aa, Artificial sequence
  Protein classification predicting sequence
REFGRA

SEQ ID NO: 77779 - protein, 5 aa, Artificial sequence
  Protein classification predicting sequence
YLKPV

SEQ ID NO: 77780 - protein, 6 aa, Artificial sequence
  Protein classification predicting sequence
NGVVLS

SEQ ID NO: 77781 - protein, 6 aa, Artificial sequence
  Protein classification predicting sequence
ATSLRL

SEQ ID NO: 77782 - protein, 6 aa, Artificial sequence
  Protein classification predicting sequence
LKYICK

SEQ ID NO: 77783 - protein, 5 aa, Artificial sequence
  Protein classification predicting sequence
YPFVT

SEQ ID NO: 77784 - protein, 7 aa, Artificial sequence
  Protein classification predicting sequence
RDAVLQG

SEQ ID NO: 77785 - protein, 6 aa, Artificial sequence
  Protein classification predicting sequence
LGATHE

SEQ ID NO: 77786 - protein, 6 aa, Artificial sequence
  Protein classification predicting sequence
FDDRAE

SEQ ID NO: 77787 - protein, 6 aa, Artificial sequence
  Protein classification predicting sequence
HAKAIN

SEQ ID NO: 77788 - protein, 6 aa, Artificial sequence
  Protein classification predicting sequence
SIARPL

SEQ ID NO: 77789 - protein, 6 aa, Artificial sequence
  Protein classification predicting sequence
KRLIPG

SEQ ID NO: 77790 - protein, 7 aa, Artificial sequence
  Protein classification predicting sequence
VAALKFA

SEQ ID NO: 77791 - protein, 7 aa, Artificial sequence
  Protein classification predicting sequence
AVEKAKE

SEQ ID NO: 77792 - protein, 6 aa, Artificial sequence
  Protein classification predicting sequence
RSEGVE

SEQ ID NO: 77793 - protein, 6 aa, Artificial sequence
  Protein classification predicting sequence
GVSAPE

SEQ ID NO: 77794 - protein, 6 aa, Artificial sequence
  Protein classification predicting sequence
LSQNKQ

SEQ ID NO: 77795 - protein, 6 aa, Artificial sequence
  Protein classification predicting sequence
VQTVGK

SEQ ID NO: 77796 - protein, 6 aa, Artificial sequence
  Protein classification predicting sequence
HNFVLT

SEQ ID NO: 77797 - protein, 7 aa, Artificial sequence
  Protein classification predicting sequence
VAATKPE

SEQ ID NO: 77798 - protein, 7 aa, Artificial sequence
  Protein classification predicting sequence
RELGLPE

SEQ ID NO: 77799 - protein, 7 aa, Artificial sequence
  Protein classification predicting sequence
TLPTNTL

SEQ ID NO: 77800 - protein, 7 aa, Artificial sequence
  Protein classification predicting sequence
LTLPLVV

SEQ ID NO: 77801 - protein, 7 aa, Artificial sequence
  Protein classification predicting sequence
AISKKLL

SEQ ID NO: 77802 - protein, 6 aa, Artificial sequence
  Protein classification predicting sequence
TFENGY

SEQ ID NO: 77803 - protein, 5 aa, Artificial sequence
  Protein classification predicting sequence
EAWFP

SEQ ID NO: 77804 - protein, 6 aa, Artificial sequence
  Protein classification predicting sequence
LEQQID

SEQ ID NO: 77805 - protein, 6 aa, Artificial sequence
  Protein classification predicting sequence
RALESF

SEQ ID NO: 77806 - protein, 7 aa, Artificial sequence
  Protein classification predicting sequence
KYLDFSR

SEQ ID NO: 77807 - protein, 5 aa, Artificial sequence
  Protein classification predicting sequence
KRPIM

SEQ ID NO: 77808 - protein, 7 aa, Artificial sequence
  Protein classification predicting sequence
PVILVVG

SEQ ID NO: 77809 - protein, 5 aa, Artificial sequence
  Protein classification predicting sequence
ATAFN

SEQ ID NO: 77810 - protein, 6 aa, Artificial sequence
  Protein classification predicting sequence
ATNTLA

SEQ ID NO: 77811 - protein, 7 aa, Artificial sequence
  Protein classification predicting sequence
LEKVVDK

SEQ ID NO: 77812 - protein, 5 aa, Artificial sequence
  Protein classification predicting sequence
GYQEV

SEQ ID NO: 77813 - protein, 6 aa, Artificial sequence
  Protein classification predicting sequence
EDLDRY

SEQ ID NO: 77814 - protein, 6 aa, Artificial sequence
  Protein classification predicting sequence
GYKPVA

SEQ ID NO: 77815 - protein, 7 aa, Artificial sequence
  Protein classification predicting sequence
FSSDSLR

SEQ ID NO: 77816 - protein, 7 aa, Artificial sequence
  Protein classification predicting sequence
YLKGETR

SEQ ID NO: 77817 - protein, 6 aa, Artificial sequence
  Protein classification predicting sequence
ADKAYG

SEQ ID NO: 77818 - protein, 7 aa, Artificial sequence
  Protein classification predicting sequence
RLYSDED

SEQ ID NO: 77819 - protein, 7 aa, Artificial sequence
  Protein classification predicting sequence
VKVGPLA

SEQ ID NO: 77820 - protein, 6 aa, Artificial sequence
  Protein classification predicting sequence
EAFTMD

SEQ ID NO: 77821 - protein, 7 aa, Artificial sequence
  Protein classification predicting sequence
NLRDLLA

SEQ ID NO: 77822 - protein, 6 aa, Artificial sequence
  Protein classification predicting sequence
DMHAIT

SEQ ID NO: 77823 - protein, 6 aa, Artificial sequence
  Protein classification predicting sequence
FSTQQE

SEQ ID NO: 77824 - protein, 5 aa, Artificial sequence
  Protein classification predicting sequence
EASHH

SEQ ID NO: 77825 - protein, 6 aa, Artificial sequence
  Protein classification predicting sequence
VPIDII

SEQ ID NO: 77826 - protein, 6 aa, Artificial sequence
  Protein classification predicting sequence
VNLLDD

SEQ ID NO: 77827 - protein, 6 aa, Artificial sequence
  Protein classification predicting sequence
AITIKQ

SEQ ID NO: 77828 - protein, 6 aa, Artificial sequence
  Protein classification predicting sequence
NTIPLF

SEQ ID NO: 77829 - protein, 6 aa, Artificial sequence
  Protein classification predicting sequence
NNKEFQ

SEQ ID NO: 77830 - protein, 5 aa, Artificial sequence
  Protein classification predicting sequence
HITNE

SEQ ID NO: 77831 - protein, 7 aa, Artificial sequence
  Protein classification predicting sequence
LTFLRDI

SEQ ID NO: 77832 - protein, 6 aa, Artificial sequence
  Protein classification predicting sequence
MGAYCP

SEQ ID NO: 77833 - protein, 6 aa, Artificial sequence
  Protein classification predicting sequence
TKYIFV

SEQ ID NO: 77834 - protein, 7 aa, Artificial sequence
  Protein classification predicting sequence
FVSESDI

SEQ ID NO: 77835 - protein, 5 aa, Artificial sequence
  Protein classification predicting sequence
QFKDK

SEQ ID NO: 77836 - protein, 7 aa, Artificial sequence
  Protein classification predicting sequence
NVQRSMR

SEQ ID NO: 77837 - protein, 6 aa, Artificial sequence
  Protein classification predicting sequence
KYDLEA

SEQ ID NO: 77838 - protein, 257 aa, Unknown
  Bacterial polypetide isolated from the Sargasso Sea
STPIAKYIYENCAKNEKRVQALGGAKNHCVVMPDCDLDQAVNGLMGAAYGSAGERCMAQSVAVAVGNIGDKLVDLLAKKVEALKVGPGMDKQSEMGPLVTKEHLEKVKNYIDIGEEEGAKLIVDGRGFKIQGYENGYFIGGSLFDHVKKDMKIYKEEIFGPVLSVVRAKDFNEALQLVNDHEYGNGVSIFTRDGDTGRTFSNKAKIGMVGINIPIPVPMAFHSFGGWKRSLFGDQHMHGPEGVRFYTKLKTITSRWP

SEQ ID NO: 77839 - protein, 339 aa, Unknown
  Bacterial polypetide isolated from the Sargasso Sea
EPIGVVVAVSAFNHPLNLIVHQVGPAIASGCPVIVKPAEDTPLSCFRFVQILHEAGLPTDYCQSLVVNDLSVAEQLVSDKRVGFFTFIGSGKVGWMLRSKLAPGARCALEHGGVAPVIIDDTADLNDTLPLIAKGGFYHAGQVCVSVQRVFAPREIAEDVACKIAELGKAMKIGDPTLEKTMVGPLIRLKEVKRVGEWVDEAKKAGATCIIGGNQISDTTYSCTVLLDPPQNIRISEQEIFGPVICVYSYDNVDDAIKIANSLPYAFQASILSRDLDFIMKCNRRIDAAAIMVNDHTAYRVDWMPFAGLKESGYGVGGIPYTFEDMQIEKLTVIRSLEL

SEQ ID NO: 77840 - protein, 279 aa, Unknown
  Bacterial polypetide isolated from the Sargasso Sea
VENFKKLNNKNLIWKKPSKVSDDILLTTHENNYLNLVKSSFPKKGFSSLDGDTIISPGSKDATFDAVGSIIAAIDGVEKKDFRNAFCGVRPPGHHSSQNKAAGFCILNSVSIGANYLLKKYKYKKVAIIDFDVHHGNGTQDIFYENENVLFISTHQYPYYPGTGSEQERGKFNNIFNIPLPAGINSEEYLNVFDRVLKKLEEFRPEFILISAGFDAHEDDPLAQFNLKTEDYFTITKRVLEGSKKFCNGKVVSILEGGYDLNALRDSTKRHVDALLEFN

SEQ ID NO: 77841 - protein, 156 aa, Unknown
  Bacterial polypetide isolated from the Sargasso Sea
TQKCIDRFDKIRNAEGNIGTAELRLSMQKTMQSKCAVFRTEKTLKEGVEEIRKTFDGLDSLSVKDKSLIFNTDLVETLEFDNLIRQAVATVDSAYHRKESRGAHAREDYPKRDDQKFMQHTLAWCDGKNTKITYRDVHKTTLTNDVQYFPPQERVY

SEQ ID NO: 77842 - protein, 302 aa, Unknown
  Bacterial polypetide isolated from the Sargasso Sea
WHDDHIKDQALMTQAVHDHGALAGVELWFGGARSANHYTRETAVDVASIPNLAGHPYQPRSMDKSDIREFRRWHREAALRAKEADFDIVYVYATHGYLLSHFLSAQTNTRTDEYGGSVENRTRLLRELIEDTKEAVGDRCAVAVRYSVGGDDGEAPELTAERRDRLEMLAELPDLWDININNYYQEMGVSRFFKEGSLEEYMSFVKSVTTKPVVTVGRFTSPETMTSQVRRGIVDFIGAARPSIADPFLPNKILEGRAEDIRECIGCNICYTGDGLGTPIRCTQNPTMGEEYRRNWHPEVVA

SEQ ID NO: 77843 - protein, 224 aa, Unknown
  Bacterial polypetide isolated from the Sargasso Sea
VDVPVLSRRTRDDKNGFSYPFKIGPKQFFDFATHPTWSLSTLLSGIPKPMNYVTSKSGDGIFKRKESRGSTDWNTLKRVRDKWKGKLIIKGVMSPDDAVKIKEAGADAIQVSNHGGRQLDSATAAINILPVIRKSVGNDFPLIFDSGIRSGSDIVRALAFGADYAMIGRPVMYAMGADGRKGLRRIVEIIKEEASTTLGLVGLNDINDVTSNIVIDSTVNKVDY

SEQ ID NO: 77844 - protein, 84 aa, Unknown
  Bacterial polypetide isolated from the Sargasso Sea
DLVETLEFDNLIRQAIVTLDSAYERKESRGAHAREDHPTRDDNNFMKHTLSWCKGSETKISYRDVHRSTLTNDVQYFPPQERVY

SEQ ID NO: 77845 - protein, 206 aa, Unknown
  Bacterial polypetide isolated from the Sargasso Sea
DTGDKIKEIVKPKIENLKIGPGLDPDSEMGPLVTFDHLQKVKRYIDQGVDEGADLVVDGRNLKLQGYENGFFIGGSFFDNVTTDMSIYKEEIFGPVLSMVRADTFDYALDIVNKHEYGNGTAIFTSNGGVARQFANECQIGMVGVNVPIPVPVAYHSFGGWKRSAFGGHGVYGMEAVRFYTRLKTVTGRWPSGQHTGAQYTFPSNS

SEQ ID NO: 77846 - protein, 241 aa, Unknown
  Bacterial polypetide isolated from the Sargasso Sea
MPDCDLDGAVNGLMGAAYGSAGERCMAQSVAVAVGDIGDELVSRLSKKAEALKVGPGMDKTSEMGPLVTKEHLEKVTSYVDLGVEEGAKLVVDGRGLKLQGYENGFYIGGCLFDHVNEDMRIYKEEIFGPVLSVVRVKTFEEAAKLINDHEYGNGVSIYTRDGDAGRTFASKIQVGMVGINVPIPVPMAFHSFGGWKRSLFGDSGMHGMEGIKFYTKLKTVTSRWPSGVRSNAEFVMPTMK

SEQ ID NO: 77847 - protein, 298 aa, Unknown
  Bacterial polypetide isolated from the Sargasso Sea
MKIKKQSGPPEDLIYFDDDLPLSQSQVEDVVEIFKTPLTGSYNWDYTVADNRIKKLYELGKELNWNGSIDLNWDYTHPADERILETDEELPHETLKAYENLSDEEKILFDRHDVAELMSQFLHGEQGALLVASQLASCAPTYNAKLYAASQTFDEARHVEVFNRYLQEKIGIHYPINPALKSLLDKILTDERWDLKFIGMQIIIEGLALAAFSMLKSTSKDPLLKQLLHYVIRDEARHVTFGINYLEDFIKTLSPEEINERAEFAYEACVISRERLINTKSQQRFLGMSEEEAREFQL

SEQ ID NO: 77848 - protein, 260 aa, Unknown
  Bacterial polypetide isolated from the Sargasso Sea
VMGRGSDVGAVLLEDERIAGVSFTGSVGTGQRVAAACVPRGAKVQLEMGGKNPFVVLDDADLNVAVGAAINSGFFSTGQRCTASSRVIVTEGIHDRFVAAMVEKMKTLKVDDARKAGTDIGPVVDDRQLAQDLEYIGIGQQEGAKLAYGGEALEKNADGAPGFYLRPALFTETTPGMRINREEIFGPVVSVLRAKNYEEALALANDTLFGLASGIATTSLKHATHFKRHAQAGMVMVNLPTAGVDYHVPFGGRKGSSYGP

SEQ ID NO: 77849 - protein, 270 aa, Unknown
  Bacterial polypetide isolated from the Sargasso Sea
MSNQNRTFSGGRIDRNKPINFMFNGQKYQGFEGDTLASALLANDVHLVGRSFKYHRPRGILTAGSEEPNALIQLGIGARTEPNIRATEIEIYEGLEAASQNCWPSVNFDIGGANNILSRLFPAGFYYKTFKWPPSLWLFYEHFIRKAAGLGESPKTKNPDRYEQRFHYCDVMVVGGGISGLSAALAAARAKCDVLLVDENSYFGGYLSNSEASVNGKKIDDWIRIVCEELESYEHVKLLNRTSAMGYYDYNYVTALEKVTNHHQELSKTC

SEQ ID NO: 77850 - protein, 236 aa, Unknown
  Bacterial polypetide isolated from the Sargasso Sea
MAIAPTEIETPPEARSEDYLWTLNFGPQHPATHTTLRLVLKLEGERVVDAVPEMGYLHSGFEKIGEHLTFNQYVTVTDRMNYISPMANNVAWHHSVETLLGIDLTPRCTYIRTIVAELARISDHLLSNGAVGLDTGAFTYFLYAFYQREVIYDIFETLCGARFTNSYTRVGGVSQDFTPLVIEKIRAFLKTFPKTLNDMERLLNRNRIFVDRTKGVGLLTKEEAINRGATGPVARA

SEQ ID NO: 77851 - protein, 261 aa, Unknown
  Bacterial polypetide isolated from the Sargasso Sea
ETARRIIKNSAENLSEVSLELGGKSPVAVFDDAEQENAINGITAGIFGATGQSCIAGSRLYIQKGIYNEFLDKLSSRASKIKIGAPMDLDTEMGPLSSFKQLETIEKNIKDTVDQGGKIKCGGKRDSFSNKGYYFPPTIIECDNHNLPTAENELFGPILSVMKFDTEEEVINKMNDNQYGLSSGVYTSNLSRGMRVSKAIRAGITFVNTYRLISPSAPFGGIKDSGYGKEAGIDSIKDYTRVKTTWFYTSDEPSLDPFSIR

SEQ ID NO: 77852 - protein, 294 aa, Unknown
  Bacterial polypetide isolated from the Sargasso Sea
MGVVNVITGFADPCGKTLTTHKDVERIAFTGGPETARHIIRNSAENLSQVSLELGGKSPVAVFEDADQENALNGITAGIFGASGQSCIAGSRLYLQKSIYDIFLDKLVNRAKKIKLGNPMSTDTQMGPLSSLKQLEIIEKNIKLTVDQGGKIRCGGKRHNLSNKGYYFPATIIECENHNLPSAENELFGPVLSVMKFETEAEVINKMNDNQYGLSSGVYTKDLGRGLRVSKAIRAGITFVNTYRLISPSAPFGGMKDSGYGKEAGIESIKDYTRIKTTWFNTSDKPMSDPFTMG

SEQ ID NO: 77853 - protein, 119 aa, Unknown
  Bacterial polypetide isolated from the Sargasso Sea
FRTEKTLKEGVEEIRKPFEGMESISVKDKSLVFNTDLVETLEFDNLIRQAIVTIDSAYERKESRGAHAREDHPKRDDNNFMKHTLSWCKGSETTISYRDVHRSTLTNDVQYFPPQERVY

SEQ ID NO: 77854 - protein, 304 aa, Unknown
  Bacterial polypetide isolated from the Sargasso Sea
ISCAKKNEVDLAVSAAKAAFQSRVLVDMPLLERAKLMHRIADETRKIADEGGKMLCYENGKMLGSAIKEFNDVADMFDYYAGLTDKLEGKTIPVSPTVFDYTVLEPFGVSAHIVPWNFPISMVGRSLACSFATGNSTIVKTAELTPLSATFFAKAIENAGVPNGIVNIICGYGNEAGSYLVSHPDVNHVVFTGSVATGKKILHSCADKAIPAVIELGGKSAGIVYEDADLDQVIESARHGIFGVAGQICTAMSRLVVHKSVKNELIDKLVDLSKSLKVGPGYEEGTGLTPIISEKQLEKVEGYA

SEQ ID NO: 77855 - protein, 327 aa, Unknown
  Bacterial polypetide isolated from the Sargasso Sea
LVHGGYSNANHYSRIPPIAPSVTSVNSYDPVQARAMTKSDIRDFRKWHRQAAVRSRQAGFDLVYVYAGHNLTLLMHFLSRRFNQRTDEYGGSLENRVRLFREILEDTKDAVGDSCAVAVRFAVDELLGSEGITCESEGREVVEMLAELPDLWDVNISEWENDSATSRFEKEGYQEPYISFVKSLTSKPVVGVGRYTSPDKMVSLIQDGVMDMIGAARPSIADPFLPKKIEEGRLDEIRECIGCNICVAGDWLSVPMRCTQNPTMGEEWRRGWHPERIERSKSDDGILVVGGGPAGLECALSLGKRGYRVILAEASEDLGGRVYKESK

SEQ ID NO: 77856 - protein, 186 aa, Unknown
  Bacterial polypetide isolated from the Sargasso Sea
DLVVFGRAAAKRASELVKPGQPHEDISESETDKCLARFDKLRNSSGSNNTADLRLSMQKTMQSKCAVFRTEKTLKEGVDQIRKPFEGMDDLSVKDKSLIFNTDLVETLEFDNLIRQAITTMDSAYHRKESRGAHAREDYPKRNDEKYMQHTLSWCEGKKTKIDYRPVHRSTLTNDVQYFPPQERIY

SEQ ID NO: 77857 - protein, 320 aa, Unknown
  Bacterial polypetide isolated from the Sargasso Sea
IFKSIPIRIFGIMNNVTLLAVPLFIFMGTILEKSGIAAKMLENMAKAFRGIKGGLSISIIIVGALLAASTGIVGATVVTMGLMSLPILINQGYDKSFSAGLVASTGTLGQIIPPSIALVLLGDVMSNAYQRAQNDMGIFSQQTVTVGDLFIGAIIPGILICIGYLIYTLYKNSNNLDLKDTSTEFAIDKVELFKTLALPIILIFLVLGSIFAGIATPTEAAAIGAFGALLIALINRKVNLHFLKETSEKTAIVSTMIFTILIGASIFSLIFRGVGGDELIDLIFNSLPGGTFTALIFVLVIIFFLGFILDFIEICYVIVP

SEQ ID NO: 77858 - protein, 104 aa, Unknown
  Bacterial polypetide isolated from the Sargasso Sea
MYLQQTQVKNKTALVTGAGKGIGKACAIALAEAGANLIILSRTKSDLDKVEKQITKLKRKCKSYICDVSNYDDLKSVFNKISSLDILVNNAGTNRPDHFTKIKK

SEQ ID NO: 77859 - protein, 311 aa, Unknown
  Bacterial polypetide isolated from the Sargasso Sea
LSATKLLVVAGGGGGGFDGAGGGGAGGLIYNASYSLSDNSYSITVGAGGSKATSVPGQASNGQNSTFGNQTAIGGGGGGSKASNGRTGGSGGGYGHKKNSPSPGAGTLGQGHSGGNSGQNAYGGSGGGGAGGAGNGPSGRNGGAGGAGLQYDISGSNQWYAAGGGGGTWAGTGGAGGSGIGGQGGSNSGQRSGGNGTAHTGSGGGANGWAGGSSAGNGGSGIVILNYSANNDVSAGLTLNTGSGQVNLQSTVSDLTSLTVNTTNSSSVVTGVISGSTDLTKAGSGLLTVSGNNTYSGDTAVNAGTLFGGTE

SEQ ID NO: 77860 - protein, 154 aa, Unknown
  Bacterial polypetide isolated from the Sargasso Sea
MEFPKPISKILNWARAYDMWYFQFGLACCAIEVMAASGPRHDFMRLGIIPLPASPRQADLMVVAGTVTDKMAPAVKRLYDQMPEPKYVISMGSCSNSGGPYWDSYSVTKGVDQLIPVDVYVPGCPPRPEALQEGIVLLQKKIKGEDRKKSERER

SEQ ID NO: 77861 - protein, 309 aa, Unknown
  Bacterial polypetide isolated from the Sargasso Sea
MKIKKQSGPPDDLIYFDDDLPLSQSQVEDVVEIFKTPLTGSYNWDYTVADNRIKKLYELGKELNWNGSIDLNWDYTHPADERILETDDELPHETLEAYENLSDEEKILFDRHDVAELMSQFLHGEQGALLVASQLASCAPTYNAKLYAASQTFDEARHVEVFNRYLQEKIGIHYPINPALKSLLDKILTDERWDLKFIGMQIIIEGLALAAFSMLKSTSKDPLLKQLLHYVIRDEARHVTFGINYLEDFIKTLSPEEINERAEFAYEACVISRERLINTKSQQRFLNMTEEEAREFQLNTGSFEMFRNS

SEQ ID NO: 77862 - protein, 165 aa, Unknown
  Bacterial polypetide isolated from the Sargasso Sea
KATYSKKGSEEFAIDIFDKLLNSKGDIPPSELRLDMQKTMQSHCAVFRTGEGLKQGSKKMDEILDKFAQVKISDKSLIWNTDLLETIELENLIQQAVVTVKSAENRKESRGAHARDDFRDRNDEDWLFHSLAWLKNKKTKLGTRPVTLRAMSNEVQSFPPKARVY

SEQ ID NO: 77863 - protein, 316 aa, Unknown
  Bacterial polypetide isolated from the Sargasso Sea
FEGEWPKLLPRERGKYLRAIADKLRKNAELLGEIETIDTGKLFRETKKQANYIAEYYDYYAGMADKVEGTVLPIDKPNIQAITTRVPIGVIAAIIPWNSQMLLTVTKLAPALAMGNTVVIKSSELAPAVLFEFAKLVEETGIPKGVVNVITGYGDPCGKALTTHNLVEKIAFTGGPETARHIIRNSAENLSEVSLELGGKSPVAVFEDAHQENAINGITAGIFGASGQSCIAGSRLYLQKGIYNEFLDKLAERAEKIKIGAPMDPDSEMGPISNFKQLEIIEKNIKLTVEQGGKVKCGGKRHSFSNEGYYFPPTII

SEQ ID NO: 77864 - protein, 308 aa, Unknown
  Bacterial polypetide isolated from the Sargasso Sea
MKLNVNVKELLSAVDVPAQWVGIREVFEAHTPRMIRDGVPVANARSSTHGIMVEVLVNGQFGYYGTPDMTTEGVARAAKKAYKQAQIASEHALYTFDETARPAFQGEYCSPFTKDRESLSAGSLNDLLLDAYKTLKVSEKIVSASSLCQVIETSSRFASSNGSDINQEFLMLEFDLSATAADGTNQQTRTFGGMRGTCRQMGLEYFDKYEIMANANRIGEQALELLNADECPNGEMDVVIAPDQMMLQIHESIGHALEVDRILGDERNYAGWSFVKLEDFGKLQYGSKLMNITFDPTLESEFASYAFD

SEQ ID NO: 77865 - protein, 289 aa, Unknown
  Bacterial polypetide isolated from the Sargasso Sea
MKKKLSITRRDFINGVSYGLAASVAPIDFLKAKNIDPFKYPPALTGIRGNHPGSFDHAHRLALAGGNFLEEIIDLGESNDLIVVGGGISGLSAAYFYQERTALNQNILILDNHDDFGGHAKRNEFQVDGREILTYGGSQSIESPSYYEEVSKKLMADLGIDFQKFYTAYDFDYFKNRGLTSSFFFNKETYGENKIVRNVPNYRYDINHKNNTKPENIKKVVKEMPISDKSKDEFIRLFLDKTDFFPEMTLEEKFYHLENMSYEEYLRKYHKVGDEVVGLFHHVMVTLGR

SEQ ID NO: 77866 - protein, 255 aa, Unknown
  Bacterial polypetide isolated from the Sargasso Sea
MYLKKYNLKNKYSLVTGAGKGLGRACAIALAEAGSNLIIISRTKKDLDSVSKIIKKLKVKCKSYTCDVTNYNEVKTIINKQPRIDVLVNNAGNNIPEHFTKVKTKNMEYLVKVNTIATFNIAQLCAIKMMKLKNRKKVGGSIINMSSQMGHVGGPIRSVYNMNKWGLEGLTKGMAVDLAKYNIRVNAVAPTFVVTPMTKKFLKNKKFKKETLNNIPLGRFAEMSEIASTVVFLASDAASMIHGTSILVDGGWTAK

SEQ ID NO: 77867 - protein, 95 aa, Unknown
  Bacterial polypetide isolated from the Sargasso Sea
KLIENQGAGEILITSIDRDGTMKGYDKDLIKIAVENTTVPIIGAGGAGTFDHLKEAFLETDVSALACGSLFNFGDNNPIRAKAFLTNYSIPFKII

SEQ ID NO: 77868 - protein, 249 aa, Unknown
  Bacterial polypetide isolated from the Sargasso Sea
MKIKKQSGPPEDLLYFDDDLPLSQSQVEDVVEIFKTPLTGSYNWDYTVADNRIKKLYELGKELNWNGSIDLNWDYTHPADERILETDDELPHEILEAYKNLSDEEKILFDRHDVAELMSQFLHGEQGALLVASQLASCAPTYNAKLYAASQTFDEARHVEVFNRYLQEKIGIHYPINPALKSLLDKILTDERWDLKFIGMQIIIEGLALAAFSMLKSTSKDPLLKQLLHYVIRDEARHVTFGINYLEDF

SEQ ID NO: 77869 - protein, 195 aa, Unknown
  Bacterial polypetide isolated from the Sargasso Sea
MKKKLSITRRDFINGVSYGLAASVAPIDFLKAKNIDPFKYPPALTGIRGNHPGSFDHAHRLALAGGNFLEEIIDLGESNDLIVVGGGISGLSAAYFYQERTALNQNILILDNHDDFGGHAKRNEFQVDGREILTYGGSQSIESPSYYEEVSKKLMADLGIDFQKFYTAYDFDYLKIEDLLPRSFLIKKPMVRIKS

SEQ ID NO: 77870 - protein, 317 aa, Unknown
  Bacterial polypetide isolated from the Sargasso Sea
MTKLKEYKMYINGVWVDAENKKTFKSLNPENNEPWAIIPEASEKDVNKAVEAAQKAFEGKWPKLMPRERANYLKAIANQLRENAEMLGKIETIDTGKLFRETKTQANYIAEYYDYFAGLADKVEGTVLPIDKPNMQVITTREPIGVIAAIIPWNSQMLLTAVKLAPALAMGNTVVIKSSELASATMFEFAKLIEKTGIPKGVVNVISGYGEPCGKALTTHKYVERIAFTGGPETAKHIIRNSAENLSQVSLELGGKSPVAVFEDADQENALNGITAGIFGASGQSCIAGSRLYLQKNIYKNFLDKLINRAKKIKLET

SEQ ID NO: 77871 - protein, 75 aa, Unknown
  Bacterial polypetide isolated from the Sargasso Sea
NLIRQAMTTMDSAYHRKESRGAHAREDFSKRDDKKFMKHTLAWQDGKKVKVEYRDVHARTLTNDVQYFPPKERVY

SEQ ID NO: 77872 - protein, 267 aa, Unknown
  Bacterial polypetide isolated from the Sargasso Sea
AFTGGPETARHIIRNSAENLSEVSLELGGKSPVAVFDDARQENAINGITAGIFGASGQSCIAGSRLYLQKGIYNEFLDKLASRAKKIKIGAPMDSDTEMGPLSNFKQLEVIEKNIKLTVEQGGKIKCGGKRHPFSNEGYYFPPTIIECENHNLPAAENELFGPVLSVMKFDTEKEVIELMNDNQYGLSSGVYTSDLARGMRVSNAIRAGITFVNTYRLISPSAPFGGIKDSGYGKEAGIDSIKDYTRVKTTWFYTSDEPSLDPFSIR

SEQ ID NO: 77873 - protein, 298 aa, Unknown
  Bacterial polypetide isolated from the Sargasso Sea
MSTHSSKRVTVDVAIIGAGPAGAVAAALLRRAGRSVLVLERQHFPRFSIGESLLPQSMAYLEEAGMLQAVVEAGFQYKNGAHFVHRGQSSAFDFRDKHSAGWGTTYQVERAVFDDILIRCAAQQGADVRFGHTVRAMHPGTAGEGGKKPLLEVIDEADNAYEVEAQFVFDASGFGRVLPRLLNLEAPTRMPTRAAIFSHVLDGIPAGATDRNKICVATHPERRDVWFWMIPLAGGRSSVGCVAEASFLDVPEAERDAKLRTLIRQEPTLGPLIGNAPFLMPVRHIGGYAANVERLHGP

SEQ ID NO: 77874 - protein, 77 aa, Unknown
  Bacterial polypetide isolated from the Sargasso Sea
YKNLIAQAVVTMNSALNRKESRGAHAREDFKERDDKNWMKHTMSWLKDKNCEVDYRSVHEYTLSNEVKYIAPKARVY

SEQ ID NO: 77875 - protein, 288 aa, Unknown
  Bacterial polypetide isolated from the Sargasso Sea
VLWTLTGDYNHPADERIMQAEEDLPHETLEAYESLSEKEKIEFDRHDAAELLSQFLHGEQGALLVASQLTACAPTYNAKLYAASQTFDEARHVEVFNRYLQEKIGMHYPINQNLKLLLDKILTDPRWDLKFIGMQIIIEGLALAAFQMLKSLSKDPLLTQLLHYIIRDEARHVTFGINYLEDFIKTLTPEEIEERAEFAYEACVISRERLINTKAMQKYLKMSEEEARKFALSTTANTAFTNFLFTRIMPNLSRIGLLTDKVRPKFEALGLLEYEHAPDDFECDWNEL

SEQ ID NO: 77876 - protein, 54 aa, Unknown
  Bacterial polypetide isolated from the Sargasso Sea
MNYTDHKLDVVVLGAGGAGLRAALGCSEQGLKTACVSKVYPTRSHTVAAQGGIG

SEQ ID NO: 77877 - protein, 300 aa, Unknown
  Bacterial polypetide isolated from the Sargasso Sea
MRGVKAEGGWAVVCTEEVEIHANSDNGSAVEGRLWDEGDIPALAKMAEEVHEHGALAGIELVHGGYSNANHYSRIPPIAPSVTSVNSYDPVQARAMTKSDIRDFRNWHRQAAVRSRQAGFDLVYVYAGHNLTLLMHFLSRRFNQRTDEYGGSLENRVRLFREVLEDTKDAVGDGCAVAVRFAVDELLGSDGITCESEGREVVEMLAELPDLWDVNISEWENDSATSRFEKEGYQEPYISFVKSLTSKPVVGVGRYTSPDKMVSLIQRGVMDMIGAARPSIADPFLPKKIEEGRFDEIREC

SEQ ID NO: 77878 - protein, 362 aa, Unknown
  Bacterial polypetide isolated from the Sargasso Sea
MKIKKQSGPPEDLIYFDDDLPLSQSQVEDVVEIFKTPLTGSYNWDYTVADNRIKKLYELGKELNWNGSIDLNWDYTHPADERILETDDELPHETLEAYENLSDEEKILFDRHDVAELMSQFLHGEQGALLVASQLASCAPTYNAKLYAASQTFDEARHVEVFNRYLQEKIGIHYPINPALKSLLDKILTDERWDLKFIGMQIIIEGLALAAFSMLKSTSKDPLLKQLLHYVIRDEARHVTFGINYLEDFIKTLSPEEINERAEFAYEACVISRERLINTKSQQRFLGMSEEEAREFQLNTGSFEMFRNFLFSRVIPNLSRIGLLTDEVRPKFEALGLLEYENAPDDFECDWAEMRKPLEAFE

SEQ ID NO: 77879 - protein, 219 aa, Unknown
  Bacterial polypetide isolated from the Sargasso Sea
ANPKQAASYAVKGMNMNRQGQSCSSTSRVLVHQDLHDAVLEEMVQLVEKLPVGLPWLEENELGPVVSEIQFKKIMDFISSAQEEGAQLITGGSSPEDEELKNGFFIQPTIFDRVTPEMRIGKEEIFGPVMSVFKWNDYEQMLSIANGIEYGLTAMIVTDNLRQAMETAERVEAGYVWINSTGRYLGAPYGGWKSSGIGQEECFEELLSYTQIKNVNMRW

SEQ ID NO: 77880 - protein, 309 aa, Unknown
  Bacterial polypetide isolated from the Sargasso Sea
NRIKKLYELGKELNWNSNMDINWDRPVVHLDEPPPIFWDDYEPYIKMSDKEKLRFLRHRQAWSMSQFLHGEQGALLVASQLTSCAPTYNAKLYAASQTFDEARHVESFNRYVQSRMELMYPIGNALKSILDKILTDPRWDLKFIGMQLIIEGLALAAFRTSRDLTPDPVLKDMLDLIIRDEARHVTFGINYLEEFVTTLSEKEIEERAQFAYEACYLSKERLVSIEVYEHFGWNVEDARQFQLSSEIMQTFQKLLFQRVMPNLKRIGLLTDSIRPKFEKLGILEYEDDASDADIDWADLSRPLFKETAE

SEQ ID NO: 77881 - protein, 215 aa, Unknown
  Bacterial polypetide isolated from the Sargasso Sea
AQSVAVAVGNIGDNLVNELSKKVEALKVGPGMDKKSEMGPLVTKEHLEKVKGYVDLGVKEGAKLVVDGRNLKLQGYEKGYYIGGCLFDHVKKNMRIYKEEIFGPVLSVVRVKDFDEATQLINEHEFGNGTSIYTRDGDVGRTFASNIKIGMVGINIPIPVPVAFHSFGGWKRSLFGDQHMHGAEGVRFYTKLKTITSRWPSGLRSDPEFVMPTMK

SEQ ID NO: 77882 - protein, 215 aa, Unknown
  Bacterial polypetide isolated from the Sargasso Sea
TFDEARHVEVFNRYLQEKIGIHYPINPALKSLLDKILTDERWDLKFIGMQIIIEGLALAAFSMLKSTSKDPLLKQLLHYVIRDEARHVTFGINYLEDFIKTLSPEEINERAEFAYEACVISRERLINTKSQQRFLGMSEEEAREFQLNTGSFEMFRNFLFSRVIPNLSRIGLLTDEVRPKFEALGLLEYENAPDDFECDWAEMRKPLEAFEKIPV

SEQ ID NO: 77883 - protein, 299 aa, Unknown
  Bacterial polypetide isolated from the Sargasso Sea
FNIMNGDKEVVDAIINNKNISAVSFVGSTPVAKYIYENCAKNEKRVQALGGAKNHCVVMPDCDLDQAVNGLMGAAYGSAGERCMAQSVAVAVGNIGDKLVKNLKTKVENLKVGPGMDKNSEMGPLVTKEHLEKVKSYVDIGVHEGAELVVDGRQLKLQGYEKGYYMGGCLFDKVKKNMRIYKEEIFGPVLSVIRVKNYDEALTLVNDHEFGNGVSIFTRDGDVGRSFSSKAKIGMVGINIPIPVPMAFHSFGGWKRSLFGDQHMHGPEGVRFYTKLKTITSRWPDGLKSDPEFVMPTMK

SEQ ID NO: 77884 - protein, 333 aa, Unknown
  Bacterial polypetide isolated from the Sargasso Sea
EKLAEINSRALDQIRLEPKVLRNVEKRSLKKKVLGYEFDFPFGFAPMGMTNLSWPGADSMLAAESARNNIPTCVSMASTTTLEKMYELSEGHSWMQLYIFQDENFVMELLDRAKNTGYEVAILTVDVPVLSRRTRDDKNGFSYPFKIGPKQFFDFATHPTWSLSTLLSGIPKPMNYVTSKSGDGIFKRKESRGSTDWDTLKRVRDKWKGKLIIKGVMSPDDATQIKEAGADAIQVSNHGGRQLDSATAAINMLPLIRKSVGSDFPLIFDSGIRSGSDIVRALAFGADYAMIGRPVMYAMGADGRKGLRRIVEIIKEEASTTLGLVGLNDINDV

SEQ ID NO: 77885 - protein, 299 aa, Unknown
  Bacterial polypetide isolated from the Sargasso Sea
MGEIACAKKTEVDLAVNSAKESYNSRILIDMPLLERAKLMHKIADETRKIAKEGGKILCYENGKTLAAAIKEFNDVADMFDYYAGLTDKLEGKTIPVSSNVFDYTVLEPFGVSAHIIPWNYPLAMLGRSLACSFATGNSTVIKTAELTPLSATVFAKAIQNAEVPNGLINIICGYGNEAGSYLVSHPDVNHVVFTGSVATGKKILHSCADKAIPAIVELGGKSAGIVFPDANLDDVVESARHAIFGVAGQICTAMSRLVVHKSVKNELVDKLVDLSKSLKVGPGYEEGSELTPIISKNH

SEQ ID NO: 77886 - protein, 260 aa, Unknown
  Bacterial polypetide isolated from the Sargasso Sea
MDLNLEGKTALVTGASKGIGFQTALRLAQEGCHLHLVARTRADLADAAKRITEQVVSSVQINFHSFDLSQSEDIDAMITACDPIDILVNNAGAIPGGSLEEVDEETWRVGWELKVFGYINSCRRAYKRMKQRGSGVIINVIGTGGERPVAAYAVGAGGNAALMSLTRALGGASLEDGIRVVGINPGPIMTDRLEGGFRIQAEKRFGDSSRWAECMDGFPTYGQPPGEPHHIADMVAFLASDLSAYTTGTIITIDGGHMGR

SEQ ID NO: 77887 - protein, 255 aa, Unknown
  Bacterial polypetide isolated from the Sargasso Sea
MFLKKQNLKNKIALVTGAGKGIGKACAIALAEAGASLIIVSRTKKDLDQVSKIIKKFRSKCKSYVCDVTKYSEIKSVIDSQKRIDILVNNAGTNIPEHFTKVKRKDMEYVVKINTMATFNIAQLCSLKMIELKNRRKVGGVIINMSSQMGHVGGPIRSVYNMTKFGFEGLTKGMSIDLAKYNIRVNTVCPTFVVTPMTSKFLKDKKFMREVLGNIPLGRFAELSDVASAVVFLASDQASMITGTSLLVDGGWTSK

SEQ ID NO: 77888 - protein, 261 aa, Unknown
  Bacterial polypetide isolated from the Sargasso Sea
MSELKKYKMLINGEWVDSESKKTFKSLNPENNEPWAEAPEANEKDVDKAVKSAQKAFEGKWPNLFPRERAKYLKAIAEQLRKNAELLGKIETIDTGKLFKETKTQANYIAEYYDYYAGLADKVEGTVLPIDKANMQVITTRVPIGVVAAIIPWNSQMLLTAVKLAPALAMGNTVVIKSSELAPATLFEFGKLIEKTGIPKGVVNIISGFGEPCGKALTSHNLVERVAFTGGPETARHIIKNSAENLSQVSLELGGKSPVAV

SEQ ID NO: 77889 - protein, 170 aa, Unknown
  Bacterial polypetide isolated from the Sargasso Sea
GGSFAEVMFMGAAPFNAAPVTVGAGGAGGGAGLTSSTAGGASTFGSGSLVASCPGGPAISPTPAGSAPLISGGAISAAAPTTTGGFLLSARRGSGGGFGIVPAQGASGVGGQGGQAGDGGSGPTGSTNAAGTSATNFGAGGAGATQSVANAGALAGGSGLDGYIEVFEYT

SEQ ID NO: 77890 - protein, 287 aa, Unknown
  Bacterial polypetide isolated from the Sargasso Sea
AGITPFNFPAMVPMWMYPVAIACGNTFILKPSEKDPSCPLKLAELAVEAGIPPGVLNVVNGDKEAVDALLQDKNIQAISFVGSTPIAEYVYHNGTKNNKRVQALGGAKNHMVVMPDADVEKTTDAIIGSAFGSAGERCMAISVAVCVGEKTKEKMKNRLLEKTEKLHVGPYTDEKSDFGPLNNKAHYEKVLGYINTGEKEGAKLLADGRNLKLQGYENGYFVGPTIFEDVKPNMKIYKEEIFGPVLSMMTTKTYEDALKLVNDHELGNGAAVFTKSGNIAKHFTENA

SEQ ID NO: 77891 - protein, 238 aa, Unknown
  Bacterial polypetide isolated from the Sargasso Sea
KNPNIIMSDADLDIAIPGVIDGMRYTRQGQACTAGSRVYIQEKIYDKVLEGVVNKLTNLKMGNALDEKSDIGAIISEEQLNRTLHYMKIAKENSSTKVLHGGNQKKGGDHKEGFFYEPTLLSGVPVESPVCQEEIFGPVACAIPFKSFDEVLKSANNTPFGLSAVLWTQNLSRALQFVEEIEAGFVQVNQCVAPRANVSYGGLKMSGLGKEYAFDSMINHFTQSKTVLINRGNSNIDE

SEQ ID NO: 77892 - protein, 138 aa, Unknown
  Bacterial polypetide isolated from the Sargasso Sea
MNEMKKTPYIWLISGCSSGFGREIALQALSAGDFVGVSSRNVKDVEDICKEYPKTALPIKLDVTNKDEIKESIQTINKVYGGLDVLVNNAGYGYLAAIEEGENEEVRKLFETNFFGALELTKAALPGMRAQRFGRIIN

SEQ ID NO: 77893 - protein, 285 aa, Unknown
  Bacterial polypetide isolated from the Sargasso Sea
MTLNLGPQHPATHGTLRIIAKLDGEKVIAAEPIMGYMHRGYEKLTEVRTYPQVTTLVNRIDWLGSFANEVPFILAAEQLMDVEAPPRAQWIRTVLFELSRIANISLFLGDMAVQVGATTPVFYAFRDREFVLNQIERVTGGRFHPNFDRIGGLKDDLPKGWIEETGTVIGKMRDFCDEMEELVLGNEIFQARTRGIGVIPPEVALSYGLSGANLRASGVDWDIRRDANVGLVYDEVDWKVWTHPDGDSFSRFWVRLQETREACNIIEQLLGGIPAGPIMAKVPRI

SEQ ID NO: 77894 - protein, 272 aa, Unknown
  Bacterial polypetide isolated from the Sargasso Sea
MPELKKYKMFIDGEWDDSESKKTFETLNPENNEPWAVAPEASAKDVDRAVKAAQKAFEGEWPKLLPRDRAKFLRAIADQLRKNAEMLGEIETIDTGKLFRETKQQATYIAEYYDYYAGLADKVEGTVLPIDKPNVQAITTRIPIGVVAAIIPWNSQMFLTATKLAPALAMGNTVVIKSSELAPAVLFEFAKLVEKTGIPKGVFNVITGFGDPCGKSLTTHNLVEKIAFTGGPETARRIIKNSAENLSEVSLELGGKSPVAVFDDAEQENAIN

SEQ ID NO: 77895 - protein, 174 aa, Unknown
  Bacterial polypetide isolated from the Sargasso Sea
KKIDILVNNAGTNIPEHFSKVKKKNMEQLVKFNTISTFNVAQLCTLKMLETKNRKKIGGSIINISSQMAHVGGPIRSVYNMTKFGLEGLTKGMAIDLAKNNIRVNSVCPTFVITPMTKKFLKNKKFRKETLNKIPLGKFAELNDVATAVAFLASDSSSMITGTSILVDGGWTAI

SEQ ID NO: 77896 - protein, 267 aa, Unknown
  Bacterial polypetide isolated from the Sargasso Sea
GVCAGITPFNFPAMVPMWMFPMAIACGNTFILKPSEKDPSCSIRLAELFCEAGLPNGVLNIINGGKEVVDSIIENKDISAVSFVGSTPIAKYIYEHCAKNEKRVQALGGAKNHCVIMPDCDLDQAVNGLMGAAFGSAGERCMAQSVAVAVGNIGNDLVKNLAKKVETLKIGPGMDKKSEMGPLVTKEHLSKVKNYVDLGVKEGADLIVDGRDLKLQGYEKGYYIGGCLFDNVKKDMRIYKEEIFGPVLSIVRVKNFSEALNLVNDHE

SEQ ID NO: 77897 - protein, 157 aa, Unknown
  Bacterial polypetide isolated from the Sargasso Sea
VDPILDRFDKILFNKGDSSTGEVRTSMQKVMQEKCAVFRTDELISKGIEEFSHIESSMDNIDVKDKSMIFNTDLTESLELHNLMAQSKVTLHSALNRTESRGAHAREDHQERDDSNWLAHSLSWLDNKGGVRMGTRPVNMNTLTNHVQPIPPKKRVY

SEQ ID NO: 77898 - protein, 136 aa, Unknown
  Bacterial polypetide isolated from the Sargasso Sea
FYIGGCLFDHVIKDMRIYKEEIFGPVLSVVRVKKFEDAAKLINDHEYGNGVSIYTRDGDAGRTFASKIQIGMVGINVPIPVPMAFHSFGGWKRSLFGDSGMHGMEGIKFYTKLKTVTSRWPSGVRSNAEFVMPTMK

SEQ ID NO: 77899 - protein, 224 aa, Unknown
  Bacterial polypetide isolated from the Sargasso Sea
MRVLSASLTERHGVKVSGIPADLADPAGPQRLYDELNEAGQTIDLLVNNAGFGGVGRFEALDQVRQREMIDVNVSALTRLAGLMLPGMKARARGGIINVASTAAFQAGPFMAVYYASKAYVLSFSEALSEECRGTGVTVSCLCPGVTATEFFETAGFGDLPLYRLGMMDAVRVARLGYDGWRSGRAIVLPGLRNQVLVWGSRVLPRPVTRRAIRFLQEKSGAVT

SEQ ID NO: 77900 - protein, 213 aa, Unknown
  Bacterial polypetide isolated from the Sargasso Sea
NSAGQRCSACRILCVEENVYEKTLTMLRGAADSLLVSSPELISTDVGPVIDSFAKEKIQNHINNFTKKYQSKEIHNEGNFINPIIIEIKNINEVREEIFGPVLHILSFNSKNLIALCDQINSLNYGLTLGIHSRIDRVIETVINNSNVGNTYINRNIVGAVVGSQPFGGHHKSGTGPKAGGPEYLKKFCYEYSISNNIVAMGGNVELLSNIDD

SEQ ID NO: 77901 - protein, 221 aa, Unknown
  Bacterial polypetide isolated from the Sargasso Sea
MNYDHEYDVIVVGSGNGALTSALCSHDGGAKVLVIEKSNQFGGTSATSGGGVWIPNNRYAKAENVDDSIEDARNYIQSVSPKGKINNDLIETYIEQGPRMVDYLHENSRVKYRNLPHYPDYFPDNPGGKEGNRSMEPEPIKGTELGDDFKHLRGQHPQTAFTMGPVNMNFTQVEGQLLLGALPGWKTLFAKLFYQYILDIPMRFIHGWRDRRLTMGNAGIA

SEQ ID NO: 77902 - protein, 156 aa, Unknown
  Bacterial polypetide isolated from the Sargasso Sea
MRYDISDEAYTTHEHDVVVIGAGGAGLRAAIAASQEGASVALVCKSMLGKAHTVMAEGGAAAALANKDPRDNWKVHFRDTMKGGKYLNDWRMAVIHAQQAPDRIRELETWGAVFDRTPKGLTSQRNFGGHTYPRLAHIGDATGLELIRTLQEKGVH

SEQ ID NO: 77903 - protein, 229 aa, Unknown
  Bacterial polypetide isolated from the Sargasso Sea
MPSSPNSGDFVAFKDYAEYFATNKLIIGRNSSNIQGVAANSELTTNRASVVLVYVDGTEGWLYTVENNVGIEPPTYVTATGGTITTDGDYKVHTFTSSGTFTVTDAGDASTSNTVDYLVIAGAGGGGSSVNCQTSGGGGGAGGYRISYPNPATGGTPVSVQAYPITIGAGGAGGANPNPYTANAGAKGSNSVWNSITSAGGGAGGAYSQGGCRPGGSGGGARTNPSAPN

SEQ ID NO: 77904 - protein, 305 aa, Unknown
  Bacterial polypetide isolated from the Sargasso Sea
GLPDKVFNVVNGDKEAVDALINNKDVMAMSFVGSTPIAKYIYENCAKNEKRVQALGGAKNHCVVMPDCDLDQAVNGLMGAAYGSAGERCMAQSVAVAVGGIGDKLVSNLAKKVEALKVGPGMDKKSEMGPLVTKEHLEKVKGYIGIGEKEGAKLIVDGRNLKLQGYENGYYIGGCLFDHVTKDMRIYKEEIFGPVLSVVRAKNFEEALKLVNDHEFGNGVSIFTRDGDSGRTFSNKAKIGMVGINIPIPVPMAFHSFGGWKRSLFGDQHMHGPEGVRFYTKLKTITSRWPSGLRSDPEFVMPTMK

SEQ ID NO: 77905 - protein, 227 aa, Unknown
  Bacterial polypetide isolated from the Sargasso Sea
AKSINDWLQEINSKTQIDYSSHLYSESDLNPIKISEIKPNYNEESVNEDGRIILRENFDAILKKNNNVLIFGQDSGKIGGVNQGLEGLQKKYGEIRVFDTGIREATIIGQGIGLALRGLRPIAEIQYLDYLLYAIQIMSDDLASLHYRTRGKQKAPLIIRTRGHRLEGIWHSGSPMGGILNLIRGIFLLVPRNMTKAAGFYNTLLEGDQPALVIECLNKYRSKEKLP

SEQ ID NO: 77906 - protein, 205 aa, Unknown
  Bacterial polypetide isolated from the Sargasso Sea
MRRIDVLVNNAGVVNTSYHETSDGIENTFAVNHLGYFLFTNLLLHKLKGENETRIINVSSAAHSFVKEMQWQDINFKNNFKQGLRCYGQSKLANLLFTRYLAIKLSTENITVNAIHPGGVNTSLGSQNKVWYSKPLRLILRPFFRSPLKGAESIIYLASKQDDGVTGEYFVDSKIHKSSSYSKNLEEAHKLWSLSEEMVGQTFDL

SEQ ID NO: 77907 - protein, 169 aa, Unknown
  Bacterial polypetide isolated from the Sargasso Sea
LEKVKGYVDLGVKEGAKLLVDGRKLKLQGYEKGFYIGGCLFDNVKKNMRIYKEEIFGPVLSVIRVKNFDEALSLVNDHEFGNGVSIFTRDGDSGRTFSSKVKIGMVGINIPIPVPMAFHSFGGWKRSLFGDQHMHGPEGVRFYTKLKTVTSRWPSGMRSNPEFVMPTMK

SEQ ID NO: 77908 - protein, 330 aa, Unknown
  Bacterial polypetide isolated from the Sargasso Sea
YDYYAGMADKVEGTVLPIDKPNIQAITTRVPIGVIAAIIPWNSQMLLTVTKLAPALAMGNTVVIKSSELAPAVLFEFAKLVEETGIPKGVVNVITGYGDPCGKALTTHNLVEKIAFTGGPETARHIIRNSAENLSEVSLELGGKSPVVVFEDAHQENAINGITAGIFGASGQSCIAGSRLYLQKGIYNEFLDKLAARAEKIKIGAPMDPESEMGPIGNFKQLEIIEKNIKLTVEQGGKIKCGGKRHSFSNEGYYFPPTIIECGNHNLPTAENELFGPVLSVMKFENEEEVINKMNDNQYGLSSGVYTSDFSRGMRVSKAIRAGITFVNTY

SEQ ID NO: 77909 - protein, 143 aa, Unknown
  Bacterial polypetide isolated from the Sargasso Sea
KLQGYENGYFIGPSLFDNVTDEMKIYKEEIFGPVLSVVRAKDYNEALSLVNKHNFGNGTSIYTSSGDTARHFTTNCKIGMVGVNVPIPVPMAFHSFGGWKQSLFGDHAVHGSEGIHFYTKLKTTTSRWPTSIKSGPEFIMPTN

SEQ ID NO: 77910 - protein, 130 aa, Unknown
  Bacterial polypetide isolated from the Sargasso Sea
KHAGVFRNDELLLEGVGKMQHIYKRFADISIDDKSDTFNSEFIELLELKNLLDNSLVTMKSANFRKESRGAHSHENYPTRNDDDWLCHTLAKLTKANEVDKTRVSLSKRKVIFSTLNNEVNTIPLAQRVY

SEQ ID NO: 77911 - protein, 174 aa, Unknown
  Bacterial polypetide isolated from the Sargasso Sea
LISLDHLNKVKEYIESGIKEGATLVEDGRKLKLQGYEEGYFIGPSLFDKVTKNMKIYQEEIFGPVLSVIRVSSYEEAIDLINDHKFGNGTSIYTSDGEISRDFTTNIKVGMVGVNVPIPVPMAFHSFGGWKQSLFGDYSMHGTEGVRFYTKLKTVTSRWPKSINKGPEFIMPTN

SEQ ID NO: 77912 - protein, 214 aa, Unknown
  Bacterial polypetide isolated from the Sargasso Sea
VDACIAGRILNAGQSCIAAKRLIVTKLNSKIFTEKLISKLSMKIMGDPLDDVDIGPMVSIAARDEVADQVQRSISGGAKLNLGGKIQHGEGAYYPITILSDVRPGMPAFDEEIFGPVFTVITADDENNAIELANKSEFGLGAAIFTRDLEKGENIAKTKLQSGACFVNDFVKSDPRMPFGGIKMSGYGRELSDYGMMEFVNIKTIVVKSVGQES

SEQ ID NO: 77913 - protein, 76 aa, Unknown
  Bacterial polypetide isolated from the Sargasso Sea
DNLIRQAITTIESAYHRKESRGAHAREDFPKRDDQNYMKHTLGWHNGEEVKIGYRKVNLSTLTNEVQTFPPKERVY

SEQ ID NO: 77914 - protein, 248 aa, Unknown
  Bacterial polypetide isolated from the Sargasso Sea
MKGKKCIVTGGSSGIGEATVRRFISEGAEVLIADINLEDSKKLSEEIGEGVDYIKCDVRLEDDIISVSEKAYEMWDQVDVLVNNAGSELNQSYDKMTEAEWDNVLNTDLKGPWLMCKHIVPKMVEAGSGSVINISSLNGLVGFPLSTAYGSAKGGLVVFTRDMAIELASTGVRINCVCPGVIQTGMMERWTDLMPDKAEAQEMLRNTMPIGRMGTAEEVAGAIFFFASDDSSLCQGSVLSVDGGFTAQ

SEQ ID NO: 77915 - protein, 253 aa, Unknown
  Bacterial polypetide isolated from the Sargasso Sea
YAGGISNAGTLTFSSSSAQTLSGAISGSGGITKSGSGNLTLSGSSNFTGAIALSNGTLIAGADNALGSSPTITASNTPTFKTTNGTTLPSISVTGDVILESSVKTTGAQTYNDNVTVKGTGFSLITSNNNITIGGNLAAYNISGILELRYNGKYIFNGASEATASGSSTSIGNGSLTYSSSTFTWTKPSTLTSADLLIIAGGGGGGGSYVGGGGGAGGLIQKSSYSLSADTYAINIGAGGAGSPGHGGKGTNG

SEQ ID NO: 77916 - protein, 256 aa, Unknown
  Bacterial polypetide isolated from the Sargasso Sea
AEVDNMLKFEKEFENAKIIRLKQNYRSTNNILQSASSLISYNEMRLGKELISDQGTGDPIYLHLVNSSRDEANLVAQEILDYKKDNPDLNNVSILVRAVFQSREIEESLIKYSIPYRIIGGIRFYERAEIKDAISYLRLVYESQDDVAFERALTVPKKGIGEKSFNHILSLANRNRISLYQASKNMIDTDELTKKISESLKSFIGVIDRGKSMIENVPFYDILKVLLDESGYMNMLKNDKNVSAQTKIENLKELIV

SEQ ID NO: 77917 - protein, 283 aa, Unknown
  Bacterial polypetide isolated from the Sargasso Sea
MQIVLTPVAKGKVKATAHKCDLCQGREQGPACVENCPAQALQLVTENSLTGLSKARRLRTASLESQPWHASTTDFVPHVITKREQMQATPARGEPDKLAIDARKTSFEEIYLPFRTAQAEREASRCLKCGDHSICEWTCPLHNHIPQWIELVKAGNIDAAVELSHQTNCLPEVTGRVCPQDRLCEGACTVRNEHGAVTIGNIERYISDRALSKGWRPDLSHVQKVDKRVAIIGAGPAGLACADVLARSGISATVYDRHPEIGGLLTFGIRAFKLDKSLLTRRR

SEQ ID NO: 77918 - protein, 329 aa, Unknown
  Bacterial polypetide isolated from the Sargasso Sea
IDAIAAYNPDPDSVLHEVQDQADAIFTWDYEKGSRPRLDKLYEKAKVSQWNAQTDLDWSIEVDPLKAFNIFTEISNVNTGHWTEHPDSPAKNWGDKEWDQFSVESFAWRLSQFLHGEQGALLCTAKIVETVPWIDAKYYAATQVVDEARHVEVFNKYIDEKIGVRYPVNPHLQLLIDDVINDSRWDMTYLGMQIMVEGLALAAFGMMHQVTTEPLLKKLLRYVMADEARHVAFGVLSLQEVYQDMTAQEVRERQEFAFEAGIRMRDRLLQQEVWDRMGCDVKQAVKHGLDIPDEDQIFSQLLFSKIVPNCRKLGLLDAGDGWLRDRFTE

SEQ ID NO: 77919 - protein, 140 aa, Unknown
  Bacterial polypetide isolated from the Sargasso Sea
GYEKGFFVGPTIFDNVTDDMKIYQEEIFGPVLSILRVDNYSEALELVNNHIYGNGTSIYTSDGEVSRHFTSNSKIGMVGVNVPIPVPMAFHSFGGWKQSLFGDHSMHGIEGIRFFTKLKTVTSRWPKSIKSSPEYVMPTN

SEQ ID NO: 77920 - protein, 216 aa, Unknown
  Bacterial polypetide isolated from the Sargasso Sea
MAQSVAVAVGGIGDKLVSSLTKKVEALKVGPGMDKESEMGPLVTKEHLAKVKSYVDIGVKEGAKLLVDGRNFKIQGYENGYYIGGCLFDHVKKDMRIYKEEIFGPVLSVVRAKDFNEALQLVNDHEFGNGVSIFTRDGDSGRTFSNKAKIGMVGINIPIPVPMAFHSFGGWKRSLFGDQHMHGPEGVRFYTKLKTITSRWPSGLRSDPEFIMPTMK

SEQ ID NO: 77921 - protein, 257 aa, Unknown
  Bacterial polypetide isolated from the Sargasso Sea
FEFAKLIEKVGIPRGVVNIVSGFGEPCGRALTSHKLVERVAFTGGPETARHIIKNSAENLSQVSLELGGKSPVAVFEDADQENALNGITAGIFGASGQSCIAGSRLYIQNSIYDNFLEKILNKAKKIKLGSPMDNETQMGPLSSLKQLEIIEKNIKLTLDQGGKLRCGGKRHTMSNKGYYFPPTVIECDNHNLPTAENELFGPVLSVMKFNDENEVISKMNDNQYGLSSGVYTKDINRGLRETNAIRAGITFVNTYR

SEQ ID NO: 77922 - protein, 102 aa, Unknown
  Bacterial polypetide isolated from the Sargasso Sea
YKGMSDISVKDKSLLFNTDLVETLEFDNLISQALTTMDSAYNRKESRGAHAREDFTKRDDKNFMKHTLAWQNGKNVEIKYRDVHSRTLTNDVQYFPPKERVY

SEQ ID NO: 77923 - protein, 275 aa, Unknown
  Bacterial polypetide isolated from the Sargasso Sea
MFIDGQWVDSDTKKTFETLNPENNKPWAVVPEASANDVDRAVKAAQKAFEGEWPKMLARDRAKYLRAIGNKLRESSELLGKIETIDTGKLYRETYQQAKYIAEYYDYYAGLADKVEGTVLPIDKPNIQAITSRIPIGVIAAIIPWNSQMFLTATKVAPALAMGNTVVIKCSELAPATMFEFAKLVEETGIPKGVINVVSGFGDPCGKALTTHNLVEKVAFTGGPETARHIIRNSAENLSEVSLELGGKSPVAVFDDAKQENAINGITAGIFGASG

SEQ ID NO: 77924 - protein, 270 aa, Unknown
  Bacterial polypetide isolated from the Sargasso Sea
HKTGAPAWRGLFTPQRWCPQGRGAGVVGGKEHGRRVHPSRPGVCPVHPHQPASRSPRLHPARASCQRHRPDPRAVPGCPPPSRAQNKHRCHRCRRLHNCGHRAQDHPARTLGSRVRPLHARVLQAAGAPQRPSQHRTQPPHAADRVWRPLPPPAARAPRKGGGRCRGFVRFLRGCPRHARDVCHDLVVRHQCGARGPPAVPTAAAPQAPHRTRCRGPHGTAVAQRRPAGGHPAQEAPVQRCSWHTVAGDPRGRCRSPRRRRGHGHMRAVT

SEQ ID NO: 77925 - protein, 154 aa, Unknown
  Bacterial polypetide isolated from the Sargasso Sea
AELVVDGRDVSLQGYEKGFFLGGCLFDGVSPEMSIYKEEIFGPVLSVVRVPDYESALQLVRENPFGNGTAIFTRDGDAARDFSNRSNIGMVGVNVPIPVPVAYHSFGGWKDSMFGTSNTHGMDGVRFYTQLKTVTSRWPSGIRQGADFSIPTLK

SEQ ID NO: 77926 - protein, 197 aa, Unknown
  Bacterial polypetide isolated from the Sargasso Sea
LEKKVQALKVGPGLDKSSEMGPLVTKEHLEKVKGYVDLGVKEGAKLVVDGRNIKLQGYEKGFYFGGCLFDNVNKNMRIYKEEIFGPVLSVVRVKDFDSAVNLVNEHEFGNGTSIYTRDGDAGRTFANKIKIGMVGINIPIPVPVAYHSFGGWKRSLFGDQHMHGTEGVRFYTKLKTITSKWPKGLASDPEFVMPILN

SEQ ID NO: 77927 - protein, 302 aa, Unknown
  Bacterial polypetide isolated from the Sargasso Sea
GMTYGAPLLVNFRLIIWDIDEIAGTKSVRDIKEQEVYMGDIPLMTKNATFVVNGTERVVVSQMHRSPGVFFDHDFGKTHTSGKYLFNARIIPYRGSWLDFEHDAKNNIHARIDRKRKFPVTTLFKCLLSQRSEDYLEECDKNKVEPDQKRILGMTAEEILSIFYENILYKKNDFGWQFKEDLKFYKGKILNYDLLDSKNGKILITKGTKVNQKTINEIKKKNINSISIEDNSLIGLYLASDIIDEKTGKIYFEAGFEIDEEFLSFINSNKTNKLDILKVDNIEIGSYIRSTLQLDKARSREE

SEQ ID NO: 77928 - protein, 201 aa, Unknown
  Bacterial polypetide isolated from the Sargasso Sea
LINSLAKKVESLKIGPGMDKLSEMGPLVTKDHLEKVKNYVDIGKKEGAKLVVDGRNFKIQGYEKGFYIGGCLFDHVTKDMRIYKEEIFGPVLSVVRAKDFDEALKLVNDHEFGNGASIFTRDGDTGRTFSNKAKIGMVGINIPIPVPMAFHSFGGWKRSLFGDQHMHGPEGVRFYTKLKTMTSRWPSGLRSDPEFIMPTMK

SEQ ID NO: 77929 - protein, 124 aa, Unknown
  Bacterial polypetide isolated from the Sargasso Sea
VKCAVFRTEKTLREGVEEIRKPYEGMDSISVKDKSLIFNTDLVETLEFDNLIRQAIVTLDSAYERKESRGAHAREDHPKRDDNNFMKHTLSWCNGSKTKISYRDVHRSTLTNDVQYFPPQERVY

SEQ ID NO: 77930 - protein, 143 aa, Unknown
  Bacterial polypetide isolated from the Sargasso Sea
SEGSNPTSELRLSMQKTMQSKCAVFRTEKTLKEGIDEIRKPYDGMDSLSVKDKSLIFNTDLVETLEFDNLIRQAITTMDSAYHRKESRGAHAREDFPKRDDENYMQHTLSWCNGSKTKINYRPVHRSTLTNDVQYFPPQERVY

SEQ ID NO: 77931 - protein, 275 aa, Unknown
  Bacterial polypetide isolated from the Sargasso Sea
QRLIYEPKGVCALITPWNWPMNQTCLKVMPALASGCTMILKPSEVAPLSAMILTELIDEAGFPPGVFNLVNGDGATTGDALTSHPDINMISFTGSTRAGALISQNAAKDFKRVSLELGGKGANIIFKDADPEAIERGALRCFRNSGQSCNAPTRMLVEKSMYDEAVERVKKFANTMKVGDPKKEGEHIGPVVSEVQYKKIQSLIQKGIDEGAKLVAGGVGKPDGIDKGYFVKPTAFANVNNQMEIARTEIFGPVLSIIPFENEEEAISIANDTDY

SEQ ID NO: 77932 - protein, 165 aa, Unknown
  Bacterial polypetide isolated from the Sargasso Sea
KSGGGVESASKSDIDSSLERLNKLNESSEGFDPAEVKKELQECMQNYFGVFRRGEYMKKGLDKLNELREKVDNLHLKDKSDAFNTNRVEAIELQNLFEVAESTAISAYRRTESRGAHARDDYPDRDDDNWLCHSIYDPISKEVSKREVNFEPQKVEAFPPKIRTY

SEQ ID NO: 77933 - protein, 276 aa, Unknown
  Bacterial polypetide isolated from the Sargasso Sea
VLRNVEERKLKKNILGFKYDYPFGFAPMGMTNLSWPGADSMLAKESARNNIPTCVSMASTTTLEKMYELSEGHSWLQLYIFQDEAFVMELLDRAEKTGYEVAILTVDVPVLSRRTRDDKNGFSYPFKIGPKQFFDFATHPVWSISTLLNGIPKPMNYETSKSGKGIFKRKESRGKTDWETLKRVRNKWKGKLIVKGVMSSDDAIKIKEMGADAIQVSNHGGRQLDSASAAINILPFIREAVGNNFPIIFDSGIRSGSDIVRSLALGADFSMIGRPV

SEQ ID NO: 77934 - protein, 320 aa, Unknown
  Bacterial polypetide isolated from the Sargasso Sea
TVAENRIKKLYELEKELNWNGSIDLDWSYTHPADEPLLGVDGIEFPHEQLDAYKALSEEEKIEFDRHETAEVLCQFLHGEQGALLVASQIASCAPTFNAKMYAASQTFDEARHVEVFNRYLQEKIGFHYPINPSLKALLDKILTDERWDLKFIGMQIIIEGLALAAFTNMKLSARDPLLQTLLHYIIRDEARHVTFGINYLEDFVKTLSPEEIEERAEFAFEACVVSKDRLINTGAMTKFLKMSDEEARVFQLNNGGLDQFRSFLFSRVMPNLKRIGLLTDSVRPKYEELGILEYENAASDYEIDWAEISKPLESSDQVK

SEQ ID NO: 77935 - protein, 96 aa, Unknown
  Bacterial polypetide isolated from the Sargasso Sea
ISVSDKSLLFNTDLVETLEFDNLIRQAMTTIDSAYHRKESRGAHAREDYKNRDDKKYMTHTLAWQKGNDVKVAYRPVHAKTLTNDVQYFPPRERVY

SEQ ID NO: 77936 - protein, 243 aa, Unknown
  Bacterial polypetide isolated from the Sargasso Sea
MPTEIEQAGQDAQEPEQGETSEAVETPETEEKAAEESSGEETPEKLAEEKQKKRNSVQERISQLARQKNDANTRVQELEQQVAYLQAQSQPQAQDAPQAYPRLEDYDYDEARHQQAVLQYTSSVNAQNVQQVMQQQQQAQIAQLQAQKAQIASQEFVEKSNAFALDYKDFNETVTNPNFHQSDQVARTIVELPNGPDVAYYLGKNLKIANALNNKSERDARDDLIRISTALQVNSRKRRANTT

SEQ ID NO: 77937 - protein, 219 aa, Unknown
  Bacterial polypetide isolated from the Sargasso Sea
MKLFETLSLAGKTLKNRVVMPPMTRSRSTQPGDVPNTLMAEYYAQRASAGLIVSEGTQISALGKGYAWTPGIYTKAQIDGWKLVTDKVHEAGGVMFAQLWHVGRVSHPSNTEGQQPISASAIQAKGVKVFVDEGGNPGFVESVMPREMSIEDIKAVVEEYRVAARNAVDAGFDGIELHSANGYLLNQFIDSQSNTRTDEYGGSVQNRIRFLKRSGAGCV

SEQ ID NO: 77938 - protein, 304 aa, Unknown
  Bacterial polypetide isolated from the Sargasso Sea
MGYVRPNSLAKLREIKAEGGWSVVCTEEVWIHHSSEIVPHAEGILWDDDDIPALAKMTEAVHKHGSLAGIELQHGGHNSSNNYSRIPPIAPSSIVSSSYHPVQARAMDKKDIANFRKWHKKAALRSKKAGFDLIYVYAAHSGTLLTNFLSRMINKRTDEYGGSLENRVRLFRELIEDTKDAVGDSCAVAVRFAVEEFLGPMGITSENEGKEIVEMLAELPDLWDVNISNWSKDSAPSRFESEGYQESYISFVKSLTTKPVVGVGRFTSPDTMVSQIKHGVMDMIGAARPSIADPFLPKKMKKAE

SEQ ID NO: 77939 - protein, 170 aa, Unknown
  Bacterial polypetide isolated from the Sargasso Sea
VNPGSPHEEVSNSETEKCLNRFDRIRNSKGSTKTSELRLKMQKTMQSKCAVFRTEKTLKEGVEQIRLPYEGMNDISVKDKSLLFNTDLVETLEFDNLISQALTTMDSAYNRKESRGAHAREDYTKRDDKNFMKHTLAWQKGKEVQIKYRDVHSRTLTNDVQYFPPKERVY

SEQ ID NO: 77940 - protein, 242 aa, Unknown
  Bacterial polypetide isolated from the Sargasso Sea
LEGRVALVTGSSKGIGAGIARGLAREGATVIVHGRDVNQARGVAEKIEAAGGTAHVVTGDLTDAAQVEAMVSAAQAAAGDIDILVNNAGGSSGASDWSTTEAAAWSASYDANVVAAVRVTSAVLPAMRCARWGRIINISSLAGLMPPAANPDYSAAKAAMLAMSASMSKAVAADGVTVNTVSPGTIHSEKLDLKFREVAQTRGIVPDAPWDEVEAAVLPLFAAVPVGRVGTLEEIADAVCFL

SEQ ID NO: 77941 - protein, 198 aa, Unknown
  Bacterial polypetide isolated from the Sargasso Sea
MSFIIWKSELLSEKDKSLAEPNNLRSEYVDFKEIDNDFQFLDVGRYDPQKKDIESRKIHFVEIYGEYNQTQAANQAHRCLDCGNPYCEWKCPVHNYIPNWLKLVNEGNILEAVELCHQTNSLPEVCGRVCPQDRLCEGACTLNDGFGAVTIGSIEKYITDKAFEMGWKPDLSNRSWSGKKVAIIGAGPAGLSCADVLT

SEQ ID NO: 77942 - protein, 103 aa, Unknown
  Bacterial polypetide isolated from the Sargasso Sea
MKNIKVAVVTGSGKGIGARIVEKLAANNFAVVVNYASSSDAANELVDKIKSKGGQAIAVKADVSKPEQSKMLFDTALKKFGKVDVLVNNAGVMALSPLADTSD

SEQ ID NO: 77943 - protein, 314 aa, Unknown
  Bacterial polypetide isolated from the Sargasso Sea
IKASELAPATMFEFAKLIEETGIPKGVVNVITGFGDPCGKALTTHNLVEKVAFTGGPETARHIIRNSAENLSEVSLELGGKSPVAVFNDAHQENAVNGITAGIFGASGQSCIAGSRLYLQKEIYNEFLDKLTARAEKIKIGAPMDPDTEMGPLSNFKQLEVIEKNIKLTIEQGGKIKCGGKRHSFSNEGYYFPPTIIECDNHNLPVAENELFGPVLSVMKFENEKEVIEKMNDNQFGLSSGVYTSDLARGLRVSNAIRAGITFVNTYRLISPSAPFGGIKDSGYGKEAGVDSIKDYTRVKTIWYYTSDEPTLDP

SEQ ID NO: 77944 - protein, 94 aa, Unknown
  Bacterial polypetide isolated from the Sargasso Sea
MHEYDVVIIGAGGAGLRAAIEATREGVSVAVICKSMLGKAHTVMAEGGAAAALGNKDPRDSWETHFRDTMKGGKYLNDWRMAEIHAKESPDRIR

SEQ ID NO: 77945 - protein, 152 aa, Unknown
  Bacterial polypetide isolated from the Sargasso Sea
MNKKEIITQYNIKLELIKKLNKFYFDKSKPIVSDEEYDDLKKEIILLENKYKFLVSNNSPSKSVGHKPSKNFKKANHKVPMLSLANAFSEEDLINFEKKITNFLSQKEGFEISFSAEPKIDGISASCTYKNGIFVRGLSRGDGKEGEDITNN

SEQ ID NO: 77946 - protein, 268 aa, Unknown
  Bacterial polypetide isolated from the Sargasso Sea
IAFTGGPETARHIIRNSAENLSEVSLELGGKSPVAVFEDAHQENAINGITAGIFGASGQSCIAGSRLYLQKGIYNEFLDKLAERAEKIKIGAPMDPESEMGPIGNFKQLEIIEKNIKLTVEQGGKIKCGGKRHPFSNEGYYFPPTIIECDNHNLPTAENELFGPVLSVMKFENEEEVINKMNDNQYGLSSGVYTSDFSRGMRVSKAIRAGITFVNTYRLISPSAPFGGMKDSGYGKEAGIESIKDYTRVKTTWYYTSDKPTLDPFSMR

SEQ ID NO: 77947 - protein, 189 aa, Unknown
  Bacterial polypetide isolated from the Sargasso Sea
LIDLVVFGKAASLTCKEKVKPNSKKIEISKSKTNNIIERFDKIRNSKGNSTTGELRTSMQHIMQQKCAVFRTHDLISKGIEEYSKVESSMDDIDIKDKSLIFNTDLVEALELHNLMAQSKVTLHSALNRTESRGAHAREDYKERDDNNWLVHSLAWLNDKGDVSMGSRGVHMNTLTNHVQPIPPKRRVY

SEQ ID NO: 77948 - protein, 284 aa, Unknown
  Bacterial polypetide isolated from the Sargasso Sea
TKVAPALAMGNTVVIKCSELAPATMFEFAKLVEETGIPKGVVNVVSGFGDPCGKALTTHNLVEKVAFTGGPETARHIIRNSAENLSEVSLELGGKSPVAVFDDAKQENAINGITAGIFGASGQSCIAGSRLYLQKGIYNEFLDKLASRAEKIKIGAPMDSDTEMGPLSNFKQLEVIEKNIKLTVEQGGKIKCGGKRHPFSNEGYYFPPTIIECENHNLPAAENELFGPVLSVMKFDTEKEVIELMNDNQYGLSSGVYTSDLARGMRVSNAIRAGITFVNTYRLI

SEQ ID NO: 77949 - protein, 199 aa, Unknown
  Bacterial polypetide isolated from the Sargasso Sea
MGANRLGTNSLIDLVVFGKASSITAKEKVKPNSKPVDIDESTIDPILDRFDKIRFNKGDSSTGEVRTSMQKVMQEKCAVFRTDELISKGIEEFSHIESSMDNIDVKDKSMIFNTDLTESLELHNLMAQSKVTLHSALNRTESRGAHAREDHQERDDSNWLVHSLSWLDNKGGVRMGTRPVNMNTLTNHVQPIPPKKRVY

SEQ ID NO: 77950 - protein, 211 aa, Unknown
  Bacterial polypetide isolated from the Sargasso Sea
AVAVGGIGDKLVDSLAKKVHLLKVGPGMDKQSEMGPLVTKEHLDKVKGYVDIGEKEGAKLVVDGRNFKLQGYENGYYIGGCLFDQVTKNMRIYKEEIFGPVLSVIRAKDFDEALQLVNDHEFGNGVSIFTRDGDSGRTFSNKAKIGMVGINIPIPVPMAFHSFGGWKRSLFGDQHMHGPEGVRFYTKLKTITSRWPSGLRSDPEFVMPTMK

SEQ ID NO: 77951 - protein, 276 aa, Unknown
  Bacterial polypetide isolated from the Sargasso Sea
RPLGVVFAIMPWNFPFWQVFRALAPALMVGNGLLLKGASNVPGCSQAIAQLLTEIDVPAGLLTNLPIHAEEAERVIAHPLVRAVTLTGSESAGRAVAALAGAHLKKCVLELGGQDPYIVLADADITLAAQKCVQSRMLCSGQVCIAAKRLIVVDAIYDAFRSEVLKQLEPYLLADPTDSSCRLGPLAREDLRDLVHAQVAASIAAGCRLLIGGVIPKQPGWWYPATVLEGVSPGTTAFDDEVFGPVVSLIRARDEEEALTLAAESRFGLGAAIFTA

SEQ ID NO: 77952 - protein, 191 aa, Unknown
  Bacterial polypetide isolated from the Sargasso Sea
IYPIKLDLENEESVKEAFIKINSLNLEIDILVNNAGTIHTALFQMTSVRKLKEIFQVNFFSQTIFTQYIIKSMMKRKSGSIIYISSSSALDSNIGRSAYSASKAALIAQSKTLSKELGSLNIRVNTIAPGLTNTDMMKENTSQEVIKEVTSNLSLKRIGEPNEIANLALFLASDLSSYITGQVIRIDGGMK

SEQ ID NO: 77953 - protein, 267 aa, Unknown
  Bacterial polypetide isolated from the Sargasso Sea
ESARNNIPTCVSMASTTTLEKMYELSEGHSWLQLYIFQDEAFVMELLDRAEKTGYEVAILTVDVPVLSRRTRDDKNGFSYPFKIGPKQFFDFATHPVWSISTLLNGIPKPMNYETSKSGKGIFKRKESRGKTDWETLKRVRNKWKGKLIVKGVMSSDDAVKIKEMGADAIQVSNHGGRQLDSASAAINILPFIREAVGNNFPIIFDSGIRSGSDIVRSLALGADFSMIGRPVMYAMGADGASGLRRIVDIIKEETSTTLGLVGLNDI

SEQ ID NO: 77954 - protein, 126 aa, Unknown
  Bacterial polypetide isolated from the Sargasso Sea
MQSKCAVFRTDKTLKEGVEEIRKPFDGMKKINVKDKSLIFNTDLVETLEFDNLIRQAITTMDSAYSRKESRGAHAREDYPKRDDQNYMKHTLSWCNGSKSKIAYREVNKSTLTNEVQYFPPQERIY

SEQ ID NO: 77955 - protein, 108 aa, Unknown
  Bacterial polypetide isolated from the Sargasso Sea
MDTLLDGCLFDHVKEDMQIYREEIFGPVLSVVRQPTFDDALKMVNDHEFGNGTTIYTRDGDTARAFANQCKIGMVGVNVPIPVPMAFHSFGGWKRSLFGDHAMHGMDG

SEQ ID NO: 77956 - protein, 249 aa, Unknown
  Bacterial polypetide isolated from the Sargasso Sea
MSKKISFTFDGKKYFGHEGDTLAEALLDNGVFLVGRSFKYHRPRGIISAGSEEPNAIVQLETGNITEPNVRATEIIIYEGLIAKSQNNWPNVNFDFGAINDFLSRFFPAGFYYKTFMWPPKFWEKYEYFIRKAAGLGISPKEDDPDRYEHFHYHCDVLVVGGGISGLYAAELAAKTNLKVLLIEQYSKLGGEINNDSRLKLNPITQETIDNFPAILFDEIYSKLKKRKNVKIITNTTVFAYMHNKLFTC

SEQ ID NO: 77957 - protein, 215 aa, Unknown
  Bacterial polypetide isolated from the Sargasso Sea
VQSAQKAFENNWSKLHPRDRAKYLRLIADQLRENAEHLGKIETIDTGKLYRETKTQANYIAEYYDYFAGLADKVEGTVVPIDKPDMQVTTTRIPIGVVAAIIPWNSQMLLTAVKLAPALAMGNTVVIKASELAPVTLLEFAKLIEKAGVPKGVINIITGLGEPCGKALTTHHLIERIAFTGGPETAKHIVKNSAENLSQVSLELGGKSPVVVFDD

SEQ ID NO: 77958 - protein, 203 aa, Unknown
  Bacterial polypetide isolated from the Sargasso Sea
SAGERCMAISVAVAVGNVADKLIESITPKINKIKVGPYNDKQTEMGPVVSKKALERIQSLIASGVEEGANLLIDGRDVKLQGYENGYFIGPCLFDKVNPNMSIYKEEIFGPVLSIVRADSYNQALQMVKDNPYGNGCSIFTRDGDTARDFSNEANIGMVGVNIPIPVPVAYYSFGGWKNSIFGGHNAYGMEAVRFYTKVKTVT

SEQ ID NO: 77959 - protein, 289 aa, Unknown
  Bacterial polypetide isolated from the Sargasso Sea
MSKLKQYKMFINGEWVDSESKKTFETLNPEHNEPWAVVPEASAKDVDNAVKAAQKAFEGEWSKLLPRERAKYLRAIGNQLRENAKMLGEIETIDTGKLYRETKKQAVYIAEYYDYYAGLADKVEGTVLPIDKPNVQAITTRIPIGVIAAIIPWNSQMFLTATKVAPALAMGNTVVIKSSELAPAVLFEFAKLVEKTGIPKGVVNVITGFGDPCGKSLTTHNLVEKVAFTGGPETARHIIKNSAENLSEVSLELGGKSPVAVFDDAEQENAINGITAGIFGASGQSCIAG

SEQ ID NO: 77960 - protein, 212 aa, Unknown
  Bacterial polypetide isolated from the Sargasso Sea
VAVAVGNVGDKLVNELAKKVEALKVGPGMDKNSEMGPLVTKEHLEKVKGYVDLGVKEGANLVVDGRNIKLQGYENGFYIGGCLFDNVKKDMRIYKEEIFGPVLSVVRAKDFDEATQLINDHEFGNGTSIYTRDGDVGRTFASKIKVGMVGINIPIPVPVAFHSFGGWKRSLFGDQHMHGPEGVRFYTKLKTITSRWPSGVRSNPEFVMPTMK

SEQ ID NO: 77961 - protein, 267 aa, Unknown
  Bacterial polypetide isolated from the Sargasso Sea
GVFNVINGDKEVVDAILTNKEIKAVSFVGSTPIAKYIYENAAKNEKRVQALGGAKNHCVVMPDCDLDQAVNGLMGAAYGSAGERCMAQSVAVAVGDVGDHLVSKLGKKVEALKIGPGMDKTSEMGPLVTKEHLEKVKGYVDIGVKEGAKLVVDGRNLKLQGYENGYYMGGCLFDHVKKNMRIYKEEIFGPVLSVVRAKNFEEATQLVNDHEFGNGTSIYTRDGDVGRTFASKIKIGMVGINIPIPVPVAFHSFGGWKRSLFGDQHMH

SEQ ID NO: 77962 - protein, 162 aa, Unknown
  Bacterial polypetide isolated from the Sargasso Sea
MISGVKEGAKLVVDGRDINLQGYENGYYIGGCLFDHVKKDMRIYKEEIFGPVLSVVRVKNFDEALQLINDHEFGNGTSIYTRDGDAGRTFANKIKVGMVGINIPIPVPVAYHSFGGWKRSLFGDQHMHGPEGVRFYTKLKTITSRWPSGFRSSPEFVMPVMK

SEQ ID NO: 77963 - protein, 181 aa, Unknown
  Bacterial polypetide isolated from the Sargasso Sea
KGAPKPMNYVTSKTGDQIFRRKESRGATDWDTLNRIRDSWKGKLIIKGVMNADDAKKIMESGADAIEVSNHGGRQLDSATAAINALPLIRKSVGKEYPLIFDSGIRSGSDILRALAFGANFVMLGRPLMYAIGADGARGLRRIINLIKEELSTNLGLVGLTNINQVDEKIIAEKYFKDINY

SEQ ID NO: 77964 - protein, 92 aa, Unknown
  Bacterial polypetide isolated from the Sargasso Sea
PNLKPASGTVFNTSLMDWLDLRNSLLCAEAICLAANERKESRGAHQMEDIPFKSDKFIKNQIISMIDGNLVSRWQDVQKLEFDLQKKRLAKV

SEQ ID NO: 77965 - protein, 301 aa, Unknown
  Bacterial polypetide isolated from the Sargasso Sea
WNSQMFLTATKVAPALAMGNTVVIKCSELAPATMFEFAKLVEETGIPKGVINIVSGFGDPCGKALTTHNLVEKVAFTGGPETARHIIRNSAENLSEVSLELGGKSPVAVFDDAKQENAINGITAGIFGASGQSCIAGSRLYLQKGIYNEFLDKLASRAEKIKIGAPMDSDTEMGPLSNFKQLEVIEKNIKLTVEQGGKIKCGGKRHPFSNEGYYFPPTIIECENHNLPAAENELFGPVLSVMKFNTEKEVIELMNDNQYGLSSGVYTSDLARGMRVSNAIRAGITFVNTYRLISPSAPFGG

SEQ ID NO: 77966 - protein, 153 aa, Unknown
  Bacterial polypetide isolated from the Sargasso Sea
MELGLNNKVVLITGGARGIGAATVRAFLNENSNVIFADRDFESGEKLAKSIGPNVKFIEAELNTIESCRKTVEKTVSFFGGIDVLVNNAGFNDGLGLETPPEEFMNSVRSNLLHVYAITHYSLPQLRRSKGCIVNLGSKVSETGQGNTSAYAA

SEQ ID NO: 77967 - protein, 178 aa, Unknown
  Bacterial polypetide isolated from the Sargasso Sea
MGPLVTKEHLEKVKGYVDLGVKEGAKLVLDGRNLKLQGYENGFYIGGCLFDHVTTDMRIYKEEIFGPVLSVVRVKTFEEATKMINEHEYGNGVSIYTRDGDAGRTFASKIQVGMVGINVPIPVPMAFHSFGGWKRSLFGDSGTHGMEGVKFYTKLKTITSRWPSGIRSNPEFIMPTMK

SEQ ID NO: 77968 - protein, 202 aa, Unknown
  Bacterial polypetide isolated from the Sargasso Sea
PLNLSTCACILAGHKDDVRPYTPISTNAMIGSFELLVRAYPDGALSQRLATMELDEAMAFKHIKFNVKTQYPFSAKKVGMLAGGTGITPMLQALHAILGAPDDETEVSLVYGSKTSEGILARDTLHDWEAEHFWRFKVTHVLGGFIGEDHVRRHLPSPSEDCVLFVCGPDLMYNALCGPRGDPEVTGLLKKLGYAKSQVYKF

SEQ ID NO: 77969 - protein, 222 aa, Unknown
  Bacterial polypetide isolated from the Sargasso Sea
MGSRLENKVAIVTGGASGIGEAISKMFFDEGSCVCIIDTNNEKLRLLEEKISSKEKIIIKNFDVSDEKSWKECVDTILKKWGKIDILVNNAGMSLRSTFEDMERSDWDRVFAVNSTSVMIGTKSVISNMKKNESGSIINISSIFGIIGSARGSTAYHASKGASRIFTKTIAAQYGKYNVRSNSIHPGFTDTPMTEDIHSIEQIRNERLDMTPMGRLGTPEDM

SEQ ID NO: 77970 - protein, 146 aa, Unknown
  Bacterial polypetide isolated from the Sargasso Sea
SGPMGSFYLRNGERPLLMLAGGTGLAPLLSMLHTLARQGSTRPITLLYGVTRDGDLVKTEALDAFVGQLSDYRWLPVVADEQSACPQRGFVTGHLDEAMLNDGDVDIYLCGPPPMVNAVSGALRERGINPAGFWYEKFLASQSAAA

SEQ ID NO: 77971 - protein, 71 aa, Unknown
  Bacterial polypetide isolated from the Sargasso Sea
NKGHMAKPTTFTDVNNDMKIAREEIFGPVLSIIPFDTEEEAIKITNDTSYGLGNYLQTEDKEKAKRVARKV

SEQ ID NO: 77972 - protein, 136 aa, Unknown
  Bacterial polypetide isolated from the Sargasso Sea
MNQLVTLSLENNEFEKGNFVPPSLFGNVQPDHVLAQEEIFGPVQVIIPFKDEEEAIRIANGTKFGLVAGIWTKDGSRQMRMAKQLKAGQVFVNNYGAGGGVELPFGGVGHSGFGREKGFEALKGFSVIKTVAVNHG

SEQ ID NO: 77973 - protein, 240 aa, Unknown
  Bacterial polypetide isolated from the Sargasso Sea
MSEVSGKVVIITGASSGLGEATAKMLADKGAKLVLGARREDRLKKLVDEIESSGGQATYQTVDVTKKDEVKALAKAAIDAYGRIDVLVNNAGLMPLAPLDEMKVDEWDQMIDVNIKGVMYGVAAVLGQMREQKSGHIINLSSVAGHVVFPGATVYCATKFAVKAISEGIRRESNGEIRSTNISPGAVATELTDHISHKDSKQMADDMYDDAIDADAIARAVTFAIEQPGDVDINEMIIRP

SEQ ID NO: 77974 - protein, 313 aa, Unknown
  Bacterial polypetide isolated from the Sargasso Sea
ACGNTFILKPSEKDPSCSIRLAEYFTEAGLPDGVLNVVNGDKEVVDAILTNKDIQAVSFVGSTPIAKYIYETAAKNEKRVQALGGAKNHCVVMPDCDLDQAVNGLMGAAYGSAGERCMAQSVAVAVGNIGDKLVNELAKKVEALKVGPGMDKNSEMGPLITKEHLEKVKGYVDLGVKEGANLVVDGRNIKLQGYESGFYIGGCLFDNVKKDMRIYKEEIFGPVLSVVRAKDFDEATQLINEHEFGNGTSIYTRDGDVGRTFASKIKVGMVGINIPIPVPVAFHSFGGWKRSLFGDQHMHGPEGVRFYTKLKTI

SEQ ID NO: 77975 - protein, 199 aa, Unknown
  Bacterial polypetide isolated from the Sargasso Sea
MYLKKINLKKKYALVTGAGKGLGRACSIALAEAGATVIGLSRTQSDLDKLQKDIKKVKGKLIKINCDVMNYNDLKIKIEKIKTIDVLVNNAGTNIPEPFEKIQQKSMNYIVDLNLKAAFNVAQLVVKKMLKNKKIGGSIINMSSQLGHVGMTGRNVYNMTKFGIEGLTKGMGVELASRSIRVNSVAPTFVETPNGKEIF

SEQ ID NO: 77976 - protein, 263 aa, Unknown
  Bacterial polypetide isolated from the Sargasso Sea
MIKKKDSKLIIIAVASPLQYRTGHIPGSHQIWRGDYTGKSSEGFGGMLASKDTFQKLMRSLGVNNNSKVVLYDHKYDSTRVWWAFFKNGKKDIRILDGGIAGWKASGGKTNILAPSKPKAGNFTAKFDSKMMMATMKDVQTARKNASKYQIWDTRETKEWTGEQLKKGAYRKGRIPGAEFMNWQKFRDKKTGEFYDAKRIKKVIAEMGIDRNKKHIFYCQSGVRTTVEMFSLYLMGWPEENLLNYDGSWIEWSFHKKNPVTKD

SEQ ID NO: 77977 - protein, 248 aa, Unknown
  Bacterial polypetide isolated from the Sargasso Sea
NAMVIDSSALFEQACDDVIRSAFMSAGQRCSALRIALIHEDIYQDFKAMLAGAIDDLVVGNPKETRTDVGPIISVDAANKIKAYVDLKRSEGFKIFCANENNAHTDQFIQPTFIEMSSLSDINEEIFGPVLHLVSFQEKNLEIVLQELKSKGFGLTFGIHSRIESKATKMSKLVSSGNSYINRDMIGAVVGTQPFGGSGLSGTGHKTGGPNYLIQFVNEKLVSINTVAIGGNAELLNLETENGNSQGT

SEQ ID NO: 77978 - protein, 252 aa, Unknown
  Bacterial polypetide isolated from the Sargasso Sea
MYLQKINLKKKYALVTGAGKGLGRACSIALAEAGATVIALSRTSSDLNKLEKDIKKVKGKIIKVSCDVMNYEDLKHKLDKIKIIDVLVNNAGTNIPEPFEKIKQKSMNYLVDLNLKAAFNVAQIVVKKMLKNKKRPGSIINMSSQLGHVGMGGRNVYNMTKFGIEGLTKGMGVELAKKNIRVNTVAPTFVETPMVKNFFKNKKFKKLALGNIPMGKAATESDVATTVCFLASSASSMITGTSIIIDGGWTAQ

SEQ ID NO: 77979 - protein, 134 aa, Unknown
  Bacterial polypetide isolated from the Sargasso Sea
RTSMQKVMQEKCAVFRTDELISKGIEEFSHIERSMDNIDVKDKSMIFNTDLTESLELHNLMAQSKVTLHSALNRTESRGAHAREDYHERDDSNWLVHSLSWLDSKGDIKMGTRPVHMNTLTNHIQPIPPKKRVY

SEQ ID NO: 77980 - protein, 157 aa, Unknown
  Bacterial polypetide isolated from the Sargasso Sea
MYLQKINLKNKYALVTGAGKGLGRACSIALSEAGATVIALSRTSSDLNKLEKDIKKVKGKIIKISCDVMNYEDLKQKLDKIKIIDVLVNNAGTNIPEPFEKIKQKSMNYLVDLNLKAAFNVAQLVVKKMLKNKKRPGSIINMSSQLGHVGMGGRNGI

SEQ ID NO: 77981 - protein, 262 aa, Unknown
  Bacterial polypetide isolated from the Sargasso Sea
MEIIPLILLLLICSALLIGYPVALTLAGVSILFALICVPFEIFDPTIFKSIPIRIFGIMNNMTLLAVPLFIFMGTILERSGVAAKMLENMATAFKSIKGGLSISIIIVGALLAASTGIVGATVVTMGLMSLPIMINQGYEKSFSAGLVASTGTLGQIIPPSIALVLLGDVMSNAYQRAQNDMGIFSQQTVTVGDLFVGAIIPGVLICIGYLIYTMYKNRNNKNLKIYNNNARINQVEVIKTLAMPVTLIFLVLGSIFAGIAT

SEQ ID NO: 77982 - protein, 227 aa, Unknown
  Bacterial polypetide isolated from the Sargasso Sea
MKKKLSITRRDFINGVSYGLAASVAPIDFLKAKNIDPFKYPPALTGIRGNHPGSFDHAHRLALAGGNFLEEIIDLGESNDLIVVGGGISGLSAAYFYQERTASNQNILILDNHDDFGGHAKRNEFQVDGREMLTYGGSQSIESPSYYEEVSKKLMADLGIDFQKFYRAYDFDYFKSRGLTSSFFFNKETYGENKIVRKCSNYRYDINHKNNTKPENIKKVVKEMPIS

SEQ ID NO: 77983 - protein, 243 aa, Unknown
  Bacterial polypetide isolated from the Sargasso Sea
GKATALAFADLGANIAVCDMLDDELAETEAEIEARGVTVLAESFDVRDAERVDAFMARAHAEMGPVDVLVNNAGGGFWAPFTDVSAKGEQALVSENFSTVTNCVRAVTPLMADGGSIINVTSVEAYHAAPGFAVYAAMKAAVQQFTQSLAVELGARSIRVNCVAPDMIPTPGDADLAEDSGALISGLQPTPLGRTGTPEECAAVIVFLASDLASFVTGSTIPVDGGTVAAGSWKVRDDGTWGM

SEQ ID NO: 77984 - protein, 236 aa, Unknown
  Bacterial polypetide isolated from the Sargasso Sea
MKSIFDSITLGKNTLQNALVMAPMTRSRANRDGTPGALAADYYSQRASLGLIVTEGIQPSDDGQGYIFTPGIYTQAHIDGWKPVTQAVHAKGGRIFFQLMHAGRMSHPDNTPHHRAGLAPSAIAPGTQMFTLKGMLDIPVPEAMTQVQIKQAIGEFRHAARSAIEAGADGVEIHGANAYLIQQFLAPSSNTRTDEYGGSIENRARFAIEIAKAVAEEIGAERTAIRLSPGTKFVGH

SEQ ID NO: 77985 - protein, 266 aa, Unknown
  Bacterial polypetide isolated from the Sargasso Sea
ILFSLVFVVYFNLNVQGVALGTLVSSTLTSIIFLFFTVFEFKKIKNLEFNYKKIFNFNKIKNIFNINLNIFIRSILLTFSFLFFTYLGNSISEDVVAANTILINLIMLSAFILDAYAFSTEGLVGYSIGSKNKKLLKEIIKNSFILSSSTGLIISFGYFLGKNHFIEIMTDLESIKNICLSYSVWIVIIPFISSFCYQFDGIFVGASKTKELRNAMIMSVSIYLLTALFLVNFFGNLGLWISLSIFFILRGLTLFLYLGRIYKRFK

SEQ ID NO: 77986 - protein, 115 aa, Unknown
  Bacterial polypetide isolated from the Sargasso Sea
YHPTVIANCKQDMRIIQEEIFGPVLPLVEFEDLDQAIEYANDSDYGLTSSIFTNNLKTALKACNEIRFGETMINRDNMEIFQSFHAGLRKSGIGGADGKHGLYEYMQTHAVYMRA

SEQ ID NO: 77987 - protein, 158 aa, Unknown
  Bacterial polypetide isolated from the Sargasso Sea
MSRVIIHPKVKDEYMTKLYEKTKELRIGPGNNENTEVTPLISKEQLQRVSNYCNSGVQSGASLVTGGEKHDSGKGNFFKPTIFDNVDPKSTIAQEEIFGPVTSIINFENEEEAIRIANSTDYGLASGVFTSDDQKAKWTAERIEAGVIWHNDWFVDGV

SEQ ID NO: 77988 - protein, 222 aa, Unknown
  Bacterial polypetide isolated from the Sargasso Sea
MPDCDLDGAVNGLMGAAYGSAGERCMAQSVAVAVGDIGDELVSRLSKKAEALKVGPGMDKTSEMGPLVTKEHLEKVKSYVDLGVEEGAKLVVDGRNLKLQGYENGFYIGGCLFDHVNKDMRIYKEEIFGPVLSVVRVKTFEEAAKLINDHEYGNGVSIYTRDGDAGRTFASKIQVGMVGINVPIPVPMAFHSFGGWKRSLFGDSGMHGMEGIKFYTKLKTVT

SEQ ID NO: 77989 - protein, 151 aa, Unknown
  Bacterial polypetide isolated from the Sargasso Sea
DKALHNLNILNESSSGHEVSTVKKELQEVMQNYFGVFRRGDYMEKGVAALNDIREKIENLHLIDKSAAFNTNRVEAIELQNLFEVAEATAISSLQRTESRGAHAREDYPNRDDENWLCHSLYDPITKTLGKRHVNFEPSQVEAFPPKVRTY

SEQ ID NO: 77990 - protein, 299 aa, Unknown
  Bacterial polypetide isolated from the Sargasso Sea
AASLAAGNCLVIKPAEEACLTVLKIASYALEVGLPPDVINIVTGYGEDIGPSLCKHNDIDHICFTGSPEVGSIVQQNASLSNKSCTMELGGKSPQIVFSDCNIENAIPIILNSITQNSGQTCSAGSRLLIEKSIYEKFFNIFIGKFSNLLVGSAEMDLDLGPLISLKQKNRVLSFYENADQDGISILAKGSISDNVSKTGFFVSPILLGPVPTDNTLAKEEIFGPCLSVIPFSNENEAISIANGTQYGLTAGIWTNDGSKQLRVANALKCGQVFINCYGAGGGVELPFGGMKKSGFGRE

SEQ ID NO: 77991 - protein, 189 aa, Unknown
  Bacterial polypetide isolated from the Sargasso Sea
KVGPGMDKNSEMGPLVTKEHLEKVKSYVDLGVKEGAKLVVDGRNLNLQGYEKGFYIGGCLFDNVTKDMRIYKEEIFGPVLSVVRVKTFEEASKLINEHEYGNGVSIYTRDGDAGRTFASKIQVGMVGINVPIPVPMAFHSFGGWKRSLFGDSAMHGTEGIKFYTKLKTITSRWPSGIRSNAEFVMPTMK

SEQ ID NO: 77992 - protein, 163 aa, Unknown
  Bacterial polypetide isolated from the Sargasso Sea
EKISNSETDKCLDRFEKLRNGNGSNRTADLRLAMQKTMQSKCAVFRTEKTLKEGVKEIRKPFEGMDSISVKDKSLIFNTDLVETLEFDNLIRQAIVTIDSAYERKESRGAHAREDYPKRDDNNFMKHTLSWCKDSKTKISYRDVHRSTLTNDVQYFPPQERVY

SEQ ID NO: 77993 - protein, 235 aa, Unknown
  Bacterial polypetide isolated from the Sargasso Sea
VEKTGIPKGVINIITGLGEPCGKSLTTHNLVERIAFTGGPETAKHIVKNSAENLSQVSLELGGKSPVAVFNDADQENALNGITAGIFGASGQSCIAGSRLYLQSKIYDEFLNKLIGKAEKIKLGAPMEESTQMGPLNSLKQLENIEKNIKATIEQGGKIRCGGKRSSISNKGYYFPATIIECENHNLPVAENELFGPILSVMKFDNEDEVIKKMNDNKYGLSSGVYTSNFARGLR

SEQ ID NO: 77994 - protein, 255 aa, Unknown
  Bacterial polypetide isolated from the Sargasso Sea
MHVGGEEILAKAGDTIVVGNPAFRGLPLALVPRSYQEDVDHAVHVAQDAFQSWRKVAPRERGRIMLRIADALESAAEEIAILISTETGNALAPQSRPEANTTAEVFRYFGGVANELKGETIPLGENLLVYNRREPIGVVGGIIPWNSPVLLGALKIAMAITAGNTLVLKAAEDAPLAVLKMSEICNNFLPAGVLNVLTGYGEEAGAALAAHPLVRKLSFTGSTDVGKLIMHAAADRIVPVSLELGGKSPVVVYPD

SEQ ID NO: 77995 - protein, 124 aa, Unknown
  Bacterial polypetide isolated from the Sargasso Sea
MSDRLQKKIAMITGGASGIGEGMVRRFCAEDAKVIIADVDEANGSRIAAECGADFALLDVSSADSWQLLEKKIRGDEGRLDILVNNAGVVTGLDITAVTVDAWQQLMSINLLGMMLGCQTAISL

SEQ ID NO: 77996 - protein, 246 aa, Unknown
  Bacterial polypetide isolated from the Sargasso Sea
MTLRIAYVTSGMGSVGTAICQKLARNGHTVVAGCAPNSPRKSAWLREQRELGFDFIASEGDATDWASTVAAFAKVKAEVGEIDVLVNNAGGSRDVLFRQMTQDDWNAVMGSNLHALFNITKQVIDGMSTRGWGRIVNIGSVSAHKGQIGQVNFATAKAAMHGFSRALANEVATRGVTVNTISPGYIASQAISSFPPDVLDRLAASVPIRRLGKPEEVASLCAWLASDDAAYVTGADYAVNGGLHMF

SEQ ID NO: 77997 - protein, 196 aa, Unknown
  Bacterial polypetide isolated from the Sargasso Sea
RERAKYVRKIGEKLRENAELLGKIETIDTGKLFRETNKQANYIAEYYDYYADLADKVEGTVLPIDKKNIQAITTRIPIGVIAAIIPWNSQMFLTATKIAPALVMGNTVVIKSSELAPAVMFEFAKLIEETGIPNGVINVITGYGEPCGKSLTSHNLVEKVAFTGGPETARQIIQNSSKNLSEVSLELGGKSPSGCF

SEQ ID NO: 77998 - protein, 168 aa, Unknown
  Bacterial polypetide isolated from the Sargasso Sea
KVDIASKKGDHIGPVVSKIQYDKIIDLINSGIQEGATLVAGGSERPEGLNKGYFIKPTIFTDVSNNMRIAREEIFGPVLSIIPFENEDEAVSIVNKTSYGLGNYVQTQDKEKARRVARKFRSGGVYINGNSADPGTPFGGYRQSGNGREGGNWGLEEYLEVKTICGWH

SEQ ID NO: 77999 - protein, 303 aa, Unknown
  Bacterial polypetide isolated from the Sargasso Sea
WAAFKKTKGGLSISIIVVGALLAASTGIVGATVVTMGLMSLPILINQGYEKSFSAGLVASTGTLGQIIPPSIALVLLGDVMSNAYQRAQNDMGIFSQQTVTVGDLFIGAVIPGMMICLGYLIYTIYKNGKNKDLKDYASEVPIQRIELLKTLALPIVLIFLVLGSIFAGIATPTEAAAIGAFGAMLIAFINGKINFQFIKETSEKTAIVSTMIFTILIGASIFSLIFRGVGGDELINLIFSSLPGGPLTALIFVLIVIFLLGFILDFIEICYVIVPLIAPPLLMMGFDPVWLAILFAINYKPL

SEQ ID NO: 78000 - protein, 78 aa, Unknown
  Bacterial polypetide isolated from the Sargasso Sea
EFDNLIRQAITTMESAYQRKESRGAHAREDYPKRDDNNFMKHTLSWHEGKKTRINYRPVKLSTLTNDVQTFPPKERVY

SEQ ID NO: 78001 - protein, 144 aa, Unknown
  Bacterial polypetide isolated from the Sargasso Sea
GNGTQDIFYENENVLFISTHQYPYYPGTGSEQERGKFNNIFNIPLPAGTSSEEYLNVFERVLKKLEEFRPEFILISAGFDAHENDPLAQFNLKTEDYFTITKRVLETSKKFCNGKVVSILEGGYDLNALRDSTKRHVDALLEFN

SEQ ID NO: 78002 - protein, 138 aa, Unknown
  Bacterial polypetide isolated from the Sargasso Sea
STAELRLSMQKTMQSKCAVFRTEKTLKEGVDEIRKPYEGMIDLSVKDKSLIFNTDLVETLEFDNLIRQAITTMDSAYHRKESRGAHAREDYPKRDDSKYMQHTLSWCDGTKTKIDYRPVHRSTLTNDVQYFPPQERVY

SEQ ID NO: 78003 - protein, 211 aa, Unknown
  Bacterial polypetide isolated from the Sargasso Sea
KNGFSYPFKIGPKQFFDFATHPTWSLSTLMSGIPKPMNYVTSKIGDGIFKRKESRGSTDWNTLKRVRDKWKGKLIVKGVMSPDDAIKIKEAGADAIQVSNHGGRQLDSASAAINMLPLIRKSVGSNFPLIFDSGIRSGSDIVRALAFGADYAMIGRPVMYAMGADGKKGLRRIVEIIKEEVSTTLGLVGLNDINEVTSEIVIENTINKVNY

SEQ ID NO: 78004 - protein, 205 aa, Unknown
  Bacterial polypetide isolated from the Sargasso Sea
SEEIGEGVDYIKCDVRLEDDIISVSEKAYEMWDQVDVLVNNAGSELNQSYDKMTEAEWDNVLNTDLKGPWLMCKHIVPKMVEAGSGSVINISSLNGLVGFPLSTAYGSAKGGLVVFTRDMAIELASTGVRINCVCPGVIQTGMMERWTDLMPDKAEAQEMLRNTMPIGRMGTAEEVAGSIFFFASDDSSLCQGSVLSVDGGFTAQ

SEQ ID NO: 78005 - protein, 169 aa, Unknown
  Bacterial polypetide isolated from the Sargasso Sea
KMIMGDPMDNIDIGPMVSMQARDEIHDQVTRSLDSGAKLELGGEVPDLKGYFYPVTLLSNVKPGMPAFDEEIFGPVFSLIMAKDEDHAIALGNQTQFGLGAALFTKDIKKGEEIARAQINAGLCFVNDFVKSDPRLPFGGVKESGYGRELSSYGLMEFVNIKTVVVNNE

SEQ ID NO: 78006 - protein, 307 aa, Unknown
  Bacterial polypetide isolated from the Sargasso Sea
KEINWNGSIDLNWDYSHPADERIIETDEELPHEALDAYNDLSEEEKILFDRHSTAELMSQFLHGEQGALLVASQLASCAPSYNAKLYAASQTFDEARHVEVFNKYLQDKIGIHYPINPNLKLLLDKILTDERWDLKFIGMQIIIEGLALAAFQMLKSITKDPLLKQLLHYVVRDEARHVTFGINYLEDFIKTLSPEEIEERAQFAYEACVISRDRLINTKAEQRFLKMSEDEAREFSLNTGSFELFRNFLFSRVIPNLSRIGLLTDSVRPKFEALGLLEYEHAPDDFECDWAEMKKPLEQLDKYLQL

SEQ ID NO: 78007 - protein, 225 aa, Unknown
  Bacterial polypetide isolated from the Sargasso Sea
MVHSVAIIGAGISGLTAGCALRKYGFEVDIFERSDSITEFGAGITLSRNATSLLRKIDLYDELERSSYKPQGSFIRHYKTAKDLAYVDFTKDFLTANRRDVVRIFSERFIDMGGRLHLSQDIESLDVESGQFFSSGKDSYSADLVLACDGIKSTIRDGEFDVSEPTFTNYIAWRGVVDESNFPQFSGNDQVNIYHGPGGHVVHYPIGNENKINFVAIETGENWEE

SEQ ID NO: 78008 - protein, 211 aa, Unknown
  Bacterial polypetide isolated from the Sargasso Sea
MQESHHGFLNTGQSCNAPTRMLVSSKNYDKAVEVAANTANAMKVGNPFDADTKMGPISNKNQYEKVQRMIQIGIDEGATLSAGGVGLPDGCESGYYVKPTIFSDVTNDMTIAREEIFGPVLCLIKYETEQEAIEIANDTPYGLAGYVQGEQAHAVEVASKIRAGQVTINKGARVRSAPFGGYGSSGNGREHGTHGLEECLETKAVIGALVE

SEQ ID NO: 78009 - protein, 121 aa, Unknown
  Bacterial polypetide isolated from the Sargasso Sea
NKESAYHPIMILTDVKPGMPVFDEEIFGPVLCIISAKDELHAISLANQTSFGLGSAVFTSDVEKGKKIANFELDAGAGFVNDFVRSDPRLPFGGVKESGYGNELSSYGILEFVNIKTVYIR

SEQ ID NO: 78010 - protein, 193 aa, Unknown
  Bacterial polypetide isolated from the Sargasso Sea
GANRLGGNSLLDLIVFGRAAGKHINEELKSGGGVDKASNEDIELAMSRLNSLNESESGYEVADVKKQLQTCMQNYFGVFRRGEFMEKGVEELKEIREKSENLYLKDKSIAFNTNRVEALELQNLLEVAEATAISAMMRDESRGAHARDDFPERDDENWLCHSLYDPVEKKLGKRDVNFVPKEVEAFPPKMRSY

SEQ ID NO: 78011 - protein, 293 aa, Unknown
  Bacterial polypetide isolated from the Sargasso Sea
LWMFPIAIACGNCFILKPSERDPSSTLLLAQMVLDAGIPPGVLNVVNGGKEAVDAILKNKDISAVSFVGSTPIAHYIYQEAAKYGKKVQAMGGAKNHMVVMPDADINLVCDSIMGSVFGSAGERCMAVSVVVPVGKETGDAIRTKITPMIENLKIGPGLEKSSEMGPLVTKQHLDKVKNYIDIGIKEGADLVVDGRNFKLQGYENGYYVGGTFFDHVSTDMKIYQEEIFGPVMSMVRSESMVEALEMVNNHEYGNGTAIFTSDGGVARKFANECQIGMVGINVPIPVPMAYHS

SEQ ID NO: 78012 - protein, 141 aa, Unknown
  Bacterial polypetide isolated from the Sargasso Sea
MQTESIIYKFYYQWWKNIDKSIFMLISLLFVIGLFFSLVSTSLIASDKLDTNSYFFFFKHLIYVLIGITLIFIFSSFNSDQLYKYSIYLFFISLISLFLVPFIGVEVKGSKRWIDLFFLPRFQPIEVLKPFLIVILATILC

SEQ ID NO: 78013 - protein, 64 aa, Unknown
  Bacterial polypetide isolated from the Sargasso Sea
SAYNRKESRGAHAREDYPKRDDEKFMQHTLAWCDGKKSKISYRDVHKSTLTNEVQYFPPQERVY

SEQ ID NO: 78014 - protein, 95 aa, Unknown
  Bacterial polypetide isolated from the Sargasso Sea
AECLLDGSHCAVEGYPNGNWVGPTLFRGVTAKMSLYREEIFGPVLVCMEVDTLEEAIELVNASPYGNGTSIFTRSGGAARHYQHAVEVGQVGINV

SEQ ID NO: 78015 - protein, 230 aa, Unknown
  Bacterial polypetide isolated from the Sargasso Sea
TRNQSPGGIPTQEVIAYYSRRAKAEVGLIITEGIEVSHKASSAYPNVPKLDSNKAREAWKKVVEGIKNNNGAVIAQLWHCGGFRKLGMQPNPEVPGHTASGLVKPGKKVAHEMTLRDIKETIDAYASDAKICEEIGFDGVEIHGAHGYLIDNFFWSGTNIREDEYGGSIENRSQFVSDIIKSVRENVSENFIVGLRFSQWKQHDFEAKLASNPEELKTILTSPVESGLDY

SEQ ID NO: 78016 - protein, 117 aa, Unknown
  Bacterial polypetide isolated from the Sargasso Sea
YYVKPTIFSDVTNDMTIAREEIFGPVLCLIKYETEEEAIEIANDTPYGLAGYVQGEHAHAVGVASKIRAGQVTINKGARVRSAPFGGYGSSGNGREHGSLGLEECLETKAVIGALVE

SEQ ID NO: 78017 - protein, 250 aa, Unknown
  Bacterial polypetide isolated from the Sargasso Sea
DLTGKVAVVTGGSRGMGREMVLAFAQHGADIVIASRKIDACEELADEVRETTGRQALPVACHVGYWEQCDELCDTVYKEFGRCDVLVNNAGLSPLYPSLYDVTEDLYSKVMDVNLKGPFRLSAVFGKHMFDGDGGSIINVSSVAAMEPTPNETAYGAAKAGVHAITKSFAREYGPKVRVNCIMPGPFLTDISKAWDMDVFNAKAETDIALQRGGEADEIVGAALYFASAASSYTTGAILKVDGGAGWAAG

SEQ ID NO: 78018 - protein, 233 aa, Unknown
  Bacterial polypetide isolated from the Sargasso Sea
AVNGLMGAAYGSAGERCMAQSVAVAVGGIGDKLVSSLTKKVEALKVGPGMDKESEMGPLVTKEHLAKVKSYVDIGVKEGAKLLVDGRNFKIQGYENGYYIGGCLFDHVKKDMRIYKEEIFGPVLSVIRAKDFDEALQLVNDHEFGNGVSIFTRDGDSGRTFSNKAKIGMVGINIPIPVPMAFHSFGGWKRSLFGDQHMHGPEGVRFYTKLKTITSRWPSGLRSDPEFVMPTMK

SEQ ID NO: 78019 - protein, 196 aa, Unknown
  Bacterial polypetide isolated from the Sargasso Sea
KPLWEAEIELRGAALYFEYYGNQAATVEGRSIPLGAGYYDFTDCEPFGVSAQIIPWNYPVEMTARSLAAALATGNTCVIKTPELTPLSTYIFAHAAEAAGLPRGAVNILCGWGHQAGAALSGHPDVNQIVFTGSVPTGVAIATAAAQNVVPCVLELGGKSAAIVHDDADLEAFENDIRWGIYFNAGQVCSAMSRVI

SEQ ID NO: 78020 - protein, 257 aa, Unknown
  Bacterial polypetide isolated from the Sargasso Sea
VRGLSRGLLLLNLLNKFDGGATIGTLAEFSGLHRTTVRRLLETLQEEGYVRRSRSDDSFRLTLKIRQLSEGFRDEHWISALATPLLGELLREVLWPTDISTLDVDAMVVRETTHRFSRLSFHRAMVGRRLPLLLTASGLTWLAFAPDHERQAMIEILAARPEEEYQLAREPEKLAAILERTRRQGYGENFRGWQQEEKIASIAVPIRSQQRVIGCLNLVYMAKAMSLEQAAQKYLAPLQKVAAQIESRMTEEEVFYE

SEQ ID NO: 78021 - protein, 289 aa, Unknown
  Bacterial polypetide isolated from the Sargasso Sea
KQANYIAEYYDYYAGMADKVEGTVLPIDKPNIQAITTRVPIGVIAAIIPWNSQMLLTVTKLAPALAMGNTVVIKSSELAPAVLFEFAKLVEETGIPKGVVNVITGYGDPCGKALTTHNLVEKIAFTGGPETARHIIRNSAENLSEVSLELGGKSPVAVFEDAHQENAINGITAGIFGASGQSCIAGSRLYLQKGIYNEFLDKLAARAEKIKIGAPMDPESEMGPIGNFKQLEIIEKNIKLTVEQGGKIKCGGKRHSFSNEGYYFPPTIIECDNHNLPTAENELFGPSAI

SEQ ID NO: 78022 - protein, 103 aa, Unknown
  Bacterial polypetide isolated from the Sargasso Sea
QMDMNNVRIQDKSLIWNTELIETLELDNLMGQALVTIRSASERKESRGAHAHEDYPERDDKDWMKHTVMWLDEQNKSKLGYRDVTLSTLTNEVQSIAPVARVY

SEQ ID NO: 78023 - protein, 267 aa, Unknown
  Bacterial polypetide isolated from the Sargasso Sea
IYISKIAAKNEKRVQALGGAKNHCVVMPDCDLNQAVNGLMGAAYGSAGERCMAQSVAVAVGGIGDKLVESLAKKVEALKVGPGMDKQSEMGPLVTKEHLAKVKEYVEVGEKEGAKLVVDGRKFKLQGYENGFYMGGCLFDDVTKDMRIYKEEIFGPVLSVVRVKDFDEALKLVNDHEFGNGVSIFTRDGDSGRTFSNKAKIGMVGINIPIPVPMAFHSFGGWKRSLFGDQHMHGPEGVRFYTKLKTITSRWPSGLRSDPEFIMPTMK

SEQ ID NO: 78024 - protein, 171 aa, Unknown
  Bacterial polypetide isolated from the Sargasso Sea
KDHKNKIEKYITVGLEEGAKLVEDGRNYKIQGYENGNFVGPTLFDNVTKDMTIYKEEIFGPVVSVVRTKTYDEALQLVNDHAFGNGTSIYTSDGEIARHFTTNAKIGMVGINVPIPVPMAFHSFGGWKQSLFGDHSVHGMEGVHFYTKLKTITSRWPKSIQSGPEFVLPTN

SEQ ID NO: 78025 - protein, 256 aa, Unknown
  Bacterial polypetide isolated from the Sargasso Sea
RSVIITGGNRGLGLEMAICLAKAGAKLCITASKEGKVYQQTSKELIGILGKDNFFSRVVDVSDAEGMARLTEDCIKKFSKIDVLVNNAGRGMRLISETFNTVPTKFWEADRRTWSTIIDTNIIGPFVAAKSVVPHMINNKFGKIINISTSSQTMIRKGYSPYGPSKAFIEATSRTWAYDLKGTGVDVNVLLPGGAADTDLLPPSKNKKGADGNLLPPTIMNEAILWLVSDKSNGVTGGRFIGRYWNDLKNRVDNKG

SEQ ID NO: 78026 - protein, 235 aa, Unknown
  Bacterial polypetide isolated from the Sargasso Sea
ALLVASQLTSCAPTYYAKLYAASQTFDEARHVEAFNKYIQTRTKLMYPIGNALKSILDKILTDPRWDLKFIGMQIIIEGLALAAFQTSRELTKDPVLRDMLGLIIRDEARHVTFGINYLEEFVETLSDDEKEDRAQFAYEACWLSRERLVSMDVFEHFGWNAEDARQFQLSSDITKHFQKLLFQRVMPNLRRIGLLRDSVKGKFEDLGILEYAEAKSDAEIDWADLSRPLFEESA

SEQ ID NO: 78027 - protein, 166 aa, Unknown
  Bacterial polypetide isolated from the Sargasso Sea
MKHDEIDKNETDRCLDRFDKLRNSEGSNPTSELRLSMQKTMQSKCAVFRTEKTLKEGVDEIRRPYDGMDSLSVKDKSLIFNTDLVETLEFDNLIRQAITTMDSAYHRKESRGAHAREDFPKRDDENYMQHTLSWCNGSKTKINYRPVHRSTLTNDVQYFPPQERVY

SEQ ID NO: 78028 - protein, 194 aa, Unknown
  Bacterial polypetide isolated from the Sargasso Sea
MDEARHMDVFRKRALANGGGLMRMSGSTSGFVGSIDLSRDFTEMSTRLHISGEGAVLTMFRMGELFGQNEAEKTMYRLCAQDEARHVAFGVMHLRYLGATAPERREEIEVYLDEAEGQILAGQQNPASQASETSEALAVLLGGGQQNYDEGYKQLLAIRKRQLKEYMKRVESAGFGERFTNGRSPLPKQYASMV

SEQ ID NO: 78029 - protein, 109 aa, Unknown
  Bacterial polypetide isolated from the Sargasso Sea
VDEIKKTYDGIDSISVKDRSLVFNTDLVETLEFDNLIRQAVTTVESAYHRKESRGAHARDDYPKRDDEKFMQHTLAWCDGKNTKISYRAVHKSTLTNEVQYFPPQERVY

SEQ ID NO: 78030 - protein, 304 aa, Unknown
  Bacterial polypetide isolated from the Sargasso Sea
KNVDSWSLRQPLGVCAGITPFNFPAMVPMWMFPMAIACGNTFILKPSEKDPSCSIRLAELFSEAGLPKGVLNIVNGDKQVVDAIISNKNISAVSFVGSTPVAKYIYENCAKNEKRVQALGGAKNHCVIMPDCDLEQAVSGLMGAAYGSAGERCMAQSVAVAVGDIGDELVKNLAKKVESLKIGPGMDKKSEMGPLVTKEHLSKVKNYVDIGEKEGAKLVVDGRNLKLQGYENGYYIGGCLFDNVKKDMRIYKEEIFGPVLSVIRAKDFSEALNLVNDHEFGNGASIFTRDGDIGRTFSSKSKIG

SEQ ID NO: 78031 - protein, 290 aa, Unknown
  Bacterial polypetide isolated from the Sargasso Sea
MLGVVLSKDARARAVQLPAWNEAMGLPRPWDQQWSLRLQQIVAYETDLLHFDDIFNGSEVIDEKVKNLKETAMKEFNHIQSIGGAVAAVESGYLKQELVNSQKERLKRINDKEQIVVGVNEFVETEESPLVSNDGGIETIDPKIENEQVKAVIDWRQNRDQKQVDSALNQLSEAAKSGDNIMEASITAAKAGVTTGEWSQVLRDVFGEFKAPTGITNIQPSNNDDYSPIRKRVESLSDKMGRRIKFLVGKPGLDGHSSGAEQIAVSASDCGMDVLYEGIRLTPEQIVKSS

SEQ ID NO: 78032 - protein, 176 aa, Unknown
  Bacterial polypetide isolated from the Sargasso Sea
LVKQALDKYGTVDVLVNNAGLMPLSFVKSLKVDEWDRMIDVNIKGVLYCTAAVVPTMTEKKSGHIINISSVAGRIVFPAGSVYCATKHAVTAFSEGLRQELSVRKNIRVTSIEPGVVQTELTNTITEDSLQGFIEKGKQMEALQADDISNAIIFAIDAPNHMNVNEILIRPTTQDH

SEQ ID NO: 78033 - protein, 134 aa, Unknown
  Bacterial polypetide isolated from the Sargasso Sea
RTSMQKVMQEKCAVFRTKELISKGIEEFSHIESSMDNIDVKDKSMIFNTDLTESLELHNLLAQSKVTLHSALNRTESRGAHAREDHQERDDSNWLVHSLSWLDNKGGVRMGTRPVNMNTLTNHVQPIPPKKRVY

SEQ ID NO: 78034 - protein, 145 aa, Unknown
  Bacterial polypetide isolated from the Sargasso Sea
NDQVQRSISAGAKLILGGKIPEIEGAFYPLTVLSNVFPGMPAFDEEIFGPVFTIIVADDDDNAIDLANKSEFGLGSAIFTRDLEKGESIAKTKLQSGACFVNDFVKSDPRLPFGGIKMSGYGRELSDYGMMEFVNIKTIVVKSVR

SEQ ID NO: 78035 - protein, 154 aa, Unknown
  Bacterial polypetide isolated from the Sargasso Sea
MDKTEILDFSGKTVIVTGGTRGLGRVISESFLDAGANVVTCARNAPGKPIISELNNKEAIFFETDVRNPDQVESLISEVFKEFGRIDVLVNNAGGAPSVKSSEASPRFNEKVVSLNLLASMHCSQSVFPVMNSQEDNGVIINISSVSGSRPNPT

SEQ ID NO: 78036 - protein, 263 aa, Unknown
  Bacterial polypetide isolated from the Sargasso Sea
MVPMWMFPIAIACGNTFILKPSEKDPSCAIRLAELLSEAGLPEGVFNVINGDKEAVDAILENKDIKAVSFVGSTPIAKYIYENSAKNEKRVQALGGAKNHLVVMPDCDLDGAVNGLMGAAYGSAGERCMAQSVAVAVGDIGDELVSRLSKKAEALKVGPGMDKASEMGPLVTKEHLEKVTSYVNLGVEEGAKLVVDGRGLKLQGYENGFYIGGCLFDHVNKDMRIYKEEIFGPVLSVVRVKTFEEAAKLINDHEYGNGVSIYT

SEQ ID NO: 78037 - protein, 103 aa, Unknown
  Bacterial polypetide isolated from the Sargasso Sea
MRLKGKKCIVTGGSSGIGEATVRRFISEGAEVLIADINLEDSKKLSEEIGEGVDYIKCDVRLEDDIISVSEKAYGMWDQVDVLVNNAGSELNQSYDKMTEAEW

SEQ ID NO: 78038 - protein, 263 aa, Unknown
  Bacterial polypetide isolated from the Sargasso Sea
RRSSSCRSRSSSTWTSPRRRSSAASASSSARARAVSRTSSWWRSPPRSSRPPSATSRRPATRGASRANRVTRRRSKRWRRRATSPRRRAQRTRRRPTSRRSTTTSSSARCSRRTSPRARWSPSRASSRRPPPTSTRGSSSASSAPSPTTSWWSCATSRRSCASACARGKTRSTATTRSRRGAGGRRSRSTSGRRSSRACGPPPRRSTSRCCRSAPRSSACCRTTRRRRCSSSPTTATRRGWSWPTRSTSPPTRCRCSSRSPRA

SEQ ID NO: 78039 - protein, 291 aa, Unknown
  Bacterial polypetide isolated from the Sargasso Sea
WNSQMLLTAVKLAPALAMGNTIVIKSSELAPATLFEFAKLIEKTGIPKGVVNIVSGFGDPCGKALTSHNFVERVAFTGGPETARHIIRNSADNLSQVSLELGGKSPVAVFEDADQENALNGITAGIFGASGQSCIAGSRLYIQNSIYENFLEKIVNRANKIKLGPPMEPDTQMGPLSSLKQLEIIEKNIRLTLDQGGKLKCGGKRHNLSNKGYYFPPTVIECENHNLPTAENELFGPVLSVMKFNDEKEVIEKMNDNQYGLSSGVYTKDINRGLRVSNSIRAGITFVNTYR

SEQ ID NO: 78040 - protein, 247 aa, Unknown
  Bacterial polypetide isolated from the Sargasso Sea
MSLSLDGRVALITGAGSGIGRSHAVLMAERGADVIINDINAEGLAETAEKAAANGRRIHQVVEDVRDIAAMTNAAKKAEAEFGKIDILVNNAGVSGQRLAFEDITEEAYDRMVDINLKGAFFLTQAIVPGMKECRYGKIINTSSMYAMGGNNVGAHYSAAKSALSGLTNSLARELAEWNIMVNAVAPGFVLTGMTSPGRDEEGLKRRVQQVPLQRMSGEFDIAYTVAFLASDEADFITGQVISPNGG

SEQ ID NO: 78041 - protein, 132 aa, Unknown
  Bacterial polypetide isolated from the Sargasso Sea
MLYFAYGSNLNLFQMKKRCKDSILINKIKLKNFKLTFRSKYRAADIEPKKNSVVPGALFEISKSDERKLDVYEDYPNLYKKYYFFYYGKKVMTYTMVKKSSFRFPTERYLNIIKRGYKDCNLDNGYLKKALQ

SEQ ID NO: 78042 - protein, 207 aa, Unknown
  Bacterial polypetide isolated from the Sargasso Sea
GDIGDELVSRLSKKAEALKVGPGMDKNSEMGPLVTKEHLEKVKSYVDLGVKEGAKLVVDGRNLKLQGYENGFYIGGCLFDNVTKDMRIYKEEIFGPVLSVVRVKTFEEASKLINDHEYGNGVSIYTRDGDAGRTFASKIQVGMVGINVPIPVPMAFHSFGGWKRSLFGDSAMHGMEGIKFYTKLKTITSRWPSGIRSNAEFVMPTMK

SEQ ID NO: 78043 - protein, 291 aa, Unknown
  Bacterial polypetide isolated from the Sargasso Sea
RKIADETRKVAKEGGELLCYENGKTLGAAVKEFNDVADMFDYYAGLTDKLEGKTIPVAKNVFDYTVLEPFGISAHIVPWNYPLSMIGRSLACSFATGNSTIIKTAELTPLSATIFAKAIVNSGVPDGLINIICGYGNEAGSYLVSHEDVNHVVFTGSVSTGKKILHACADKAIPAVVELGGKSAGIVFPDADLDEVVDSARHAIFGVAGQICTAMSRVVVHKSVKDELVDKLVDLSKSLKIGPGIEKDTDLTPVISENQLQKVEGYARSGIQEGAEAAHGGKRVERDGYFM

SEQ ID NO: 78044 - protein, 162 aa, Unknown
  Bacterial polypetide isolated from the Sargasso Sea
EESMDRFDKIRNSKGNIPTAQLRLEMQQTMQADAAVFRSDKTLAEGCKKMKKIASDFSDVSVTDKTLIWNSDLMETLELDNLMPNALTTIFSAEARKESRGAHAHEDYPDRDDKNWRKHTLARINHNGSVSLTYRSVHTETLSNIEDGGIDPKKIAPKARVY

SEQ ID NO: 78045 - protein, 281 aa, Unknown
  Bacterial polypetide isolated from the Sargasso Sea
GQDDFSRMGEYFAERASTGVGLIITGGISPNEEGALDGAIFNQESQVARHKLVTDAVHNANVDTKICMQILHSGPLAISKELVAASPVRSRIGRLVPNEMSLEVLRKQVSDFIKCAELCKKANYDGVEIIGSAGYFISTFFVNKTNLRTDEYGGSFSNKIRIATEIVEGIRKSVGEDFLIIFRIPAMDMLEGGMSWEEICTLGQALENSGVSIVSTHFSWHESPVPTIATMVPRAAFTSVTKRLKSFINVPVITSNRINMPDVAENVLANGDADLISMARP

SEQ ID NO: 78046 - protein, 250 aa, Unknown
  Bacterial polypetide isolated from the Sargasso Sea
QLLHVVVKELGKASAKIMCEEGANVVICARRQELLDSAVNEIKATAKGEIIGISADVTNPDDIKNVVESCITKFGRIDILVNNAGTSNANNFETVDDDVWQHDLDLKFFAAIRFSRLAIEQMKKVGGGRIINVTNLGAKQPGANSVPTSVSRAAGIALTKAMSKDLAQYNILVNTVLIGLIKSGQHQNRFHNEKGVDIEQYYEERSGNIPLKRFGEAEEAGNIISFLASGKASYITGTSMNIDGGTSGVL

SEQ ID NO: 78047 - protein, 276 aa, Unknown
  Bacterial polypetide isolated from the Sargasso Sea
GYPVALTLGGISILFALICIPFGIFDPTIFGSIPIRIFGIMNNVTLLAVPLFIFMGTILEKSGIAASMLKNMALAFRSVKGGLSISIIMVGALLAASTGIVGATVVTMGLMSLPILINQGYDKSFSAGLVASTGTLGQIIPPSIALVLLGDVMSNAYQRAQNDMGIFSQQTVTVGDLFIGAIVPGVLICIGYLIYTIYKNQTNPSINDHTIDSKINIISLFKTLALPFLLIFLVLGSIFAGIATPTEAAAIGAFGALIIALVNGKITFAFVKESSE

SEQ ID NO: 78048 - protein, 205 aa, Unknown
  Bacterial polypetide isolated from the Sargasso Sea
MPTKKEIINKHKKNLSILKKHNEDYFIHDSPKISDSEYDKLKIDALKFEENYPYLKKYESINSIVGSKLLNKFKKVKHLTPMLSLSNAFNLDDMKDFLKKINNFLNKKNEIIELFCEPKIDGISATIIYENGILVRGLSRGDGETGEDILENLKTIDNLPKKIISKNVPQLLEIRCEVYIGKKDFTDLSNKFANPKKCCWRVLRQ

SEQ ID NO: 78049 - protein, 140 aa, Unknown
  Bacterial polypetide isolated from the Sargasso Sea
QLVDKLAKKVERLKVGPGLDEESEMGPLVTKEHLEKVKSYVDIGEKEGAELVVDGRNFKIQGYEKGFFIGGCLFDKVTKNMRIYKEEIFGPVLSVVRAKDFDEALQLVNDHEFGNGVSIFTRDGDSARTFSSKAKIGMVG

SEQ ID NO: 78050 - protein, 90 aa, Unknown
  Bacterial polypetide isolated from the Sargasso Sea
MSDRVVLVTGAARGLGAVIAERFHAAGYRVALADIAADAIEAHARELDPSGERAIALPLDVTSKRDFEAARDALVARWGAIDVLVNNAGA

SEQ ID NO: 78051 - protein, 209 aa, Unknown
  Bacterial polypetide isolated from the Sargasso Sea
MQQWKGKTAFITGASNGIGAAVATRLLAEGMRVVGSARRHDRVAAVLQKADTSGGNSLAVQCDVRDEQSVQEAFSLAKQTFGGVDVLVNNAGLGHAATLAEGKVDEWREMLDVNVLGLCICTRDALADMRSRGGRGHIIHIGSMAGQRVPAGAGLYSATKHAVRALTEALRMELREKGDSIRVGEICPGFVETGFASNYMKSEEKAREV

SEQ ID NO: 78052 - protein, 128 aa, Unknown
  Bacterial polypetide isolated from the Sargasso Sea
EINEEIFGPVLHLVSYKEKNLEIVLQELKSKGFGLTFGIHSRIESKATKISKLVGSGNSYINRDMIGAVVGTQPFGGSGLSGTGHKAGGPNYLIQFVNEKLVSINTVAIGGNAELLNLETEDGNSQRT

SEQ ID NO: 78053 - protein, 237 aa, Unknown
  Bacterial polypetide isolated from the Sargasso Sea
MNMSNSMIPVSSPDNTSATHMPSVGLGLWKVDPASVGELIHEAISVGYRHLDSACDYGNEAEVGKGIERVLTSNLCHREDLWVTSKLWNTFHEPKYVRSAIERTLRDLRLEYLDSYLIHFPIALAYVAPETRYPPGWFFEPDAPNPSMQSIKVPLAETWGAMEELVDAGLVRTIGVCNFGVSLLRDLQAGARIQPSSLQVEMHPRLTQKKLLRFCDQEDIAVTAFSPLGAPSYVSLG

SEQ ID NO: 78054 - protein, 99 aa, Unknown
  Bacterial polypetide isolated from the Sargasso Sea
VRRFISEGAEVLIADINLEDSKKLSEGIGEGVDYIKCDVRLEDDIISVSEKAYEMWDQVDVLVNNAGSELNQSYDKMTEAEWDNVLNTDLKGPWLMCKH

SEQ ID NO: 78055 - protein, 188 aa, Unknown
  Bacterial polypetide isolated from the Sargasso Sea
LIDLVVFGKAASKKATELVKPNSKHEIIPDSETQKSLDRFDKLRNSNGSTSTAHLRNLMQKTMQNKCAVFRTNKTLQEGVNEIRKPWDGLSDLSVKDRSLIFNTDLVETLEFDNLIRQSMVTMASAENRKESRGAHSREDFKERDDNNWMKHTLAWHKSGSVDIDYRDVHKHTLSNDVQYFPPKARVY

SEQ ID NO: 78056 - protein, 234 aa, Unknown
  Bacterial polypetide isolated from the Sargasso Sea
MGRACAIALSEGGSNLIIISRTKKDLSEVSKIIKKNKSKCKSYVCDLTNYGEIKKIINKQPRIDILVNNAGNNIPEHFTKVKTKNMENLVKINTIAAFNVAQLCALKMIELKNRRKIGASIINISSQMGHVGGPIRSVYNMNKFGLEGLTKGMAIDLAKYNIRVNSIAPTFVITPMTRKFLKNKKFRKQTLNNIPLGRFAEMSEVSSAVAFLASDAASMITGTSLLVDGGWTAK

SEQ ID NO: 78057 - protein, 271 aa, Unknown
  Bacterial polypetide isolated from the Sargasso Sea
VEKIAFTGGPETARHIIRNSAENLSEVSLELGGKSPVAVFDDAHQENAINGITAGIFGASGQSCIAGSRLYLHDGIYNEFLDKLSARANKIKIGAPMDPESEMGPLSNFKQLEIIEKNIRLTVDQGGKIKCGGKRHSFSNEGYYFSPTIIECDNHNLPVAENELFGPVLSVMRFKTEDEVIEKMNDNQYGLSSGVYTSDFSRGLRVSKAIRAGITFVNTYRLISPSAPFGGIKDSGFGKEAGVESIKDYTRVKTTWYYTSDKPTLDPFSMR

SEQ ID NO: 78058 - protein, 264 aa, Unknown
  Bacterial polypetide isolated from the Sargasso Sea
VISDPYPRTLDLIFSKTTLKELKTKYKIIVAPKKNKKIFYENNIGKATFIMGQPNLDKYLLSKASKLKCIINVESNFMDNLDYDYCFKKNIHVIATSPVFSKPVAEIALGMTLSLLRNIHNAHFDFIKSKEKYGLESNLQASLLTNKKIGLLGFGDLAKSLYPLLLPFSKNINVYDPWIPKNKIKKIGFNPINLNKMFSSCEVIYVLATITKKNKHLIDKKLLNKMKSGTIFILMSRAAIVNFKDLIKRIKKGDIYVATDVFPD

SEQ ID NO: 78059 - protein, 285 aa, Unknown
  Bacterial polypetide isolated from the Sargasso Sea
MEIHGGKALTTHNLVEKVAFTGGPETARHIIRNSAENLSEVSLELGGKSPVAVFDDAKQENAINGITAGIFGASGQSCIAGSRLYLQKGIYNEFLDKLASRAEKIKIGAPMDSDTEMGPLSNFKQLEAIEKNIKLTVEQGGKIKCGGKRHPFSNEGYYFPPTIIECENHNLPAAENELFGPVLSVMKFDTEKEVIELMNDNQYGLSSGVYTSDLARGMRVSNAIRAGITFVNTYRLISPSAPFGGIKDSGYGKEAGIESIKDYTRVKTTWFYTSDEPSLDPFSIR

SEQ ID NO: 78060 - protein, 263 aa, Unknown
  Bacterial polypetide isolated from the Sargasso Sea
FVEDFIVAEDIFSIYGMGTFELGNALVVAGVRIENTSVDGEAFDQDGAKVTSSNEHTFVSPSLNIKYGLSDQLLLRGAFWRSLARPGFNSIAPAVEIEVDGDEVSGKVGNPDLEPYEASNFDISLEFYGDGMTYIAAGVFYKDIDNAIYKTIQKTGTFNGVTFTDEVETWLNSDQSTVLGLELNFQYGLENGLFIATNLTHMLDNESTFQNDGDSTFTTPFRKLADDTANVSFGFDKGKLDVRLAMNYRSEYLDSLADGEDDI

SEQ ID NO: 78061 - protein, 230 aa, Unknown
  Bacterial polypetide isolated from the Sargasso Sea
VAKYIYENCAKNEKRVQALGGAKNHCVVMPDCDLDQAVSGLIGAAYGSAGERCMAQSVAVAVGNIADNLVKKLAKKVELLKVGSGMDKKSEMGPLVTKEHLEKVKGYVDLGVKEGAKLVVDGRKLKLQGHENGYFMGGCLFDHVKKDMRIYKEEIFGPVLSVVRAKSFDEALQLVNDHEFGNGVSIFTRDGDSARTFSNKAKIGMVGINIPIPVPVAFHSFGGWKRSLFG

SEQ ID NO: 78062 - protein, 195 aa, Unknown
  Bacterial polypetide isolated from the Sargasso Sea
MELGLKDKVVLITGGAKGIGAATVRAFLDENSNVVFVDLDSESGSALEKSLGTRGKFIEAELNTPESCKQAVENTVSFFGGIDVLVNNAGFNDGLGIETPPEKFMDSVRTNLLHVYSMTHYSLPLLRKSQGCLVNIGSKVSETGQGNTSAYAAAKGAIQALTREWAVAMAPDNIRVNCVLPAECHTEQYEKFFQN

SEQ ID NO: 78063 - protein, 160 aa, Unknown
  Bacterial polypetide isolated from the Sargasso Sea
KSSTDKIIDRLDKSLHSKGDVSVSEVRYAMQNAMQKHAAVFRSSKSLQEGVTNINKICKNLDNIGIKDRSLIFNTDLIESLELENLMQQALVTMRSADQRKESRGAHAHEDFPDRNDKDWMKHTLMWLDKNNKSKLGYRDVQLNTLSNEVKTIPPVARVY

SEQ ID NO: 78064 - protein, 231 aa, Unknown
  Bacterial polypetide isolated from the Sargasso Sea
MSRRVMITGGASGIGRALAQRFRSCGDRIAICDKSRPNLERLKLEMPESLVIKADVTQVNQMQNFFNRVIEVLGGIDILISNAGTSGPAENIENLKFSEWKSCLETNLNGAFLTSRWGAKVMKDQESGLILFISSTSGLHGVPLRSPYVTAKWGLIGLTKTLAMELGPKGIRVNAICPGSVEGKRMNSVLKMESSATGLTEEEIERLIHKLCVVKKICNCEGCRRPWLYFS

SEQ ID NO: 78065 - protein, 110 aa, Unknown
  Bacterial polypetide isolated from the Sargasso Sea
KEGAKLVVDGRDHKLQGYENGFYIGGCLFDHVNKDMRIYKEEIFGPVLSVVRVKTFEEAAKLINDHEYGNGVSIYTRDGDAGRTFASKIQVGMVGINVPIPVPMAFHSFG

SEQ ID NO: 78066 - protein, 247 aa, Unknown
  Bacterial polypetide isolated from the Sargasso Sea
ALIQDKVIVITGASSGIGHSTAKALAKKGAKIVAGARRLDRLETLKKEIIDDGGEITICETDVTKKADCDNLVKQALDKYGTVDVLVNNAGLMPLSFVKSLKVDEWDRMIDVNIKGVLYCTAAVVPTMTEKKLGHIINISSVAGRIVFPAGSVYCATKHAVTAFSEGLRQELSVRKNIRVTSIEPGVVQTELTNTITEDSLQGFIEKGKQMEALQADDISNAIIFAIDAPNHMNVNEILIRPTTQDH

SEQ ID NO: 78067 - protein, 227 aa, Unknown
  Bacterial polypetide isolated from the Sargasso Sea
MYFDEDLNLSQKQVEDVIEIFNTPLTGAYNWDYTVSDNRIKKLYELGKELNWNGSIDLNWEYTHPSDEKIIEPDEELPHELLDAYQNLSEEEKILFDRHNTAELMSQFLHGEQGALLVASQLASCAPTYNAKLYAASQTFDEARHVEVFNKYLQDKIGIHYPINPSLKLLLDKILTDERWDLKFIGMQIIIEGLALAAFQMLKAITKDPLLKQLLHYVVRDEARHVT

SEQ ID NO: 78068 - protein, 172 aa, Unknown
  Bacterial polypetide isolated from the Sargasso Sea
TKKLKIGSGDNNKTEVTPLISTEQLQRVSNYCQSGIQSGANLITGGEKHVEGKGNYFKPTIFDNVDPKSTIAQEEIFGPVTTILNFETEEEAINIANSTDYGLASGVFTSDDQKAKWTAERIEAGVIWQNDWFVDGVNLPGGGYKKSGYGRDGGIDSLYSYGQTKRVSKRLN

SEQ ID NO: 78069 - protein, 278 aa, Unknown
  Bacterial polypetide isolated from the Sargasso Sea
KFDSNMFHGCSVINGNEISKEDNKVAAPFDPNKIIGNVSFLTDKDIKEISFKESDDWRHSSLDERTKIFKRISDRFEDEKYKFFYLLTNEAGKTLKDCDAEVRESIDFINYYSAQAKKIFTNIELESPSGEKNYLRHAPKGTFLCISPWNFPMAIFVGQVSAALLTGNTVIAKPAEDTSLIASEIVKVFHDCGVPKDALHLVVGGKDAGNELTKIHALSGVAFTGSTSAAKKINMNLAESDGPIKTLIAETGGQNVMFVDSSSKKEQVIDDVVRSAFY

SEQ ID NO: 78070 - protein, 141 aa, Unknown
  Bacterial polypetide isolated from the Sargasso Sea
GGTNTASLRLSMQKTMQSKCAVFRTEKTLKEGIDAIRKPFEGLADISVKDKSLLFNTDLVESLEFDNLIRQAMTTMDSAYHRKESRGAHAREDFSKRDDKQFMKHTLAWQNGKEVKVKYRDVHSRTLTNDVQYFPPKERVY

SEQ ID NO: 78071 - protein, 286 aa, Unknown
  Bacterial polypetide isolated from the Sargasso Sea
KVEGTVLPIDKPNMQVITTRVPIGVVAAIIPWNSQMLLTAVKLAPALAMGNTVVIKSSELAPATLFEFAKLIEKTGIPKGVVNIISGFGEPCGKALTSHNLVERVAFTGGPETARHIIKNSANNLSQVSLELGGKSPVAVFEDADQENALNGITAGIFGASGQSCIAGSRLYIQNTIYDKFLEKIVNRANKIKLGPPMEAETQMGPLSSLKQLEIIEKNIKLTLDQGGKLKCGGKRHSMSNKGYYFPPTVIECENHNLPTAENELFGPVLSVMKFNNEEEVINKMK

SEQ ID NO: 78072 - protein, 262 aa, Unknown
  Bacterial polypetide isolated from the Sargasso Sea
ECAKNEKRVQALGGAKNHCVVMPDCDLDQAVNGLMGAAYGSAGERCMAQSVAVAVGGIGDKLVSSLAKKVEALKVGPGMDKHSEMGPLVTKEHLAKVKGYVDIGVKEGAKLIVDGRNFKIQGYEDGYYIGGCLFDKVTKDMRIYKEEIFGPVLSVVRAKDFNEALQLVNDHEFGNGVSIFTRDGDSGRTFSSKAKIGMVGINIPIPVPMAFHSFGGWKRSLFGDQHMHGPEGVRFYTKLKTITSRWPSGLRSDPEFVMPTMK

SEQ ID NO: 78073 - protein, 299 aa, Unknown
  Bacterial polypetide isolated from the Sargasso Sea
DEYLKQGGYSVWKQILSDQSNKTSEWVIEEVKKSGLRGRGGAGFPTGLKWSFMPKNDDQKYIVCNSDESEPGTCHDRDILKYNPHALVEGMAIAGYAIGATVGYNYVRGEFILECYPRIDTAVKDAYDAGLLGVNVLDSGIDFDLYNFLGAGAYICGEETGLLESLEGKQGKPRFKPPFPANYGLYGKPTTVNNTQTLATIPKILEKGAKWYADFGTEKSPGTLIFSISGHVNKPGNYELPLGISFEEVIDVAGGVLDGKKLKAVIPGGSSTKILPAEIIQNCTMDYESLQDADSALGT

SEQ ID NO: 78074 - protein, 213 aa, Unknown
  Bacterial polypetide isolated from the Sargasso Sea
MAVANYQRQVAIVLDGVVESAPTINATEFNGQAVISGSFDEAEAKNLALVLRFGALPVEFERDDVRTVSATLGEGTLRAGVIAGLVGLALVGLYMLLYYRLLGLVAICSLAVSGATLWSIIAWLGESKGLALTLAGATGIIVSIGVQVDSNIVYYERIKEEVRRGRAVRSAAAGSFRAAFSTIVWADLASLIGAGVLYQLKSGTVRGFALYLG

SEQ ID NO: 78075 - protein, 288 aa, Unknown
  Bacterial polypetide isolated from the Sargasso Sea
MAELFSEAGLPEGVLNVVNGDKEVVDAILTNKDIQAVSFVGSTPIAKYIYENAAKNEKRVQALGGAKNHCVVMPDCDLDQAVNGLMGAAYGSAGERCMAQSVAVAVGNIGDKLVSELAKKVEALKVGPGMDKNSEMGPLVTKEHLEKVKSYVDLGVKEGAKLVADGRDIKLQGYENGFYIGGCLFDHVKKDMRIYKEEIFGPVLSVVRAKDFDEASQLVNNHEFGNGTSIYTRDGDVGRTFASKIKVGMVGINIPIPVPVAFHSFGGWKRSLFGDQHMHGPEGVRFYT

SEQ ID NO: 78076 - protein, 236 aa, Unknown
  Bacterial polypetide isolated from the Sargasso Sea
LQLDVEDDDSVDAAFEKPGDIDVLVNNAGLSPIGSVEEFQVDAWKQLFETNVFGLIRCTQAALPAMRDNASGHIINISSVAGRVAIPMFGPYSSSKWAVEALTETLACEAAIFGIRVSLVEPGAVATPIREKTGRPNRDSPYRPVAKNWGFSVGYDHAFPSEPEDVAACIAQLIRDPSPPLRVTVGRGVEQMVDLRSDHSDTEWVDLWSSETSNFLSTWESLTGDDLTDLSTKPDS

SEQ ID NO: 78077 - protein, 117 aa, Unknown
  Bacterial polypetide isolated from the Sargasso Sea
GFFIQPTIFDQVRPEMMIGKEEIFGPVMSVFKWDDYEKMLSVANEIEYGLTAMIVTDDLKMAMETAERVEAGYVWINSTGRYLGAPYGGWKASGIGQEECFEELLSYTQIKNVNMCW

SEQ ID NO: 78078 - protein, 150 aa, Unknown
  Bacterial polypetide isolated from the Sargasso Sea
MSDLNLHSIATTKEKVWFITGANRGIGAEIAKAALSAGDSVVVTGRNLQQLREKFGDSDKALALALDVTDIAQALEAVEATLNHFGRIDVLVNNAGYGQLGVFEEIPQADVERQFATNVFGLMNVTRAVLPLMRAQRSGRIFNLSSMAAL

SEQ ID NO: 78079 - protein, 293 aa, Unknown
  Bacterial polypetide isolated from the Sargasso Sea
GVVAAIIPWNSQMLLTAVKLAPALAMGNTVVIKSSELAPATLFEFAKLIEKVGIPKGVVNIVSGFGEPCGRALTSHKLVERVAFTGGPETARHIIRNSADNLSQVSLELGGKSPVAVFEDADQENALNGITAGIFGASGQSCIAGSRLYIQNSIYDNFLEKIVNRANKIKLGPPMDSETQMGPLSSLKQLEIIEKNIKLTLDQGGNLKCGGKRHTMSNKGYYFPPTVIECDNHNLPTAENELFGPILSVMKFKDEKEVISKMNDNQYGLSSGVYTKDINRGLRVSNAIRAGIT

SEQ ID NO: 78080 - protein, 231 aa, Unknown
  Bacterial polypetide isolated from the Sargasso Sea
MRLKDKVTLVTGAGSGFGAGIARLYASEGAKVVINDINDNAGQTVAQEIRQAGGEATYVHADVASREETRLMIQSAVDFGGRLDVLVNNAGFTHHNKPFLDVTEDEFDRIYDVNVKAIFHALQEAVPIFLEQGGGSVINTSSTAAIRPRPGLGVYCSSKGAVNNLTKSLAIEFADKNIRINAVCPVIGETGLLETFMGAPDTPENRKKFQATIPMGRLSTPEDIARAALFL

SEQ ID NO: 78081 - protein, 225 aa, Unknown
  Bacterial polypetide isolated from the Sargasso Sea
VSAGRELAELDDMLVTRLDVQDHASIQAAIAAAIERFGAVDTLVNNAGFSLYGVFESLSREKIRDQFDVNVFGVMDVTRAILPHFRQRQRGTLINISSGAGVFGLPMICAYNASKFALEGFSESLAFELASQNIRVKLVEPGGGLDTRFSQRVAAEASLTETPKDYSAFVAGAERVFTSIRATRNATSEQVADVILQAASDDSDRLRYVATEDIKPLVKARRETS

SEQ ID NO: 78082 - protein, 217 aa, Unknown
  Bacterial polypetide isolated from the Sargasso Sea
CMAQSVAVAVGGIGDKLVNELSKKVEALKVGPGMDKESEMGPLVTKDHLEKVKGYVDIGVKEGAKLIVDGRKINIQGYEKGFYIGGCLFDHVKKDMRIYKEEIFGPVLSVVRAKNFDEALKLVNDHEFGNGVSIFTRDGDTGRTFYNKAKIGMVGINIPIPVPMAFHSFGGWKRSLFGDQHMHGPEGVRFYTKLKTITSRWPSGSRSDPEFVMPTMK

SEQ ID NO: 78083 - protein, 251 aa, Unknown
  Bacterial polypetide isolated from the Sargasso Sea
IERIAFTGGPETARHIIKNSAENLSQVSLELGGKSPVAVFEDADQENALNGITAGIFGASGQSCIAGSRLYLQKNIYNNFLDKLVNRANKIKLGNPMDSDTQMGPLSSLKQLEIIEKNIKLTVDQGGKVKCGGKRHSLSNKGYYFPATIIECENHNLPTAENELFGPVLSVMKFETEEEVVNKMNDNQYGLSSGVYTKDLGRGLRVSKAIRAGITFVNTYRLISPSAPFGGMKDSGYGKEKGIESIKDYTR

SEQ ID NO: 78084 - protein, 278 aa, Unknown
  Bacterial polypetide isolated from the Sargasso Sea
MFPMAIACGNTFILKPSEKDPSCSIRLAELFFEAGLPEGVFNVINGGKESVDAIINHKSISAVSFVGSTPIAKYIYENCAKNEKRVQALGGAKNHCVVMPDCDLDQAVNGLMGAAYGSAGERCMAQSVAVAVGNIADSLVNKLAKKVEILKIGPGLDKKSEMGPLITKEHLQKVQNYVDIGVKEGAKLIVDGRKLNLQGFDKGFFMGGCLFDHVKKSMKIYKEEIFGPVLSVVRVKNFDEALKLVNDHEFGNGVSIFTRDGDTGRTFSNKVKIGYGRY

SEQ ID NO: 78085 - protein, 206 aa, Unknown
  Bacterial polypetide isolated from the Sargasso Sea
VDSIADELCDLLTKKAESLRIGPGNEPENEMGPLITDDHKNKVIDYIQQGEDAGATVLLDGRDHEVTSKPGFFLGPTLFDHVNPEMSIYKEEIFGPVLVVLRVKDFNAAIKLANEHQFGNGVAIFTNQGSKAREFVHSVEVGMVGINVAIPVPLSFYTFGGWKDSIFGSSNIYGMDGIRFFTRTKTITARWVDDDGSINLSMPTVK

SEQ ID NO: 78086 - protein, 284 aa, Unknown
  Bacterial polypetide isolated from the Sargasso Sea
MGLIYPSSFPTNEASAGSFSDWKTLSYLALVNYSFKDKYIVDLSYRNDGSSRFAADYRFGNFYSAGLAWNISNENFLADSEVIDNLKIRASYGESGNNAVGLNTYQALFSYSGSYDDNGTIVPSGFSNPIISWETAELTDIGFDFGLFKNRVSGSFNYYIKDTEGLLQSVPLSLTTGHSSYTMNVGAVRNSGIEIEFDATVAKIGDFSWDLYGNYATNDNEILELAKDAQGNDINLDGGYQASRVGRSIRAWYLRTWGGVDSSDGRPYYIVGGDETPEQGYSDE

SEQ ID NO: 78087 - protein, 91 aa, Unknown
  Bacterial polypetide isolated from the Sargasso Sea
MSKIDRRDFINGSLMLFGSSVMPVGSSMGQNPIDLSNSSYPPALNGLRGSHPGSNESAHKKAWTGNNDWGTRNLLDEEYDLVVVGGGISGL

SEQ ID NO: 78088 - protein, 149 aa, Unknown
  Bacterial polypetide isolated from the Sargasso Sea
LDGRGIKIQGYENGSFVGPTLFDNVTEKMTIYKEEIFGPVLSVVRSKTYEEAINLVNNHAFGNGTSIYTSDGEISRHFTTNCKIGMVGINVPIPVPMAFHSFGGWKQSLFGDHSMHGTEGIKFFTKLKTVTSRWPKSIRSGPEFEMPTN

SEQ ID NO: 78089 - protein, 239 aa, Unknown
  Bacterial polypetide isolated from the Sargasso Sea
MAVITGGASGIGLGAVKRFLNEGYEVLSLDANKEAGDKSINELKSDTCKVNFIHCDITNHSQIESIFNALLEEKRPAKVLINCAGISPALNPLHEYSVDEWLRTININLHGTFYACREFLKLATAMNIKEGSIVNVASIMGTRASAAQASYGASKHAVVGLTKSIAQDYATMNIRANAIGPGVIDTPMNTELMKDENVMQYLLQRVPMKRVASADEVANLIYFLASSEASYITGSYYPH

SEQ ID NO: 78090 - protein, 241 aa, Unknown
  Bacterial polypetide isolated from the Sargasso Sea
RALSNAEVKDLVGMWGEAARRVAEAGFDILEIHAAHGYLIHQFLSPYANVRNDEYGGSEENRMRFATEVVEAVRAYWPADKPLFMRLSVEDNAGWGPEESVRLAQRVGPMGVDVIDCSSGGMMGSPVVGKDMRPGYNYQVPYAEKLKRESGVMSMAVGMIVHADQAEKILQDGQADLVALAREILYNPNWPMDAARKLGLERDFESVPPQQSYWLAKRAQSIEDMVPSTYQVGIDGKDGSS

SEQ ID NO: 78091 - protein, 150 aa, Unknown
  Bacterial polypetide isolated from the Sargasso Sea
RFDQLRNGNGSNKTSELRLSMQKTMQSKCAVFRTEKTLKEGVDEIKKPFIGMESISVKDKSLIFNTDLMETLEFDNLIRQAIITMESAYSRKESRGAHAREDFPKRDDVNYMKHTLSWHSGKEVKINYRKVNLSTLTNDVQTFPPKERVY

SEQ ID NO: 78092 - protein, 190 aa, Unknown
  Bacterial polypetide isolated from the Sargasso Sea
SLLDLVVFGKSAAKRCSEIIDSSKENPHVDINIIENLIQKFQKIRNANGTKKVSSIRLEMQHTMQNFCPVYRSEKKMLEGKKKMLSLLEDFNNIKIKDKSLVWNTEVVEALELKNLISQSIVSIESALVRKESRGAHSRIDFQKRDDKKWLKHSVIWVDEKGKTNTKFRKVNLKTNSKEIKTIEPKARVY

SEQ ID NO: 78093 - protein, 217 aa, Unknown
  Bacterial polypetide isolated from the Sargasso Sea
MYLKNYNLKNKYSFVTGAGKGLGRACAIALAEAGSNLIIVSRTQKDLNEVSKKVKKYKVNCKSYVCDVTSYQQVKNIINKQKRIDVLVNNAGNNIPGHFTKVKTKDMEHLVKINSIAAFNVAQLSALKMIKLKNRKKVGGSIINMSSQMGHVGGPIRSVYNMNKWGLEGLTKGMALDLAKYNIRVNAVAPTFVVTSMTKKFLKNKKFKRETLKNIPL

SEQ ID NO: 78094 - protein, 107 aa, Unknown
  Bacterial polypetide isolated from the Sargasso Sea
YSKVESSMDDIDIKDKSLIFNTDLVEALELHNLMAQSKVTLHSALNRTESRGAHAREDYKERDDKNWLVHSLAWLNDKGDVSMGSRGVHMNTLTNHVQPIPPKRRVY

SEQ ID NO: 78095 - protein, 221 aa, Unknown
  Bacterial polypetide isolated from the Sargasso Sea
AGERCMAQSVAVAVGSVGDKLVKNLAKKVETLKVGPGMDKKSEMGPLVTKEHLSKVKSYVDIGEKEGAKLIVDGRNLKLQGYENGYYMGGCLFDHVTSKMRIYKEEIFGPVLSVVRAKDFNEALTLVNDHEFGNGVSIFTRDGDSGRTFSSKAKIGMVGINIPIPVPMAFHSFGGWKRSLFGDQHMHGPEGVRFYTKLKTITSRWPSGLRSDPEFVMPTMK

SEQ ID NO: 78096 - protein, 227 aa, Unknown
  Bacterial polypetide isolated from the Sargasso Sea
IGGTALEMDVQNQEHIDKAINQIISEQGRVDVLVNNAGLGVYGAIEDVSMEDIYYQYDVNLFGLARVTKAVLPYMREKESGLIINISSVLGETYGPLAGWYLSTKHALEGWSDALRVELKEFDIDVVVVQPGAINTNFSNVTKTYIDKYRENSAYQHLYGEPITDTGNEVLSNQSDPIVIAKVINKAMNARNPKTRYAAGAYSKIGIFLRKIMTDKMFDRFILFISD

SEQ ID NO: 78097 - protein, 191 aa, Unknown
  Bacterial polypetide isolated from the Sargasso Sea
NSLIDLVVFGKAASLTCKEKVKPNSKKIEISKSKTDNIIERFDKIRNSKGNSTTGELRTSMQHIMQQKCAVFRTHDLISKGIEEYSKVESSMDDIDIKDKSLIFNTDLVEALELHNLMAQSKVTLHSALNRTESRGAHAREDYKERDDNNWLVHSLAWLNDKGDVSMGSRGVHMNTLTNHVQPIPPKRRVY

SEQ ID NO: 78098 - protein, 122 aa, Unknown
  Bacterial polypetide isolated from the Sargasso Sea
MRIYKEEIFGPVLSVVRVKSFEEAAKLINDHEYGNGVSIYTRDGDAGRTFASKIQVGMVGVNIPIPVPMAFHSFGGWKRSLFGDSAMHGMEGIKFYTKLKTITSRWPSGIRSNAEFVMPTMK

SEQ ID NO: 78099 - protein, 202 aa, Unknown
  Bacterial polypetide isolated from the Sargasso Sea
IKLKQSYWEETAKLNVGPYTDEKSDFGPLNNKAHFEKVLGYIDAGEKEGAKLLSDGRNFKKQGYENGYFVGPTIFDDVKPEMKIYKEEIFGPVLSMMTTDTYEEALNLVNEHELGNGAAVFTKSGNIAKHFTENAKIGMIGVNVPIPVPVAYHSFGGWKRSLFGDHSMHGPEGVRFYTKLKTATVTWVEDNAGPEFTIPVLS

SEQ ID NO: 78100 - protein, 94 aa, Unknown
  Bacterial polypetide isolated from the Sargasso Sea
MYLNKISLKNKTALVTGAGKGIGKACAIALAEAGANLIIISRTQKDLDIVSKIIKKFKSKCVSYVCDVTNYNQIKNIINKQKKIDILVNNAGNN

SEQ ID NO: 78101 - protein, 185 aa, Unknown
  Bacterial polypetide isolated from the Sargasso Sea
YSSLGARKSRGTLTIQLTGNIKNGGLIEVPFGIKLSEVLYDYGMGTITGRPIKAVQVGGPLGAYWSEKLFDTPLDYETFQENGGMIGHGGIVVFDDHIDLRFQAKFAMEFCSFESCGKCTPCRIGSIRGKEILDKIIFGDNVKNNIKLLMDLCDVMEHGSLCAFGGLIPVPVKSAIENFKEDFID

SEQ ID NO: 78102 - protein, 315 aa, Unknown
  Bacterial polypetide isolated from the Sargasso Sea
LNLAPGRLLWEILVVIKSSELAPATLFEFAKLIEKVELPKGVVNIVSGFGEPCGRALTSHKLVERVAFTGGPETARHIIRNSADNLSQVSLELGGKSPVAVFEDADQENALNGITAGIFGASGQSCIAGSRLYIQNSIYDNFLEKIVNRANKIKLGPPMDTETQMGPLSSLKQLEIIEKNIKLTLDQGGKLRCGGKRHTMSNKGYYFPPTIIECDNHNLPTAENELFGPILSVMKFNDEKEVINKMNDNQYGLSSGVYTKDINRGLRVSNAIRAGITFVNTYRLISPSAPFGGMKDSGYGKEAGVESIKDYTRIK

SEQ ID NO: 78103 - protein, 197 aa, Unknown
  Bacterial polypetide isolated from the Sargasso Sea
FFDFATHPTWSISTLLNGIPKPMNYVTSKSGDGIFKRKESRGTTDWDTLKRVRDKWKGKLIIKGVMSPDDAIQIKEAGADAIQVSNHGGRQLDSATAAINMLPLIRKSVGSDFPLIFDSGIRSGSDIVRALAFGADYAMIGRPVMYAMGADGRKGLRRIVEIIKEEASTTLGLVGLNDINDVTSNIVIDSTVNKVNY

SEQ ID NO: 78104 - protein, 225 aa, Unknown
  Bacterial polypetide isolated from the Sargasso Sea
MNSQMFLTATKLAPALAMGNTVVIKSSELAPAVLFEFAKLIEKTGIPKGVVNVITGFGDPCGKTLTTHNLVEKIAFTGGPETARRIIKNSAENLSEVSLELGGKSPVAVFDDAEQENAINGITAGIFGASGQSCIAGSRLYIQKGIYNEFLDKLSSRASKIKIGAPMDLDTEMGPLSSFKQLETIEKNIKDTVDQGGKIKCGGKRDSFSNKGYYFPPTIIECDNH

SEQ ID NO: 78105 - protein, 167 aa, Unknown
  Bacterial polypetide isolated from the Sargasso Sea
EHLMREISESETQKCLDRFDKLRNAQGNNSTAELRLSMQKTMQSKCAVFRTEKNLKEGVDEIKKTYDGMDSISVKDRSLVFNTDLVETLEFDNLIRQAVTTVESAYHRKESRGAHARDDYPKRDDEKFMQHTLAWCDGKNTKISYRAVHKSTLTNEVQYFPPQERVY

SEQ ID NO: 78106 - protein, 226 aa, Unknown
  Bacterial polypetide isolated from the Sargasso Sea
AAYGSAGERCMLQSVAVAVGEIGDKLVSSLAKKVEALKVGPGMDKQSEMGPLITKEHLAKVKGYVDIGVKEGAKLIVDGRKFKIQGYENGYYIGGCLFDKVTKDMRIYKEEIFGPVLSVVRAKDFDEALQLVNDHEYGNGVSIFTRDGDSGRTFSSKAKIGMVGINIPIPVPMAFHSFGGWKRSLFGDQHMHGPEGVRFYTKLKTITSRWPSGLRSDPEFVMPTMK

SEQ ID NO: 78107 - protein, 258 aa, Unknown
  Bacterial polypetide isolated from the Sargasso Sea
RHIIRNSAENLSQVSLELGGKSPVAVFEDADQENALNGITAGIFGASGQSCIAGSRLYIQNGIYDNFLEKIINRANKIKLGSPMNNETQMGPLSSLKQLEIIEKNIKLTLDQGGKLRCGGKRHSMSNKGYYFPPTIIECENHNLPTAENELFGPVLSVMKFNDEEEVINKMNDNQYGLSSGVYTKDINRGLRVSNAIRAGITFVNTYRLISPSAPFGGMKDSGYGKEAGIESIKDYTRIKTTWFNTSDKPMDDPFTMG

SEQ ID NO: 78108 - protein, 242 aa, Unknown
  Bacterial polypetide isolated from the Sargasso Sea
MNYQSVFRDDLFAGQVIVVTGGGSGIGRCIAHELASLGAGVVITGRQEAKLADVAGEISADGGAVDTLAFDIRDEDAVKANVSEIISRYGRIHGLVNNAGGQFPARLEDISANGWNAVVATNLTGGFFVAREVYRHSMKANGGSIVNIIADMWRSMVEMGHSGAARAGMMSLTETAAVEWGPDGVRVNAVAPGWIMSSGFDTYDDPKTRKRFREMPGFVPLKRIGTEAELSAAVAFLCRRRR

SEQ ID NO: 78109 - protein, 270 aa, Unknown
  Bacterial polypetide isolated from the Sargasso Sea
NGDKEAVDAIIENKHIAAVSFVGSTPIAKYIYENCAKNEKRVQALGGAKNHCVVMPDADLEQAVNGLMGAAYGSAGERCMAQSVAVAVGKIADPLVKSLSKKVDALKVGPGLDKKSEMGPLVTKEHLEKVKSYVDTGVKEGAKLVVDGRNLRLQGYEKGFYMGGCLFDHVKNDMRIYKEEIFGPVLSVVRAKDYSEALKLVNDHEFGNGVSIFTRDGDTGRSFSSNVKIGMVGINIPIPVPMAFHSFGGWKRSLFGDQHMHGPEGGKILY

SEQ ID NO: 78110 - protein, 98 aa, Unknown
  Bacterial polypetide isolated from the Sargasso Sea
NSMSVKDKSLIFNTDLVESLEFDNLIRQAVVTVDSAYHRKESRGAHAREDFPKRDDKKFMQHTLAWCDGKETKISYREVHKTTLTNEVQYFPPQERVY

SEQ ID NO: 78111 - protein, 197 aa, Unknown
  Bacterial polypetide isolated from the Sargasso Sea
QSCDAPTRLIVERSCYGQVVELAEQAARSQEVKDPSLEGDHIGPLFDEIQYHRVQGMIQVGIDEGATLLVGGLGRPEGIDGGWYVKPTVFSDVKNTMRIAQQEIFGPVLVIIPFDDEDEAIQLANDSPYGLAAYIQTSDPKRAERVAARLRAGQIHINGSAPNFATPFGGFKQSGNGREGGTHGLEEYLELKSICRN

SEQ ID NO: 78112 - protein, 209 aa, Unknown
  Bacterial polypetide isolated from the Sargasso Sea
AVGDIGDELVSRLSKKAEALKVGPGMDKASEMGPLVTKEHLEKVTSYVDLGVKEGAKLVVDGRGLKLQGYENGFYIGGCLFDHVNKDMRIYKEEIFGPVLSVVRVKTFEEAAKLINDHEYGNGVSIYTRDGDAGRTFASKIQVGMVGINVPIPVPMAFHSFGGWKRSLFGDSGMHGMEGIKFYTKLKTVTSRWPSGVRSNAEFVMPTMK

SEQ ID NO: 78113 - protein, 217 aa, Unknown
  Bacterial polypetide isolated from the Sargasso Sea
DNEESAKNAISVIIQEKGRIDVLVNNAGWGIWGTGEDVSLEEFREQFETNFFSVVRMIQKVAPIMREQGSGNIVNISSVAGRIGLPASTAYVSSKFAIEGLSESLRYELGPFGVNVIIIEPGVIKTNFFDSMKTAKKADVGETYRDITLKVITGVKMMAEMGTPPKEVAQVIINSIKEEKPLPRYIVGNDAAMFMESKKMKTDIEFENYMKKELYGE

SEQ ID NO: 78114 - protein, 271 aa, Unknown
  Bacterial polypetide isolated from the Sargasso Sea
MEKVAVVTGSSSGIGFETSLALAREGYFTYATMRDVKKAAEIQKITDEESLPLKIIELDVDNEESAENAINTIIQEKDRIDVLVNNAGWGIWGTGEDVSIEEFKAQFETNFFSVVRMIQKVAPTMRKQGSGNIVNISSVAGRIGLPASTAYVSSKFAVEGLSESLRYELGQFGINVIIIEPGVIKTNFFDSMKTAKKADTGETYRDITLKVITGVKMMAEMGTSPKEVAQVIINSLKEEKPLPRYIVGNDAAMFMESKKMKTDIEFENYRK

SEQ ID NO: 78115 - protein, 277 aa, Unknown
  Bacterial polypetide isolated from the Sargasso Sea
FEIFSISGKNVKNVIKNKAISAVSITGSTPAGSSVAQIAGKYLKKTVLELGGSDPYIILDDADLNNSIQACINGRILNSGQSCISAKRLIVTKSLYHDFLIKLKIQLSKKIMGDPMDNVDIGPMVSISARDEIHDQVTRSIDSGAILELGGEVPDLKGCFYPVTMLSNVKPGMPAFDEEIFGPVFSLIMAQDEEDAINLGNNTQFGLGAAIFTENIKKAEEIARFSLNAGLCFVNDFVKSDPRLPFGGVKESGYGRELSSYGLMEFVNIKTVVVNHE

SEQ ID NO: 78116 - protein, 165 aa, Unknown
  Bacterial polypetide isolated from the Sargasso Sea
MGVIEKFGIPKPISKILNWARAYDMWYFQFGLACCAIEVMAASGPRHDFMRLGIIPLPASPRQADLMVVAGTVTDKMAPAVKRLYDQMPEPKYVISMGSCSNSGGPYWDSYSVTKGVDQLIPVDVYVPGCPPRPEALQEGIVLLQKKIKGEDMKEKWREKDIEPV

SEQ ID NO: 78117 - protein, 263 aa, Unknown
  Bacterial polypetide isolated from the Sargasso Sea
ENAAKNEKRVQALGGAKNHCVVMPDCDLDQAVNGLMGAAYGSAGERCMAQSVAVAVGNVGDKLVDELSKKVEALKIGPGMDKNSEMGPLVTKEHLERVRGYVDLGIKEGANLVVDGRDIKLQGYEDGYYIGGCLFDNVKKDMRIYKEEIFGPVLSVVRAKDFDEALNLVSDHEFGNGTSIYTRDGDAGRTFANQIKVGMVGINIPIPVPVAFHSFGGWKRSLFGDQHMHGPEGVRFYTKLKTITSRWPSGVRSDPEFVMPTMK

SEQ ID NO: 78118 - protein, 122 aa, Unknown
  Bacterial polypetide isolated from the Sargasso Sea
CAVFRDDQIMSEGSKLIEEIWFGSTEIKIKDKSMIWNTDLLETLEYKNLIEQAVVTMNSALNRKESRGAHAREDYKERDDKNWMKHTLSWLEEKSCKIDYRSVHEYTLSNEVKYIEPKARVY

SEQ ID NO: 78119 - protein, 157 aa, Unknown
  Bacterial polypetide isolated from the Sargasso Sea
KEGAKLVVDGRNLKLQGYENGFYIGGCLFDNVKKDMRIYKEEIFGPVLSVVRVKTFEEASKLINDHEYGNGVSIYTRDGDAGRTFASKIQVGMVGINVPIPVPMAFHSFGGWKRSLFGDSAMHGMEGIKFYTKLKTITSRWPSGIRSNAEFVMPTMK

SEQ ID NO: 78120 - protein, 240 aa, Unknown
  Bacterial polypetide isolated from the Sargasso Sea
VMELGGKSPQIVLPDCDLELAVNGIISGIFPAAGQSCISGSRLLIHQEISELFTEYLLNALRDVKVGDPNDPATHIGPIAHRLHYENILKKIETAVKDGYQLILDGRTYCKSDGYYIGPTIFKDISNETDLSQNEIFGPVVSTQSWVEEEEVIHIANDTIYGLAAGIWSKDVAKAMRIADRIEAGTVYINNYFNAATQSPVGGFKQSGYGRENGWEGMRCFMQTKSVWLSTNPNEKNPFE

SEQ ID NO: 78121 - protein, 264 aa, Unknown
  Bacterial polypetide isolated from the Sargasso Sea
ISSHPDIDMISFTGSTRAGKLITKNAADTIKRVCLELGGKGGNIVFADSYPNAIRDGIKNVMSNSGQSCDAPTRMLVEKTIYERAIKEAADEANKIKVDIASKKGDHIGPVVSKVQYDKIINLINNGIDEGATLAAGGPDLPNGLNKGYFIKPTIFTNVTNSMEIAKKEIFGPVLSIIPFETEEEAIQITNDTEYGLGNYLQTEDKEKAKRVAKKLRSGIVYINGNAADSGTPFGGYRQSGNGREGGVWGLEEYLEVKTVTGWK

SEQ ID NO: 78122 - protein, 292 aa, Unknown
  Bacterial polypetide isolated from the Sargasso Sea
AELFKEAGLPDGVLNVVNGDKESVDALINNKDVVAMSFVGSTPIAKYIYENCAKNEKRVQALGGAKNHCVIMPDCDLDQAVNGLMGAAYGSAGERCMAQSVAVAVGNIGDKLVNSLAKKVEALKVGPGMDKQSEMGPLVTKEHLAKVKGYVDIGVKEGAKLVVDGRNFKIQGYENGYYIGGCLFDHVKNNMRIYKEEIFGPVLSVVRAKDFEEALKLVNDHEFGNGVSIFTRDGDSGRTFSNKAKIGMVGINIPIPVPMAFHSFGGWKRSLFGDQHMHGPEGVRFYTKLKTV

SEQ ID NO: 78123 - protein, 255 aa, Unknown
  Bacterial polypetide isolated from the Sargasso Sea
MYLKNYNLKNKTVIVTGAGKGIGRACAIAFAEASANLVIISRTQKDLNEVSKKIKKLKVKCKSYVCDITNYNEIRNIINKQPKIDILVNNAGNNIPEHFTKVKTKNMEYLVKINTIATFNLAQLCALKMIKSKNRKKVGGAIINMSSQMGHVGGPIRSVYNMTKFGLEGLTKGMSIDLAKYNIRVNTVCPTFVVTPMTKKFLKSKKFKREVLGNIPLGKFAELSDVASAAVFLASDAASMITGTSLLVDGGWTAK

SEQ ID NO: 78124 - protein, 172 aa, Unknown
  Bacterial polypetide isolated from the Sargasso Sea
IVGFGRIGQNLIKRCLGFEMNVFVYDPFVSKEIVEKLGGKKVEDLKESVKSMDAISLHMPLNEKTKNLINYNLIKNMKKNCIIINAARGGIINEHDLDKALNKELIFGAGLDVFEKEPPDKNNPLLKNNKVFLSPHTAAFTEDCMIRMAKETVQNIIDFFEKKLDKSKLVNL

SEQ ID NO: 78125 - protein, 188 aa, Unknown
  Bacterial polypetide isolated from the Sargasso Sea
ENDVKAVSEYADQAWDKVDVLVNNAGSELNQTYDKTTLEEWDRVLDTDLKGPWLMCKYIVPGMVNVGSGSVINISSLNGLVGFPLSTAYGSAKGGLVVFTRDMAIELANTGVRINCVCPGVIDTGMMDRWTDLMPDKTEAQEMLKGAMPIGRMGTADEVAGAIYFFASPDSSLCQGSVLSVDGGFTAQ

SEQ ID NO: 78126 - protein, 305 aa, Unknown
  Bacterial polypetide isolated from the Sargasso Sea
PSYEYIVFDNSNSSNYELAYPAATEDKSNAKLTVRNRLSDEASVIPDTEWEYTSSDRSAIRLLPNSTCFKQSCIYEFTYTAMNPVVAGIGLAATRDFVDFLRSATQIDENPLAGDVKYTFSYSISQPSRVLNDFQRLGFNESKDGHAIFDGILSHTGGASGDQINYRFAQTGRTERNRQNHLYPEAVFPFSHQVLTDHLSGKTDGKSLRNISSHTQTKKFEVNTSNEYWVKACSLLHTDTEGNDLNDPENVRFYLLSGLSHGVGKINDKSIGQQYTNPVAPYAAHRALLIALNEWVTKGMTPPDS

SEQ ID NO: 78127 - protein, 284 aa, Unknown
  Bacterial polypetide isolated from the Sargasso Sea
GFPADIFRNISISGKNVKDVIKNKAISAVSITGSTPAGSSVAQTAGKYLKKTVLELGGNDPYIILDDADLDNAIEACISGRILNTGQSCISAKRLIVTKSLYHEFLKKLKIKLSKMIMGDPMDNVDIGPMVSINARDEIHDQVTRSIHSGAKLEVGGKVPDLKGCFYPVTLLSNVKPGMAAFDEEIFGPVFSLIMAEDEEEAINLGNNTQFGLGAAIFTENLKKAEEIAKSSLNAGLCFVNDFVKSDPRLPFGGVKESGYGRELSSYGLMEFVNIKTVVVKHDY

SEQ ID NO: 78128 - protein, 255 aa, Unknown
  Bacterial polypetide isolated from the Sargasso Sea
IENAVRGAYWAGFGTAGQRCTSLGNLIIHEDIYDEFVERFMEKVRSTTIGDSMRHDGVLYGPMLSERYSVDFLKGVDMCESSGATKIWGEGRITEDSKPDSFHGDASEGIYMWPHVYVDVTEDMECFHEEIFGPLVTIVKASDFDHALHLANASPYGLSSAIYTNDRLEAYRYKTGIKAGMTGINNSTTGAEAHLPFGGVKGSGNGTRESGIWVIEAYSYWHAVNDELSGKLQLAQMDVDEIEMEEADADYGGLA

SEQ ID NO: 78129 - protein, 244 aa, Unknown
  Bacterial polypetide isolated from the Sargasso Sea
MSTRMANPFQFLDVDRMDPGKKNMETRTEAFVEIYDPYTQVQAAEQSHRCLECGNPYCEWKCPVHNFIPNWLKLLAEGNLFEAAELSHQTNTLPEVCGRVCPQDRLCEGACTLNDGFGAVTIGNSEKYITDTALAMGWRPDLSDVVPTDKKVAIIGAGPAGLGCADILTRNGVNAVVFDRYPEIGGLLTFGIPQFKLEKQVMERRREVFEGMGIEFRLNTEVGRDITIDQLLADYDAVFLGMGT

SEQ ID NO: 78130 - protein, 180 aa, Unknown
  Bacterial polypetide isolated from the Sargasso Sea
MYLKKINLKNKYALVTGAGKGLGRACSIALAEAGATVIGLSRTQSDLDKLQTDIKRVKGRLIKINCDVMNYNDLKFKIEKIKIIDVLVNNAGTNIPEPFEKIQQKSMNYIVDLNLKAAFNVAQLVVKKMLKNKKRGGSIINMSSQLGHVGMIGRNVYNMTKFGIEGLTKGMGVELATRNI

SEQ ID NO: 78131 - protein, 144 aa, Unknown
  Bacterial polypetide isolated from the Sargasso Sea
MYLQKINLKKKYALVTGAGKGLGRACSIALAEAGAIVVALSRTKSDLNKLEKDIKKVKGKIIKITCDVMDYEDLKKKLEKIKIIDVLVNNAGTNIPEPFEKVQQKSMNYLIDLNLKAAFNVAQLVVKKMLKNKKRPGSIINMSS

SEQ ID NO: 78132 - protein, 273 aa, Unknown
  Bacterial polypetide isolated from the Sargasso Sea
TLADGSVTFTGSSVIPVADVNGGAVDGVTLGTNSAVTQAVVDNINLNGTTIGHTDDTDLMTLADGSVTFTGSTVIPVADVNGGAVDGITLGTNSAVTQAVIDNVNINGATIGHTSDTDLLTLSSGVVTLAGNLTFANGESVSNATDGDFLFTTDVTDGALVLKNSNATDGTAKIELVSDNADNAGDGYEIKSVNGTFTVTSDHSSSGTYNDTYLTIDGNATPASSTTKIAGDLLVDGGQIALTGDTDLITLSSGVVTVAGELSATTLDINGTD

SEQ ID NO: 78133 - protein, 224 aa, Unknown
  Bacterial polypetide isolated from the Sargasso Sea
YGSAGERCMAQSVAVAVGNIGDNLVNELSKKVEALKVGPGMDKKSEMGPLVTKEHLEKVKGYVDLGVKEGAKLVVDGRNLKLQGYENGYYIGGCLFDHVKKNMRIYKEEIFGPVLSVVRVKDFDEATKLINDHEFGNGTSIYTRDGDVGRTFASNIKIGMVGINIPIPVPVAFHSFGGWKRSLFGDQHMHGVEGVRFYTKLKTITSRWPSGLRSDPEFVMPTMK

SEQ ID NO: 78134 - protein, 293 aa, Unknown
  Bacterial polypetide isolated from the Sargasso Sea
LRENSELLGKIETIDTGKLYRETYQQAKYIAEYYDYYAGLADKVEGTVLPIDKPNIQAITTRIPIGVIAAIIPWNSQMFLTATKVAPALAMGNTVVIKCSELAPATMFEFAKLVEETGIPKGVVNVVSGFGDPCGKALTTHNLVEKVAFTGGPETARHIIRNSAENLSEVSLELGGKSPVAVFDDAKQENAINGITAGIFGASGQSCIAGSRLYLQKGIYNEFLDKLASRAEKIKIGAPMDSDTEMGPLSNFKQLEVIEKNIKLTVEQGGKIKCGGKRHPFSNEGYYFPPTNY

SEQ ID NO: 78135 - protein, 245 aa, Unknown
  Bacterial polypetide isolated from the Sargasso Sea
WARRIEGEIITSDVKNENIFLYRVPIGVVAGILPWNFPFFLIARKVAPALIAGNSIIIKPSEETSNNAFFFTKIIHELNLPKGLINVVYGKGETVGRYLSAHPGIDMISFTGSVETGSLIMQEAGKNITKVNLELGGKAPAIVLGDADIDKAANKIKNARVINSGQVCNCVERVYVQNNILDEFTDKLTKIMENVQYGNPNLYNDIEYGPMINNEGLTKVEGLVKSATSEGAEIVTGGKSTKIEN

SEQ ID NO: 78136 - protein, 221 aa, Unknown
  Bacterial polypetide isolated from the Sargasso Sea
AASQTFDEARHVEVFNKYLQDKVGMHYPINPSLKLLLDKILTDERWDLKFIGMQIIIEGLALAAFQMLKAITKDPLLKQLLHYVVRDEARHVTFGINYLEDYLKTLSPEEINERAEFAYEACVISRDRLINTKAEQRFLKMTEEEAREFQLNTGTFEMFRNFLFTRVMPNLKRIGLLTDEVRPKFEALGLLEYENAPDDFECDWAEMKKPLEKFGQIPEVV

SEQ ID NO: 78137 - protein, 141 aa, Unknown
  Bacterial polypetide isolated from the Sargasso Sea
CLVFARAASQDIESQMHKIPLPGQIPAWDESKVSNSDEEVVIAHNWHELRLFMWDYVGIVRSDKRLERALRRCLMLQQEIQEYYSNFRVSNNLLELRNLVQVAELIIRCAMDRKESRGLHYNIDHPEKVDSPQPTILQPEK

SEQ ID NO: 78138 - protein, 223 aa, Unknown
  Bacterial polypetide isolated from the Sargasso Sea
KRGIPDGVLNVLPGYGDVGEALGRHKDVDAVSFTGSTEVGGYFLKYSSESNLKPVALEMGGKSPFIVLEDAKITDDLIDNAMNSAFWNGGQNCSANMRQIIHKKVKDEFLDKVIKKVKKLKVGDPLDLKSNMGSMISKGHLQTVDGYIQKGIDEGAKLLSGGVSSKKQKGFYAKPTLFDGLKENMTIAQEEIFGPVLGVLTLKNDEEALKIASNSKYGLHASV

SEQ ID NO: 78139 - protein, 279 aa, Unknown
  Bacterial polypetide isolated from the Sargasso Sea
LAPALAMGNTIIIKASEVAPTPLLEFAKIIDKVGMPKGVVNIITGFADTCSKLLTSHPKINKIAFTGGVHTAKHIVRNSAENLSQISLELGGKSPVVVFKDAHKNNAINGIMASIFGASGQSCIAGSRLYLQEEIYQEYLEELKNRVEEIEIGDPLLTTTQLGPLATLNQLQNIEQKIKQTKEQGGKIITGGNKVSEFKNGYYFEPTIIECANHNLPVAENELFGPVLSVMKFKNEENAIELMNDNSFGLAAGIFTENNGIAMRVSKKVQAGIVFVNTY

SEQ ID NO: 78140 - protein, 106 aa, Unknown
  Bacterial polypetide isolated from the Sargasso Sea
MTTPPFVWLISGCSTGFGREIAISALEAGDMVAVTSRNTEDIRDICNKYPSTSVALNLDVTYTDQIIECVRNVISKFGRIDVLVNNAGYGYLSAIEEGEGEEVSKL

SEQ ID NO: 78141 - protein, 35 aa, Unknown
  Bacterial polypetide isolated from the Sargasso Sea
MSSYKIIEHEYDVVVLGAGGAGLRAAVGLSEAGLK

SEQ ID NO: 78142 - protein, 251 aa, Unknown
  Bacterial polypetide isolated from the Sargasso Sea
LGGAKNHLVVMPDCDLDGAVNGLMGAAYGSAGERCMAQSVAVAVGDIGDELVSRLSKKAEALKVGPGMDKASEMGPLVTKEHLERVRGYVDLGVKEGAKLVIDGRDLKLQGYENGFYIGGCLFDHVNKDMRIYKEEIFGPVLSVVRVKTFEEAAKLINDHEYGNGVSIYTRDGDAGRTFASKIQVGMVGINVPIPVPMAFHSFGGWKRSLFGDSAMHGMEGIKFYTKLKTITSRWPSGIRSNPEFVMPTMK

SEQ ID NO: 78143 - protein, 310 aa, Unknown
  Bacterial polypetide isolated from the Sargasso Sea
KERARYLRMIGDNFRDNSEHLGKIETIDTGKLYRETYKQANYIAEYYDYYAGLADKVEGTVLPIDKPNIQAITTRIPIGVVVAIVPWNSQMFLTATKLAPALAMGNTVVIKCSELAPATMFEFAKLIEETGIPKGVVNVISGFGEPCGRALTSHNLVEKIAFTGGPDTARHIIINSAQNLSEVSLELGGKSPVAVFNDANQENAINGITAGIFGASGQSCIAGSRLYLQEEIYDEFLDKLSKRAEKIKIGAPMDPETEMGPISNYKQLEVIEKNIKLTLEQGGRLKCGGQRHSFSNEGYYFPATIIECDN

SEQ ID NO: 78144 - protein, 222 aa, Unknown
  Bacterial polypetide isolated from the Sargasso Sea
MGLMSLPILINQGYEKSFSAGLVASTGTLGQIIPPSIALVLLGDVMSNAYQRAQNDMGIFSQQTVTVGDLFIGAVIPGIMICLGYLLYTIYKNKNNLNLKDYTNEVLIEKIEIFKTLALPVTLIFLVLGSIFAGIATPTEASAIGAFGALVIALINGKINFNFIKESSENTAIVSTMIFTILIGASIFSLIFRGVGGDELINIIFSSLPGGSYTAFIFLFYL

SEQ ID NO: 78145 - protein, 307 aa, Unknown
  Bacterial polypetide isolated from the Sargasso Sea
FEFAKLIEKSGIPRGVVYIITGFGEPCGKALTTHEDVERIAFTGGPETARHIIRNSAENLSQVSLELGGKSPVAVFEDADQENALNGITAGIFGASGQSCIAGSRLYLQKGIYNNFLDKLVNRAKKIKLGNPMDADTQMGPLSSLKQLEIIEKNIKLTVDQGGKIKCGGKRHSLSNKGYYFPATIIECENHNLPTAENELFGPILSVMKFENEEEVINKMNDNQYGLSSGVYTKDLGRGLRVSKAIRAGITFVNTYRLISPSAPFGGMKDSGYGKEAGIESIKDYTRIKTTWFNTSDKPMSDPFTMG

SEQ ID NO: 78146 - protein, 189 aa, Unknown
  Bacterial polypetide isolated from the Sargasso Sea
MGDKVSVSIISVAIIGAGPAGFYAAEALIKKKLNCEIDIIDLLPTPYGLIRAGVAPDHQTTKKVTRAFEKTALNDSCAFFGNINVGKDISIEELKKIYDVIILSIGADSDRELGIPGQELDGVIGSASFVSWYNAHPNFVDLNPNLDCKNVVVLGNGNVAIDVARVLVKNREEMADSDIPEYALKSIED

SEQ ID NO: 78147 - protein, 80 aa, Unknown
  Bacterial polypetide isolated from the Sargasso Sea
TLEFDNLIRQAVVTVDSAYNRKESRGAHAREDYPKRDDEKFMQHTLAWCNGKDTKIGYREVHKSTLTNEVQYFPPQERVY

SEQ ID NO: 78148 - protein, 176 aa, Unknown
  Bacterial polypetide isolated from the Sargasso Sea
TCKEKVKPNSKKIEISKSKTDNIIERFDKIRNSKGNSTTGELRTSMQHIMQQKCAVFRTHDLISKGIEEYSKVESSMDDIDIKDKSLIFNTDLVEALELHNLMAQSKVTLHSALNRTESRGAHAREDYKERDDNNWLVHSLAWLNDKGDVSMGSRGVHMNTLTNHVQPIPPKRRVY

SEQ ID NO: 78149 - protein, 148 aa, Unknown
  Bacterial polypetide isolated from the Sargasso Sea
DYLKKNSLLLNEVAISASEIAKDKKIRNIVHKFQQICAYNPPKKYKGSVLDGRDIITVQVRDAMFKFYITASLGVRAKRRFNEYRKLNKKITYKEVLKSLRNRDESDRKRRYGPLKKTKDSILINTTKLSKKACFEKIKAIMDKKLNN

SEQ ID NO: 78150 - protein, 299 aa, Unknown
  Bacterial polypetide isolated from the Sargasso Sea
HSSQTPLCAEELYEAAKQSSLPKDIFQYLHLDHDQTSRIISDSRINHVLFTGSVSGGKQIKKSIDTRFIGAGLELGGKDPAYVRADCDLDHAVENLVDGSYFNSGQSCCGIERIYVDKKIYNTFVEKFKDVTEKYILGNPLEMETNLGPVVKQSAANNIRSEVNNAISQGGKNIIDKKKFNLDDGKNCYVSPSALINVDHSMKYMMEEIFGPSVGIMKVENENEALSLMNDSSYGLTASIWTNDKSFAENFGKNVETGTFFMNRCDYLDPGLAWTGVKDTGIRVTLSVLGFDHLTRAKS

SEQ ID NO: 78151 - protein, 209 aa, Unknown
  Bacterial polypetide isolated from the Sargasso Sea
DEVADALIAQLQQEISTLKVGPGTGVSPEPHMGPLISRQHADKVLSYINAGVAEGATLVADGRNFVVSQHQQGYFVGPTLFDKVTPDMSIYREEIFGPVLAVVRVPSFAEGLALINQHEFGNGTAIFTGSGEAAREFTAQVQVGMVGVNVPIPVPMAFHSFGGWKRSVFGPLNMHGPDGVRFYTRMKTITARWPNGQAQGNQFSMPTMK

SEQ ID NO: 78152 - protein, 100 aa, Unknown
  Bacterial polypetide isolated from the Sargasso Sea
MDEIDIKDKSLVFNTDLVEALELHNLMAQSKVTLHSALNRKESRGAHAREDFKDRDDKNWLVHSLAWLTNKGDVIMGSRGVHMNTLTNHIQPIPPKKRVY

SEQ ID NO: 78153 - protein, 155 aa, Unknown
  Bacterial polypetide isolated from the Sargasso Sea
MDKTSEMGPLVTKEHLEKVKSYVDLGVEEGAKLVVDGRNLKLQGYENGFYIGGCLFDHVNKDMRIYKEEIFGPVLSVVRVKTFEEAAKLINDHEYGNGVSIYTRDGDAGRTFASKIQVGMVGINVPIPVPMAFHSFGGWKRSLFGDSGMHGMEGI

SEQ ID NO: 78154 - protein, 262 aa, Unknown
  Bacterial polypetide isolated from the Sargasso Sea
MLSYFGEIETIDTGKLFRETKKQANYIAEYYDYYAGMADKVEGTVLPIDKPNIQAITTRVPIGVIAAIIPWNSQMLLTVTKLAPALAMGNTVVIKSSELAPAVLFEFAKLVEETGIPKGVVNIITGYGDPCGKALTTHNLVDKIAFTGGPETARHIIRNSAENLSEVSLELGGKSPVAVFEDAHQENAINGITAGIFGASGQSCIAGSRLYLQKGIYNEFLDKLASRAEKIKIGAPMDPESEMGPISNFKQLEIIEKNIKFN

SEQ ID NO: 78155 - protein, 285 aa, Unknown
  Bacterial polypetide isolated from the Sargasso Sea
TGKIIGEISCAKKNEVDLAVSAAKAAFNSRVLVDMPLLERAKLMHRIADETRKIADEGGKILCYENGKMLGSAIKEFNDVADMFDYYAGLTDKLEGKTIPISPTVFDYTVLEPFGVSAHIVPWNFPISMVGRSLACSFATGNSTIVKTAELTPLSATFFAKAIENAGVPNGIVNIICGYGNEAGSYLVSHPDVNHVVFTGSVATGKKILHSCADKAIPAVIELGGKSAGIVYEDADLDQVIESARHGIFGVAGQICTAMSRLVVHKSVKNELIDKLVDLSKSLKV

SEQ ID NO: 78156 - protein, 285 aa, Unknown
  Bacterial polypetide isolated from the Sargasso Sea
FALICIPFGIFDPTIFKSIPIRIFGIMNNITLLAVPLFIFMGTILEKSGIAAKMLENMAAAFKKTKGGLSISIIIVGALLAASTGIVGATVVTMGLMSLPILINQGYEKSFSAGLVASTGTLGQIIPPSIALVLLGDVMSNAYQRAQNDMGIFSQQTVTVGDLFIGAVIPGIMICLGYLIYTIYKNGKNADLKDYSNGVPIQRIELLKTLALPIVLIFLVLGSIFAGIATPTEAAAIGAFGAMLITFVNGKIDFQFIKETSEKTAIVSTMIFTILIGASIFSLIF

SEQ ID NO: 78157 - protein, 123 aa, Unknown
  Bacterial polypetide isolated from the Sargasso Sea
GERCMAQSVAVAVGDIGDELVTRLSKKVEALKVGPGMDKNSEMGPLVTKEHLEKVKGYVDLGVNEGAKLIVDGRNLKLQGYENGFYIGGCLFDHVNKDMRIYKEEIFGPVLSVVRVKNFDEAT

SEQ ID NO: 78158 - protein, 280 aa, Unknown
  Bacterial polypetide isolated from the Sargasso Sea
TGIPKGVVNVITGFGDPCGKTLTTHNLVEKIAFTGGPETARRIIKNSAENLSEVSLELGGKSPVAVFDDAEQENAINGITAGIFGASGQSCIAGSRLYIQKGIYNEFLDKLSSKASKIKIGAPMDLDTEMGPLSSFKQLETIEKNIKDTVDQGGKIKCGGKRDSFSNKGYYFPPTIIECDNHNLPTAENELFGPILSVMKFDTEEEVINKMNDNQYGLSSGVYTSNLSRGMRVSKAIRAGITFVNTYRLISPSAPFGGIKDSRYGKEAGIDSIKDYTRVK

SEQ ID NO: 78159 - protein, 133 aa, Unknown
  Bacterial polypetide isolated from the Sargasso Sea
MTVRVAVNGFGRIGRNVVRALYESSKRAEMEIVAINGRGSPEQITHLFKYDSAHGKFPHEVRCDGKSLVIDDKDKIKFIYDRDPTKLPWNDLDVDVVLECTGAFRDHETASKHLDAEARKVLISAPGKNMDAT

SEQ ID NO: 78160 - protein, 131 aa, Unknown
  Bacterial polypetide isolated from the Sargasso Sea
SLFDQVKPEMDIYKEEIFGPVLSTVRAVDYEDAINLIHCNPHGNGVAIFTRDGDAARDFASRIEVGMVGINVPIPVPVGFHSFGGWKQSLFGSHHIYGPETIHFYTRLKAITSRWPTGIKAGAQFNFPTMN

SEQ ID NO: 78161 - protein, 279 aa, Unknown
  Bacterial polypetide isolated from the Sargasso Sea
SSISFVGSTPIAEYVYHTGTKNNKRVQALGGAKNHMVIMPDADVNKTTDAIIGSAFGSAGERCMAISVAVCVGKQTKEKIKTKLLEETAKLNVGPYTDEKSDFGPLNNEAHFKKVLGYIDAGEKEGAKLLTDGRNFKKQGYESGYFVGPTIFDDVKPEMKIYKEEIFGPVLSMMTTETYEEALNLVNDHELGNGAAVFTKSGNIAKHFTENAKIGMIGVNVPIPVPVAYHSFGGWKRSLFGDHSMHGPEGVRFYTKLKTATVTWVEDNAGPEFTIPVLS

SEQ ID NO: 78162 - protein, 282 aa, Unknown
  Bacterial polypetide isolated from the Sargasso Sea
LAMGNTVVIKSSELAPATMFEFAKLIEKTGIPKGVVNVITGFGDPCGKTLTSHKNVERIAFTGGPETARHIIKNSAENLSQVSLELGGKSPVAVFEDADQENALNGITAGIFGASGQSCIAGSRLYLQKSIYNNFLDKLVNRAKKIKLGNPMSADTQMGPLSSLKQLEIIEKNIKLTLDQGGKIKCGGKRHTVSNKGYYFPATIIECENHNLPTAENELFGPVLSVMKFENEEEVINKMNDNKYGLSSGVYTKDLARGLRVSKAIRAGMTFVNTYRLISPSA

SEQ ID NO: 78163 - protein, 302 aa, Unknown
  Bacterial polypetide isolated from the Sargasso Sea
GFSEENIEDVVEIFNTPLIGHYNWDYTDADTRIKKLYELGKKLNWDGSIDLDWSKAIKKGEPPVKAELIARMEGPLAALPEDERIEYMRHDSAWSLSQFLHGEQGALLVASQLVSCAPTYQAKLYAASQTFDEARHVEVFARYLKEVSGIEYPINKNLKSLIDKILSDPRWDLKFIGMQIIIEGLALAAFQTTKETSNCPLLRQLVHYVIRDEARHVTFGVNYLEDFLSTLTEEEVEDRAMFAYEACVVMRDRIINTELPARWFNISEEEIREMLINDETQDMFTNLLFSRVMPNLKRIGLL

SEQ ID NO: 78164 - protein, 252 aa, Unknown
  Bacterial polypetide isolated from the Sargasso Sea
MLENKIVQAISFVGSTPIAEYVYHTGTKNNKRVQALGGAKNHMVIMPDADINKTTDAIIGSAFGSAGERCMAISVAVCVGKQTKEKIKTKLLEETAKLNVGPYTDEKSDFGPLNNKAHFEKVLGYIDAGEKEGAKLLSDGRNFKKQGYENGYFVGPTIFDDVKPEMKIYKEEIFGPVLSMMTTETYEEALNLVNDHELGNGAAVFTKSGNIAKHFTENAKIGMIGVNVPIPVPVAYHSFGGWKRSLFGDHSM

SEQ ID NO: 78165 - protein, 269 aa, Unknown
  Bacterial polypetide isolated from the Sargasso Sea
PSCSIKLAELFTEAGLPEGVLNIVNGDKEVVDAILTNKDIKAVSFVGSTPIAKYIYENAAKNEKRVQALGGAKNHCVVMPDCDLDQAVNGLMGAAYGSAGERCMAQSVAVAVGNIGDKLVNELTKKVEVLKVGPGMDKNSEMGPLVTKEHLEKVKGYVDLGVKEGAKLVVDGRNIKLQGYENGFYIGGCLFDNVKKDMRIYKEEIFGPVLSVVRAKDFEEATQLVNEHEFGNGTSIYTRDGDVGRTYASKIKVGMVGINIPIPVPVAFH

SEQ ID NO: 78166 - protein, 231 aa, Unknown
  Bacterial polypetide isolated from the Sargasso Sea
MTFDLDVENELNLTPQQVEDVAEIFNTPLTGAYNWDYTVADNRIKKLYELGKELNWNGSMDLNWDYNHPADERIMQADEDLPHETLQAYESLTEKEKIEFDRHDAAELLSQFLHGEQGALLVASQLTACAPTYNAKLYAASQTFDEARHVEVFNRYLQEKIGMHYPINKNLKLLLDKILTDPRWDLKFIGMQIIIEGLALAAFQMLKSLSKDPLLTQLLHYIIRDEARHVT

SEQ ID NO: 78167 - protein, 52 aa, Unknown
  Bacterial polypetide isolated from the Sargasso Sea
MIKTDILIIGSGAAGMTAAIELSNQFNVTLITKNSLVDSSTWYAQGGIAAVI

SEQ ID NO: 78168 - protein, 269 aa, Unknown
  Bacterial polypetide isolated from the Sargasso Sea
FKNPPDYENPQDTDKNNDYVVIVQATDTSRLVSEQTVKVTVDNVDEIPPLITGPDGDIVEVWENTTAVHTFTANEDVEWSISGADASKFSINTDGVLSFKIAPDYENPQDTDKNNDYVVAVKAVDIADLVSEQTVKVTVVRAPPIITGPGDIKTQGQLPFNLSYTDSAINVNENRTSVHTFTANKEVTWSVVDANLSKFQINTDGVLSFKIAPDYENPTDRNKNNTYPVIIRARDIHNLVSYQTVTVTVVNVDDTPPIITGTSGGPGAS

SEQ ID NO: 78169 - protein, 130 aa, Unknown
  Bacterial polypetide isolated from the Sargasso Sea
MQKTMQSKCAVFRTEKNLKEGVDEIKKTYDGMDSISVKDRSLVFNTDLVETLEFDNLIRQAVTTVESAYHRKESRGAHARDDYPKRDDEKFMQHTLAWCDGKNTKISYRAVHKSTLTNEVQYFPPQERVY

SEQ ID NO: 78170 - protein, 218 aa, Unknown
  Bacterial polypetide isolated from the Sargasso Sea
ADIEKAVSAGVSSCFLNTGQSCNAPTRMLVSSKNYDKAVEVAANTANAMKVGDPFDADTKMGPISNKTQYEKVQRMIQIGIDEGATLSAGGVGLPEGCESGYYVKPTIFSDVTNDMTIAREEIFGPVLCLIKYETEEEAIKIANDTPYGLAGYIQGEHAHAVEVASKIRAGQITINKGARVRSAPFGGYGSSGNGREHGTHGLEECLETKAVIGALVE

SEQ ID NO: 78171 - protein, 205 aa, Unknown
  Bacterial polypetide isolated from the Sargasso Sea
TVWQMVTHPHWSLRMLRAGVPQFVNLQPYHQDGYSHNIGRSIVESSKYIEERMGLHITTSLFKEIRAMWPNKLLAKGVLDPKEAQAYLELGADGLVISNHGGRQLDAAPSVVSLLPGIRAAVGPEATLIADGGIRSGLDIIRMLALGADFVLMGRPFLFAVGALDRRGGDHVMNLLKAELQTTMGQLGCNTLKELPEFLFSNPQS

SEQ ID NO: 78172 - protein, 278 aa, Unknown
  Bacterial polypetide isolated from the Sargasso Sea
MSQSQVEDVVEIFNTPLTGSYNWDYTVADNRIKKLYELGKELNWNGSIDLNWEYTHPENERIIQPDEELPHESLDVYLNLSDEDKILFDRHSVAELMSQFLHGEQGALLVASQLASCAPTFNAKLYAASQTFDEARHVEVFNRYLQEKIGIHYPINPALKTLLDKILTDERWDLKFIGMQIIIEGLALAAFSMLKSITKDPLLKQLLHYVIRDEARHVTFGINYLEDYVKTLSQDEINDRANFAYEACVISRERLINTKSEQRFLKMTESEARDFISA

SEQ ID NO: 78173 - protein, 168 aa, Unknown
  Bacterial polypetide isolated from the Sargasso Sea
MSSQFETGTGFTSETRPSHVTVGGSGTILTSSDNGTTWTSRTTATSRDLNGIIYANSKYVAVGEDGTILTSLNGASAWNSMTSSTSSSLNGVTYANSTFLTVGGSGTILTSSDNGTSWTSRTSGTSNSLSAVAYGNSTLVAIGHSGTILTSSNGTSWTSRTSGTSDNL

SEQ ID NO: 78174 - protein, 224 aa, Unknown
  Bacterial polypetide isolated from the Sargasso Sea
MEKIAVVTGSSSGIGFETSLALARDGYFTYATMRDMKKADEIQRITNEESLPLKVIELDVDDEESAKNAIGTIIQEKGRIDVLVNNAGWGIWGTGEDVSLEEFREQFETNFFSVVRMIQKVAPIMREQGSGNIVNISSVAGRIGLPASTAYVSSKFAIEGLSESLRYELGPFGVNVIIIEPGVIKTNFFDSMKTAKKADVGETYRDITLKVITGVKMMAEMGTP

SEQ ID NO: 78175 - protein, 81 aa, Unknown
  Bacterial polypetide isolated from the Sargasso Sea
GKKYLNKKVFPYEKKINFNSVRKGSVIGKHEVSFSSGKEIVSLNHEAFDRELFSVGALTAAKWIINKKPGLYSMRDLLNFK

SEQ ID NO: 78176 - protein, 202 aa, Unknown
  Bacterial polypetide isolated from the Sargasso Sea
VFLYRCNRLGTNSLIDLVVFGKAASLTCKEKVKPNSKKIEISKSKTDNIIERFDNIRNSKGNSTTGELRTSMQHIMQQKCAVFRTHDLISKGIEEYSKVESSMDDIDIKDKSLIFNTDLVEALELHNLMAQSKVTLHSALNRTESRGAHAREDYKERDDNNWLVHSLAWLNDKGDVSTGSRGVHMNTLTNHVQPIPPKRRVY

SEQ ID NO: 78177 - protein, 168 aa, Unknown
  Bacterial polypetide isolated from the Sargasso Sea
RDRVKSYVDLGVEEGAKLIVDGRSKLSEETGFFLGPCLFDDVRQNMRIYQEEIFGPVLCIVRANSLEEAVELIDEHDYGNGTCIFTRDGEAARYFSDYIQVGMVGVNVPLPVPVAYFSFGGWKRSLFGDMHIYGPEAVRFYTRSKVITQRWPSGGVREKVKFSFPGSD

SEQ ID NO: 78178 - protein, 111 aa, Unknown
  Bacterial polypetide isolated from the Sargasso Sea
GRKKLNSLLTEFKNIKISDKSTIWNTEIIEAYELQNLLLQSLASIDSALNRKESRGAHARMDYQKRDDKKWMKHTMIALNIEGKADINYRSVNLKTKNKEIKTIEPKARVY

SEQ ID NO: 78179 - protein, 285 aa, Unknown
  Bacterial polypetide isolated from the Sargasso Sea
MELIPLLLLIFICGALLIGYPVAFTLAGVSILFALVCIPFGIFDPTIFKSIPLRIFGIMNNVTLLAVPLFIFMGTILEKSGIAAKMLENMSAAFRNTKGGLSISIIFVGALLAASTGIVGATVVTMGLMSLPILINQGYEKSFSSGLVASTGTLGQIIPPSIALVLLGDVMSNAYQRAQNDMGIFSQQTVTVGDLFIGAIIPGIMICLGYLIYTIYRNHKNLNLEDYSNKASIKKTELLKTLALPIALIFLVLGSIFAGIATPTEASAFGAFGALTIAALMANKF

SEQ ID NO: 78180 - protein, 171 aa, Unknown
  Bacterial polypetide isolated from the Sargasso Sea
DIAAIVFVGSTPIAKYIYENAAKNEKRVQALGGAKNHCVVMPDCDLDQAVNGLMGAAYGSAGERCMAQSVAVAVGKIGDPLVNKLAKKVESLKIGPGLDKNSEMGPLVTKQHLEKVKGYVDLGVKEGAKLVVDGRNIKLQGYEKGFYIGGCLFDNVNKKMKIYKEEIFGPV

SEQ ID NO: 78181 - protein, 186 aa, Unknown
  Bacterial polypetide isolated from the Sargasso Sea
LNTGQSCISAKRIIATKSLYHDFLKKLKIQLSKMIMGDPMDNVDIGPMVTLSARDEVHDQVIRCINSGAKPELGGEIPDLKGSFYPVTLLFNVKPGMPAFDEEIFGPVFSLIMAKDEDHAIALGNQTQFGLGAALFTKDIKKGEEIARAQINAGLCFVNDFVKSDPRLPFGGVKESGYGRELSSYG

SEQ ID NO: 78182 - protein, 221 aa, Unknown
  Bacterial polypetide isolated from the Sargasso Sea
AGERCMAQSVAVAVGSIGDKLVDALAKKVEALKVGPGMDKQSEMGPLVTKEHLAKVKNYVDIGTKEGAKLVVDGRNFKLQGYEKGFFIGGCLFDHVDKNMKIYKEEIFGPVLSVVRVKDFDEALELVNDHEFGNGTSIFTRDGDSGRTFSNKAKIGMVGINIPIPVPMAFHSFGGWKRSLFGDQHMHGPEGVRFYTKLKTITSRWPSGLRSDPEFVMPTMK

SEQ ID NO: 78183 - protein, 168 aa, Unknown
  Bacterial polypetide isolated from the Sargasso Sea
KIGGGENPDTEVTPLISKDQIQRVSNYVNSGIQSGAKLVLGGQKIENEKGNFYEPTIFENVKTDSTIAQEEIFGPVTSVFDFQEPEEAIKIANSTNYGLASGVFTSDDQKAKWSAERIKAGIIWHNDWFVDGVNLPGGGYKKSGYGRDGGIDGIYSHGQTKRISKRLT

SEQ ID NO: 78184 - protein, 288 aa, Unknown
  Bacterial polypetide isolated from the Sargasso Sea
KVVVVGGGISGLAAAYELLTNGYDVSVIEASSTIGGKISTVEIAGVPIDGGPDAFLVREPEMKELCSSLGVANELVAPDSRSAKIWVDGSMQALPKSQFLGIPLDLDELSSLNLISPEGIAIAQNDLTAKDNARDDDETVGSLIRRRLGHEVMEKLVGPLLGGINAGDPDKISLKSGVPYLSAAASLDPSLIRSIQKFIRASNRNPETPVFLTHPEGLGKVVDALGKELEGKIILSERIESVHAKDKQWILEGQGGSYEADSVILTTPSYISGSIIETTNDKIAKLLQ

SEQ ID NO: 78185 - protein, 278 aa, Unknown
  Bacterial polypetide isolated from the Sargasso Sea
WFVNAAKRSKTAGFNLICLYGAHGFGIFQHFLSTATNQRTDEYGGSLENRARFVKEVVEEVRNEVGDKIGITLRLSLDEMIGDLGFANSEVRDFVEMHQDLPDLWDLAHGAWEDCSGPSRFKEEAAQFDLVTGIRKLTSKPIVGVGRFTSPDVMAKQIKSGTLDFIGCARPSIADPFLPKKIEEGRIQDIRECIGCNICITGDMTMSISRCTQNPTFMEEWRKGWHPETIEPKGKTSKVLVIGSGPAGLEAALACSNRGYDVTLTEASKILGGRVQKR

SEQ ID NO: 78186 - protein, 297 aa, Unknown
  Bacterial polypetide isolated from the Sargasso Sea
NWDVIVVGAGAAGLMTCLELPSNLKVLLLNRNTSKVSSSRWAQGGIASVVRKDDSFDLHAEDTLKAGDGLCDFQAVEMLVKEAPGCVNRLQNLGMIFDQSSDQLATTLEAAHSRRRVLHVKDRTGRALVEVLEDHIENQKNILHCRGVRVTELLIENKECRGVQVLDGANLYWIQSRAVVLATGGGGHLFTNTTNPAQSSGEGIALAWKAGAVIEDLEFVQFHPTALKFYGAPCFLISEALRGEGAILVDKNGESPVKNLENRDLATRDQVSRAIMKNMHDNNVDHVGLDLRYMTPK

SEQ ID NO: 78187 - protein, 89 aa, Unknown
  Bacterial polypetide isolated from the Sargasso Sea
MHAANTRKESRGAHAREDFTERDDVEWMKHTLAYYEDPLLGEYKVDIKYRPVHHNTMNIEDLAEVAGEGKAFTYMDDGNVTLAPMKRTY

SEQ ID NO: 78188 - protein, 137 aa, Unknown
  Bacterial polypetide isolated from the Sargasso Sea
ASAWPLSFGLACCAFEMMASAMSRFDLSRFGMEVFRPSPRQADLIIIAGTVTWKMAPAIERVYEQMAEPRWVISMGVCATSGGPYYGSYSVVPGVNHIIPVDVYVPGCPPRPDALLYGIMQLHEKIKRYSIKNKNRK

SEQ ID NO: 78189 - protein, 212 aa, Unknown
  Bacterial polypetide isolated from the Sargasso Sea
VAVVVGKIADPLVKNLSKKVEALKVGPGLDKKSEMGPLVTQAHLEKVKGYVDIGVKEGAKLLVDGRNLKLQGYEKGFYMGGCLFDQVTKNMRIYKEEIFGPVLSVVRVKNYEEALKLVNDHEFGNGVSIFTRDGDTGRSFASNAQIGMVGINIPIPVPMAFHSFGGWKRSLFGDQHMHGPEGIRFYTKLKTITSRWPSGIKSDPEFTMPTMK

SEQ ID NO: 78190 - protein, 297 aa, Unknown
  Bacterial polypetide isolated from the Sargasso Sea
TNVEQRILNKKFLDKDYNYPFGFAPMGMTNLSWPEADKMFAKESALNNIPTCVSMASSTTLEDMHKFSEDHAWMQIYIFQSEEFIMELLERAKNIGYKTLILTVDVPILSRRSRDDRNGFGYPFKIGPKQFIDFVLHPQWSLTTLLKGAPKPMNYVTSKSGNQIFRRKESRGTTDWDTLKRIRDHWKDKLIIKGIMNSDDAIKIKDAGADAIQVSNHGGRQLDSATAAINALPNIRKNLGKEFPIIFDSGIRSGSDILRALALGADFVMIGRPLMYAVGADGARGLRRLINIIKEEL

SEQ ID NO: 78191 - protein, 312 aa, Unknown
  Bacterial polypetide isolated from the Sargasso Sea
ENNEPWAIVLEASEKDTNKAVEAAHKAFEGEWSKLFPRDRAKFLRAIAEQLRNNAEHLGKIETVDTGKLFRETKTQATYIAEYYDYFAGLADKVEGTVLPIDKPNMQVITTRVPIGVVAAIVPWNSQMLLTAVKLAPALAMGNTVVIKASELGPATLLEFAKLVEKTGIPKGVVNVITGFGEPCGKALTSHNLVERVAFTGGPETAKHIIKNSAENLSQVSLELGGKSPVAVFEDADQENALNGITAGIFGASGQSCIAGSRLYLQKNIYENFLNKLINKAKKIKIGAPMEPDTQMGPLNSLKQLEVIEKNI

SEQ ID NO: 78192 - protein, 159 aa, Unknown
  Bacterial polypetide isolated from the Sargasso Sea
GEKEGAKLVVDGRNLKLQGYENGFYIGGCLFDNVTKDMRIYKEEIFGPVLSVVRVKTFEEASKLINEHEYGNGVSIYTRDGDAGRTFASKIQVGMVGINVPIPVPMAFHSFGGWKRSLFGDSAMHGMEGIKFYTKLKTITSRWPSGIRSNAEFVMPTMK

SEQ ID NO: 78193 - protein, 173 aa, Unknown
  Bacterial polypetide isolated from the Sargasso Sea
DESSDIGAIISEEQLKRTLHYMDIAKKNSTTNVVHGGNQITGGDYKNGFFYEPTLMSGVPVSSPVCQEEIFGPVACAIPFKTFDEVMNSANDTPFGLSAVLWTQNLSRALQFVEEIEAGFVQVNQCVAPRANVSYGGLKMSGLGKEYAFDSMINHFTQSKTVLINRGKSNIDI

SEQ ID NO: 78194 - protein, 250 aa, Unknown
  Bacterial polypetide isolated from the Sargasso Sea
YTVADNRIKKLYELGKELNWNGSMDLNWDYNHPANERIIQADEDLPHETLEAYESLTEKEKIEFDRHDAAELLSQFLHGEQGALLVASQLTACAPTYNAKLYAASQTFDEARHVEVFNRYLQEKIGMHYPINKNLKLLLDKILTDPRWDLKFIGMQIIIEGLALAAFQMLKSLSKDPLLTQLLHYIIRDEARHVTFGINYLEDFIKTLSPEEIEERAEFAYEACVISRERLINTKAMQKYLKMSEEEARK

SEQ ID NO: 78195 - protein, 260 aa, Unknown
  Bacterial polypetide isolated from the Sargasso Sea
MDPLFVLNGKLILVSGGSRGIGKALVSGFAKRGARVVFTGRDEDSLESAKKELAEDSSEVFPECCDVSRIDEVEALVNRVRKQHGPIDVLVNVAGVNRRQRAETYLPEDYDFVMDINLKGAFFLSTEVGRVMLENGSGIQINIDSLNSYAPVKGMAPYAMSKFGMVGMTRTLAAEWGPKGIRVNSIAPGFILTDLTRKVWSDPSLQQWGIENTPLRRLGDPKDLVGAAVFLASDASAFMTGQVVRVDGGFSSAILWPVEF

SEQ ID NO: 78196 - protein, 149 aa, Unknown
  Bacterial polypetide isolated from the Sargasso Sea
MGGIKFSGDIAKALVAGADAVMVGSMLAGTSEAPGKIIKKKGKLFKVFRGMGSVGAMNKGSADRYFQKKQKDKSKYVPEGVEGLIKYKGEVSKTINKLVGGLRSSMGYLGAEQIKNLNKKAKFVKITKAGFYESMVHSIDEVKKNSEYL

SEQ ID NO: 78197 - protein, 309 aa, Unknown
  Bacterial polypetide isolated from the Sargasso Sea
FFSTPLCAEELNEAAKQSSLPKNIFQYLHLDHDQTSRIISDSRINHVLFTGSVSGGKQIKKSIGTRFIGAGLELGGKDPAYVRADCDLDHAVENLVDGSYFNSGQSCCGIERIYVDKKIYNTFIEKFKDVTEKYVLGNPLEMETNLGPVVKQSAANNIRSEVSNAISQGGKNIIDNKKFNLDDGNNCYVSPSALINVDHSMKYMMEEIFGPSVGIMKVENENEALSLMNDSSYGLTASIWTNDKSFAENFGKNVETGTFFMNRCDYLDPGLAWTGVKDTGIGVTLSVLGFDHLTRAKSYHIRNILGYGK

SEQ ID NO: 78198 - protein, 159 aa, Unknown
  Bacterial polypetide isolated from the Sargasso Sea
ETETEKCLSRFDKLRNADGENSTAELRLSMQKTMQSKCAVFRTEKNLKEGVDEIRKTYDRMDFISVKDRSLVFNTDLVETLEFDNLIRQAITTVDSAFHRKESRGAHAREDYPKRDDQKFMKHSLAWCDGKNTKIEYRDVHKSTLTNEVQYFPPQERVY

SEQ ID NO: 78199 - protein, 62 aa, Unknown
  Bacterial polypetide isolated from the Sargasso Sea
SYRKESRGAHAREDFKERDDKNWMKHTLSWLDDEKCKLEYRSVHEYTLSNEVKYIEPKARVY

SEQ ID NO: 78200 - protein, 189 aa, Unknown
  Bacterial polypetide isolated from the Sargasso Sea
MAITRRDFLNGVAVTIAAGLTPLEWVRATGKGNAFIDGNYYPPALTGLRGNHPGSFEMAHALGREQKHFDLNALPVEEEYDLVVVGGGISGLAAGCFWRQLAGQNSRVLILDNHDDFGGHAKRNEFTSSGKKLLGYGGSEAFQSPAHNFSPEVQKLMETVGVSVTRLKESFDVNFYPDWQLSRGVFFDK

SEQ ID NO: 78201 - protein, 267 aa, Unknown
  Bacterial polypetide isolated from the Sargasso Sea
KYIYENSAKNEKRVQALGGAKNHLVVMPDCDLDGAVNGLMGAAYGSAGERCMAQSVAVAVGNIGDELVSRLSKKAEALKVGPGMDKNSEMGPLVTKEHLEKVRGYVDLGVKEGAKLVVDGRSLKLQGYENGFYIGGCLFDHVKKEMRIYKEEIFGPVLSVVRVKTFEDAANLINNHEYGNGVSIYTRDGDAGRTFASKIQVGMVGINVPIPVPMAFHSFGGWKRSLFGDSAMHGMEGIKFYTKLKTITSRWPSGIRSNAEFVMPTMK

SEQ ID NO: 78202 - protein, 149 aa, Unknown
  Bacterial polypetide isolated from the Sargasso Sea
EGVMNYIKSGVEQGAKLLLGGDQNKSGELKNGFFINATIFCDVKPDMKIAKEEIFGPVISVIDWDDYDEMVKIANSTQYGLTTMIVTNSLSNAMKTAEDAEVGYVWVNTAGRYSGAPYGGWKLSGIGVEECFDEMKGYARLKNVNMKWN

SEQ ID NO: 78203 - protein, 165 aa, Unknown
  Bacterial polypetide isolated from the Sargasso Sea
AHEEVSNSETDKCLNRFDKIRHSTGSTKTAELRLNMQKTMQSKCAVFRTEKTLKEGVDQIRKPYEGMKDVSVKDKSLLFNTELVETLEFDNLIRQALTTMDSAYSRKESRGAHAREDYSKRDDKNFMKHTLAWQNDKKVEIKYRDVHAKTLTNDVQYFPPKERVY

SEQ ID NO: 78204 - protein, 174 aa, Unknown
  Bacterial polypetide isolated from the Sargasso Sea
VTKEHLEKVKGYVDIGVKEGAKLVVDGRNLKLQGYENGFYMGGCLFDNVKKGMRIYKEEIFGPVLSVVRAKDYKEALSLVNDHEFGNGTSIFTRDGDTGRSFASNVKIGMVGINIPIPVPMAFHSFGGWKRSLFGDQSIHGPEGVRFYTKLKTITSRWPSGIKSDPEFVMPTMK

SEQ ID NO: 78205 - protein, 272 aa, Unknown
  Bacterial polypetide isolated from the Sargasso Sea
MHVFTTRVPVGVIAAIIPWNSQMFLTAVKLAPALAMGNTIVIKASEIAPTPLLEFAKIIDKVGLPKGVVNIITGYADTCSKILTSHPNINKIAFTGGVHTAKHIVRNSAENLSQVSLELGGKSPVVVFNDARKDNAINGIMASIFGAGGQSCIAGSRLYLQKNIYEEYIAELKTKAEAIKIGDPMSTTTQLGPLATLHQLQNIEDKIKQTLDQGGRIITGGNRVNDFKSGFYFEPTIIACDHHSLPAAEIELFGPVLSVMKFNDEDEAIKLM

SEQ ID NO: 78206 - protein, 211 aa, Unknown
  Bacterial polypetide isolated from the Sargasso Sea
RACERSEQAGFDWLELHCAHGYLLSMFLTPLNNQRTDEYGGSLENRLRFPIEVFQAMRAVWPDHKPMSVRLSASDWMPEGVDIYESAKMAKAFIDAGCDMIDVSSGQTHPDARPVFGRMYQTPLADHIRNEEGIPVMAVGNIYEPDHLNSILAAGRADLCCLARPHLSNPFWTLHAAAEQGYAEQPWPVQYLSGKQQLERNLERAAQSGPI

SEQ ID NO: 78207 - protein, 284 aa, Unknown
  Bacterial polypetide isolated from the Sargasso Sea
APAVLFEFAKLVEEVGIPKGVVNVITGYGDPCGKALTTHNLVEKIAFTGGPETARHIIRNSAENLSEVSLELGGKSPVAVFEDAHQENAINGITAGIFGASGQSCIAGSRLYLQKGIYNEFLDKLAARAEKIKIGAPMDPESEMGPIGNFKQLEIIEKNIKLTVEQGGKIKCGGKRHSFSNEGYYFPPTIIECDNHNLPTAENELFGPVLSVMKFENEEEVINKMNDNQYGLSSGVYTSDFSRGMRVSKAIRAGITFVNTYRLISPSAPFGGMKDSGYGKEARY

SEQ ID NO: 78208 - protein, 262 aa, Unknown
  Bacterial polypetide isolated from the Sargasso Sea
VAAISFVGSTPIAKYIYENAAKNEKRVQALGGAKNHCVVMPDCDLDQAVNGLMGAAYGSAGERCMAQSVAVAVGKIGNKLVSKLAKKVESLKVGPGLDKNSEMGPLVTKQHLEKVKGYVDLGVKEGAKLIVDGRNINLQGYENGFYIGGCLFDNVEKKMRIYKEEIFGPVLSVVRVKDFDSAINLVNEHEFGNGTSIYTRDGDVGRTFASKVKIGMVGINIPIPVPVAYHSFGGWKRSLFGDQHMHGLEGVRFYTKLKTITS

SEQ ID NO: 78209 - protein, 252 aa, Unknown
  Bacterial polypetide isolated from the Sargasso Sea
LFEFAKLVEETGMPKGVVNVITGYGDPCGKALTTHNLVEKIAFTGGPETARHIIRNSAENLSEVSLELGGKSPVAVFEDAHQENAINGITAGIFGASGQSCIAGSRLYLQKGIYNEFLDKLAERAEKIKIGAPMDPESEMGPIGNFKQLEIIEKNIKLTVEQGGKIKCGGKRHPFSNEGYYFPPTIIECDNHNLPTAENELFGPVLSVMKFENEQEVINKMNDNQYGLSSGVYTSDFSRGMRVSKAIRAGIT

SEQ ID NO: 78210 - protein, 223 aa, Unknown
  Bacterial polypetide isolated from the Sargasso Sea
IAIGLKDAGYTVVVNYNSDDSAAETFKAKTGIAVYKWDVSDFDSAERGISQVKHDLGPIDVLVNNAGTASDSRFENMSLEQWHKVQRVNIDSVFIMCKLVYSGMINKKWGRIINIGSMNGQAGQLNQVNYVASKAGMHGFTKALALEAAKHGITVNTIAPGYVDTYLISAMPDRIMQKILDASPVHRLGLEEEIAHAVKFLIDENSSWTTGSTITMNGGTHMY

SEQ ID NO: 78211 - protein, 113 aa, Unknown
  Bacterial polypetide isolated from the Sargasso Sea
FANVSNDMTIAKEEIFGPLLCILPFEDEDDAVRIANDTLYGLSGYVSSSDPDHALEVARKIRSGNVHINNAPTGINDPFGGFKQSGNGREWGIFGFEEFLEIKAVMGYAQEEK

SEQ ID NO: 78212 - protein, 182 aa, Unknown
  Bacterial polypetide isolated from the Sargasso Sea
GRAAAQRALKTVEKGSFHAPLPKRVTDKIIARLNKIRFSKGDTSVGEIRNSMQNAMQKHAAVFRSNNSMTEGVKKVDTISKGIENIGIKDRSMIFNTDLVEALELENLMQQAIVTMKSADQRKESRGAHSHEDFPERDDKNWMKHTIMWLNDKNKTKLDYRDVHLNTLTNEVATVPPAARVY

SEQ ID NO: 78213 - protein, 283 aa, Unknown
  Bacterial polypetide isolated from the Sargasso Sea
SISVASNAFSDAAGNFNQDGNDSNNSLSFSIAPPPDTTPPTIAISANSSSLTVGETALISFALSEDSSDFTLADISVSNGSLSNFSGSGSSYSAVFSPANNGASQASISVASNAFSDAAGNFNQDGNDSNNSLSFSIAPPPDTTPPTIAISANSSSLTVGETALISFALSEDSSDFTLADISVSNGSLSNFSGSGSSYSAVFSPANNGASQASISVASNAFSDAAGNFNQDGNDSNNSLSFSIAPPPDTTPPDDIKYKVTYLGNAESNKNEISFSNGIHSIKQ

SEQ ID NO: 78214 - protein, 175 aa, Unknown
  Bacterial polypetide isolated from the Sargasso Sea
MSNSRTVVITGASSGIGFGLAKAFLASGFNVVGNARSAERLEQAREQLGSPTAFVGVAGDIARPDTARHLIQAGIEAFGQVDVLVNNAGFFLPKPFIEYSPEDIDGLLETNLKGVVYASQAAATHMIERRQGQIINITAAVALQPNLAVPAALPVLIKGGLNQVTRALALELSPH

SEQ ID NO: 78215 - protein, 267 aa, Unknown
  Bacterial polypetide isolated from the Sargasso Sea
KYIYENCAKNEKRVQALGGAKNHCVIMPDCDLEQAVNGLMGAAYGSAGERCMAQSVAVAVGKIADPLVKSLSKKVESLKIGPGLDKKSQMGPLVTKEHLEKVKGYVDVGVKEGAKLVVDGRNLKLQGYENGFYMGGCLFDHVKKDMRIYKEEIFGPVLSVVRAKDYTEALSLVNDHEFGNGTSIFTRDGDTGRSFASNVKIGMVGINIPIPVPMAFHSFGGWKRSLFGDQSIHGPEGVRFYTKLKTITSRWPSGIKSDPEFVMPTMK

SEQ ID NO: 78216 - protein, 184 aa, Unknown
  Bacterial polypetide isolated from the Sargasso Sea
MNYEDLKQKLDKFKIIDVLVNNAGTNIPEPFEKIKQTSMNYLVDLNLKAAFNVAQLVVKKMLKNKKRPGSIINMSSQLGHVGMGGRNVYNMTKFGIEGLTKGMGVELAKKNIRVNTVAPTFVETPMVKNFFKNKKFKKLVLGNIPMGKAATESDIATTVCFLASSASSMITGTSIIIDGGWTAQ

SEQ ID NO: 78217 - protein, 121 aa, Unknown
  Bacterial polypetide isolated from the Sargasso Sea
MYLQKINLKNKYALVTGAGKGLGRACSIALAEAGATVIALSRTSSDLNKLEKDIKKVKGKIIKVSCDVMNYEDLKQKLDKIKIIDVLVNNAGTNIPEPFEKIKQKNMNYLVDLNLKAAFNV

SEQ ID NO: 78218 - protein, 144 aa, Unknown
  Bacterial polypetide isolated from the Sargasso Sea
MYLQKINLKNKYALVTGAGKGLGRACSIALAEAGATVIALSRTSSDLNKLEKDIKKVKGKIIKVSCDVMNYEDLKQKLEKIKIVDVLVNNAGTNIPEPFEKIKQKSMNYLVDLNLKAAFNVAQLVVKKMLKNKKRPGSIINMSS

SEQ ID NO: 78219 - protein, 233 aa, Unknown
  Bacterial polypetide isolated from the Sargasso Sea
RVCLELGGKGGNIVFADSYPNAVRDGIRNVMSNSGQSCDAPTRMLVEKSIYEKAIKEAADEASKIKVDIALKKGDHIGPVVSKVQYDKIINLIKSGIDEGATLATGGPELPKNLDKGYFIKPTIFTNVTNDMEIAKKEIFGPVLSIIPFETEEEAIKITNDTEYGLGNYLQTEDKEKAKRVAKKLRSGIVYINGKGADPGTPFGGYRQSGNGREGGTWGLEEYLEVKTITGWK

SEQ ID NO: 78220 - protein, 134 aa, Unknown
  Bacterial polypetide isolated from the Sargasso Sea
SYEVTASLSLPIFNKGHNFYNLEKSKNSAISSFKSLESKKLDLIFQIQSTWKKIESTKSSIGSLELSVESNVMAVEGVTKEAGVGTRTTLNILDAEKELTQSESNLVNAQFQLIVSSFDLLNQCGLLNFQYLGL

SEQ ID NO: 78221 - protein, 269 aa, Unknown
  Bacterial polypetide isolated from the Sargasso Sea
EVAFTGGPETARHIIRNSAENLSEVSLELGGKSPVAVFDDAHQENAINGITAGIFGASGQSCIAGSRLYLQKGIYDEFLDKLTKRAEKIKIGAPMDPDTEMGPLSNFKQLEIIEKNIKKTIEQGGKVRCGGKRHPFSNEGYYFPPTIIECDNHNLPTAENELFGPVLSVMKFNDEKEVIEKMNDNQYGLSSGVYTSDFARGLRVSNAIRAGITFVNTYRLISPSAPFGGIKDSGYGKEAGMESIKDYTRVKTTWYYTSDEPTLDPFSIR

SEQ ID NO: 78222 - protein, 301 aa, Unknown
  Bacterial polypetide isolated from the Sargasso Sea
EALDEEIDLAFNAASTSVKNRVLQDMDAVHKANMMRAIAAKLREYKKSGSQILSKENGKTIDQCAGEFEGAAAIFDYYAGLTDKIENKLIPSGQDTFNYIVLEPFGVSLQIVPWNYPISLFARSVAASFVVGNSVVIKPPELCPISSNIFGTILTEVGAPKGIVNIVHGQGEITGKKLVNHKSVDQVVFTGSPEVAAEILKATADRIIPCHLELGGKSAAIIYPDANVDQAVSSTIKGIFEPNAGQICVAMSRVIIHPKIKDEYVSKLKLKAEALRIGPGNDKNSQVTPLISKTQLKRVSN

SEQ ID NO: 78223 - protein, 225 aa, Unknown
  Bacterial polypetide isolated from the Sargasso Sea
YGSAGERCMAVAVPVPVGKEVADNLMDRMVPLVEELPVGPPDDSKAAMGPIITRQSLERITSLLQSGVDQGAALLVDGRDLTVPGFEKGFFIGGSLFDQVKPEMDIYKEEIFGPVLSTVRAEDYEDAINLIHSNPHGNGVAIFTRDGDAARDFASRIEVGMVGINVPIPVPVGYHSFGGWKQSLFGTHHIYGPETIHFYTRLKAITSRWPAGIKSGAQYNFPTMN

SEQ ID NO: 78224 - protein, 198 aa, Unknown
  Bacterial polypetide isolated from the Sargasso Sea
QVAYLQAQSQPQAQDAPQAYPRLEDYDYDEARHQQAVLQYTSNLNAQNVQQVMQQQQQAQIAQLQAQKAQIASQEFVEKSNAFALDYKDFNATVTNPNFHQSDMVARTIVELPNGPDVAYYLGKNLKIANALNNKSERDARDDLIRISTALQVNSRKRRANTTNAPTPGKTVTPKGKVSKDLDKMSPEEYRRARGYIK

SEQ ID NO: 78225 - protein, 281 aa, Unknown
  Bacterial polypetide isolated from the Sargasso Sea
GSTLTGSKIMGACAPKLSQVALELGGKSALVVFDDTDLDKAVETTMKGFLTNGGQICTAHTRLVVQESIKSPLLNKLKEELEKLPFCNDPITEKDRGDRAWESGMTDVVQPVVCDSQHKKIMGFLHEAKATGVEVLTGGDVPDDATVGNSGGFFIQPTVLINVERDADVWQKEVFGPVLSVRSFSTEEDAVLEANSTSFGLASTVMSSDPAKAMRVANRIRAGAVFATSNGEGLLAEHPAVSRGGFGFSGVGRELGIGGLHEYTELKSVNYTGFSLADAKK

SEQ ID NO: 78226 - protein, 132 aa, Unknown
  Bacterial polypetide isolated from the Sargasso Sea
MRLKGKKCIVTGGSSGIGEATVRRFISEGAEVLIADINLEDSKKLSEEIGEGVDYIKCDVRLEDDIISVSEKAYGMWDQVDVLVNNAGSELNQSYDKMTEAEWDNVLNTDLKGPWLMCKHHCTKGMVEAGSG

SEQ ID NO: 78227 - protein, 206 aa, Unknown
  Bacterial polypetide isolated from the Sargasso Sea
GDIADKMVESITDKAESLKVAPWTDSSAQMGPVISNEHKQKIENYINSGVEEGAKLVLDGRNLKIQGYENGYFVGPTLFDKVNKDMKIYKEEIFGPVLSVIRAKNYNEALKLVNDHAFGNGTSIYTSDGEISRHFTTNSKIGMVGVNVPIPVPMAFHSFGGWKQSLFGDHSMHGVEGVRFFTKLKTVTSRWPKSIQKGPEFKMPTN

SEQ ID NO: 78228 - protein, 260 aa, Unknown
  Bacterial polypetide isolated from the Sargasso Sea
MDPLFELNDKLILVSGGSRGIGKALVSGFAKRGARVVFTGRDEVSLESAKKELAEDSSEVFPERCDVSRVDEVEALVNRVRKQHGPVDVLVNVAGVNRRQRAETYKPEDYDFVMDINLKGAFFLSTEVGRVMLENGSGIHINIDSLNSYAPVKGMAPYAMSKFGMVGMTRALAAEWGPKGIRVNSIAPGFILTDLTRKVWSDPSLQQWGIENTPLRRLGEPKDLVGAAIFLASDASAFMTGQVVRVDGGFSSAILWPVEF

SEQ ID NO: 78229 - protein, 180 aa, Unknown
  Bacterial polypetide isolated from the Sargasso Sea
TTRLVAGIGVPQLSALLDVKKGLAKNIKMISDGGIKFSGDIAKALATGADAVMVGSMLAGTSETPGKIIKKKGKLFKIFRGMGSVGAMNRGSADRYFQKKQKDSSKYVPEGVEGLIKYKGDVSKVINKLVGGLRSSMGYLGAQKIKDLSKNAKFVKITKAGFYESMVHSIDEVKKNSEYL

SEQ ID NO: 78230 - protein, 216 aa, Unknown
  Bacterial polypetide isolated from the Sargasso Sea
MAQSVAVAVGKIADPLVKSLSKKVESLKIGPGLDKKSQMGPLVTKEHLEKVKGYVDIGVKEGAKLVVDGRNLKLQGYENGFYMGGCLFDNVKKNMRIYKEEIFGPVLSVVRAKDYSEALSLVNDHEFGNGTSIFTRDGDTGRSFASNVKIGMVGINIPIPVPMAFHSFGGWKRSLFGDQSIHGPEGVRFYTKLKTITSRWPSGIKSDPEFVMPTMK

SEQ ID NO: 78231 - protein, 232 aa, Unknown
  Bacterial polypetide isolated from the Sargasso Sea
MSDADLDIAIQGVIDGMRYTRQGQACTAGSRVYIQEKIYDKVLNGAVEKLSKLKMGNALDENSDIGAIISEEQLKRTLHYMNIAKKNSTTKVLHGGNQSTGGDYKNGFFYEPTLMSGVPVSSPVCQEEIFGPVACAIPFKTFDEVMNSANDTPFGLSAVLWTQNLSRALQFVEEIEAGFVQVNQCVAPRANVSYGGLKMSGLGKEYAFDSMINHFTQSKTVLINRGKSNIDI

SEQ ID NO: 78232 - protein, 228 aa, Unknown
  Bacterial polypetide isolated from the Sargasso Sea
GARVVFTGRDEDSLESAKKELAEDSSEVFPECCDVSRVEEVEALVNRVRKQHGPIDVLVNVAGVNRRQRAETYLPEDYDFVMDINLKGAFFLSTEVGRVMLEIGSGIQINIDSLNSYAPVKGMAPYAMSKFGMVGMTRALAAEWGPKGIRVNSIAPGFILTDLTRKVWSDPSLQQWGIENTPLRRLGDPKDLVGAAIFLASDASAFMTGQVVRVDGGFSSAILWPVEF

SEQ ID NO: 78233 - protein, 271 aa, Unknown
  Bacterial polypetide isolated from the Sargasso Sea
YQALSEEEKILFDRHNTAELMSQFLHGEQGALLVASQLASCAPTYNAKLYAASQTFDEARHVEVFNRYLQDKIGIHYPINPSLKLLLDKILTDERWDLKFIGMQIIIEGLALAAFQMLKAITKDPLLKQLLHYVVRDEARHVTFGINYLEDYLTTLSKEEINERAQFAYEACVISRDRLVNTQAEQRFLKMTAEEAREFQLSTGTFEMFRNFLFSRVMPNLKRIGLLTDEVRPKFEALGLLEYEHAPDDFECDWAEMKKPLEKFGQIPTNL

SEQ ID NO: 78234 - protein, 275 aa, Unknown
  Bacterial polypetide isolated from the Sargasso Sea
MSKLKQYKMFINGEWVDSESKKTFETLNPEHNEPWAIVPEASAKDVDNAVKAAQKAFDGEWPKLLPRERAKYLRAIGDQLRENAEMLGEIETIDTGKLYRETKKQAVYIAEYYDYYAGLADKVEGTVLPIDKPNVQAITTRIPIGVIAAIIPWNSQMFLTATKVAPALAMGNTVVIKSSELAPAVLFEFAKLIEKTGIPKGVVNVITGFGNPCGKSLTTHNLVEKVAFTGGPETARHIIRNSAENLSEVSLELGGKSPVAVFDDAEQENAINGIT

SEQ ID NO: 78235 - protein, 136 aa, Unknown
  Bacterial polypetide isolated from the Sargasso Sea
FNLNQGEVCTCPSRALVQESIYDKFMERAVARTKAVVQDNPLKMETMIGAQASVEQMEKIKSYLELGKKEGAKVLTGGSVGKLNSGLEKGNYIQPTIFEANNQMRISQEEIFGPVVSVIKFKDEAEALKIANDTLY

SEQ ID NO: 78236 - protein, 189 aa, Unknown
  Bacterial polypetide isolated from the Sargasso Sea
VTDSASCQNAVKETLGRFGRLDVLVNNAGVVASGPISQFEEKDWDRIFDVNVKGIYLMTRAALKALSDSNDAAVINTASIGGKKGSAGLSAYCGSKFAAIGITQSLALEFAPAGIRVNALCPGIVGTAMWHDHLMAGQGEAQFKEWMTTLIPLGRPQETSDMGDAAVYLATAHNVTGVALSVAGGMEMN

SEQ ID NO: 78237 - protein, 311 aa, Unknown
  Bacterial polypetide isolated from the Sargasso Sea
VACNECLDEATVRERTVRCLVNPRAGRHSEIEPIEIVKNPKKVIIIGGGCIGLQAALTAAQRGHNVHIFEKKPYLGGKWLVSFAPPGREPLRLFLTWLVNETKHAGVKFHLETEVTSELLKLEDPDEVIVTIGAIPIMPDIPGIDLPHVVTGEQVLMGEVELGKRVLVIGAGGAGVEVAHFIAMRNHINRDLKAHLQAYGGYDAIAGVIRESGHDITLVGRNPKLGTGLGPATRWVLVEELGHDGVTSIPSSKVSLIGKSSVWIDSAEDDQEREIQADSVVICTGYKGDETKIEWLRMGARNLKFVGDAKQ

SEQ ID NO: 78238 - protein, 87 aa, Unknown
  Bacterial polypetide isolated from the Sargasso Sea
NTDLVEALELHNLMAQSKVTLHSALNRTESRGAHAREDYKERDDKNWLVHSLAWLNDKGDVSMGSRAVHMNTLTNHVQPIPPKRRVY

SEQ ID NO: 78239 - protein, 237 aa, Unknown
  Bacterial polypetide isolated from the Sargasso Sea
MRDPLYDILFEPVKIGPVTARNRFYQVPHCNGMGYVRPNSLAKMREIKAEGGWSVVCTEEVWIHHSSEIVPHAEGILWDDGDIPALAKMTEAVHKHGSLAGIELQHGGYCSTNNYSRIPPIAPSSIVSSSYNPLQARAMDKTDIANFRKWHKKAAKRSKQAGFDLIYVYAAHSGTLLTHFLSRRINRRTDEYGGSLENRVRLFRELIEETKDAVGDSCAVAVRFAVEEFLGPMGITS

SEQ ID NO: 78240 - protein, 305 aa, Unknown
  Bacterial polypetide isolated from the Sargasso Sea
EKRSLKKKVLGYEFDFPFGFAPMGMTNLSWPGADSMLAAESARNNIPTCVSMASTTTLEKMYELSEGHSWMQLYIFQDENFVMELLDRAKNTGYEVAILTVDVPVLSRRTRDDKNGFSYPFKIGPKQFFDFATHPTWSLSTLLSGIPKPMNYVTSKSGDGIFKRKESRGSTDWDTLKRVRDKWKGKLIIKGVMSPDDATQIKEAGADAIQVSNHGGRQLDSATAAINMLPIIRKSVGSDFPLIFDSGIRSGSDIVRALAFGADYAMIGRPVMYAMGADGRKGLRRIVEIIKEEASTTLGLVGLND

SEQ ID NO: 78241 - protein, 84 aa, Unknown
  Bacterial polypetide isolated from the Sargasso Sea
LIETLELENLLGQAIITMKSGQVRKESRGAHARDDYPDRDDENWLIHSMGWMDESNDVTIGSSPVHLDTQTDEVESIPLKARVY

SEQ ID NO: 78242 - protein, 167 aa, Unknown
  Bacterial polypetide isolated from the Sargasso Sea
IGALISKGHIEKVHKYVLDGISEGAELLIGGEKLNNLSGYFYPPTVLKLKSTENILFKEEIFGPVVAILPFDSEIEVIELANKTHYGLAGGIWTKDISKAIRVAKSIEAGYLWINTYGGIIPETPYGGFKQSGYGKELGHEGLDEYLQIKNISIFTGEQIPKWYGDN

SEQ ID NO: 78243 - protein, 155 aa, Unknown
  Bacterial polypetide isolated from the Sargasso Sea
SIYDKFMEKCIARTKAVIQDNPLKMETMIGAQASVEQMEKIKSYLDLGKKEGAKVLAGGDVGKLNSGLEKGNYIQPTIFEADNSMRISQEEIFGPVVSVIKFKDEAEALEIANDTLYGLGAGVWTRNGNIAYRMGRAIQAGIVWTNCYHAYPAHS

SEQ ID NO: 78244 - protein, 263 aa, Unknown
  Bacterial polypetide isolated from the Sargasso Sea
MSENDVTDVVEIFNTPLTGSYNWDYTIQDNRIKKLYELGKELNWNSNMDINWDRPVVHLDEPPPIFWDDYEPYIKMSDKEKLRFLRHRQAWSMSQFLHGEQGALLVASQLTSCAPTYNAKLYAASQTFDEARHVESFNRYVQSRMELMYPIGNALKSILDKILTDPRWDLKFIGMQLIIEGLALAAFRTSRDLTPDPVLKDMLDLIIRDEARHVTFGINYLEEFVTTLSEKEIEERAQFAYEACYLSKERLVSIEVYEHFGGT

SEQ ID NO: 78245 - protein, 271 aa, Unknown
  Bacterial polypetide isolated from the Sargasso Sea
PSWTGFTPGQHLLVTLLHQGRYISRSFSISSSSGLFAQQKQIRISCRIQPQGQFTKALAADIAKLTHLSISAATGDFVLEPQTDGAPQQSIVMVAAGSGITPLWSMLNSLRCWTSPVVLFYCVKNAAQAAFLTELRLLAAKQPLFELQLIETASTGRLNLVQQLKENTKVSLTNALYYLCGPAAMSRQYKDDLIQQGVPSDAVHAELFGLELAATKGAVKQALLIEQGKVTTIEAAAGVPLLQAAEQQGLSPRFGCRIGVCYQCVCQKKSG

SEQ ID NO: 78246 - protein, 290 aa, Unknown
  Bacterial polypetide isolated from the Sargasso Sea
MGKDSFIIGTKKIGNEILVKATNSPKKTTHSKQNLNKTFNKMISKELNQSSVSSLGNNHHNSIDSKEEKFSINNFSEKALKEFRLEFQDLRDQLNGMVLTDMAGLSPNLKSTVKINLQKIGFSDYTLVKFKDKIENKNTKEGIENFINELADKLTFDDPINSLLDSKYVFVVGLSGSGKTSFSAKIAATIAQDIKNSNIALGKLGKQNEFLNDNLKSYSRLINVPNLNILPENAQKKLESIEKKLIIDVSTDIADTLNIVKSIKEKVGSNKVLTIAVIPHLVSKHYLKNY

SEQ ID NO: 78247 - protein, 151 aa, Unknown
  Bacterial polypetide isolated from the Sargasso Sea
VVDGMNLKLQGYENGYYIGGCLFDHVKKDMRIYKEEIFGPVLSVVRVKDFDEATQLINDHEFGNGTSIYTRDGDVGRTFASNIKIGMVGINIPIPVPVAFHSFGGWKRSLFGDQHMHGVEGVRFYTKLKTITSRWPSGLRSDPEFVMPTMK

SEQ ID NO: 78248 - protein, 320 aa, Unknown
  Bacterial polypetide isolated from the Sargasso Sea
MELSDVLTAVNLAPALAMGNTVVIKSSELAPATLFEFAKLIEKVGMPKGVVNIVSGFGEPCGRALTSHKLVERVAFTGGPETARHIIRNSADNLSQVSLELGGKSPVAVFEDADQENALNGITAGIFGASGQSCIAGSRLYIQNSIYDNFLEKIVNRANKIKLGPPMDSETQMGPLSSLKQLEVIEKNIKLTLDQGGKLRCGGKRHTMSNKGYYFPATIIECDNHNLPTAENELFGPILSVMKFNDEKEVINKMNDNQYGLSSGVYTKDINRGLRVSNAIRAGITFVNTYRLISPSAPFGGMKDSGYGKEAGVESIKDYT

SEQ ID NO: 78249 - protein, 294 aa, Unknown
  Bacterial polypetide isolated from the Sargasso Sea
NRGTGASHTKSFIRYLKEFEFEKPLGDHAKNQRLIYEPKGVCALITPWNWPMNQVTLKVIPALSSGCTMILKPSELAPLSAMILAELIDEAKFPKGVFNLVNGDGATTGDALTSHPDVNMISFTGSTRAGALISQNAAKDFKRVSLELGGKGANIIFKDADPEAIERGALRCFRNSGQSCNAPTRMLVEKSIYNEAIEKLKNYTNEFKVDDPKKEGEHIGPVISESQFNKIQTLIQKGIDEGAKLVAGGPGKPDGMNNGYYVKPTVFADVNNQMEIARTEIFGPVLSVIPFETE

SEQ ID NO: 78250 - protein, 99 aa, Unknown
  Bacterial polypetide isolated from the Sargasso Sea
GNIQVKDQSLIFNTDLVETLELHNLMEQSKATLYSALNRKESRGAHAREDYPERDDKNWLVHSLVWLDKEGNIKLDKKPVNLNTLTNHVQPIPPKKRVY

SEQ ID NO: 78251 - protein, 281 aa, Unknown
  Bacterial polypetide isolated from the Sargasso Sea
PGRPPLLPKGTAVYRRDVDGLRAVAVLSVMAYHLDHAYLPGGFTGVDIFFVISGYVVSGSLLSRPSPSVREYLVAFYSRRVKRLTPALLLMVSLTAIGMSMLLPPRTRDLRGYYGTAQLALVGWANNQFVLESHGYFEQGANALEYNPFTHCWSLGVEEQFYLLTPLLTALAHGRRVAANAPERSLRPPAALLVGGFALSFATSTALSMLIPTSSAALGAFYSLPSRYWQLTGGAMLSHLELFHGPCGMAAAGSDMDGGAATTPRSNPPRWLQASLVPLEA

SEQ ID NO: 78252 - protein, 245 aa, Unknown
  Bacterial polypetide isolated from the Sargasso Sea
YPHGVIAAFTPFNAPSNLLMQKVAPAIAMGNSVVIKPAFEGVGEALLIAECFTRAGVPDGLVNVVACRRDVTGHLVAHRDIAVVTLTGGTAAGEALASAAGAKPFIGELGGNSANIVCADADVRDAALRITPSAFEASGQQCISAQRIIVEEAVLEEFLEYFVNAAKAMKVGDPTKEDTDVGPMVNVEAADRVEKMVEEAVAGGAKAPLPLKRENAIIYPTILVTELPDERVVCEEIFGPVAVVI

SEQ ID NO: 78253 - protein, 282 aa, Unknown
  Bacterial polypetide isolated from the Sargasso Sea
QTCTGISNGVTLVVIKCSELAPATMFEFAKLIQETGIPKGVVNVISGFGEPCGKALTSHNLVEKIAFTGGPETARHIIRNSAENLSEVSLELGGKSPVAVFNDANQENAINGITAGIFGASGQSCIAGSRLYLQEGIYDEFLDKLSNRAKKIKIGAPMDPETEMGPISNYKQLEVIEKNIKLTLEQGGRLKCGGQRHSFSNEGYYFPATIIECDNHNLPVAENELFGPVLSVMKFKTEEEVVSKMNDNQYGLSSGVYTSDFARGMRVSKAIRAGITFVILID

SEQ ID NO: 78254 - protein, 181 aa, Unknown
  Bacterial polypetide isolated from the Sargasso Sea
NSEMGPLITKEHLEKVRGYVDIGVKEGAKLLVDGRNLKLQGYENGFFIGGCLFDNVKKDMRIYKEEIFGPVLSVIRAKDFQEATELVNDHEYGNGVSIFTRDGDAARTFSSKIKVGMVGINIPIPVPMAFHSFGGWKRSLFGDQHMHGPEGVRFYTKLKTITSRWPSGIRTNPEFIMPTMK

SEQ ID NO: 78255 - protein, 240 aa, Unknown
  Bacterial polypetide isolated from the Sargasso Sea
MKIKKQSGPPEDLIYFDDDLPLSQSQVEDVVEIFKTPLTGSYNWDYTVADNRIKKLYELGKELNWNGSIDLNWDYTHPADERILETDDELPHETLEAYENLSDEEKILFDRHDVAELMSQFLHGEQGALLVASQLASCAPTYNAKLYAASQTFDEARHVEVFNRYLQEKIGIHYPINPALKLLLDKILTDERWDLKFIGMQIIIEGLALAAFSMLKSISKDPLLKQLLHYVIRDEARHVT

SEQ ID NO: 78256 - protein, 255 aa, Unknown
  Bacterial polypetide isolated from the Sargasso Sea
MFEFAKLIEKTGIPNGVVNVISGFGDPCGKALTSHDLVEKVAFTGGPETARHIIRNSAENLSEVSLELGGKSPVAVFNDAHQENAINGITAGIFGATGQSCIAGSRLYIQNEIYDEFLEKLVNRAKKIKIGSPMDPDTEMGPISNFKQLETIEKNIKLTVNQGGKIKCGGKRDSFSNKGYYFPPTIIECENHKLPAAENELFGPVLSVMKFKNEEDVIKKMNDNKYGLSSGIYTRDLARGMRVSKAIRAGITFVN

SEQ ID NO: 78257 - protein, 198 aa, Unknown
  Bacterial polypetide isolated from the Sargasso Sea
RLSKKAEALKIGPGMDKSSEMGPLVTKEHLEKVKGYVDLGVKEGAKLVLDGRNLKLQGYENGFYIGGCLFDHVTTDMRIYKEEIFGPVLSVVRVKTFEEATKMINEHEYGNGVSIYTRDGDAGRTFASKIQVGMVGINVPIPVPMAFHSFGGWKRSLFGDSGTHGMEGVKFYTKLKTITSRWPSGIRSNPEFIMPTMK

SEQ ID NO: 78258 - protein, 206 aa, Unknown
  Bacterial polypetide isolated from the Sargasso Sea
MSGTIAYNSKFIKSELKNNKHISTILNEDNEIKIESSILINAAGLYAEEVAKSISALDNTLIPKTFFAKGNYFETSKDLNIRHLIYPIPNEASLGLHLGLDIGMQVRFGPDVEWIDAINYDVDENRLDSFYNDIRKYIPTFDKSLLKKGYSGVRPKLKNCGEGKSDFMIQGEEVHNTRNLINLFGIESPGLTSSLVLGEHILELVS

SEQ ID NO: 78259 - protein, 298 aa, Unknown
  Bacterial polypetide isolated from the Sargasso Sea
GVKAEGGWAVVCTEEVEIHANSDNGSAVEGRLWDEGDIPALAKMADAVHKHGALAGIELVHGGYSNANHYSRIPPIAPSLTSVNSYDPVQARAMTKSDIRDFRRWHRQAAIRSRQAGFDLVYVYAGHNLTLLMHFLSRRFNQRTDEYGGSLENRTRLFREVLEETIDAVGDSCAVAVRFAVDELLGSEGITCKSEGREVVEMLAELPDLWDVNISEWENDSATSRFEKEGYQEPYISFVKSLTSKPVVGVGRYTSPDTMVSLIQRGVMDMIGAARPSIADPFLPKKVEEGRLDEIREC

SEQ ID NO: 78260 - protein, 163 aa, Unknown
  Bacterial polypetide isolated from the Sargasso Sea
EEVSNSETDKCLDRFDKIRNSSGSTKTSELRLKMQKTMQSKCAVFRTEKTLKEGVEEIRKPYDGMNDISVKDKSLLFNTDLVETLEFDNLIRQALTTMDSAYNRKESRGAHAREDFSKRDDKNFMKHTLAWQNENKVEIKYRDVHSRTLTNDVQYFPPKERVY

SEQ ID NO: 78261 - protein, 242 aa, Unknown
  Bacterial polypetide isolated from the Sargasso Sea
LCASGPQSITSTITSVNALSDTTIELNVALSEPLDFLPGQYINLGLPNSDETRAYSFSSCPGSKDASFLIRNVPNGLMSTYLSKNANAGDVLPVTGPLGSFYLRAVERPVLMLAGGTGLAPILSMLASLVQNPTSQPVYLLYGVTNVDDLVKLEAIQEYADALDNFSYATVVVNPDSAHEKLGFVTDHMESVPFALADADAYLCGPPPMVDAVRQYFKDAGTNPYSFHYEKFNPSQPKEEAA

SEQ ID NO: 78262 - protein, 127 aa, Unknown
  Bacterial polypetide isolated from the Sargasso Sea
VYIKEKIYEKVLDGVVDRLKNLKMGNALDENSDVGAIISEDQMKRTLHYMNIAKENSSTKVLHGGNQKKGGEYQEGFFYEPTLLSGVPVKSPVCQEEIFGPVACAIPFKSFDEVIESANDTPFGLSA

SEQ ID NO: 78263 - protein, 241 aa, Unknown
  Bacterial polypetide isolated from the Sargasso Sea
MPDCDLDQAVNGLMGAAYGSAGERCMAQSVVVAVGKIADKLVSNLSKKVENLKVGPGLDKKSEMGPLVTKEHLEKVKGYVDLGVKEGAKLVVDGRNIKLQGYEKGFYIGGCLFDHVSKKMRIYKEEIFGPVLSVIRVKDFESAVSLVNEHEFGNGTSIYTRDGDVGRTFANRIKIGMVGINIPIPVPVAYHSFGGWKRSLFGDQHMHGMEGVRFYTKLKTITAKWPKGLVEDPEFVMPILK

SEQ ID NO: 78264 - protein, 270 aa, Unknown
  Bacterial polypetide isolated from the Sargasso Sea
VLFEFAKLIEKTGIPKGVVNVITGFGDPCGKTLTTHNLVEKIAFTGGPETARRIIKNSAENLSEVSLELGGKSPVAVFDDAEQENAINGITAGIFGASGQSCIAGSRLYIQKGIYNEFLDKLSSRASKIKIGAPMDLDTEMGPLSSFKQLETIEKNIKDTVDQGGKIKCGGKRDSFSNKGYYFPPTIIECDNHNLPTAENELFGPILSVMKFDTEEEVINKMNDNQYGLSSGVYTSNLSRGMRVSKAIRAGITFVNTYRLISPFGSIWRY

SEQ ID NO: 78265 - protein, 183 aa, Unknown
  Bacterial polypetide isolated from the Sargasso Sea
EGFVMFNLNQGEVCTCPSRALIQESIYDKFMERAIARTKAVVQDNPLKMETMIGAQASVEQMEKIKFYLELGKKEGAKVLTGGSVGKLNSGLEKGNYIQPTIFEANNSMRISQEEIFGPVVSVIKFKDEAEALKIANDTLYGLGAAVWTRNGNIAHRMGREIQAGIVWTNCYHAYPAHSPFGG

SEQ ID NO: 78266 - protein, 292 aa, Unknown
  Bacterial polypetide isolated from the Sargasso Sea
SSAEFSDVYLADGAVINLGNNQDVTLTHIDDEGIRLNSVNQLQFGDSGTKISQSADGVLDLVSDNEVEINGTTIDINGNAELENVTIDYVKIDGTYIGHADDTDLMTLANGTLTVSGTLAATTLTGDGSNLTGISASSIMADDISQGNAAVTIGTSSGAININPAAGSPILLDNTINVDGSLIGHADDTDLMTLANGSVTFTGSTVIPTADVNGGAIDAVTLGTNSAVTQAVIDNVNIDGAVIGHTSDTDLMTLADGSVTFTGSTVIPTADVNGGAIDAVTLGTNSAVTQAV

SEQ ID NO: 78267 - protein, 258 aa, Unknown
  Bacterial polypetide isolated from the Sargasso Sea
MELGLNDKVVLITGGARGIGAAAVRAFLNEKCKVVFVDHDYESGSELAKSSKTRLRFIEADLNTQESCKQAVKKTVSFFGGIDVLVNNAGFNDGLGLETPPEEFMDSVRKNLLHVYSMTHYSLPQLRKSQGCLVNLGSKVSETGQGNTSAYAAAKGAINALTREWAVALAPDNIRVNCVMPAECHTDQYEKFFQTRKNPEATRQAIGNLVPLSRRLTTPDEIALTIVFLSSNCSSHTTGQHIFVDGGYTHFDRAVSHE

SEQ ID NO: 78268 - protein, 280 aa, Unknown
  Bacterial polypetide isolated from the Sargasso Sea
MLIFLIIGSGVAGLLTALELADYGSVLIVSKQAFGESNTRYAQGGIAAAWNRLDSSDSHFKDTLKAGCYHNVESHVQLLTDKGQDAIQTLLDYGVSFDRDESDFMLAQEGAHSQPRVLHFQDKTGIAIMEPLLRRVQQHQSIQCLEFTAVVELVMHEQRCVGAYAVTGQKESLVISSKVTCLATGGAGQLFEHTSNPKIATGDGVMLAYNAGASLKDLEFVQFHPTSVLIDKTKPEYMLLSEALRGDGATLVDADGVSIMGNKLSNLSSRDKVSRAIYTE

SEQ ID NO: 78269 - protein, 131 aa, Unknown
  Bacterial polypetide isolated from the Sargasso Sea
MKPIPTVATSNNFKYNFKNQVVLVTGASKGLGYEAAKYFLKYGSNLMICSRNQIQIKKAYEKLIKIKKKNQKIFYSATDVSSYQQVKKLIDITIKKFKKIDVLVNNAGVYGPKGHIEKVNWDEWVKTFQIN

SEQ ID NO: 78270 - protein, 296 aa, Unknown
  Bacterial polypetide isolated from the Sargasso Sea
VNYLNEIAKSKNLKTNLLSSIKPSNENHKKWIYHHLEKLILNKKIKKVTIWGLTYKENTDTLRRSFAIEVSTWLKNYGIKVTGFDSNIKKFTTKLNEKIQQLSTPLSKIKSIDTLIILGKSEDFLRISATAIKKLNKKLFIIDPNYFCNHFKKTYKDRYLYVGKPMKPIPTVATSNNFKYNFKNQVVLVTGASKGLGYEAAKYFLKYGSNLMICSRNQIQIKKAYEKLIKIKKKNQKIFYSATDVSSYQQVKKLIDITIKKFKKIDVLVNNAGVYGPKGHIEKVNWDEWVKTFQIN

SEQ ID NO: 78271 - protein, 245 aa, Unknown
  Bacterial polypetide isolated from the Sargasso Sea
HCVVMPDCDLDQAVNGLMGSAYGSAGERCMAQSVAVAVGKIADPLVKNLSKKVESLKVGPGLDKKSQMGPLVTKQHLDKVKGYVDIGVKEGAKLVVDGRNLKLQGHEKGFYMGGCLFDHVKKDMKIYKEEIFGPVLSVVRAKDYNEALNLVNDHEFGNGTSIFTRDGDTGRSFASNVKIGMVGINIPIPVPMAFHSFGGWKRSLFGDQHIHGPEGVRFYTKLKTITSRWPSGIKSDPEFIMPTMK

SEQ ID NO: 78272 - protein, 212 aa, Unknown
  Bacterial polypetide isolated from the Sargasso Sea
MISEKKVAIVTGSARGIGESTARMLSERDYNVVVNYASSADEAKETADTCESAGADVLLIQGDIALDVDCRRMIDETMAKWGRLDVLVNNAGTTTYVNHDNLEGLTPEVWERTFSVNVFGTFQMVRAAEKPLRASGNGNIVNVGSIAGVAGIGSSIAYAASKGAVNTMTLSLARVLAPEVRINTICPGFVGTKWQRDGQGDGYDAYVEQVKI

SEQ ID NO: 78273 - protein, 201 aa, Unknown
  Bacterial polypetide isolated from the Sargasso Sea
LVSELAKKVESLKVGPGMDKNSEMGPLVTKEHLEKVKGYVDLGVKEGAKLIVDGRKIKLQGYDKGFYIGGCLFDHVKKDMRIYKEEIFGPVLSVVRAKDFDEATQIINDHEFGNGTSIYTRDGDVGRTFASKIKIGMVGINIPIPVPVAFHSFGGWKRSLFGDQHMHGPEGVRFYTKLKTITSRWPSGVRSNPEFIMPTMK

SEQ ID NO: 78274 - protein, 158 aa, Unknown
  Bacterial polypetide isolated from the Sargasso Sea
IGPLIDEGAADNVCGFIEEAVSKGAKVAIGGGKSPLGGAFVEPTILTNVNKDMRVFSEEIFGPVAPLFKFSTEEEAIEMANDTEFGLAAYFYSRDIGRVWRVSEGLEYGIVGINEGSVSTEVAPFGGVKESGSGREGSKYGLDDFTEIKYLCMGGIDE

SEQ ID NO: 78275 - protein, 128 aa, Unknown
  Bacterial polypetide isolated from the Sargasso Sea
MNIENKVALITGGASGLGLATAKNLHAKGAKLVLLDLNEDNLKSAQEELKTNVTGVVTNVADEESVKNAIKSAIDEFGAIHILVNCAGIGSASKTVGRDGAHPLDIFKIVIDVNLVGTFNTLRLAAEE

SEQ ID NO: 78276 - protein, 71 aa, Unknown
  Bacterial polypetide isolated from the Sargasso Sea
QAITTMESAYYRKESRGAHAREDFPKRDDENYMKHTLSWHNGKEVKINYRKVNLSTLTNDVQTFPPKERVY

SEQ ID NO: 78277 - protein, 290 aa, Unknown
  Bacterial polypetide isolated from the Sargasso Sea
QAGFDLIYVYAGHNLTLLMHFLSRRFNHRTDEYGGSLENRVRLFREVIEETIEAVGDSCAIAVRFAVDELLGAKGITCESEGREVVEMLAELPDLWDVNISEWRNDSATSRFEKEGYQEQYIGFVKSLTSKPVVGVGRYTSADTMVSLIKRGVMDMIGAARPSIADPFLPKKIEEGRLDEIRECIGCNICVAGDWLSVPIRCTQNPTMGEEWRRGWHPERIEPCKSNEGVLIVGGGPAGLECALSLGKRGYRLILAEAAEVLGGRVNRESRLPGLAEWGRVRYYRETLLE

SEQ ID NO: 78278 - protein, 283 aa, Unknown
  Bacterial polypetide isolated from the Sargasso Sea
FEHDAKNNIHARIDRKRKFPVTTLFKCLLSQRSEDYLEDCDKNKVEPDQKRILGMTAEEILSIFYENILYKKNDFGWQFKEDLKFYKGKILNYDLLDSKNGKILITKGTKVNQKIINEIKKKNINTISIEENSLIGLYLASDIIDEKNGKIYFEAGHEIDEEFLSFINSNKTNKLDILKVDNIEIGSYIRSTLQLDKARSREEALFEVFKILRPGEPPTIETAELLFNNLFYNADRYDLSSVGRLKINSKFKKETSIEKRILDKSDINDVVKHMHNLIDGKGG

SEQ ID NO: 78279 - protein, 257 aa, Unknown
  Bacterial polypetide isolated from the Sargasso Sea
MGVFNVVTGHGEEAGQSLALHQDVSKIGFTGSTEVGKLLLQYAGQSNMKKVSLETGGKSPMIYFADLPDMELAVSTAYDSIYANMGEVCNAGSRIYVERAIYADFVDQFIAEGQGAYTPGDPLDPETNMGPLMSAQAQKRVLGFIESGKNEGAKLKFGGNIPTGLESGCFVEPTMFADVNNDMTIGREEIFGPVASIIPFDTEEEAIEMANDTIYGLCASVWTSNVSRAHNMAKAIESGMVYVNCYDVGDMTFEFGG

SEQ ID NO: 78280 - protein, 243 aa, Unknown
  Bacterial polypetide isolated from the Sargasso Sea
VVMPDCDLDQAVNGLMGAAYGSAGERCMAQSVAVAVGNIGDNLVNELSKKVEALKVGPGMDKKSEMGPLVTKEHLEKVKGYVDLGVKEGAKLVVDGRNLKLQGYENGYYIGGCLFDHVKKDMRIYKEEIFGPVLSVVRVKDFDEATKLINDHEFGNGTSIYTRDGDVGRTFASNIKIGMVGINIPIPVPVAFHSFGGWKRSLFGDQHMHGLEGVRFYTKLKTITSRWPSGIRSDPEFVMPTMK

SEQ ID NO: 78281 - protein, 103 aa, Unknown
  Bacterial polypetide isolated from the Sargasso Sea
TYDGLDSLNVKDKSLVFNTDLVETLEFDNLIRQAVATVDSAYHRKESRGAHAREDFPKRDDEKFMQHTLAWCNGKETKISYREVHKTTLTNEVQYFPPQERIY

SEQ ID NO: 78282 - protein, 126 aa, Unknown
  Bacterial polypetide isolated from the Sargasso Sea
YESMCEEIFGPVLTIYLYDSDKWDETLKLVNETSPYALTGCVWGNDRNAINDATEKLTHAAGNFYINDKPTGAVVGQQPFGGGRASGTNDKAGSIFNLIRWVSQRTIKETYDPPTEFSYPFMESSK

SEQ ID NO: 78283 - protein, 262 aa, Unknown
  Bacterial polypetide isolated from the Sargasso Sea
VNIGDKVVMHWRPGTGIESDFPNYKLNNKIISSGKVTTFNEYSIVSENRLTKVPSETPSELCAILGCALTTALGIIDNEIELKFGESIAVIGCGGVGLNLIYAASMKGASEIIGVDNNTEKKSLATNCGANIFLKDLNDYEEKIDIIIDTTGIAEVLTNAVEKLSGTGRLILVGQPQPGRSFEIFNAVNLFSGSGQMIRATQGGRTNPENDIPRYIKLFQLGKLNISNMITNSFELDDINKAFDLLKTGNAGRILININKNE

SEQ ID NO: 78284 - protein, 227 aa, Unknown
  Bacterial polypetide isolated from the Sargasso Sea
DDADLDRALDAAIFMIYSLNGERCTSSSRLLIQDSIADDFETKLIQRVNSIKVGHPLDPKTEVGPLIHKVHFDKVTSYFDIARQDGATVAAGGSRHGDTGWFVTPTLFTGATNQMTIAREEIFGPVLTAIRFTDEDEALNIANDTQYGLTAYVWTNDVTRAMRFTNQLEAGMIWVNSENVRHLPTPFGGVKASGIGRDGGDWSFEFYMEQKHIGFATGHHKIPRLGA

SEQ ID NO: 78285 - protein, 145 aa, Unknown
  Bacterial polypetide isolated from the Sargasso Sea
RNSEGNVGTAELRLSMQKTMQSKCAVFRTEKTLKEGVDEIKKTFDGLNSISVKDKSLIFNTDLVETLEFDNLIRQAVVTVDSAYNRKESRGAHAREDYPKRDDDKFMQHTLAWCEGKNSKISYRDVHKSTLTNEVQYFPPQERVY

SEQ ID NO: 78286 - protein, 105 aa, Unknown
  Bacterial polypetide isolated from the Sargasso Sea
KKTYDGMDSISVKDRSLVFNTDLVETLEFDNLIRQAVTTVESAYHRKESRGAHARDDYPKRDDEKFMQHTLAWCDGKNTKISYRAVHKSTLTNEVQYFPPQERVY

SEQ ID NO: 78287 - protein, 312 aa, Unknown
  Bacterial polypetide isolated from the Sargasso Sea
INQGYERSFSTGLVASTGTLGQIIPPSIALVLLGDVMSNAYQRAQNDMGIFSQQTVTVGDLFIGAIVPGIMICLGYLIYTIYKNKTNPHLKDYTNSSNVKNLVLFKTLMLPIILIFLVLGSIFAGIATPTEAAAIGAFGALIIALINQKVDISFIKETSEKTAVVSTMIFTILIGASIFSLIFRGVGGDDLIDLIFNSLPGGSYTALIFVLLVIFLLGFILDFIEICYVIIPLVAPPLLMMGFDPVWLAILFAINLQTSFLTPPFGFSLFYLRGVADESIQTKEIYKGVIPFIFIQLLILFLVILFSTIIIK

SEQ ID NO: 78288 - protein, 247 aa, Unknown
  Bacterial polypetide isolated from the Sargasso Sea
MVTEGTQIEPRGQGYAWTPGIHSPEQIQGWRKVTDAVHAEGGVIFAQLWHVGRVSHTSLQPGGEAPVAPSAIRADNVKVFIETGPGTGTLADPSTPRALSTKEVKELVELYAQAARNALDAGFDGVELHCANGYLVNQFISAHTNQRDDEYGGSLQNRLRFLREITLAVAGVVGKERVGVRFAPLFATTDEDRVYLGLVEEDPHQTYIEAVKILEEVGIAYLSLAEADWESAPELPETFREAVRKTS

SEQ ID NO: 78289 - protein, 279 aa, Unknown
  Bacterial polypetide isolated from the Sargasso Sea
SELAPATMFEFAKLVEETGIPKGVINVVSGLGDPCGKALTTHNLVEKVAFTGGPETARHIIRNSAENLSEVSLELGGKSPVAVFDDAKQENAINGITAGIFGASGQSCIAGSRLYLQKGIYNEFLDKLASRAEKIKIGAPMDSDTEMGPLSNFKQLEVIEKNIKLTVEQGGKIKCGGKRHPFSNEGYYFPPTIIECENHNLPAAENELFGPILSVMKFDTEKEVIELMNDNQYGLSSGVYTSDLARGMRVSNAIRAGITFVNTYRLISPSAPLEALKIV

SEQ ID NO: 78290 - protein, 192 aa, Unknown
  Bacterial polypetide isolated from the Sargasso Sea
QKLLKVAPWTDSLSQMGPVISKEHKEKIENYIASGVEDGAHLVLDGRNMKIQGYENGYFVGPTLFDHVKKDMKIYKEEIFGPVLSVIRAQNYDEALRLVNDHSFGNGTSIYTSDGEISRHFTTNCKIGMVGVNVPIPVPMAFHSFGGWKQSLFGDHSMHGVEGVRFYTKLKTVTSRWPKSIKKGAEFKMPTN

SEQ ID NO: 78291 - protein, 209 aa, Unknown
  Bacterial polypetide isolated from the Sargasso Sea
VWAVDSIADELCDLLTKKAESLRIGPGNEPENEMGPLITDDHKNKVIDYIQQGEDAGATILLDGRDHEVTSKPGFFLGPTLFDHVNPEMSIYKEEIFGPVLVVLRVKDFNAAIKLANEHQFGNGVAIFTNQGSKAREFVHSVEVGMVGINVAIPVPLSFYTFGGWKDSIFGSSNIYGMDGIRFFTRTKTVTARWVDDDGSINLSMPTVK

SEQ ID NO: 78292 - protein, 268 aa, Unknown
  Bacterial polypetide isolated from the Sargasso Sea
AKYIYENSAKNEKRVQALGGAKNHLVVMPDCDLDEAVNGLMGAAYGSAGERCMAQSVAVAVGDIGDELVLKLSKKAETLKVGPGMDKSSEMGPLVTKEHLEKVKGYVDLGVEEGAKLVVDGRNLKLQGYENGFYIGGCLFDHVKKEMRIYKEEIFGPVLSVVRVKSFEEAAKLINDHEYGNGVSIYTRDGDAGRTFASKIQVGMVGINIPIPVPMAFHSFGGWKRSLFGDSAMHGMEGIKFYTKLKTITSRWPSGIRSNPEFVMPTMK

SEQ ID NO: 78293 - protein, 302 aa, Unknown
  Bacterial polypetide isolated from the Sargasso Sea
GVAISTVLVGTLLAASTGVVGASVVAMGVISLPVMMKYKYNTPLACGTICASGTLGQIIPPSIVLIILGDVFQVPVGDLFKAAVGPGLALVAAYILFILVVSFIKKDMAPAIPSDSSRGSKKKQVIRALIDIIPSLTLIILVLGSIFAGVATPTESAAVGCIGAIGLSMLYKTYTNAMVKEAALESVKITSMVFGILIGATAFSMVFSYTGGEELVEHAMMSLPGDDKWGFIIFTMLAILVLGFFIDFIEISYIIVPILVPVADALGISPVWFAILIAMNLQTSFLTPPFGFSLFYLKRLCT

SEQ ID NO: 78294 - protein, 91 aa, Unknown
  Bacterial polypetide isolated from the Sargasso Sea
VISFHTDLVEALELHNLMAQSKVTLHSALNRTESRGAHAREDYKERDDKNWLVHSLAWLNDKGDVSMGSRAVHMNTLTNHVQPIPPKRRVY

SEQ ID NO: 78295 - protein, 319 aa, Unknown
  Bacterial polypetide isolated from the Sargasso Sea
KKFKNYINGDFTESKSGKSFKSIDPSTEKEFAEISLAEEYEVNLAVESAHNAFYGEWSKILPSKRAHYLRAIGDQLKEKAELLGTIETKDTGKLFKETKFQANYIAEYYYYYAGLVDKIEGSTLPIDKEDMHVFTTRVPVGVVAAIIPWNSQMFLTAVKLAPALAMGNTIIIKASEIAPTPLLEFAKIIDKVGMPKGVVNIITGFADTCSKLLTSHPKINKIAFTGGVHTAKHIVRNSAENLSQISLELGGKSPVVVFKDARKNNTINGIMASIFGASGQSCIAGSRLYLQEDIYQEYLEELKNRVERIKIGDPLSTTT

SEQ ID NO: 78296 - protein, 312 aa, Unknown
  Bacterial polypetide isolated from the Sargasso Sea
DAVRFRGTAIGTNTAHRGAQRGPGQNQIAPIISPILDAAADELGVSRFDIRKINTPMTGDVGGPQRTPFTSAYMPETLDLAAEQFGWEERQSRRRRTNGSKVIGLGIGQGYHNAGRSGMDGIVMMGPDGRLKVHNGVGNLGTYSYASTSRAAAEVLKMPWERVDIVTGRTDLHLPITSPQDGSNSIFTNTRTFYGAAQDMLAKMKEIAAGDLGGTPEDYDISNERVHQIADESVGMTFGQVAVRALELGGKYTGSSDLPEELAEWTQISVSRLAGTAFMGVFHDPRHEGNPPGFTVSCIEIELDTETGKYEI

SEQ ID NO: 78297 - protein, 163 aa, Unknown
  Bacterial polypetide isolated from the Sargasso Sea
EKISNSETDKCLERFEKLRNSNGDNRTADLRLEMQKTMQSKCAVFRTEKTLKEGVEEIRKPYAGMDSISVKDKSLIFNTDLVETLEFDNLIRQAIVTLDSAYERKESRGAHAREDHPKRDDNNFMKHTLSWCEGSKTKISYRDVHRSTLSNDVQYFPPQERVY

SEQ ID NO: 78298 - protein, 289 aa, Unknown
  Bacterial polypetide isolated from the Sargasso Sea
ATVIAMGLISLPTMLNNKYDRSLASGIVCSSGTLGQIIPPSIVLIIIADQLASAADVANTMRQADYKLITGEFNMPGEFRVGSTSAGDMFLGALLPGLVLVGLYMLYVFVYARLNPRAAPPVPFKGQFDFKFWMKVIMVIIPPLALIFAVLGSILMGIATVNQAGSIGAIGATIMAGYRLHQGKKDAYYPLLISVIALIPIFFISNNYNLNIKAIETRNLTAIFITGFFTLFFLIGIIWSFWRSYKVDNVLKEVVTETCVTTSMVFIILLGAAMLTSGFRAFGGEELVR

SEQ ID NO: 78299 - protein, 236 aa, Unknown
  Bacterial polypetide isolated from the Sargasso Sea
PNIIMSDADLDIAIQGVIDGMRYTRQGQACTAGSRVYIQEKIYDKVLDGAVEKLSKLKMGNALDESSDIGAIISEEQLKRTLYYMDIAKKNSTTNVVHGGNQRTGGDYKNGFFYEPTLMSGVPVSSPVCQEEIFGPVACAIPFKTFDEVMNSANDTPFGLSAVLWTQNLSRALQFVEEIEAGFVQVNQCVAPRANVSYGGLKMSGLGKEYAFDSMVNHFTQSKTVLINRGKSNIDN

SEQ ID NO: 78300 - protein, 127 aa, Unknown
  Bacterial polypetide isolated from the Sargasso Sea
TMQAKCAVFRNEKTLKEGVNEIKKSFAGMESISVKDRSLIFNTDLMETLEFDNLIRQAITTMESAYHRKESRGAHAREDFPKRDDANYMKHTLSWHNGKEVKINYRKVNLSTLTNDVQTFPPKERVY

SEQ ID NO: 78301 - protein, 91 aa, Unknown
  Bacterial polypetide isolated from the Sargasso Sea
MSDRVVLVTGAARGLGAVIAERFHAAGYRVALADIAADAIEAHARELDPSGERAIALPLDVTSKRDFEAARDALVARWGAIDVLVNNAGAS

SEQ ID NO: 78302 - protein, 274 aa, Unknown
  Bacterial polypetide isolated from the Sargasso Sea
FVGSTPVAKYIYETSAKNHKRVQALGGAKNHLVVMPDANLDQAVDGIMGAAYGSAGERCMAVSVAVAVGNIADELVENIYKKTQELKVAPWTDNESDMGPLISKDHLEKVEKYINIGVEEGAKLVTDGRNYKLQGYENGYFIGPSLFDNVTDKMKIYKEEIFGPVLSVVRAKDYNEALGLVNRHNFGNGTSIYTSSGDTARHFTTNCKIGMVGVNVPIPVPMAFHSFGGWKQSLFGDHAVHGSEGIHFYTKLKTTTSRWPTSIKSGPEFIMPTN

SEQ ID NO: 78303 - protein, 300 aa, Unknown
  Bacterial polypetide isolated from the Sargasso Sea
IDLNWEYTHPADEKIIEPDEELPHEMLDAYQNLTDEEKILFDRHNTAELMSQFLHGEQGALLVASQLASCAPTYNAKLYAASQTFDEARHVEVFNRYLQDKVGIHYPINPSLKLLLDKILTDERWDLKFIGMQIIIEGLALAAFQMLKAITKDPLLKQLLHYVVRDEARHVTFGINYLEDYLKTLSPEEINERAEFAYEACVISRDRLINTKAEQRFLKMSEEEAREFQLNTGTFEMFRNFLFTRVMPNLKRIGLLTDEVRPKFEALGLLEYENAPDDFECDWAEMKKPLEKFGQIPTSL

SEQ ID NO: 78304 - protein, 285 aa, Unknown
  Bacterial polypetide isolated from the Sargasso Sea
FLSTATNQRTDEYGGSLENRARFVKEVVEEVRNEVGDSMGITLRLSLDEMIGDLGFANSEVRDFVEMHQDLPDLWDLAHGAWEDCSGPSRFKEEAAQFDLVTGIRKLTSKPIVGVGRFTSPDVMVKQINSGTLDFIGCARPSIADPFLPKKIEEGRIQDIRECIGCNICITGDMTMSISRCTQNPTFMEEWRKGWHPEIIEPKGKTSKVLVIGSGPAGLEAALACSNRGYDVTLTEATKILGGRVAKERKLPGLSAWGRVADYREYQLSQKSNVETYLESSLDAD

SEQ ID NO: 78305 - protein, 143 aa, Unknown
  Bacterial polypetide isolated from the Sargasso Sea
YISSAKNEGADLITGGEIPKEEELQDGFFIQPTIFDKVTMDMKIGKEEIFGPVMSVIEWDDYESMISLANGIEYGLTAMIVTDNLKLAMETAERVEAGYIWINSTGRYLGAPYGGWKQSGFGQEECFDELLSYTQIKNVNMRW

SEQ ID NO: 78306 - protein, 171 aa, Unknown
  Bacterial polypetide isolated from the Sargasso Sea
VKPNSKKIEINKSKTEEIIQRFDKIRNSRGSETTGKLRTSMQHIMQKKCAVFRTHNLISRGIQEFNEVEKSMEDIDIKDKSLVFNTDLVEALELHNLMAQSKVTLYSALNRKESRGAHAREDFKERDDTNWLVHSLAWLNDNGDVNMGSRAVHMNTLTNHVQPIPPKRRVY

SEQ ID NO: 78307 - protein, 251 aa, Unknown
  Bacterial polypetide isolated from the Sargasso Sea
MTGHYNWDYTDADSRIKKLYELGKELNWDGEIDLDWSKGIGRDEYPIKPEMVARLEGPLAALPEEKRLEYMRHDQAWALSQFLHGEQGALLVASQLVSCAPTYQAKLYAASQTFDEARHVEVFSRYLQRIHGLEYPVNKNLKALLDKTLTDPRWDLKFIGMQIVIEGLALAAFQTTKETSNCPLLRQLVHYVIRDEARHVTFGINYLSEFLQTLSEEELEERAQFAYEACVVMRRRIINNELPAKWFGITE

SEQ ID NO: 78308 - protein, 190 aa, Unknown
  Bacterial polypetide isolated from the Sargasso Sea
SLLDIVVFGRAAAQRALKTVEKGASHAPLPKHVTDKILARLDKMRYAKGDVSVGEIRNSMQNAMQKHAAVFRSNSSMNEGVKKVDTIANSLDGVGIKDRSLIFNTDLVEALELENLMQQAIVTIKSADQRKESRGAHSHEDYPDRDDKDWMKHTIMWLNEKNKTKLDYRDVHLNTLTNEVASIPPAPRVY

SEQ ID NO: 78309 - protein, 290 aa, Unknown
  Bacterial polypetide isolated from the Sargasso Sea
DKIEGSTLPIDKEDMHVFTTRVPVGVVAAIIPWNSQMFLTAVKLAPALAMGNTIIIKASEIAPTPLLEFAKIIDKVGIPKGVVNIITGFADTCSRLLTSHPKINKIAFTGGVHTAKHIVRNSAENLSQISLELGGKSPVVVFKDARKDNAINGIMASIFGASGQSCIAGSRLYLQEDIYNEYLEELKSRVEEIQIGDPLSTTTQLGPLATLTQLENIEEKIKQTKKLGGKIITGGNKVSEFKHGYYFEPTIIECDNHNLPVAENELFGPVLSVMRFKDEENAIKLMNDNS

SEQ ID NO: 78310 - protein, 166 aa, Unknown
  Bacterial polypetide isolated from the Sargasso Sea
MELGLNDKVVLITGGARGIGAATVRAFISEKCNVVFVDQDSESGSELAKSSGPNLRFIEAKLNTPDSCRQAVEKTVSFFGGIDVLVNNAGFNDGLGLETPPEKFMSSVRTNLLHVYAMTHYSLPKLRKSQGCLVNLGSKVSETGQGNTSAYAAAKGAIQALTREWA

SEQ ID NO: 78311 - protein, 165 aa, Unknown
  Bacterial polypetide isolated from the Sargasso Sea
MGVIDKFGLPKPISSVFNWARSYSLWYFQFGLACCAIEVMAVSGPRHDFMRLGVIPLPASPRQADFMIVAGTVTDKMAPSVKRLYDQMPEPKYVISMGSCSNSGGPYWDSYSVTKGVDQLIPVDVYVPGCPPRPEALQEGIILLQKKIRGEDMKEKWLEVQTEPI

SEQ ID NO: 78312 - protein, 212 aa, Unknown
  Bacterial polypetide isolated from the Sargasso Sea
IVRASFLNQGQVCLCGSRILIQDSIFEAFKIKFVEAVKNLKIGDPSKQETDLGSLISPEHLEKVRSYVDLAIQEGGTLLTGGDTPNIDSQFRGGNWITPTVVEGLSPNSRCSTEEIFGPVVTLHPFSTDEEAIAISNGTKYGLAGSVWTGDSARGTEIAKQMDTGMVWVNTWLHRDLRVPFGGVKDSGLGREGGKWSLGFYSEASNICIMDD

SEQ ID NO: 78313 - protein, 159 aa, Unknown
  Bacterial polypetide isolated from the Sargasso Sea
GVEEGATLVCDGRGIKVEGHENGFYVGPTLFDRVTPSMRIYREEIFGPVLAVVRVKSFDEALQLINDHEYGNGTSIFTRDGDTARQFEENVKVGMVGVNVPIPVPMAFHCFGGWKRSVFGPLNMHGPDGVRFFTRMKTVTRRWPTGIRAGAEFAMPTMK

SEQ ID NO: 78314 - protein, 192 aa, Unknown
  Bacterial polypetide isolated from the Sargasso Sea
GFNSLIDLVVFGRAAAKRASEIVKPGTAHEEIPQSETDKCLDRFEKLRNGNGSNRTADLRLSMQKTMQSKCAVFRTEKTLKEGIEEIRKPYEGIESISVKDKSLIFNTDLVETLEFDNLIRQAIVTIDSAYERKESRGAHAREDHPKRDDNNFMKHTLSWCEGSKTKIAYRDVHRSTLSNDVQYFPPQERVY

SEQ ID NO: 78315 - protein, 184 aa, Unknown
  Bacterial polypetide isolated from the Sargasso Sea
MDKSSEMGPLVTKEHLARVKGYVDLGVKEGAKLVVDGRDINLQGYENGYYIGGCLFDYVKKDMRIYREEIFGPVLSVVRVKNFDEALQLINEHEFGNGTSIYTRDGDVGRTFANKIKVGMVGINIPIPVPVAYHSFGGWKRSLFGDQHMHGPEGVRFYTKLKTITSRWPSGVRSNPEFVMPVMK

SEQ ID NO: 78316 - protein, 156 aa, Unknown
  Bacterial polypetide isolated from the Sargasso Sea
EGAELVIDGRNFNLQGYENGYFVGGSFFDNVSTDMSIYKEEIFGPVMSMVRSKSLTEALEMVNRHEFGNGTAIFTSDGGVARKFSNECQIGMVGVNVPIPVPVAYHSFGGWKRSVFGGHGVYGMEAVRFYTRLKTVTGRWPIGKSLGAQYTFPSNN

SEQ ID NO: 78317 - protein, 176 aa, Unknown
  Bacterial polypetide isolated from the Sargasso Sea
MSKVILITGASSGIGEEAAKSLAKAGHTVILGARRFDRLQALAKTIEASGGTARAHALDVTSRSNFKTVVDATVEEFGHIDVLVNNAGLMPLSPISAAKVDEWDRMIDVNVKGVLYGIESVQPLMEAREQGHIINIASIAAHSVFPTSAVYCATKYAVWALSTGLRMESKNLRVTT

SEQ ID NO: 78318 - protein, 163 aa, Unknown
  Bacterial polypetide isolated from the Sargasso Sea
MYLKKINLKNKTAVVTGAGKGIGKACAIALAEAGADLIIISRTQKDLDKVSKIIKKYKSKCISYTCDITNYAQIKNIINKQRKIDILVNNAGTNIPEHFTKVQKKNMEYLVRLNTISTFNVAQLCTLKMLEMKNRKKIGGSIINMSSQMGHVGGPIRSVYNMT

SEQ ID NO: 78319 - protein, 104 aa, Unknown
  Bacterial polypetide isolated from the Sargasso Sea
EIWLESSDISVTDQSLVWNTDLLETLEYENLIAQAVVTMNSAHNRKESRGAHAREDYKERDDKNWMVHTLAWTNDKECNLDYRSVHEYTLSNEVKYIEPKARVY

SEQ ID NO: 78320 - protein, 254 aa, Unknown
  Bacterial polypetide isolated from the Sargasso Sea
MSTNKPQPLAVITGGASGIGLGAVKRFLKEGYEVLSIDANKEAGDKSINDLKSDTYKLNFTHCDITNHSQIESIFNALLEEKRPAQVLINCAGISPALNPLHEYSVDEWLRTIDINLHGTFYACREFLKLATAVNIEEGSIVNVASIMGTRASAAQASYGASKHAVVGLTKSIAQDYATMNIRANAIGPGVIDTPMNTELMKDENVMQYLLQRVPMKRVASADEVANLIYFLASSEASYITGSYYPIDGGYLAS

SEQ ID NO: 78321 - protein, 262 aa, Unknown
  Bacterial polypetide isolated from the Sargasso Sea
TAKNRFYQVPHCNGMGYLRPNTLAKMREIKAEGGWAVVCTEEVEIHANSDNGSAAEGRLWDDGDIPALAKMTEAVHKHDALAGIELVHGGYSNANNYSRIPPIAPSNISVNSYDPVQARAMTKKDIREFRKWHQKAVSRSMEAGFDIIYVYAGHNLTLLMHFISRRFNHRTDEYGGSLENRVRLFREVLEETKELVGNKCAVAVRFAVDELLGNKGITCQKEGREVIEMLAEIPDLWDVNISEWDNDSATSRLKKRVTKNLI

SEQ ID NO: 78322 - protein, 286 aa, Unknown
  Bacterial polypetide isolated from the Sargasso Sea
QVFRFAIPTIMAGNGAILKHASNVQGCGFAIESCFKRAGFPENIFRNVSVPGKDVEHIIKDSRVAAVTITGSTPVGRSVAKVAGQYLKKTVLELGGSDPYIILEDADIDKAVNACINGRILNAGQSCISAKRIIATKFVYQSILDRFREILPKKIMGDPRDNVDIGPMVSLSARDEVHMQVTNSINSGASLILGGFIPKLKGAFYPITLLAGVKPGMVAFDEEIFGPVLSLIMAENEEDAIALANNTPFGLGAAIFTKDIEKGEIIAKTRINAGACFVNDFVKSDP

SEQ ID NO: 78323 - protein, 105 aa, Unknown
  Bacterial polypetide isolated from the Sargasso Sea
MYLNKINLKNKTALVTGAGKGIGKACAIALAEAGADLIIVSRTQKDLDAVSKIIKKFKSKCAAYICDVTNYNQIKNIIGKQKRIDILVNNAGNNIPEHFTKVKKE

SEQ ID NO: 78324 - protein, 176 aa, Unknown
  Bacterial polypetide isolated from the Sargasso Sea
QRAAEIVKPGMKHEEISQSETDKCLERFDRLRNSQGSNPTADLRLSMQKTMQSKCAVFRTEKTLREGVDDIRKPFEGMENISIKDKSLIFNTDLVETLEFDNLIRQAITTMDSAYHRKESRGAHAREDYPKRNDEKFMQHTLSWCNGSETKINYRPVHRSTLSNDVQYFPPQERVY

SEQ ID NO: 78325 - protein, 241 aa, Unknown
  Bacterial polypetide isolated from the Sargasso Sea
MPDADLDQVVDGLIGAGYGSAGERCMALSVAVAVGDVGDKLIEKLTPRVQGLKVGPGTDPEVEMGPLISDVHLSKVKSYVDSGVAEGADLIVDGRSISLQGYENGYFIGGCLFDHVKEDMQIYREEIFGPVLSVVRQPTFDDALKMVNDHEFGNGTTIYTRDGDTARAFANQCKIGMVGVNVPIPVPMAFHSFGGWKRSLFGDHAMHGMDGVRFFTRLKTVTSRWPTGIRKGAEFTIPTMK

SEQ ID NO: 78326 - protein, 252 aa, Unknown
  Bacterial polypetide isolated from the Sargasso Sea
QVRLSPVPESVMSAVCYFPDLDSAVKTAQEVIQYGVPIARIEMLNKDQMEISIKYSKLDNIKASPTLFFEFHGSETSNNEAISIVEELSKNNNGSDFQWASSPEEQKKLWKARHDVYYSVKALGNNMKIYSTDVCVPISRLVECISWAENEVKKLGLTAPMVGHVGDGNFHSIILYDPQDKEKQKKIRQYSDDLINKALELEGTITGEHGIGLQKKHYLLKEHLDNLPVMKAIKRSLDVNNIMNPGKVFDLN

SEQ ID NO: 78327 - protein, 167 aa, Unknown
  Bacterial polypetide isolated from the Sargasso Sea
GTPHEEISQSETDKCLERFDRLRNASGTNNTADLRLAMQKTMQSKCAVFRTEKTLKEGVNEIRKPFEGMDDLSVKDKSLIFNTDLVETLEFDNLIRQAITTMDSAYHRKESRGAHAREDFPKRNDEKFMQHTLSWCDGKKTKIDYRPVHRSTLSNDVQYFPPQERVY

SEQ ID NO: 78328 - protein, 288 aa, Unknown
  Bacterial polypetide isolated from the Sargasso Sea
YYLQVLLNKEVKKITDESVANAEKILNRAKATTEVGTTAKTVEAEATASFAREKQKQKSAEIDIERALFNLAMILQLKDFQNFDVQEFPLPDMLSTPLNSTDSFIEKAYDNQPQIKAAETRILSAQKQVEITKTQFLPTVTASAGISSFYYNNLTTDITGANTTTGQIFYENNFAKQYKDNFGQNLGLSVNIPIFNKGNTKLQVEQAKISENIAKNTLDQQKQSVRQDVQKAYFDANANYENFMAAVEAEKSTKLALEFAEKSYEAGRSTIYDLNNARNNYVNAQSTV

SEQ ID NO: 78329 - protein, 291 aa, Unknown
  Bacterial polypetide isolated from the Sargasso Sea
AEMIDEAGFPPGVFNLVNGDGAGVGTNISGHPDIDMISFTGSTRAGKLISKNAADTIKRVCLELGGKGGNIVFADSYPQAVRDGIRNVMSNSGQSCDAPTRMLVEKSIYERAIKEAADEANKIKVDFASKKGDHIGPVVSKAQYDKIINLIKSGIDEGATLATGGPELPNNLNKGYFIKPTIFTNVTNNMQIAKKEIFGPVLSIISFETEEEAIKITNDTEYGLGNYLQTEDKEKAKRVAKKLRSGIVYINGKAADSGTPFGGYRQSGNGREGGTWGLEEYLEVKTITGWE

SEQ ID NO: 78330 - protein, 260 aa, Unknown
  Bacterial polypetide isolated from the Sargasso Sea
MSELKKYKMFINGEWVDSESKKTFETLNPENNKPWAIVPEASAKDVDKAVKSAQRAFEGEWPKLLPRERAKYLRAIGNKLRENAELLGKVETFDTGKLYRETHKQAHYIAEYYDYYAGLADKVEGTVLPIDKPNIQAITTRIPIGVIAAIVPWNSQMFLTATKLAPALAMGNTVVIKASELAPATMFEFAKLVEETGIPKGVVNVITGFGEPCGKALTSHNLIEKIAFTGGPETARHIIRNSAENLSEVSLELGGKSPVA

SEQ ID NO: 78331 - protein, 166 aa, Unknown
  Bacterial polypetide isolated from the Sargasso Sea
TPHEEISNSETDKCIDRFEKLRNGNGTNRTADLRLAMQKTMQSKCAVFRTEKTLKEGVEEIRKPFEGMDSISVKDKSLIFNTDLVETLEFDNLIRQAIVTLDSAYERKESRGAHAREDHPKRDDNNFMKHTLSWCKGSETKISYRDVHRSTLSNDVQYFPPQERVY

SEQ ID NO: 78332 - protein, 183 aa, Unknown
  Bacterial polypetide isolated from the Sargasso Sea
MSGIIKLGVIGDPINHSLSPNIHKLFAERANIEIEYLAYRVASSNLENFIKSFFKDGGTGLNVTLPHKVDCLNSVDEFSLIVKKIGAANTLRREKGTNKIFADSTDGMGLIKGLHGAKINEIKSDILIIGAGGAAQSIIHNLQDRHPRVIVIANRTKEKIKPVISRFPPLDYDDLYPNTQVVI

SEQ ID NO: 78333 - protein, 273 aa, Unknown
  Bacterial polypetide isolated from the Sargasso Sea
YELGKKLNWNATMDLDWSKDHHPHTEWPTNPEFQQLAGFKPYDDLSEEEKIECAWHLLASGLSQIVHGEQGAMLVASQLVSCAPTYNAKLYAASQTFDEARHVEVFHKYLRERIGMTYPVMPGLKLLLDKILTDPRWDLKFIGMQIIIEGLALAAFERQRIAAMDPLLKDIFYLVIRDEARHVTFGVNYLEEFVQTLSEKEREDRAEFAYEACVVMRNRFGSNNVMNHYGWDVEEAQEVLNQSESAKLFNNLLFSKIMPNLKRIGLLTEKTQE

SEQ ID NO: 78334 - protein, 189 aa, Unknown
  Bacterial polypetide isolated from the Sargasso Sea
SLIDLVVFGRAAAKRAVEIIKPGTPHEEVSNLETDKCLERFDKIRNSSGSTRTSELRLQMQKTMQSKCAVFRTEKTLKEGVEQIRKPYEGMNDISVKDKSLLFNTDLVETLEFDNLISQALTTMDSAYNRKESRGAHAREDFTKRDDKNFMKHTLAWQSGKKVEIKYRDVHSRTLTNDVQYFPPKERVY

SEQ ID NO: 78335 - protein, 257 aa, Unknown
  Bacterial polypetide isolated from the Sargasso Sea
MVIHVGKALTTHKDVERIAFTGGPETARHIIKNSAENLSQVSLELGGKSPVAVFEDADQENALNGITAGIFGASGQSCIAGSRLYLHKNIYNNFLDKLVKRADKIKLGDPMNPDTQMGPLSSLKQLEIIEKNIKKTIDQGGKIRCGGKRHSLSNKGYYFPATIIECENHNLPTAENELFGPVLSVMKFETENEVINKMNDNQYGLSSGVYTKDLGRGLRVSKAIRAGITFVNTYRLISPSAPFGGMKDSGYGKEAGI

SEQ ID NO: 78336 - protein, 258 aa, Unknown
  Bacterial polypetide isolated from the Sargasso Sea
KVKTSNVLSEEEFENVVGRISFFVNSGIKFITEMCKMRAFVSLWNEITKERYSVKDPKNRRFRYGMQVNSLGLTEQQPENNVYRILIEMLGVVLSKDARARAVQLPAWNEAMGLPRPWDQQWSLRLQQIVAYETDLLHFDDIFNGSEVIDEKVRDLKETAMKEFNHIQSIGGAVAAVESGYLKQELVNSQKERLKRINDKEQIVVGVNEYIETEESPLVSNDGGIETIDPKIENEQVKAVIDWRQNRDQKQVDNALNH

SEQ ID NO: 78337 - protein, 305 aa, Unknown
  Bacterial polypetide isolated from the Sargasso Sea
DVDRAVKAAQKAFEGEWSRLLPRERGNYLRAISNKLRENAELLGKIETIDTGKLFRETNKQANYIAEYYDYYAGLADKVEGTVLPIDKPNIQAITTRIPIGVIAAIIPWNSQMLLTVTKLAPALAMGNTVVIKSSELAPAVMFEFAKLIEETEIPKGVVNVITGFGDPCGKALTTHNLVEKVAFTGGPETARHIIRNSAENLSEVSLELGGKSPVAVFDDAHQENAINGITAGIFGASGQSCIAGSRLYLQDGIYNEFLDKLSARAEKIKIGAPMDPESEMGPLSNFKQLEIIEKNIKLTVESGG

SEQ ID NO: 78338 - protein, 232 aa, Unknown
  Bacterial polypetide isolated from the Sargasso Sea
MTDKMLKFVKIGQQTPPKRDVVSRKEDFKEIYDEFINQKAQEQSSRCSQCGVPFCQIHCPLSNNIPDWLKLTAEGRLKEAYELSQSTNNMPEVCGRICPQDRLCEGNCVIEQSGHGTVTIGSMEKYITDNAWEQGWVKPIEVKYERDQSVGIIGAGPAGLAAAEQLRKDGYRITVYDRYDRAGGLLIYGIPNFKLEKHVVERRTKLLKDGGIEFIQNFEIGKDATLGQLRKK

SEQ ID NO: 78339 - protein, 287 aa, Unknown
  Bacterial polypetide isolated from the Sargasso Sea
SIGFDFGDLEDIKELENNMKDFHNNEFKACSIINGLDVAEEYEIKKAPFDNKKHIGKVSYVSKDKLENIELNESWTELNLEERIKVLNKVAADIQNNRDKFFYLLANEAGKTLKDCDAEVRESIDFINYYCHQAKELFTKEELEGPTGEKNYLMHAPKGKFLCISPWNFPMAIFVGQISAALVTGNSVIAKPAEDTSIIAYEIIKLFHEAGVPGSALQLIIGGREIGNELTKNDQLNGVAFTGSSEAAKKINVNLANSDGPIKTLIAETGGQNVMFVDSSSLKETSY

SEQ ID NO: 78340 - protein, 167 aa, Unknown
  Bacterial polypetide isolated from the Sargasso Sea
RNIPPLPKNATEQIISRFDGLRYADGSESTASLRLEMQRVMQNHAAVFRTGDVLEEGKQKIREIYNKFNHVKVADRSMIWNTDLVETLELANLLGSSLTSMDAAANRTESRGAHAREDFPDRDDENWMKHTLTWVDEQGEVSFDYRPVHLYTLTDEVEVIPPKARVY

SEQ ID NO: 78341 - protein, 171 aa, Unknown
  Bacterial polypetide isolated from the Sargasso Sea
TKPNSAKFNIHQRHTEEILNRFDLIRHNKGEIFSGEARNEMQKIMQKKCAVFRTEDLIKSGIKEFETVERKMENIQVKDQSLIFNTDLVETLELHNLMEQSKATLYSALNRKESRGAHAREDYPERDDKNWLVHSLVWLDKEGNIKLDKKPVNLNTLTNHVQPIPPKKRVY

SEQ ID NO: 78342 - protein, 164 aa, Unknown
  Bacterial polypetide isolated from the Sargasso Sea
MIQDKVVVITGASSGIGYSTAKELAKKGAKIVAGARRLDRLETLQKEITDDGGEIVICETDVTKKTDCDNLVKQALDKFGTVDVLVNNAGLMPLSFVKSLKIDEWDRMIDVNIKGVLYCTAAVIPTMTEKKSGHIINISSVAGRIVFPAGSVYCATKHAVTAFS

SEQ ID NO: 78343 - protein, 161 aa, Unknown
  Bacterial polypetide isolated from the Sargasso Sea
DLGVKEGANLVVDGRNIKLQGYENGFYIGGCLFDNVKKNMRIYKEEIFGPVLSVVRAKDFNEATQLINDHEFGNGTSIYTRDGDVGRTFASKIKVGMVGINIPIPVPVAFHSFGGWKRSLFGDQHMHGPEGVRFYTKLKTITSRWPSGVRSNPEFVMPTMK

SEQ ID NO: 78344 - protein, 277 aa, Unknown
  Bacterial polypetide isolated from the Sargasso Sea
MNNVTLLAVPLFIFMGTILEKSGIAANMLKNMALAFRSVKGGLSISIIVVGALLAASTGIVGATVVTMGLMSLPILINQGYDKSFSAGLVASTGTLGQIIPPSIALVLLGDVMSNAYQRAQNDMGIFSQQTVTVGDLFIGSIVPGALICIGYLIYTIYKNQTNQNINDHAIDSKINIINLFKTLALPFLLIFLVLGSIFAGIATPTEAAAIGAFGALIIALVNGKITFAFIKESSEKTAIVSTMIFTILIGASIFSLIFRGVGGDELINLIFGSIPG

SEQ ID NO: 78345 - protein, 312 aa, Unknown
  Bacterial polypetide isolated from the Sargasso Sea
SLPEVCGRVCPQDRLCEGACTLNDGFGAVTIGSIEKYITDKAFEMGWRPDLSNRSWSGKKVAIIGAGPAGLSCADVLTRAGVKSHVFDKHEEIGGLLTFGIPEFKLEKSVVKKRRMVLEEMGVKFFLGKEIGTDIRFKDIYKDYDAVFLGMGTYTSLEGGFKGEKLLNVHKAIDYLVESNKKLLGINQKKDSFIDLKGKDVVILGGGDTAMDCNRTAIRQGAKSVTCIYRRDEDNMPGSRKEVINAKEEGVNFVFNSQPIEILGNDKVEAIKTISTRLADPDHNGRRVPIPITNSEKIFNADAVIVAFGFRA

SEQ ID NO: 78346 - protein, 224 aa, Unknown
  Bacterial polypetide isolated from the Sargasso Sea
MFEPPHEQLDAWKNLSDEEKIEFDRHETAELLCQFLHGEQGALLVASQIASCAPTYNAKLYAASQTFDEARHVEVFNRYLQEKIGFHYPVNANLKALLDKILTDERWDLKFIGMQVIIEGLALAAFTNLKLDTNCVLLKQLLHYVIRDEARHVTFGINYLEEYIKTLSPEEVEDRAQFAYEACVISRDRIINTTAMQKFLKMSPEEARQFTLESGAMETFRNFL

SEQ ID NO: 78347 - protein, 300 aa, Unknown
  Bacterial polypetide isolated from the Sargasso Sea
VFNIVNGDKEVVDAILENKDIPAVSFVGSTPIAKYIYENAAKNEKRVQALGGAKNHCVVMPDCDLDQAVNGLMGAAYGSAGERCMAQSVAVAVGNIGDDLVNQMSKKVEALKVGPGMDKSSEMGPLVTKEHLERVKGYVDLGVKEGAKLVVDGRDINLQGYENGYYIGGCLFDHVKKDMRIYKEEIFGPVLSVVRVKNFDEALQLINDHEFGNGTSIYTRDGDVGRTFANKIKVGMVGINIPIPVPVAYHSFGGWKRSLFGDQHMHGPEGVRFYTKLKTITSRWPSGVRSNPEFVMPVMK

SEQ ID NO: 78348 - protein, 233 aa, Unknown
  Bacterial polypetide isolated from the Sargasso Sea
TGYEVAILTVDVPVLSRRTRDDKNGFSYPFKIGPKQFFDFATHPTWSLSTLLSGIPKPMNYVTSKSGDGIFKRKESRGSTDWDTLKRVRDKWKGKLIIKGVMSPDDATKIKGAGADAIQVSNHGGRQLDSATAAINMLPLIRKSVGSDFPLIFDSGIRSGSDIVRALAFGADYTMIGRPLMYAMGADGKKGLRRIVEIIKEEASTTLGLVGLNDINDVTSNIVIDNTLNKVNY

SEQ ID NO: 78349 - protein, 219 aa, Unknown
  Bacterial polypetide isolated from the Sargasso Sea
MKSPAYNEWAREMTKAEMDEVSDAFAQTAISSKAAGFDGVELHYSHGYLHQQFLSFVYNKRTDEYGGSLDNIVRFPIETLERVRAAVGPDFVIGIRVSMDECTVDGMHADDAIEMTKRMVATGLVDYVSATAGTYAAHADQIPPGDYEENWLVADGARMRKAIREVRDIPMFIVGHIVDADKAEALVASGATDMVAMTRTQIADPHFANKLREGREDEI

SEQ ID NO: 78350 - protein, 124 aa, Unknown
  Bacterial polypetide isolated from the Sargasso Sea
KDMRIYKEEIFGPVLSIVRVKNFDEALQLINDHEFGNGTSIYTRDGDVGRTFANKIKVGMVGINIPIPVPVAYHSFGGWKRSLFGDQHMHGPEGVRFYTKLKTITSRWPSGVRSNPEFVMPVMK

SEQ ID NO: 78351 - protein, 248 aa, Unknown
  Bacterial polypetide isolated from the Sargasso Sea
NVKYFDLINKKVFISGGADGIGSSIVENFCEQGAEVIFVDINMIKANELIKNIKNKKFNLPKFFKCNVLDIKKLQNIIHKNGPFDVLVNNAGNDQRHSIHEITEKYYKNRFDTNLKHYFFSAKAAKKGMIKNNGGSIINLSSICWIRGAPGFILYSSAKSAIFGLTRSLAKELGKYNIRVNSISPGSIATERQVKLWLKPKLKKEIKSLQSLNKQLMPKDVSNMVLYLASDVSSGCTKQNFIVDAGIT

SEQ ID NO: 78352 - protein, 34 aa, Unknown
  Bacterial polypetide isolated from the Sargasso Sea
RIDVLVNNAGGVLGTGRKASRSGFSFGVGSDRSC

SEQ ID NO: 78353 - protein, 91 aa, Unknown
  Bacterial polypetide isolated from the Sargasso Sea
FADTCSKFLTSHPKINKIAFTGGVHTAKHIVRNSAENLSQISLELGGKSPVVVFKDARKDNAINGIMASIFGASGQSCIARFQTLFARRYL

SEQ ID NO: 78354 - protein, 282 aa, Unknown
  Bacterial polypetide isolated from the Sargasso Sea
PCGKSLTTHNLVEKVAFTGGPETARHIIRNSAENLSEVSLELGGKSPVAVFDDAEQENAINGITAGIFGASGQSCIAGSRLYLQKGIYDEFLNKLSNRASKIKIGAPMDPETEMGPLSNFKQLEVIEKNIKDTINQGGKIKCGGERHSFSNKGYYFPPTIIECDNHNLPVAENELFGPVLSVMKFDTEEEVISKMNDNQYGLSSGVYTSNLSRGMRVSKAIRAGITFVNTYRLISPSAPFGGIKDSGYGKEAGIDSIKDYTRVKTTWFYTSDEPSLDPFSIR

SEQ ID NO: 78355 - protein, 78 aa, Unknown
  Bacterial polypetide isolated from the Sargasso Sea
EYKNLIEQAVVTMNSALNRKESRGAHAREDYKERDDKNWMKHTLSWLDDKSCKIDYRSVHEYTLSNEVKYIEPKARVY

SEQ ID NO: 78356 - protein, 173 aa, Unknown
  Bacterial polypetide isolated from the Sargasso Sea
MSKHPLQYLELPRKDPEKDIPEVRIKHYDEIYASYDGAEAASQAGRCISCGIPYCEWKCPVHNYIPNWLELIEEGKLFEAAELSHQTNSLPEICGRVCPQDRLCEDACTLNNGVGAVSIGNIEKYITDEAIKQGWRPNMEHVKDTGKKVAIIGAGPAGLSAADVLARAGIRPV

SEQ ID NO: 78357 - protein, 175 aa, Unknown
  Bacterial polypetide isolated from the Sargasso Sea
MNYVTSKSGDGIFKRKESRGSTDWDTLKRVRDKWKGKLIIKGVMSPDDAVKIKEAGADAIQVSNHGGRQLDSATAAINMLPLIRKSVGNDFPLIFDSGIRSGSDIVRALAFGADYAMIGRPVMYAMGADGRKGLRRIVEIIKEEASTTLGLVGLNDINDVTSNIVIDSTVNKVNY

SEQ ID NO: 78358 - protein, 196 aa, Unknown
  Bacterial polypetide isolated from the Sargasso Sea
AKKVETLKVGPGLDKKSEMGPLVTKEHLDKVKGYVDLGIKEGAKLVVDGRNLKLQGYEKGFYMGGCLFDNVKKDMRIYKEEIFGPVLSVVRANDYKEALSLVNDHEFGNGVSIFTRDGDTGRSFSSNAKIGMVGINIPIPVPMAFHSFGGWKRSLFGDQHIHGPEGVRFYTKLKTITSRWPSGIKSDPEFVMPTMK

SEQ ID NO: 78359 - protein, 173 aa, Unknown
  Bacterial polypetide isolated from the Sargasso Sea
MYLQKINLKNKYALVTGAGKGLGRACSIALAEAGATVIALSRTSSDLNKLEKDIKKVKGKIIKVSCDVMNYDDLKQKLDKIKIIDVLVNNAGTNIPEPFEKIKQKSMNYLVDLNLKAAFNVAQLVVKKMLKNKKRSGSIINMSSQLGHVGMGGRNVYNMTKFGIEGVNQKGWV

SEQ ID NO: 78360 - protein, 296 aa, Unknown
  Bacterial polypetide isolated from the Sargasso Sea
MFEPPHEQLDAWKNLSDEEKIEFDRHETAELLCQFLHGEQGALLVASQIASCAPTYNAKLYAASQTFDEARHVEVFNRYLQEKIGFHYPVNANLKALLDKILTDERWDLKFIGMQVIIEGLALAAFTNLKLDTNCVLLKQLLHYVIRDEARHVTFGINYLEEYIKTLSPEEVEDRAQFAYEACVISRDRIINTTAMQKFLKMSPEEARQFTLESGAMETFRNFLFSRVMPNLSKIGLLTDSIRPKYEELGLLEYENAPSDFEIDWAEITKPLESSEQIVKESNEQAKAVAEMLKQA

SEQ ID NO: 78361 - protein, 188 aa, Unknown
  Bacterial polypetide isolated from the Sargasso Sea
MKIYFLGISGTFMGNLAQIAKAMGHEVFGCDSKVYPPMSDELRKSGINFFQGYEEKNVVDADIYVIGNAISKENNLLREILKLEKKIISGPKWLYENILSNKKVIAVSGTHGKTTVTSMIAHALVNNNFDPNFLIAGIPKKLKKSWNISNDEVFVIEADEYDTCYFDKRPKFFHYRPNILLINNIEFD

SEQ ID NO: 78362 - protein, 180 aa, Unknown
  Bacterial polypetide isolated from the Sargasso Sea
MLKSSAKKEYREKIKQYKKYNKKYFEDSAPIVSDQDFDLLKREILDLEKKFDFQDKDSPSRTLGFSPSKNFEKYPHRVKMLSLANAFNEEDLINFEKKIVNFLNLQKNFEFEYSAEPKIDGISASLTYKSGKLVRGLSRGNGEEGEDITLNLKTISDIPLFIKQKDFPEDIDIRGEVFIK

SEQ ID NO: 78363 - protein, 284 aa, Unknown
  Bacterial polypetide isolated from the Sargasso Sea
MFPMAIACGNTFILKPSEKDPSCSMRLAELFKEAGLPDGVLNVVNGDKEVVDAILENKDISAVSFVGSTPIAKYIYENAAKNEKRVQALGGAKNHCVVMPDCDLDQAVNGLMGAAYGSAGERCMAQSVAVAVGNIGDKLVEQLSKKVEALKIGPGMDKTSEMGPLITKEHLEKVKGYVDFGVKEGAKLVVDGRNIKLQGYEDGYYIGGCLFDEVKKNMRIYKEEIFGPVLSVVRVKDFNEALKLINDHEFGNGTSIYTRDGDVGRTFCTQIKVGMVGIYIPIPS

SEQ ID NO: 78364 - protein, 154 aa, Unknown
  Bacterial polypetide isolated from the Sargasso Sea
AKLVLDGRNLKLQGYENGFYIGGCLFDHVTADMRIYKEEIFGPVLSVVRVKTFEEATKMINDHEYGNGVSIYTRDGDAGRTFASKIQVGMVGINVPIPVPMAFHSFGGWKRSLFGDSGTHGMEGVKFYTKLKTITSRWPSGIRSNPEFIMPTMK

SEQ ID NO: 78365 - protein, 195 aa, Unknown
  Bacterial polypetide isolated from the Sargasso Sea
KKAEALKIGPGMDKSSDMGPLVTKEHLEKVKGYVDLGVKEGAKLVLDGRNLKLQGYENGFYIGGCLFDHVTTDMRIYKEEIFGPVLSVVRVKTFEEATKMINEHEYGNGVSIYTRDGDAGRTFASKIQVGMVGINVPIPVPMAFHSFGGWKRSLFGDSGTHGMEGVKFYTKLKTITSRWPSGIRSNPEFIMPTMK

SEQ ID NO: 78366 - protein, 263 aa, Unknown
  Bacterial polypetide isolated from the Sargasso Sea
MFKKIILITLLFGIVFSQEKQKVVLITGTALGIGKSTAEYLIDKGHIVYGGDILIEENLYLNDIGGTALEMDVTNQNHIDNAVTQIISEHGRIDVLVNNAGLGVYGAIEDVSMEDIYYQYDVNLFGLARVTKAVLPYMRDKESGLIINISSVLGETYGPLAGWYLSTKHALEGWSDALRVELKKFSIDVVIVQPGAINTNFSNVTKTYIDKYRENSPYQHLYGEPITDTGNDVLSNQSDPIVIAKVINKAIDARNPKTRYAAG

SEQ ID NO: 78367 - protein, 198 aa, Unknown
  Bacterial polypetide isolated from the Sargasso Sea
CSSTSRVLVNKKVKDEFLKSLVKKAKSIPIGLPWIETNEIGPIVSKNQFEGVMSYIKSGIDQGAKLLLGGDQNKSGDLKNGFFVNATIFCDVKPDMKIAKEEIFGPVISVIDWDDYDEMVKIANSTQYGLTTMIVTNSLSNAMKTAEDAEVGYVWVNTAGRYSGAPYGGWKLSGIGVEECFDEMKSYARLKNINMKWN

SEQ ID NO: 78368 - protein, 119 aa, Unknown
  Bacterial polypetide isolated from the Sargasso Sea
YFGVYRNEKLMKEGISKLEEITNRTKKIHLMDKSNQFNSERVEVLEYLNLLDIANATAYSALERKESRGAHAREDFPERDDQNWLCHSLFFKEKNVVSKREVNLSPKTMDAFKPKARVY

SEQ ID NO: 78369 - protein, 290 aa, Unknown
  Bacterial polypetide isolated from the Sargasso Sea
MSQTVRSPHGVVGLIVPANTPIANIAWKIFPALICGNTIVLKSSEDSPSIANMIAKITKEAELPDGVLNVIQGDGESGTALVENENVSLISFTGSTSVGKLIAQNAGKRLARVSLELGGKNSFVVCDDADINHAVNWAALSVFSNAGQRCAATSRILVFESIYEDFASKLVDKAKSLKLGVSDESDLGPVVNRRQYENILKAIDEAKERGGKILCGGNCNDDSLKDGYYISPTLISNLPHNDDLNRKEIFGPVATIQIISDLEEALKIANDSKYGLTAAIHTQNINRALW

SEQ ID NO: 78370 - protein, 284 aa, Unknown
  Bacterial polypetide isolated from the Sargasso Sea
TNKDISAVSFVGSTPIAKYIYENCAKNEKRVQALGGAKNHCVVMPDCDLEQAVNGLMGAAYGSAGERCMAQSVAVAVGKIADPLVESLSKKVESLKVGPGLDKKSQMGPLVTKEHLEKVKGYVDIGVKEGAKLVVDGRNLKLQGYENGFYMGGCLFDNVKKDMRIYKEEIFGPVLSVVRAKDYSEALSLVNDHEFGNGTSIFTRDGDTGRSFASNVKIGMVGINIPIPVPMAFHSFGGWKRSLFGDQSIHGPEGVRFYTKLKTVTSRWPSGIKSDPEFVMPTMK

SEQ ID NO: 78371 - protein, 211 aa, Unknown
  Bacterial polypetide isolated from the Sargasso Sea
AVAVGDIGDELVLRLSKKAEALKIGPGMDKSSEMGPLVTKEHLEKVKGYVDLGVKEGAKLVLDGRNLKLQGYENGFYIGGCLFDHVTTDMRIYKEEIFGPVLSVVRVKTFEEATKMINEHEYGNGVSIYTRDGDAGRTFASKIQVGMVGINVPIPVPMAFHSFGGWKRSLFGDSGTHGMEGVKFYTKLKTITSRWPSGIRSNPEFIMPTMK

SEQ ID NO: 78372 - protein, 203 aa, Unknown
  Bacterial polypetide isolated from the Sargasso Sea
TTSFFAQAIHNAEVPKGLINIVTGYGSEAGAALTAHPDVAQITFTGSVKTGKAILHAAAERAVPAVVELGGKSAAVVLPDADIDKVVNATKVGIFSQAGQICSAMSRMIVHKSIKDEVLEKLSKLAASIKVGPGDEEGVDLTPVISEEQLQKVENYARSGLQAGAKAVSGGNRVDRKGFFFEPTIYSDVKPDMTIAQEEIFGP

SEQ ID NO: 78373 - protein, 126 aa, Unknown
  Bacterial polypetide isolated from the Sargasso Sea
HVNSKMKIYKEEIFGPVLSVVRAKNYEEALNLVNNHQFGNGTSIYTSDGEISRHFTTNAKIGMVGVNVPIPVPMAFHSFGGWKDSLFGDHSMHGMEGINFFTKLKTITSRWPKSIKSGPEFVIPTN

SEQ ID NO: 78374 - protein, 274 aa, Unknown
  Bacterial polypetide isolated from the Sargasso Sea
PVPPMFAPLQLRGMRLSNRVVVSPMCQYCATDGNPDDWHFSHYTSRAMGGAGLVFTEMTCVSPDARITPGCVGIWTDEQEAEWKRIVDFAHQRTDAKMAMQIGHAGRKGATKLAWEGIDQPLEEGAWEIIAASPLPYLPNSVVPKEMNRDDMDRVKADFVSAFQRAARAGFDMAELHCAHGYVLATFLSPFTNKRTDEYGGSIDNRMRFPLEVFDACRAVWPKERPMSVRISATDWVEGGTTADDAVQFAKAFKAHGCDLINVSTGQTDATERP

SEQ ID NO: 78375 - protein, 183 aa, Unknown
  Bacterial polypetide isolated from the Sargasso Sea
DKSIEMGPLITKEHLKKVKDYVEVGKKEGAKLIVDGSEIKLQGYEQGFFMGGCLFDHVKTNMKIYNEEIFGPVLSIVRVKDFEEAIKIINDHEYGNGVSIFTRDGDAARSFSSRIKVGMVGINIPIPVPMAFHSFGGWKRSLFGDHHMHGMEGIRFYTKLKTITSRWPTGIKDNNNFTMPTMK

SEQ ID NO: 78376 - protein, 203 aa, Unknown
  Bacterial polypetide isolated from the Sargasso Sea
MYDLGLKDKVILITGGSDGLGYASAELLSSEEAHVVICGRRGDYLNEKAKIITEKTGNQVIPIKADVSIAEDCKKLVEETIARFKKIDVLVNNAGASAAAIFEDVTDRNWEDDINLKLMSTIRMCRLAIPYMKSSNGGVIINATIGGGKAPNAGSLPTTVTRAAGINLTKSLANQYAKDQIRDNTICIGLIKSAQWERRADQE

SEQ ID NO: 78377 - protein, 271 aa, Unknown
  Bacterial polypetide isolated from the Sargasso Sea
FLQHKTCSCSSYGETPVVIKSSELAPAVMFEFAKLIEETGIPKGVVNVITGFGDPCGKALTTHDLVEKVAFTGGPETARHIIRNSAENLSEVSLELGGKSPVAVFDDAHQENAINGITAGIFGASGQSCIAGSRLYLQKGIYDEFIDKLIKRAEKIKIGAPMDPETEMGPLSNFKQLEIIEKNIKKTVEQGGKIKCGGKRHPFSNDGYYFPPTIIECDNHNLPTAENELFGPVLSVMKFNDEKEVIEKMNDNQYGLSSGVYTSDFARGLRV

SEQ ID NO: 78378 - protein, 125 aa, Unknown
  Bacterial polypetide isolated from the Sargasso Sea
KKNMRIYKEEIFGPVLSVVRAKNFEEALSLVNDHEFGNGVSIFTRDGDVGRSFSSKAKIGMVGINIPIPVPMAFHSFGGWKRSLFGDQHMHGPEGVRFYTKLKTITSRWPDGLKSDPEFIMPTMK

SEQ ID NO: 78379 - protein, 236 aa, Unknown
  Bacterial polypetide isolated from the Sargasso Sea
TGGPDAARHIIKNSAENLSQVSLELGGKSPVAVFEDADQENALNGITAGIFGASGQSCIAGSRLYLQKNIYNQFLDKLINRANKIKLGSPMDPSTQMGPLNSLKQLEIIEKNIKLTVDQGGKIKCGGKRHTLSNKGYYFPATIIECDNHNLPTAENELFGPVLSVMKFETEKEVINKMNDNQYGLSSGVYTKDLGRGLRVSKAIRAGITFVNTYRLISPSAPFGGMKDSGYGKEAG

SEQ ID NO: 78380 - protein, 205 aa, Unknown
  Bacterial polypetide isolated from the Sargasso Sea
MYLKKINLKNKTALVTGAGKGIGKACAIALAEAGADLIIISRTQKDLDKVSKIIKKFRSKCISYVCDVTNYNHIKNIINKQKKIDILVNNAGTNIPEHFTKVQKKNMEYLVKLNTISTFHLAQLCALKMLEARNRKKTGGSIINMSSQMAHVGGPIRSVYNMTKAGLEGLTKGMAIDLAKNNIRVNTVCPTFVVTPMTKKFLKNK

SEQ ID NO: 78381 - protein, 208 aa, Unknown
  Bacterial polypetide isolated from the Sargasso Sea
IKGIFKPNAGQICVAMSRVIVHPKIKDEYMSKLVSKTKSLKIGGGENPETEVTPLISKDQIQRVSNYVNSGIQSGAKLALGGQKIENEKGNFYEPTIFENVKTDSTIAQEEIFGPVTSVFDFQEPEEAIKIANSTNYGLASGVFTSDDQKAKWSAERIKAGIIWHNDWFVDGVNLPGGGYKKSGYGRDGGIDGIYSHGQTKRISKRLT

SEQ ID NO: 78382 - protein, 249 aa, Unknown
  Bacterial polypetide isolated from the Sargasso Sea
MGRLEGKVALISGGSKNQGAAEAKVFTAEGAKVVFGDIADQEGRIVEAEIHADGGVAHYMHLDVTNAADWQAAVGYACETYGKLDILINNAAILVPRVLVEERTEEEWDRVMAVNTKGVFLGTKTAIPAMRAAGGGSIVNISSIAGIGQALTQEPAYAASKGAIRVFSKVVAAQHAIDNIRCNSVHPGPVDTAMFRAAFPTPEALDRRLSRVPMKRAGTIDEVVQGVLFLASDEASYITGTELVIDGGA

SEQ ID NO: 78383 - protein, 207 aa, Unknown
  Bacterial polypetide isolated from the Sargasso Sea
MEKVAVVTGSSSGIGFETSLALAREGYFTYGTMRDLKKAAEIQKIADEESLSLKVLELDVDNEESTENAINTIVQEKGRIDVLVNNAGWGLWGTAEDVSLEEFRAQFETNFFSVVRMIQKVAPTMRKQGSGNIVNISSVAGRIGFPVSTAYISSKFALEGLSESLRYELGQFGVNVIIIEPGVIKTNFFDSMKTAKKADEGETYRDI

SEQ ID NO: 78384 - protein, 232 aa, Unknown
  Bacterial polypetide isolated from the Sargasso Sea
VNGLMGAAYGSAGERCMAQSVAVAVGDIGDELVSRLSKRVEVLKVGPGMDKNSEMGPLVTKEHLEKVKSYVDLGVKEGANLVVDGRNLKLQGYENGFFIGGCLFDNVKKDMRIYKEEIFGPVLSVVRVKTFEEATKLINEHEYGNGVSIYTRDGDAGRTFASKIQVGMVGVNVPIPVPMAFHSFGGWKRSLFGDSAMHGVEGVRFYTKLKTITSRWPSGIRSNPEFVMPTMK

SEQ ID NO: 78385 - protein, 171 aa, Unknown
  Bacterial polypetide isolated from the Sargasso Sea
EHLAKVKGYVDIGVEEGAKLIVDGRNFKIQGYENGYYIGGCLFDKVTKDMRIYKEEIFGPVLSVVRAKDFNEALQLVNDHEFGNGVSIFTRDGDSGRTFSSKAKIGMVGINIPIPVPMAFHSFGGWKRSLFGDQHMHGPEGVRFYTKLKTITSRWPSGLRSDPEFVMPTMK

SEQ ID NO: 78386 - protein, 258 aa, Unknown
  Bacterial polypetide isolated from the Sargasso Sea
MKKEFKLSGGAKNHCVIMPDCDLEQAVNGLMGAAYGSAGERCMAQSVAVAVGKIADPLVKSLSKKVESLKIGPGLDKKSQMGPLVTKEHLEKVKGYVDVGVKEGAKLVVDGRNLKLQGYENGFYMGGCLFDHVKKDMRIYKEEIFGPVLSVVRAKDYTEALSLVNDHEFGNGTSIFTRDGDTGRSFASNVKIGMVGINIPIPVPMAFHSFGGWKRSLFGDQSIHGPEGVRFYTKLKTITSRWPSGIKSDPEFVMPTMK

SEQ ID NO: 78387 - protein, 293 aa, Unknown
  Bacterial polypetide isolated from the Sargasso Sea
MIFPFGFAPMGMTNLSWPGADSMLAAESARNNIPTCVSMASTTTLEKMYELSEGHSWMQLYIFQDENFVMELLDRAKNTGYEVAILTVDVPVLSRRTRDDKNGFSYPFKIGPKQFFDFATHPTWSLSTLLSGIPKPMNYVTSKSGDGIFKRKESRGSTDWDTLKRVRDKWKGKLIIKGVMSPDDATQIKEAGADAIQVSNHGGRQLDSATAAINMLPLIRKSVGNDFPLIFDSGIRSGSDIVRALAFGADYAMIGRPVMYAMGADGRKGLRRIVEIIKEEASTTLGLVGLNDI

SEQ ID NO: 78388 - protein, 190 aa, Unknown
  Bacterial polypetide isolated from the Sargasso Sea
MLVERSIYERAVKEAADEANKIKVGLASKAGDHIGPVISKIQFDKIQSLIKSGIEEGAKLVAGGPDRPEDFKKGYFIKPTIFTDVDNNMRVAKEEIFGPVLSIIPFETEEEAIQITNDTEYGLGNYLQTSDKEKAKRVSRKLRSGIVYVNNQAADSGTPFGGYRQSGNGREGGSWGLHEYLEVKTITEWQ

SEQ ID NO: 78389 - protein, 231 aa, Unknown
  Bacterial polypetide isolated from the Sargasso Sea
RGARAGKRVQAMGGAKNHGIVMPDADLDQVVTDLVGAAYGSAGERCMALPVVVPVGDETAEKLKAKLVPAIKNIMVSHSEDPNAHYGPVVTAAHKERVESYIDLAIEEGAELVYDGRTSQIPSDSHGYFIGPTFFDHVTKNMRSYQEEIFGPVLQMVRAKDFNEAVNLASDHQYGNGVAMYTRNGHAAREFAQRVNVGMVGINVPIPVPVAYHTMAAGNAQPLAILINTVG

SEQ ID NO: 78390 - protein, 157 aa, Unknown
  Bacterial polypetide isolated from the Sargasso Sea
EKEGAKLLTDGRKFKKQGYENGYFVGPTIFDDVKPNMKIYKEEIFGPVLSMVTTDTYEEALNLVNDHELGNGAAVFTKSGNIAKHFTENAKIGMIGVNVPIPVPVAYHSFGGWKRSLFGDHSMHGPEGVRFYTKLKTATVTWVEDNAGPEFTIPVLS

SEQ ID NO: 78391 - protein, 236 aa, Unknown
  Bacterial polypetide isolated from the Sargasso Sea
MAYTIDLTGKTALVTGGASGIGFAIAEGFQEAGAEVIVTAQSDESLEKCVDKTKFGSLRKLKLDVTNDISIEKTFDEIDELHILVNNAGRIKRGLEYRIEHFADVINTNLMGVMRMSHEALPKLALTHGNIINIASMFSFFGSPMSPGYTASKTGLVGLTKSLANGWSEHHVRVNAIAPGYIKTKLTKALREEDEQREKITERTALKKWGVPEDIAGAAVYLASDRASYTTGTTIT

SEQ ID NO: 78392 - protein, 199 aa, Unknown
  Bacterial polypetide isolated from the Sargasso Sea
KMQKTMKTLKVGAYSESSNDFGPLITKGHRDKVVSYIDSAEEQGASIIVDGRGIEVKGYENGFFIGGTLIDNVTPDMVSYKEEIFGPVLQVIRVKTMQEAMNIINNHEYANGTCIFTRDGEAARYFSDHINVGMVGINIPLPVPVSYHSFGGWKRSLFGDLSAYGPDGVRFYTRRKTITQRWPSDSIREGKQFSMPTMK

SEQ ID NO: 78393 - protein, 210 aa, Unknown
  Bacterial polypetide isolated from the Sargasso Sea
VAIGDIADNLVNQLSKKVEALKIGPGMDKSSEMGPLVTKEHLEKVKGYVDLGVKEGAKLVVDGRNIKLQGYENGFYIGGCLFDNVKKNMRIYKEEIFGPVLSVVRVKDFDEATKLINDHEFGNGTSIYTRDGDVGRTFASKIKVGMVGINIPIPVPVAFHSFGGWKRSLFGDQHMHGIEGVRFYTKLKTITSRWPSGIRSNPEFVMPTMK

SEQ ID NO: 78394 - protein, 68 aa, Unknown
  Bacterial polypetide isolated from the Sargasso Sea
TTMDSAYNRKESRGAHAREDYTKRDDKNYMKHTLAWQKGKQVEIKYRDVHSRTLTNDVQYFPPKERVY

SEQ ID NO: 78395 - protein, 283 aa, Unknown
  Bacterial polypetide isolated from the Sargasso Sea
MQRAADTSAQAYRPQRGQREREEAYWYGEAAEVARRAKTIAARHAAERNIEMTWSRGNAAAVLPKATRKAARGMMRRMHEMRGGSHEGRTWDERDVLPRRGGCSVTASEARRATRGARDAPAGRTDADWRRLVEELEAEAQTETGARAHAAPTPISAAAIAATARAAERAAADARDGGGEAEWDDEDWAMEAMEGPTSDDEACDDAQWRRGGGPRDGDAMEGPTSDDEACDDAQRHRGEVQREHDAEESLARLREFVTSVEADAERAAAIVHELSTHAHLGEI

SEQ ID NO: 78396 - protein, 287 aa, Unknown
  Bacterial polypetide isolated from the Sargasso Sea
HFSEAEKIISSILKKDPKSAESYNALGSIYEKKGDFEKSKKYLNKALELKPDLFAAKLNLIAIKQHYGEIYEAERSLEELLKEKGDSPVLHNNLALIYLTLGKFENGWKKYEYRWKVFPGVRVRWPKSHTELWAGQKDKRIVLWREQGIGDLIIFLGLVPEAFKIAKTLSVYIDPRLTSMCNRSMPGIKFKKYTPGNFDGEVFDYHLPMGSLPLLFRNSEKDFDRVIRGYLKADPKRVELIRDELGLRGKKVVGISWKSFTPLNPQKKSLALMDFSKVFKDLDITLV

SEQ ID NO: 78397 - protein, 242 aa, Unknown
  Bacterial polypetide isolated from the Sargasso Sea
TKNAADTIKRVCLELGGKGGNIVFADSYPNAVRDGIKNVMSNSGQSCDAPTRMLVEKTIYERAIKEAADEANKIKVDIASKPGDHIGPVVSKVQYDKIINLINSGIDEGATLAAGGPDLPNGLNKGYFIKPTIFTNVTNDMEIAKREIFGPVLSIIPFESEEEAVKITNDTEYGLGNYLQTEDKEKAKRVAKKLRSGIVYINGKAADSGTPFGGYRQSGNGREGGVWGLEEYLEIKTVTGWK

SEQ ID NO: 78398 - protein, 260 aa, Unknown
  Bacterial polypetide isolated from the Sargasso Sea
IVENFKKLNNKNLIWKKPSKVSDDILLTTHENNYLNLVKSSFPKKGFSSLDGDTIISPGSKDATFDAVGSIIAAIDGVEKKEFKNAFCSVRPPGHHSSQNKAAGFCILNSVSIGANYLLKKYKYKKVAIIDFDVHHGNGTQDIFYENENVLFISTHQYPYYPGTGSEQERGKFNNIFNIPLPAGISSEEYLNVFDRVLKKLEEFRPEFILISAGFDAHEDDPLAQFNLKTEDYFTITKRVLENSKKFCNGKVGFNFRGRL

SEQ ID NO: 78399 - protein, 133 aa, Unknown
  Bacterial polypetide isolated from the Sargasso Sea
MFLKKQNLKNKIALVTGAGKGIGKACAIALAEAGASLIIVSRTKKDLDQVSKIIKKFRSKCKSYVCDVTKYSEIKSVIDSQKRIDILVNNAGTNIPEHFTKVKRKDMEYVVKINTMATFNIAQLCSLKMIELK

SEQ ID NO: 78400 - protein, 319 aa, Unknown
  Bacterial polypetide isolated from the Sargasso Sea
MGDYNQSEASNQSHRCLDCGNPYCEWKCPVHNYIPDWLKLVNDGNIMEAADLCHQTNSLPEMCGRVCPQDRLCEGACTLNDGFGAVSIGNIEKYITDKAIDMGWKPDLSNRTWTNKKVAIIGAGPAGIGCADILIRAGINCDVFDKQPEIGGLLTFGIPEFKLEKSVVRRRRKILEEMGIKFHLNKEIGKDISFQKLHDKYDAVFLGMGTYTSLEGGFKGEDLPQAHKAIDYLIGNTNHLLKFPQKESAYINFKGKDVIILGGGDTAMDCNRTAIRQGAKSVTCLYRRDEKNMPGSRREVINAKEEGVVFELTFSPSRS

SEQ ID NO: 78401 - protein, 231 aa, Unknown
  Bacterial polypetide isolated from the Sargasso Sea
NGLMGAAYGSAGERCMAQSVAVAVGDIGDELVSRLSKKVENLKVGPGMDKASEMGPLVTKEHLSKVKAYVDLGVKEGAKLVVDGRDLKLQGYENGFYIGGCLFDHVKRDMRVYKEEIFGPVLSVVRVKSFEEATKLINDHEYGNGVSIYTRDGDAGRTFASKIQVGMVGINVPIPVPMAFHSFGGWKRSLFGDSAMHGMEGIKFYTKLKTITSRWPSGIRSNPEFVMPTMK

SEQ ID NO: 78402 - protein, 130 aa, Unknown
  Bacterial polypetide isolated from the Sargasso Sea
ILTTNHQFKTMQEEIFGPVVTLYVYNDNDWKNMLDIVDNTSDYALTGAFISKDEESIDYALKKLKYSAGNFYVNDKPSGAVVGQQPFGGCRASGTDDKAGSKLNLLRWVSPRLVSRTHNPPTDYPYEYMD

SEQ ID NO: 78403 - protein, 101 aa, Unknown
  Bacterial polypetide isolated from the Sargasso Sea
EGMEDISVKDKSLLFNTDLVETLEFDNLISQALTTMDSAYNRKESRGAHAREDFAKRDDKNFMKHTLAWQKGKKVEIKYRDVHSRTLTNDVQYFPPKERVY

SEQ ID NO: 78404 - protein, 189 aa, Unknown
  Bacterial polypetide isolated from the Sargasso Sea
KIGPYSDLEAEMGPVITKEALARIRGLVDAGVTDGAELVVDGRDVSLQGYENGFFLGGCLFDKVLPEMSVYKEEIFGPVLSVVRVPDYESALQLVKANPFGNGTAIFTRDGDAARDFSNRANIGMVGVNVPIPVPVAYHSFGGWKDSMFGASNTHGMDGVRFYTRLKTVTSRWPSGIRQGADFSIPTLK

SEQ ID NO: 78405 - protein, 93 aa, Unknown
  Bacterial polypetide isolated from the Sargasso Sea
WNSDLMETLELTNLMPNALATIAGAEARKESRGAHAHEDFTVRDDEKWRVHSLAKVDGPEIKLSYRDVIRDPLSDVSEGGIELKKIAPKERTF

SEQ ID NO: 78406 - protein, 201 aa, Unknown
  Bacterial polypetide isolated from the Sargasso Sea
KIIIAPKKNKKIFYENNIGKATFIIGQPNLDKYLLSKASKLKCIINVESNFMDNLDYDYCFKKNIHVIATSPVFSKPVAEIALGMTLSLLRNIHNAHFDFIKSKEKYGLESNLQASLLTNKKIGLLGFGDLAKSLYPLLLPFTKNINVYDPWIPKSKIKKIGFNPINLNKMFSSCEVIYVLATITKKNKHLIDKKLLNKMK

SEQ ID NO: 78407 - protein, 233 aa, Unknown
  Bacterial polypetide isolated from the Sargasso Sea
MYLKKVNLKNKTALVTGAGKGIGKACAIALAEAGANLILISRTQKDLDKVSKIIKKLKSKCVSYACDVTNYNKIKNIIASQKKIDILVNNAGTNIPEHFTKVQKRNMEYLVKLNTVSTFNIAQLCTLKMLETRSRKKIGGSIINMSSQMGHVGGPIRSVYNMTKSGLEGLTRGMAIDLAKNNIRVNTVCPTFVVTPMTKKFLKNKKFKNNMLRNIPLGRFADLSDVATAVVFL

SEQ ID NO: 78408 - protein, 119 aa, Unknown
  Bacterial polypetide isolated from the Sargasso Sea
FRTEKNLKEGIEEIRKTYDGLDSLSVKDKSLIFNTDLVETLEFDNLIRQAVVTVDSAYHRKESRGAHAREDFPKRDDEKFMQHTLAWYNGKKTTIKYREVHKTTLTNEVQYFPPQERVY

SEQ ID NO: 78409 - protein, 310 aa, Unknown
  Bacterial polypetide isolated from the Sargasso Sea
RARVMFKFKELVEANRDRLAALLSSEHGKVLVDAQGDIQRGLEVIEFACGIPHAQKGEYTEGAGPGIDVYSMRQALGVVAGITPFNFPAMIPMWMFGVAIACGNAFILKPSERDPSVPVELAKLMIEAGLPAGVLNVVHGNKEVVDGILDHQTIKAVSFVGSSDIANYVYERGARAGKRVQAMGGAKNHGIVMPDADLDQVVTDLVGAAYGSAGERCMALPVVVPVGDETAEKLKAKLIPAIKDIMVSHSEDPKAHYGPVVTAAHKERVEGYIDLCIKEGAELVYDGRTSQIPDDSQGYFIGPTFFDPRD

SEQ ID NO: 78410 - protein, 138 aa, Unknown
  Bacterial polypetide isolated from the Sargasso Sea
EDGKILLGGNIIKTSGRCQDGWFYEPTIIEGLDINSRVNQEEIFGPVVTIQSFNSEKQAIENANGTDYGLSAMVWTDDKKKGNRIISQIDAGIIWLNCWMVRDLRTPFGGMKKSGLGREGGDEILQFFTEQKNICAPI

SEQ ID NO: 78411 - protein, 291 aa, Unknown
  Bacterial polypetide isolated from the Sargasso Sea
AADKAYKEWKDVSAYERSKIMRKAADIFRSRADYIAKLLTMEQGKPLAEAMIETLGAADSIEWYAEEGRRAYGRIIPPRAKGIYQFVFKEPVGVIAAFTPWNFPINQVVKKIAAAFAAGCTAIVKGPEETPASVVELIKAFDEAGMPKGSINLVFGIPAEISEYLIPHPIIRKVTFTGSTAVGKQLAALAGAHMKRVTMELGGHSPAIVCEDADVDVAVKILSANKFRNAGQVCISPTRFLVHDSVYNKFVDGFVKKAEELNVGNGLEDGVKMGPLAHDRRLTAIEGFVSR

SEQ ID NO: 78412 - protein, 300 aa, Unknown
  Bacterial polypetide isolated from the Sargasso Sea
FDFEKPLGDHAQDQRIIYEPKGVCVLITPWNWPMNQVCLKVIPALAAGCTMILKPSELAPLSSMILAELIDEAGFPKGVFNLVNGDGETTGNALTSHKDVNMISFTGSTRAGALISQNAAKDFKRVSLELGGKGANIIFEDADSEAIERGAARCFRNSGQSCNAPTRMLVEKSIYDDAVNRLKKFANEYKVDIPQKEGDHIGPVISETQYNKIQGLIKKGIDEGANLIAGGPGKPDGLEDGYYVKPTVFADVNNNMEIARTEIFGPVLSVIPFETEEEAIKIANDTPYGLTNYIQTKTKK

SEQ ID NO: 78413 - protein, 172 aa, Unknown
  Bacterial polypetide isolated from the Sargasso Sea
EQFGRIDVLVNNAGGAMFVKPPEKLRPEQWRAAIDLNLSSVFYCCAAAGQRMIQQNSGRIINISSVAGVKNSPSFVHYGAAKAGVINLTKSMAVCWGPHNININCIAPGLTATEGVAQWLPAKNREDGSPVPPLEYPPDPQNVADLALFLAAPGSARISGEIFPIRALNEIV

SEQ ID NO: 78414 - protein, 169 aa, Unknown
  Bacterial polypetide isolated from the Sargasso Sea
MKNIEDINKAAIKKIVANKKITNFSPGDTIKVGVKIVEGKRERIQYFEGVCIAKKNRDINSSFTVRKISFGEGVERTFALYSPNVDSIKVIRSGKVRRAKLYFLRDRKGKSARIAEKIKKKIGVDVSVKTEEPKVKPIEPSEQETKVEEVKKKAPKVEAKVEKPTSEKK

SEQ ID NO: 78415 - protein, 308 aa, Unknown
  Bacterial polypetide isolated from the Sargasso Sea
MTYPNTQLFIAGQWQDAAEGKTLAVFNPATGKEIGRVAHATKVDLDRALDAAQKGFEAWRDMPAAERAKTMRRAAALMRERAEAIAAIMVQEQGKPLAEAKVETMASADIIEWFADESLRVYGRIVPSRNLKATQMVLKDPVGPVAAFTPWNFPINQVVRKLAAALGAGCSILVKAPEETPASPAELIRAFADAGVPAGTVGLVYGDPAEISNYLIPHPIIRKVTFTGSTPVGKQLAALAGKHMKRVTMELGGHAPVIVAEDADLELAIKIGSGAKFRNAGQVCISPTRYLVHESIRADFGRRVRKYA

SEQ ID NO: 78416 - protein, 192 aa, Unknown
  Bacterial polypetide isolated from the Sargasso Sea
EALKVGPGMDKNSEMGPLVTKEHLEKVRGYVDLGVKEGAKLVVDGRSLKLQGYENGFYIGGCLFDHVKKEMKIYKEEIFGPVLSVVRVKTFEDAANLINDHEYGNGVSIYTRDGDAGRTFASKIQVGMVGINVPIPVPMAFHSFGGWKRSLFGDSAMHGMEGIKFYTKLKTITSRWPSGIRSNAEFVMPTMK

SEQ ID NO: 78417 - protein, 154 aa, Unknown
  Bacterial polypetide isolated from the Sargasso Sea
MIQDKVIVITGASSGIGHSTAKALAKKGAKIVAGARRLDRLETLKKEITDDGGKITICETDVTKKADCDNLVKQALDKYGTVDVLVNNAGLMPLSFVKSLKVDEWDRMIDVNIKGVLYCTAAVVPTMTEKKSGHIINISSVAGKIVFPAGSVYC

SEQ ID NO: 78418 - protein, 262 aa, Unknown
  Bacterial polypetide isolated from the Sargasso Sea
PETARHIIRNSAENLSEVSLELGGKSPVAVFEDAHQENAINGITAGIFGASGQSCIAGSRLYLQKGIYNEFLDKLAARAEKIKIGAPMDPESEMGPIGNFKQLEIIEKNIKLTVEQGGKIKCGGKRHSFSNEGYYFPPTIIECDNHNLPTAENELFGPVLSVMKFENEEEVINKMNDNQYGLSSGVYTSDFSRGMRVSKAIRAGITFVNTYRLISPSAPFGGMKDSGYGKEAGIESIKDYTRVKTTWYYTSDKPTLDPFSMR

SEQ ID NO: 78419 - protein, 298 aa, Unknown
  Bacterial polypetide isolated from the Sargasso Sea
GDRDARRPPELLTRDHVARKIVKEVQEGRGSPHGGAFLDIAWIKEHIKDSEGHIKKKLPSMYHQFKELAGIDITKEQMEVGPTTHYAMGGIAVDADTQMTTTVPGLFAAGEVAGGLHGANRLGGNSLSDLVVFGQRAGEYAAKFAKENPSYSVSEAQIEEAATEALAPLERGVTERNPFQLQLELQTMMQDKVGIAREDEGLTDAIESIREISGQIADVGAGGNRWYNPGWHTALDMKHLLTVSEAIALSARERKESRGAHSRLDHPDKEEGWSTFNHVVRKGPDGEMIIERQEIPPM

SEQ ID NO: 78420 - protein, 226 aa, Unknown
  Bacterial polypetide isolated from the Sargasso Sea
MGAIESVVIDTCFHGRHINPQILADLTPDTWDLEGYIKRGGYSALKKVLGKEGGSSGYTPETVIAEIKDSALRGRGGAGFPTGLKWGFMPAKLPMQKYLVCNSDEGEPGTFKDRDILRYNPHILIEGMTLAAYAMGISTGYNYIHGEIWEVYERFEEALEQAREAGLIGKKILGTDFDFELFACHNYGAYICGEETALLESIEGKKGQPRFKPPFPASYGLYGKPT

SEQ ID NO: 78421 - protein, 243 aa, Unknown
  Bacterial polypetide isolated from the Sargasso Sea
VVMPDCDLDQAVNGLMGAAYGSAGERCMAQSVAVAVGNIGDQLVKNLKTKVENLKVGPGMDKNSEMGPLVTKEHLEKVKSYVDLGVQEGAELVVDGRKLKLQGYEKGYYMGGCLFDKVKKNMRIYKEEIFGPVLSVIRAKNYDEALTLVNDHEFGNGVSIFTRDGDVGRSFSSKAKIGMVGINIPIPVPMAFHSFGGWKRSLFGDQHMHGPEGVRFYTKLKTITSRWPDGLKSDPEFVMPTMK

SEQ ID NO: 78422 - protein, 158 aa, Unknown
  Bacterial polypetide isolated from the Sargasso Sea
KRTLYYMDIAKKNSTTNVVHGGNQRTGGDYKNGFFYEPTLMSGVPVSSPVCQEEIFGPVACAIPFKTFDEVMNSANDTPFGLSAVLWTQNLSRALQFVEEIEAGFVQVNQCVAPRANVSYGGLKMSGLGKEYAFDSMVNHFTQSKTVLINRGKSNIDN

SEQ ID NO: 78423 - protein, 306 aa, Unknown
  Bacterial polypetide isolated from the Sargasso Sea
LESLDGNKRDPKISSAVVRTAANYWEGVRKQYQPFESKTRTSMSEVYLHQMPGGQYTNLREQARSMGITDERWPELASMYAEVNKIFGDVIKVTPISKVVGDMAIYMLANNIQIQDVLDPKKDVGFPASVIEFFSGRLGQPYKGFPKALQKKILKGKKPINYRFGSKLPSLKIKNRTKDLEKKYSETISEKDTISQIFFPEVFDEYIKHKKKFGNTSVIPTSNYFFGMNTGEEIYVSIEPGKTLIIRYFTLSEPNEKGYRTVYFELNGQARSVDIKDNSIAVDDLAKEITDPSNKDHVAAPIPGLL

SEQ ID NO: 78424 - protein, 191 aa, Unknown
  Bacterial polypetide isolated from the Sargasso Sea
PAQWHKALDHCEKLFGSIDVLVNNAGVGEFCDVERMSLEQWRHTLACNLDSVFLGTQQVIGRMKERGGSIINVASIEGLIGDPLVPAYNASKGAVRLFTRSVAAHCARQGYAIRVNALCPGYVDTPMVQGALADAPAEQARFMQDYLRQRIPMGRMALPEEIARAMLFLASDDSNYMTGADLVVDGGYLAQ

SEQ ID NO: 78425 - protein, 168 aa, Unknown
  Bacterial polypetide isolated from the Sargasso Sea
MPDCDLDQAVFGIMGAAYGSAGERCMAQSVAVAVGNIGDLLVKNLKAKVESLKIGPGMDKNSEMGPLVTKAHLEKVKDYVNIGIQEGAELVVDGRNLKLQGYEKGFYMGGCLFDKVKKNMRIYKEEIFGPVLSVVRAKNFEEALSLVNDHEFGNGVSIFTRDGDVGRS

SEQ ID NO: 78426 - protein, 280 aa, Unknown
  Bacterial polypetide isolated from the Sargasso Sea
NSDKGITNLHVPSDVIVDASMPAMIRDSGKMWGTDGQLHDTKAVIPDRCYATIYQAVIEDCKANGAFDPTTMGSVPNVGLMAKKAEEYGSHDKTFQIKADGVVRVTDSQGNLLMEQNVEAGDIFRMCQTKDAPIQDWVKLAVNRARASNTPAIFWLDPQRAHDGVVVEKVQAYLKDHNTEGLDIRIMAPVDAMKFTLERTRKGLDTISVTGNVLRDYLTDLFPIMELGTSAKMLSIVPLMNGGGLFETGAGGSAPKHVQQLLEENFLRWDSLGEFLALAA

SEQ ID NO: 78427 - protein, 260 aa, Unknown
  Bacterial polypetide isolated from the Sargasso Sea
APATMFEFAKLIEKTGIPKGVVNVVTGFGDPCGKALTTHKLVERIAFTGGPETARHIIKNSAENLSQVSLELGGKSPVAVFEDADQENALNGITAGIFGASGQSCIAGSRLYLQKSIYDNFLNKLADRAKKIKLGSPMDPDTQMGPLSSLKQLEIIEKNIKLTVDQGGKIKCGGKRHNLSNKGYYFPATIIECENHNLPTAENELFGPVLSVMKFETEEEVITKMNDNQYGLSSGVYTKDLGRGLRVSKAIRAGITFVNN

SEQ ID NO: 78428 - protein, 230 aa, Unknown
  Bacterial polypetide isolated from the Sargasso Sea
GGKNPIIIFPDADPKQAASYAVKGMNMNRQGQSCSSTSRVLVHHDLHDAVLEEMVNLVEKLPIGLPWIEENELGPVVSEIQYKKIMEFISSAQMEGAHLITGGSSPKDEELKDGFFIQPTIFDQVTPEMRVGSEEIFGPVMSVFKWDDYEKMLSIANGIEYGLTAMIVTDNLKQAMETAERVEAGYVWINSTGRYLGAPYGGWKASGIGQEECFEELMSYTQIKNVNMRW

SEQ ID NO: 78429 - protein, 164 aa, Unknown
  Bacterial polypetide isolated from the Sargasso Sea
NLIQAAKMKNAYPVYGVDINDKMFDLTHQIGVDIFTCDLEFIPEKVDVILDTTGVPEVISKAFDKLAPSGRLIMVGQPAPGTDLNIFNPLSMFDGQGKSIRASQGGGTKPDEDIPRYIKLANREMLDFNTLHTDTFALDNINDAFDLLKTGNAGRIIIKIGEED

SEQ ID NO: 78430 - protein, 241 aa, Unknown
  Bacterial polypetide isolated from the Sargasso Sea
MPDCDLDQAVNGLMGAAYGSAGERCMAQSVAVAVGNIGDNLVNELSKKVEALKVGPGMDKKSEMGPLVTKEHLEKVKGYVDLGVKEGAKLVVDGRNLKLQGYENGYYIGGCLFDHVKKDMRIYKEEIFGPVLSVVRVKDFDEATQLINDHEFGNGTSIYTRDGDVGRTFASNIKIGMVGINIPIPVPVAFHSFGGWKRSLFGDQHMHGAEGVRFYTKLKTITSRWPSGLRSDPEFVMPTMK

SEQ ID NO: 78431 - protein, 200 aa, Unknown
  Bacterial polypetide isolated from the Sargasso Sea
VEVSDLYAMNFNPIASQNDFANLNQPEYFNYALEQRHAYKQNSLAPDIQVEIEKIKRADLLIFSFPLYWTSVPAILKGWIDRVFVSGLFYGGKRFYNHGGMAGKKAMLCFTLGGRDYMFGENAIHGSIAEYLSPIQRGTLAYAGFEVLPPFIAYHVPYISNENRKNILINFEAYLNDLQNLEPLTFPLIENFDEKMRPLP

SEQ ID NO: 78432 - protein, 219 aa, Unknown
  Bacterial polypetide isolated from the Sargasso Sea
MIIVSRTKKDLDAVSKTIKKLRVKCKSYVCDITNYEDLKNIINKQSRIDVLVNNAGNNIPEHFTKVKTKNMEYLVKINSIAAFNTAQLCALKMIKLKNRKKIGGSIINMSSQMGHVGGPIRSVYNMNKWGLEGLTRGMALDLAKHNIRVNTVAPTFVVTPMTKKFLKNKKFKKETLHNIPLGRFAEMSEIASTVVFLASDAASMIHGTSLLVDGGWTAK

SEQ ID NO: 78433 - protein, 254 aa, Unknown
  Bacterial polypetide isolated from the Sargasso Sea
QFLHGEQGALLVASQLVSCALTFNAKMYAASQTFDEARHVEGFNRYLKEKIGFQYPATNGLKSLMDKILTDERWDLKFIGMQIIIEGLALAAFNNMKFILNDGLLKQLLHYVIRDEARHVTFGVNYLEDYLKTLSKSEIDDRAEFAFEACVVMRNRLISGDVIARFLDYTPEEAQAAAENTEQGQNFRTLLFTKIIPNLKRIGLLNDKVMPKYEKLGVLSYAELEDNFDIDWADMSKPYETQEEIERFINAGHH

SEQ ID NO: 78434 - protein, 204 aa, Unknown
  Bacterial polypetide isolated from the Sargasso Sea
RVINSGQVCNCVERVYVDKKIADEFTEKLTKAMQNTKFGNPNTKTDIDYGPLINEDGSKKVSELVNSAKGSGAEILTGGNRDESSEGIYYHPTVIANCKQDMRIIQEEIFGPVLPLVEFEDLDQAIEYANDSDYGLTSSIFTNNLKTALKACNEIRFGETMINRDNMEIFQSFHAGLRKSGIGGADGKHGLYEYMQTHAVYMRA

SEQ ID NO: 78435 - protein, 133 aa, Unknown
  Bacterial polypetide isolated from the Sargasso Sea
MIQDKVVVITGGSSGIGYSTAKALAKKGAKIVAGARRLDRLETLQKEITDDGGEITICETDVTRKADCDNLVKQAIDKYGTVDVLVNNAGLMPLSFVKSLKIDEWDKMVDVNIKGVLYCTAAVVPTMVEKKSG

SEQ ID NO: 78436 - protein, 44 aa, Unknown
  Bacterial polypetide isolated from the Sargasso Sea
MSSYKIIEHEYDVVVLGAGGAGLRAAVGLSEAEIKTACISKVFP

SEQ ID NO: 78437 - protein, 193 aa, Unknown
  Bacterial polypetide isolated from the Sargasso Sea
KVIKVPCDVMNYDELKTKLEKIKIIDVLVNNAGTNIPEPFEKIRQTSMNYLVDLNLKAAFNVAQLVVKKMLKNKKRPGSIINMSSQLGHVGMGGRNVYNMTKFGIEGLTKGMGVELAKRNIRVNTVAPTFVETPMVKNFFKNKKFKKLALGNIPMGKAATESDVATTVCFLASSASSMITGTSIIIDGGWTAQ

SEQ ID NO: 78438 - protein, 270 aa, Unknown
  Bacterial polypetide isolated from the Sargasso Sea
IDKEDMQVFTTRVPVGVVAAIIPWNSQMFLTAVKLAPALAMGNTIIIKASEIAPTPLLEFAKIIDKVGIPKGVVNIITGFADTCSKLLTSHQKINKIAFTGGVHTAKHIVRNSAENLSQISLELGGKSPVVVFKDARKNNAINGIMASIFGAGGQSCIAGSRLYLQEEIYDEYLEALKNRVEEIEIGDPLSTTTQLGPLATLNQLQNIEEKIKQTKKLGGKIITGGKKVSEFKNGYYFEPTIIECANHNLPVVENELFGPVLSVMKFKDE

SEQ ID NO: 78439 - protein, 115 aa, Unknown
  Bacterial polypetide isolated from the Sargasso Sea
LEPTVFSGLSHLSRTATEEIFGPVVTLHSFRTDEEAIEMANCTDYGLAGSVWTGDSKRGKSVAEKIDTGMVWVNTWLHRDLRVPFGGVKDSGVGREGGRWSLSFFSEAVNICVKK

SEQ ID NO: 78440 - protein, 252 aa, Unknown
  Bacterial polypetide isolated from the Sargasso Sea
VLFEFAKLIEQTGIPKGVVNVITGFGDPCGKTLTTHNLVEKIAFTGGPETARRIIKNSAENLSEVSLELGGKSPVAVFDDAEQENAINGITAGIFGATGQSCIAGSRLYIQKGIYNEFLDKLSSRASKIKIGAPMDLDTEMGPLSSFKQLETIEKNIKDTVDQGGKIKCGGKRDSFSNKGYYFPPTIIECDNHNLPTAENELFGPILSVMKFDTEEEVINKMNDNQYGLSSGVYTSNLSRGMRVSKAIRAGI

SEQ ID NO: 78441 - protein, 111 aa, Unknown
  Bacterial polypetide isolated from the Sargasso Sea
PLLAGCNPDMHVVKEEAFGPVVVVMSHDGDEHAVELANDSHYGLFSYVYAGNTTRAYDIAQKLESGNVALNTIAPHMYAPFGGFKMSGVGRDRGRWGLEAYSEVQAINWPS

SEQ ID NO: 78442 - protein, 189 aa, Unknown
  Bacterial polypetide isolated from the Sargasso Sea
KVGPGMDKSSEMGPLVTKEHLEKVKGYVDLGVQEGAKLVVDGRDIKLQGYEEGYYIGGCLFDNVKKEMRIYKEEIFGPVLSVVRAKDFDEAINLINDHEFGNGTSVYTRDGDTGRTFANKIKVGMVGINIPIPVPVAFHSFGGWKRSLFGDQHMHGPEGVRFYTKLKTITSRWPSGIRMNPEFVMPTMK

SEQ ID NO: 78443 - protein, 228 aa, Unknown
  Bacterial polypetide isolated from the Sargasso Sea
MTHKEKLNSVIDYSRDYFFDYFGFKTLEKAYLLKVNGKIVERPQHLIMRVALGLHKNNIKAAIETYELISHKYFIHATPTLFHAGTCNPAMLSCFLLGMHDSVEGIYKCLGDCAQISKYAGGIGIWLTDIRANNSQINCNLGKSSGIVPMCRVFNDCARHINQSGKRLGSFAFYIEPWHDDIFDFLNLKKNHGDEAARARDLFYAVYIPDLFMKKVQANDTWHLFCPN

SEQ ID NO: 78444 - protein, 252 aa, Unknown
  Bacterial polypetide isolated from the Sargasso Sea
MRILFIGAGKMGLPIISSWKKGSRQEFIDIHLVEKQEANINIIKKKNIKINFYKKIPKKWKGDVVFFAVKPQDFNKVAEEINTNNVLYKNIVSIMAGITTSKIRSYLKTQTSVTRVMPNLAVEVNLGVNCIFHSSNTKKLFKKNINTLFGILGNNYEIKDEKLLENVTAISGSGPAYFFLYLNVFEKIAHDLGFSKKVARGLIYDTVKGALELVKVENNTRKLIESVSSKKGTTEAALRVLEKKKTGLYELL

SEQ ID NO: 78445 - protein, 166 aa, Unknown; identical to SEQ ID NO: 78027
  Bacterial polypetide isolated from the Sargasso Sea

SEQ ID NO: 78446 - protein, 203 aa, Unknown
  Bacterial polypetide isolated from the Sargasso Sea
MQKNLPYITIAFGIAAIVAIFSFLDLYDNFENSLLDLRFKTRGLVKVRQDIATVDIDTDALTNVGKWSPWSREKHLPLIKLSEQHGVDHFLFDFYFIEPSDRQLNIKEIDFEKDTTTAQIRDKFPDPDNDLAAAAKKAGNIIFAQSFKPKTEAQSADSVKKRTEAMTKRLLLMKEKGLFRIVKKNEKEKFSSIFSAYDIEAPS

SEQ ID NO: 78447 - protein, 312 aa, Unknown
  Bacterial polypetide isolated from the Sargasso Sea
MVFCWSGHAQYITSQQDSEAGDNAIEADNSEFDAAARPLTKPRISNVTIVGAPQTNGVRLRAGTAGLISNMLVVGPEGYNNCLRVNGDESVANAESGELAITGSVVSCADDEQQFTSGEIGGVSTQEWFLAQENNQVLPTAQLNLAANGYAPLAGSVLLTSGVDPRDIDPAFDNANYVGAFDGQTNWMTGWTVGVNGGFPTDVQNAFEQGLAVDASAQFPQITDKPVYLLDTDVTFTSDVTLTNDAHWVLSGRTAVGGDNIDSATLFIENGTTIIGQRGEDFLVVRRGSKIEALGLENAPIIMTSIQDVTGE

SEQ ID NO: 78448 - protein, 291 aa, Unknown
  Bacterial polypetide isolated from the Sargasso Sea
MFYSILIKQMFLKKEFNTIYYIILLFFSFFVNQYFGFIGINPIDSFFSFNTGYDILNGRYPFKDYWTITGPFIGLTQALIFKILDVSWSSYVFHASIFNSIITLTTFYTLKIFNLNKHYCFIYSLCVALLAYPSIGTPYVDHHSTYLSVISIFCFILALKTNLSFYWLILPIVLGFSFLTKQAPTGHIFIIISILSLVYFIFHFNIKKLVYGILGSFITIALFFFFITYLEIPLINFVDQYILFPLSLGESRLEYLFPFEFQRVIMRFKLIHLSALILIYILIKEILNKVE

SEQ ID NO: 78449 - protein, 300 aa, Unknown
  Bacterial polypetide isolated from the Sargasso Sea
MKSWRTLLFIPYGRGGAGFSVLDVTIPKVTAGAEGEVGTGPLHMFSIYNDSYNKEVIRIDHKGKIIRLPYQRATIALEESNEGLHAADIYSQAEALDLALPKVTYDPMDTPDDTSDDVEGDAFTNRELKAACKADDEYLSTPFLNTSYSDGATTCYTSSVFTFDNINLPNSAIGAGGAVKDGILTVSELISDDWTPMTGVTATYSGTSLTVNFGENKTINQGVDSTAPNKIKIETTCEGQGLSNKEYDYSGLGETWSTPRIFRIPSGSGDSNIQNDRYVAVMGGGMGSGTKCVGYRCLYC

SEQ ID NO: 78450 - protein, 319 aa, Unknown
  Bacterial polypetide isolated from the Sargasso Sea
QQGPRAWEAATEYFRASSDVVKLIGFPQFERWVESGIELTVEAPVIAAAFFRASPNVLPVLAPRHISGWASLGRGLSRGTWKSSSLAARFFDISDELVQNVNFHEMQLFVALVQKLASRSYDLAAEALVLGQRVLPNVTEKEEVISLATVLAETSWREVRGSFEAASRVTLSIEKRLRPRYFALAERLAQNGLVNVAGFMVDSSQSLAKLPQDEQSQVLERAEVLADSSAEAVSAFLRTAPHVLDRISLAQLEIWFNRGLEYLIDNPDAGVAYFKLESARAENLIDQLSSSIEFEKVQSLLRMYSNALAGTEVELNTTA

SEQ ID NO: 78451 - protein, 258 aa, Unknown
  Bacterial polypetide isolated from the Sargasso Sea
MQNCNGKYIQFIDSDDEPLPNKTSEQVRALESNKNLLMTYGTTLIGKKDGKMDVLGKTNKIKQKIAPLFPYNVYWTTSSILWRKEYISEDSWFPLFGSEDLLFEFLNGLMDYPIVHTPSQKPILKKWLHPKNISNQIATDYLYQMEILKCYDIIYKKIKEKKQLSQLKVIAELYQSKIMFFLVHRRYNEANYCISMYNQIIESKFSIEKIAFLFSRIFSIKRVYRILRMYYWFQKKVKNLYRPLTYSKKFHPNTNPYN

SEQ ID NO: 78452 - protein, 198 aa, Unknown
  Bacterial polypetide isolated from the Sargasso Sea
QQVAYLQAQSQPQAQDAPQAYPRLEDYDYDEARHQQAVLQYTSSLNAQNVQQVMQQQQQAQIAQLQAQKAQIASQEFVEKSNAFALDYKDFQATVTNPNFHQSDQVARTIVELPNGPDVAYYLGKNLKIANALNNKSERDARDDLIRISTALQVNSRKRRANTTNAPTPGKTVTPKGKVAKDLDKMSPEEYRKARGYT

SEQ ID NO: 78453 - protein, 166 aa, Unknown
  Bacterial polypetide isolated from the Sargasso Sea
DPGSDTHSSAQQVQKRMSASPYGTPAIGTPPSGIEAPPMEMDIPSYEEPEMTPELEDYSEDEGLGMAGLADENDSDVVSGNGRITDESHESFIRDHTESAVKFLMRKDLDDSELKSEDEQVHEEWQKRGLSRGKLRKHVMKMMNWDNIPEVAVDEILSQIREKISS

SEQ ID NO: 78454 - protein, 382 aa, Unknown
  Bacterial polypetide isolated from the Sargasso Sea
MDRDSRYDILFDTVDIGPVKSKNRFYQVPHCNGGGYRDPSAAAEMRGIKSQGGWGVIFTEQCEMHHSSEITPFIELRLWDDADIPMIAKMAGKMKEYGALAGIQLAYSGINGPNLYTKEVPLAVTGMPIRTFTNDPVSARSLDKEDIKNLRRWFVNAAKRSKTAGFNLICLYGAHGFGIFQHFLSTATNQRTDEYGGSLENRSRFVKEVVEEVRNAVGDTMGITLRLSLDEMIGDLGFANSEVRDFVEMNQDLPDLWDLAHGAWEDCSGPSRFKEEAAQFDLVTGIRKLTSKPIVGVGRFTSPDVMVKQIKSGTLDFIGCARPSIADPFLPKKIEEGRIQDIRECIGCNICITGDMTMSISRCTQNPTFMEEWHKGWHPENY

SEQ ID NO: 78455 - protein, 322 aa, Unknown
  Bacterial polypetide isolated from the Sargasso Sea
MSFTDSDLRSLVPRDKQYRVAAGDGLFVVVYPNGGKYFVWKYRYPPGRSGQQRWHHIGPYGRGSGQWTLKAARDERDRLDQLRKAGDDPRVLKADAKREVDEKSKVPSLQEVAEDYLRRSKNRQTTVSDYRNMLFNQVLPVLGHKSPVNRFEWNNGGRQKVLNLKKGIEARGSLYQSDKCLMVMRSMFEHAIDNAWMQPPNPALGSKGAKSSHVAKHNPTLEWHEVPQLLEDLESKSKLGSFIVQSAVKMTLLTFLRVGSLAPTKWDELDYKKGILTIPGSRMKGKKDHLVPITNQIKDLFEDLRRVNGEQEYVFYSPRGKT

SEQ ID NO: 78456 - protein, 256 aa, Unknown
  Bacterial polypetide isolated from the Sargasso Sea
MSTVLITGCSSGFGLETAKIFLEKGWHVIATMRKPDPSLLPASDNLTLLPLDITSTSSIDNLMQEVEKIDVLVNNAGFGAPVPVELTPLATAQQLMNTNVLGTLSLTQRFLPLMRQQGSGVIINVSSSVTTKAMPLIGLYRASKAALNAWSESLAIETKPFGIRVHVVLPGRSPETKFGENARAYFAGMDDPAYGKMVNDFVQMASETNSPVTYAEDVASTIFAIAIDQSTPFYSSAGEDAKLWLEESQQQSPFCR

SEQ ID NO: 78457 - protein, 202 aa, Unknown
  Bacterial polypetide isolated from the Sargasso Sea
RKIKSKLLEETAKLNVGPYTDEKSDFGPLNNKAHFEKVLGYIDTGEKEGAKLLSDGRNFKKQGYENGYFVGPTIFDDVKPDMRIYKEEIFGPVLSMMTTETYEEALNLVNDHELGNGAAVFTKSGNIAKHFTENAKIGMIGVNVPIPVPVAYHSFGGWKRSLFGDHSMHGPEGVRFYTKLKTATVTWVEDNAGPEFTIPVLS

SEQ ID NO: 78458 - protein, 443 aa, Unknown
  Bacterial polypetide isolated from the Sargasso Sea
MTKLKEYKMFINGEWVESESKKTFETLNPENNEPWAIVPEASSKDVDKAVQAAQQAFEGEWPKLLPRERARFLRAIGDQLRANAEMLGEIETIDTGKLYRETKKQAIYIAEYYDYYAGLADKVEGTVLPIDKPNVQAITTRIPIGVVAAIIPWNSQMFLTATKLAPALAMGNTVVIKSSELAPAVLFEFAKLVEKTGIPKGVINVITGFGDPCGKALTTHNSVEKVAFTGGPETARHIIRNSAENLSEVSLELGGKSPVAVFDDAEQENAINGITAGIFGASGQSCIAGSRLYLQKGIYDEFLDKLSQRASKIKIGAPMDPETEMGPLSNFKQLEVIEKNIKDTIDQGGKIKCGGKRHSFSNKGYYFPPTIIECDNHNLPVAENELFGPVLSVMKFETEEEVISKMNDNQYGLSSGVYTSNLSRGMRVSKAIRAGITFVIHID

SEQ ID NO: 78459 - protein, 355 aa, Unknown
  Bacterial polypetide isolated from the Sargasso Sea
MIKVGIVGTGGIAEWHASAFKDNKDSDVVAACDVNNDRLNEFCDKFNIDHRYNSVDELLEKSDVDAISNTTPDAFHKEISIKAIEKNKHIFCEKPLAENHADAQLMCEALKGRNLINMVNFSYRNSSGYQELCKMVQEGNIGNVIHMDANYNQSWLTSNYWGNWKEQDKWLWRLSTKHGSKGTLGDIGVHIFDFASRPIGKIKRLNSYLKTFHSKGEKIKDYVLDANDTFLSMVEFDNGAIGTVNATRFATGYSNRLELRIFGDKGAVKIEFDDPISEGNKFMYTKDIEREFNSKDDKIKWEEIKCPSSLTNFERFIESIMNNNNHEPDFKRGAEIQKVLDSCYASSENGCWVEV

SEQ ID NO: 78460 - protein, 202 aa, Unknown
  Bacterial polypetide isolated from the Sargasso Sea
EYSGQSCDAPTRMLVEKSIYQRAVNEAVDEAKKIKVDIASKKGDHIGPVVSKVQYDKIIKLIESGIKEGATLAAGGPELPNNLNKGYFIKPTIFTDVTNDMTIAKEEIFGPVLSIIPFETEDEAVNIVNDTSYGLGNYLQTENKEKAHRVARKLRSGCVYINGNGADAGTPFGGYRQSGNGREGGIWGLEEYLEVKTVTGWK

SEQ ID NO: 78461 - protein, 496 aa, Unknown
  Bacterial polypetide isolated from the Sargasso Sea
MLKITHYVNGQHTPASTRNQEIFEPATGECRGQVSLASNDEVAAAIAIAKTAFEAWSQVTPLNRARVLFKFKALVEQHMDELAQLITLEHGKVIDDAKGELIRGLEVVEFACGIPHLLKGEHTQQVGGGVDSWSVNQALGVVAGIAPFNFPVMVPMWMFPIAIACGNTFIMKPSEKDPSSVMRIAELLKQAGLPDGVLNVINGDKEAVDTLLTHPDVQAISFVGSTPIAEYIYSTASKHGKRVQALGGAKNHMLLMPDADLDQAVSALMGAAYGSAGERCMAISVVLAVGDVGDKLVDKLLPQIQQLKVGNGLTPEMEMGPLISKQHLAKVTDYVETGVQEGATLLVDGRQLTVADHQQGYFLGACLFDNVTPEMRIYREEIFGPVLSIVRVKDYPTALTLINQHEFGNGTAIFTQSGEAARHFCHHVQVGMVGVNVPIPVPMAFHSFGGWKRSLFGPLHMHGPDGVRFYTKRKAITARWPVGKQTQAEFVMPTMK

SEQ ID NO: 78462 - protein, 476 aa, Unknown
  Bacterial polypetide isolated from the Sargasso Sea
MLDKKKFYINGKWVSSLGKNELKVINPSTEEAFATISLGNEVDLNNAVKAAKEAFAQWKDVSKKERIIFLEKLLTVYKKRFNEMAESMSMEMGAPIDYATAVHAVSGQSHIEDFILRLKNFKFEESFDSKSNNYISYDPIGVCGLITPWNWPINQIALKVIPALATGCTMILKPSEISPISGMLFAEMIDEAGFPAGVFNLVNGDGDGIGSQISEHPGIDMISFTGSTRAGKLITKNAANTIKRVCLELGGKGGNIVFADSYPNAVRDGIRNVMSNSGQSCDAPTRMLVEKSIYQRAVKEAADEANKIKVDVASKKGDHIGPVVSKIQYDKIINLIKSGISEGATLAAGGLGLPNNLKKGYFIKPTIFTDVTNDMEIAKKEIFGPVLSIIQFETEEEAIEITNNTEYGLGNYLQTEDKEKAKRVAKKLRSGIVYINGNGADSGTPFGGYRQSGNGREGGVWGLEEYLEVKTITGWK

SEQ ID NO: 78463 - protein, 417 aa, Unknown
  Bacterial polypetide isolated from the Sargasso Sea
IVGDCADPQVCRDIVSRAVDSFGKLDVLVNNAGAAGPKYTLRDIPFTDVEMRAAGSDQTMFDSAMNLLGAPWNMARAAAAHLSDGGTIVNVSTIFSRTHYYGRIPYVVPKSGLNALGKGLALELGEERGIRVNTLFPGPIESERIDTVFATMDELQNIPPGSTSQEFRDLMITTRNGEEGLEYRYPTPTDVANGIVWLASEESAAVSGHHVEVTNGMQVPAQSRSQLVSWPDKRLEDLTNNVVLILGGSDYEQALTYAERQINSGAHVLLAFRSLESVGHARTLIQTKGLDEIQLSHLDPLRRESVDRTMQFIDDHFGRLDGVIVLPRKPNGHYGHSLCSATDEDVENFVREEVVAPVAFASMLASNLSRWFGKCEPPAITYATNGSDTQGNLLNEVIRASIEALIRGWRHEDETLL

SEQ ID NO: 78464 - protein, 406 aa, Unknown
  Bacterial polypetide isolated from the Sargasso Sea
GEIETIDTGKLFRETKKQANYIAEYYDYYAGMADKVEGTVLPIDKPNIQAITTRVPIGVIAAIIPWNSQMLLTVTKLAPALAMGNTVVIKSSELAPAVLFEFAKLVEETGIPKGVVNVITGYGDPCGKALTTHNLVEKIAFTGGPETARHIIRNSAENLSEVSLELGGKSPVAVFEDANQENAINGITAGIFGASGQSCIAGSRLYLQKGIYNEFLDKLSERAEKIKIGAPMDPESEMGPISNFKQLEIIEKNIKLTVEQGGKIRCGGKRHSFSNEGYYFPPTIIECDNHNLPTAENELFGPILSVMKFENEEEVIKKMNDNQYGLSSGVYTSDFSRGMRVSKAIRAGITFVNTYRLISPSAPFGGMKDSGYGKEAGIESIKDYTRVKTTWYYTSDKPTLDPFSMR

SEQ ID NO: 78465 - protein, 497 aa, Unknown
  Bacterial polypetide isolated from the Sargasso Sea
MNLIEHFIDGKIVSGSSDRKGKVFNPATGNQESEVRLASKSDLDLAVEKAKKAYETWSIKPPLQRARIIFKFKEIIEKNFDELTKLIVSEHGKVYEDAKGSLTRGLEVVEFACGIPQMLKGDFTENVGTNIDSWSIRQPLGVCAGITPFNFPAMVPMWMFPMAIACGNTFILKPSEKDPSCPLRLAELFSEAGLPDGVLNIVNGDKEVVDAILKNKDIPAVSFVGSTPIAKYIYENAAKNEKRVQALGGAKNHCVVMPDCDLDQAVNGLMGAAYGSAGERCMAQSVAVAVGNIADDLVSNLSKNVESLKIGPGMDKSSDMGPLVTKEHLEKVKGYVDLGVNEGADLVVDGRNIKLQGYENGYYIGGCLFDNVTKDMRIYKEEIFGPVLSVVRVKDFDEAVQLINDHEFGNGTSVYTRDGDVGRTFASKIKIGMVGINIPIPVPVAYHSFGGWKRSLFGDQHMHGPEGVRFYTKLKTITSRWPSGVRSDPEFTMPTMK

SEQ ID NO: 78466 - protein, 222 aa, Unknown
  Bacterial polypetide isolated from the Sargasso Sea
FDDCNFDLAVQTALDANFYTAGEVCSNATRVFVQRSIAEKFIAAMVEKVEDMVVGDPMAADVQMGALISAAHLSKVLDYVQIGVAEGAKIATGGIQIHPQGCENGNFMAPTIMTNCHDTMRITHEEIFGPVMSVLVFDDEQDAIDRANSTDFGLGAGVMTTDLARAHRVADALVSGNVWVNSFNILPPGLPFGGAKKSGFGRENSLYTLDAYSEIKSVHISL

SEQ ID NO: 78467 - protein, 499 aa, Unknown
  Bacterial polypetide isolated from the Sargasso Sea
MTTQVKHYIDGEFTTGTGTSQIVVTNPANNESIALINCATADEVHAAIASAKAAFKTWKEVPVSERARVMLRYQHLLKEHHDELATILAKETGKTFEDAKGDVWRGIEVAEHACNIASLLMGETVENVARSIDTYSYTQPLGVCAGITPFNFPAMIPLWMFPLAIACGNTFILKPSEQDPMTPQRLVELFVEAGAPKGVLQLVHGDKTAVDILLADPAVKAISFVGSVAVGQYIYKTGTDNLKRVQAFAGAKNHCVIMPDANKQQVINNLVGASVGAAGQRCMAISVAVFVGAAKEWIPELKEALAKVRPGLWDDKEAGYGPLISPAAKVRVLKLIAQGKEEGAECLLDGSDFSVAGYESGNWVGPTMFTKVTTDMSIYKEEIFGPVLCCMESDSLEDAIELVNASPYGNGTSIFTASGAAARKYQHEIEVGQVGINVPIPVPLPFFSFTGWKGSFYGDQHAYGKQAVRFYTETKTITSRWFESDIAVAAGPNMSINLR

SEQ ID NO: 78468 - protein, 435 aa, Unknown
  Bacterial polypetide isolated from the Sargasso Sea
MSTSTAASSTQSHSLSIDVAIIGAGPSGSIAASLLHKQGKRVLVLEKQHFPRFSIGESLLPCCMQFIEEAGMLEALNAAGFQYKNGAAFRRDGVYTTFDFTDKFTPGPGTTFQVQRANFDKLLADTAASFGVEIRYGETVEAIDLSANPCLSVRNEQGELYQVEAKYVLDASGFGRVLPRLLDLETPSSLPTRSAIFTHVEDNISDPDFDRNKILISVHPQHQDIWYWLIPFSNGRCSLGVVAEPQLLARLEGDLEQQLLTIVKEEPGLKALLANAKVAQPCATLKGYSANVSRLATDKFALLGNAGEFLDPVFSSGVTIAMQSASMAAKCVLKQLNGDTVDWPTEYSAPLMQGVNTFRTYVQAWYDGRFQDVIFYENPNPKIKQMICSILAGYAWDVQNPFVKDSERRLNMVVELCRQEAELTAEPAVSELAEV

SEQ ID NO: 78469 - protein, 466 aa, Unknown
  Bacterial polypetide isolated from the Sargasso Sea
MSTNYDHEYDVIVVGSGNGALTSAICSHDGGAKVLVIEKSNQFGGTSATSGGGVWIPNNRYAKAENVDDSVEDARNYIQSVSPEGKINNDLIETYIEQGPRMVDYLHENSRVKYRNLPHYPDYFPDNPGGKEGNRSMEPEPIKGTELGDDFKYLRGQHPQTAFTMGPINMNFTQVEGQLLLGALPGWKTLFAKLFTKYILDIPMRFIHGWRDRRLTMGNAGIARLLLSCKDRDIPIWRNTSMTDLIYENGKVEGIIALQNNETIKIKANKGVILASGGFEKNQTLREKYLPKPTDTAWSAANIHNTGDAISATKDLNVALHQMDAGWWTTTMNIPGHEKGWLSIVDKSVPGNYTVNKNGRRFSNESQNYVSFVTDMFDEYEKGNPCAPCYMIFDSNFRKNRPCGPLLQASMQPDSRVPKEWWDPSFLSKADTLEELAEIVGIDAKGLLETQVKVNEYSKTGKDLDF

SEQ ID NO: 78470 - protein, 387 aa, Unknown
  Bacterial polypetide isolated from the Sargasso Sea
MSDNILPSQKIFSIKDARDLSRKRLPKLVFDFIDGASGDEKLAEINSIALDQIRLEPKVLRNVEKRSLKKKVLGYEFDFPFGFAPMGMTNLSWPKADSMLAAESARNNIPTCVSMASTTTLEKMYELSEGHSWMQLYIFQDENFVMELLDRAKNTGYEVAILTVDVPVLSRRTRDDKNGFAYPFKIGPKQFFDFATHPTWSLSTLLSGIPKPMNYVTSKSGDGIFKRKESRGTTDWDTLKRVRDKWKGKLVIKGVMSPDDAIKIKEAGGDAIQVSNHGGRQLDSATAAINMLPLIRKSVGSDFPLIFDSGIRSGSDIVRALAFGADYTMIGRPVMYAMGADGKKGLRRIVEIIKEEVSTTLGLVGLNDINDVTSKIVIENTINKVTY

SEQ ID NO: 78471 - protein, 126 aa, Unknown
  Bacterial polypetide isolated from the Sargasso Sea
MQSKCAVFRTEKTLKEGVEEIRKPFEGMDSISVKDKSLIFNTDLVETLEFDNLIRQAIVTLDSAYERKESRGAHAREDHPKRDDNNFMKHTLSWCKGSETKISYRDVHRSTLTNDVQYFPPQERVY

SEQ ID NO: 78472 - protein, 497 aa, Unknown
  Bacterial polypetide isolated from the Sargasso Sea
MRKINHFIDGKEYLSKSDRLGDIFNPAQGEKIAEVSLANKSDVDAAIESALNVKQKWASTPPLTRSRIFFKFKELILRDMDKLARALTEEHGKILSDSQGSITRGMEVVEFACGIPHLLKGEFSENVGSEIDSWSMRQPLGISVGISPFNFPAMVPMWMFVVSIACGNCFILKPSEKDPTVPMMLAELLTEAGLPDGVFNIINGDKEAVDLLITSPHVDSVSFVGSTPVAEYIYHTSTQYNKRVQSLGGAKNHMIIMPDADLDQVVDGLMGAGYGSAGERCMALSVAVAVGDVGDKLIEKLTPRVQSLKVGPGTDPEVEMGPVISKQHLNKVRSYVDSGVEEGAKLIVDGRPISLQGYENGYFIGGCLFDNVTSEMKIYKEEIFGPVLSVVRKPTFDDALEMLNNHEFGNGTTIYTRDGDTARAFTNKCQIGMVGVNVPIPVPMAFHSFGGWKRSLFGDHAMHGMEGVRFFTRLKTVTSRWPTGIRKGAEFIIPTMK

SEQ ID NO: 78473 - protein, 245 aa, Unknown
  Bacterial polypetide isolated from the Sargasso Sea
MNKARVVLITGSSRGIGAATAVYFARHGYDVCINYKTHLTQAEYVADRVKSYGVRAELVRADVSQEIDVNDLFSRIDKVFGRLDVLVNNAGVLKPQMPLLNMDAKRINELLTTNITSTFICSREAIKRMLPGSSIVNVSSVAAKTGSPNEYIDYAATKGAIDTLTMGLAKEVACKGVRVNCVRPGLIYTDMHTDGGEEGRVERLKSNLPLRRGGQPEEVAAAIYFLASHSASFTTGTFIDVAGGL

SEQ ID NO: 78474 - protein, 319 aa, Unknown
  Bacterial polypetide isolated from the Sargasso Sea
MTGSYNWDYSVQDDRIKKLYELGKQLNWDPQMDINWDQPWPEEEGQAELMNLHDYPPYLALSNKERDEFWLHMNAWSLSQFLHGEQGALLVASQLCSCAPTFNAKLYAASQTFDEARHVEVFNQYIQKRIGLMYPINTHLNSIIDKILTDPRWDLKFIGMQIVIEGLALSAFNTTRETTPDPVLKDIVYLVTRDEARHVTFGVNYLEEFVQTLTIEEREERALFAFEACAISRERLVATDVFRRFGWDVEESRRKVLDGFVMSTFRNLLFQRVVPNLRRIGLLTDAVRPRFEELGILDYESLADDGDIDWAKLERPLDT

SEQ ID NO: 78475 - protein, 445 aa, Unknown
  Bacterial polypetide isolated from the Sargasso Sea
MEIVPLLLLVIICASLLVGFPVALTLAGVSIIFALICIPLGIFDPTIFKSIPIRIFGIMNNVTLLAVPLFIFMGTILEKSGIAAKMLENMAKAFRSIKGGLSISIIIVGALLAASTGIVGATVVTMGLMSLPILINQGYDKSFSAGLVASTGTLGQIIPPSIALVLLGDVMSNAYQRAQNDMGIFSQQTVTVGDLFIGAIVPGILICIGYLIYTLYKNSNNLDLKDTSTEFAINKVELFKTLALPVVLIFLVLGSIFAGIATPTEAAAIGAFGALLIALINRKVNLHFLKETSEKTAIVSTMIFTILIGASIFSLIFRGVGGDELIDLIFNSLPGGSFTALIFVLVIIFLLGFILDFIEICYVIVPLVAPPLLMMGFDPVWLAILFAINLQTSFLTPPFGFSLFYLRGVADKSIQTKEIYKGVIPFILIQIIILFAVMLFPILII

SEQ ID NO: 78476 - protein, 387 aa, Unknown
  Bacterial polypetide isolated from the Sargasso Sea
MSDNILPSQKIFSIKDARELSRKRLPKLVFDFIDGASGDEKLAEINSIALDQIRLEPKVLRNVEKRSLKKKVLGYEFNFPFGFAPMGMTNLSWPGADSMLAAESCRNNIPTCVSMASTTTLEKMYELSEGHSWMQLYIFQDENFVMELLERAKNTGYEVVILTVDVPVLSRRTRDDKNGFSYPFKIGPKQFFDFATHPTWSLSTLMSGIPKPMNYVTSKIGDGIFKRKESRGSTDWNTLKRVRDKWKGKLIVKGVMSPDDAIKIKEAGADAIQVSNHGGRQLDSASAAINMLPLIRKSVGSNFPLIFDSGIRSGSDIVRALAFGADYAMIGRPVMYAMGADGKKGLRRIVEIIKEEVSTTLGLVGLNDINEVTSEIVKENTINKVNY

SEQ ID NO: 78477 - protein, 411 aa, Unknown
  Bacterial polypetide isolated from the Sargasso Sea
MIGGEIKYYDGPTQAVYNPSSGEISKQIQLAKKETVEEAIDIAQTVFPEWRNTPAVKRARIMFRFKELLEKNSDRICQLIGEEHGKISHDAMGELQRGIENVEYACSAPEILKGEHSKNVGQSVDCWSEFQPLGVVAGITPFNFPAMVPMWMYPLAIVCGNCFILKPSERDPSSTLYIAELLHEAGLPNGVLNVVNGNKEAVDALLHDERIQAVSFVGSTPIAEYIYSTATTNGKRCQALGGAKNHAIVMPDADIDNTVNQLVGAAFGSSGERCMALSVAVVVGDEVGDVFVTKMQETMKTLKVGAYSESSNDFGPLITKEHRDKVASYIDSAEEQGASIIVDGRSIKVKGCENGFFIGGTLIDNVTPDMVSYKEEIFGPVLQVIRVKTMQEAMDIISNHEYANGTCIFTA

SEQ ID NO: 78478 - protein, 363 aa, Unknown
  Bacterial polypetide isolated from the Sargasso Sea
NILNIDDLQNMAKKRVPKMFYEYADSGSWSGETYRANQNDFSNIKFRQRVGVNIENRTLSKSFLGKKVSIPLALAPTGLCGMQHYNGEIFAAQASEEFGIPFTLSTMSICSIEDVAEATTQPFWFQLYVMRDKVFISNLLSRAQAAGCSVLQITMDLNILGQRHADVRNGLSAPPKFKLEHIKQIITKPRWALGMLRAKRHFFANVVGHAEGVTDSGALWSWIAEQFDSTFSWDDLDWIRNQWKGKILLKGILDPEDAEKAVKLGYDGIIVSNHGGRQLDGALSSIRALPYIVDKVGNKMEVYMDGGIRSGQDICKALCLGAQGVLIGRPFLYGLGANGKKGVTRCLEIMRDSLDESMGFLGE

SEQ ID NO: 78479 - protein, 296 aa, Unknown
  Bacterial polypetide isolated from the Sargasso Sea
LLRESAGLNVPGGNERFKAIVHRLLENMCTLIDDYNITEEEFWHAVNYLHELGGRQEAALLAAGLGLEHFLDLRQDAIDAAQHRETGTPRTIEGPLYVANAPLAEGYARMDDGRDAGEVMWLHGQVCDTQGRPVANAIVDIWHANTLGNYSFFDRSQSDYNLRRRIRTGADGRYSVRSIMPSGYGCPPDGPTQKLLNQLGRHGNRPAHIHFFVSAPGHKHLTSQINLNGDKYLWDDFAFATRDGLIADPVKITDRELIQQRKLDGEHTEVRFDFTLCTALNAEEEQRISRLRAQES

SEQ ID NO: 78480 - protein, 245 aa, Unknown
  Bacterial polypetide isolated from the Sargasso Sea
MFGKLSWDAVPFHEPIVMVTIAMIALGGLALVAGITYFKKWSYLWTEWLTSVDHKKIGVMYVIVAMVMLLRGFADAIMMRTQLAMATEGSPGYLPPEHYDQIFTAHGVIMIIFMAMPFFTGLMNLALPLQIGARDVAYPFLNSLSFWLLVSGVVLINVSLGVGEFAKTGWVAYPPLSGLQYSPGVGVDYYIWALQLSGLGTTLTGVNFLATVLKMRAPGMKLMDMPIFTWTCTWANVLIVASFPI

SEQ ID NO: 78481 - protein, 225 aa, Unknown
  Bacterial polypetide isolated from the Sargasso Sea
MKKFKAHILVVDDDDRIRDLVKQYLNENNYLVTTAISSEDAQEKVKVIKFDLIVLDIMMPGKSGLDFTTENKEKLYTPIILLTAKGEAEERIQGLELGADDYLAKPFEPKELILRIKNILNKTKSKNIKRLIEFGNIKVDLNKHIILKDNKEFKINNTEKTILEAMINSPGKSFSRDEIGKIINLDKERSIDVIITRLRKKIEREPKNPKYLQTLRGEGYVLWIE

SEQ ID NO: 78482 - protein, 396 aa, Unknown
  Bacterial polypetide isolated from the Sargasso Sea
LYRETKKQAVYIAEYYDYYAGLADKVEGTVLPIDKPNVQAITTRIPIGVIAAIIPWNSQMFLTATKVAPALAMGNTVVIKSSELAPAVLFEFAKLVEKTGIPKGVVNVITGFGDPCGKSLTTHNLVEKVAFTGGPETARHIIKNSAENLSEVSLELGGKSPVAVFDDAEQENAINGITAGIFGASGQSCIAGSRLYLQKGIYDEFLDKLSKRASKIKIGAPMDPETEMGPLSNFKQLEVIEKNIKETIDQGGKIKCGGERHSFSNKGYYFPPTIIECDNHNLPVAENELFGPVLSVMKFDTEEEVISKMNDNQYGLSSGVYTSNLSRGMRVSKAIRAGITFVNTYRLISPSAPFGGIKDSGYGKEAGIDSIKDYTRVKTTWFYTSDEPSLDPFSIR

SEQ ID NO: 78483 - protein, 425 aa, Unknown
  Bacterial polypetide isolated from the Sargasso Sea
MIICAALLVGFPVALTLAGVSIIFALICIPLGIFDPTIFKSIPIRIFGIMNNVTLLAVPLFIFMGTILEKSGIAAKMLENMAKAFRSIKGGLSISIIIVGALLAASTGIVGATVVTMGLMSLPILINQGYDKSFSAGLVASTGTLGQIIPPSIALVLLGDVMSNAYQRAQNDMGIFSQQTVTVGDLFIGAIIPGILICIGYLIYTLYKNSNNLDLKDTSKEFAIDKVELFKTLALPIVLIFLVLGSIFAGIATPTEAAAIGAFGALLIALINRKVNLHFLKETSEKTAIVSTMIFTILIGASIFSLIFRGVGGDELIDLIFNTLPGGSFTALIFVLIIIFLLGFILDFIEICYVIVPLVAPPLLMMGFDPVWLAILFAINLQTSFLTPPFGFSLFYLRGVADESIQTKEIYKGVFPFILIQIIIL

SEQ ID NO: 78484 - protein, 319 aa, Unknown
  Bacterial polypetide isolated from the Sargasso Sea
DNRIKKLYELGKELNWNGSIDLNWEYTHPSDERIIEPDEELPHEMLDAYQNLSEEEKILFDRHNTAELMSQFLHGEQGALLVASQLASCAPTYNAKLYAASQTFDEARHVEVFNRYLQDKIGIHYPINPSLKLLLDKILTDERWDLKFIGMQIIIEGLALAAFQMLKAITKDPLLKQLLHYVVRDEARHVTFGINYLEDYLKTLSKEELDERAEFAYEACVISRDRLINTKAEQRFLKMSEEEAREFQLNTGTFEMFRNFLFTRVMPNLKRIGLLTDEVRPKFEALGLLEYENAPDDFECDWAEMKKPLEKFGQIPTAL

SEQ ID NO: 78485 - protein, 387 aa, Unknown
  Bacterial polypetide isolated from the Sargasso Sea
MNDLIKPSTKIHTIDDAIRLSKKRLPKLVFDFIDGASGDDKLAEINSTALDQIRLEPKVFRNVENRNLSKKIFDFHFDYPFGFAPMGMTNLSWPEADKMIAKESAYNNIPTCVSMASSTTLEDMFTFSEGHSWMQIYIFQSEEFIMELLKRAENIGYKVLILTVDVPVLSRRARDDRNGFGYPFKIGPKQFLDFALHPQWSLTTLLKGAPQPMNYVTSKSGDQIFRRKESRGATDWNTLKRIRDAWEGKLIIKGVMNSEDALKIKEAGADAIQVSNHGGRQLDSATASINALPLIRKALGDNFPILFDSGIRSGSDILRALALGADFVMFGRPLMYAIGADGARGLRRIINLIKEELSTNLGLVGLTDINEVDKKIIAEKFFKDIKY

SEQ ID NO: 78486 - protein, 178 aa, Unknown
  Bacterial polypetide isolated from the Sargasso Sea
MGPLVTKEHLAKVKGYVDIGVKEGAKLIVDGRKFKMQGYENGYYIGGCLFDQVTKNMRIYKEEIFGPVLSVVRAKDFDEALKLVNDHEFGNGVSIFTRDGDSGRTFSSKAKIGMVGINIPIPVPMAFHSFGGWKRSLFGDQHMHGPEGVRFYTKLKTITSRWPSGLRSDPEFVMPTMK

SEQ ID NO: 78487 - protein, 318 aa, Unknown
  Bacterial polypetide isolated from the Sargasso Sea
MTFNKMPPYRAEHVGSFIRPNELLDAARSFKKGKITTEKFDAIKNKSISDIVSFQDSIGMPSITDGEFRRRVWSGGVSDALTGMSIKDSGTLTFKSAEGDVLMPPSPYAEGKLSRKHNIVTDDFKFIQSLNIKGHAKVTMASPPVMHFFLGKESYNSQVYSSDEEYFADLARVYQEEIIDLTAAGCTYIQLDDTALACNCDFDARKSVIGRGEDPDYLTDIYVRAINSAISNRPSSMFVGMHMCRGNLKGLWMAAGGYEPIAEKIFSELNIDAFFLEYDNERSGDFEPLRYLPVGKVAVLGIVSTKTPELEDKDYLKR

SEQ ID NO: 78488 - protein, 443 aa, Unknown
  Bacterial polypetide isolated from the Sargasso Sea
MSKLKQYKMYIDGEWVDSDTKKTFETLNPENNKPWAVVPEASANDVDRAVKAAQKAFEGEWPKLLPRERGKYLRAIADKLRKNAELLGEIETIDTGKLFRETKKQANYIAEYYDYYAGMADKVEGTVLPIDKPNVQAITTRVPIGVIAAIIPWNSQMLLTVTKLAPALAMGNTVVIKSSELAPAVLFEFAKLIEQTGIPKGVVNVITGFGDPCGKALTTHNLVEKIAFTGGPETARQIIRNSAENLSEVSLELGGKSPVAVFDDANQENAINGITAGIFGASGQSCIAGSRLYLQKGIYDEFLKKLVERAEKIKIGAPMDSESEMGPISNFKQLEIIEKNIKLTVEQGGRIRCGGKRHSFSNEGYYFPPTIIECDNHNLPTAENELFGPILSVMKFEKEDEVINKMNDNQYGLSSGVYTSDFARGMRVSKSIRAGITFVNTYR

SEQ ID NO: 78489 - protein, 165 aa, Unknown
  Bacterial polypetide isolated from the Sargasso Sea
MGVIDKFGVPKPISKILNWARAYDMWYFQFGLACCAIEVMATSGPRHDFMRLGIIPLPASPRQADLMVVAGTVTDKMAPAVKRLYDQMPEPKYVISMGSCSNSGGPYWDSYSVTKGVDQLIPVDVYVPGCPPRPEALQEGIVLLQKKIKGENIQEKWREKDIEPV

SEQ ID NO: 78490 - protein, 490 aa, Unknown
  Bacterial polypetide isolated from the Sargasso Sea
MSELKKYQMFIDGQWVDSDTKKTFETLNPENNKPWAVVPEASANDVDRAVKAAQKAFEGEWPKMLARDRAKYLRAIGSKLRENSELLGKIETIDTGKLYRETYQQAKYIAEYYDYYAGLADKVEGTVLPIDKPNIQAITTRIPIGVIAAIIPWNSQMFLTATKVAPALAMGNTVVIKCSELAPATMFEFAKLVEETGIPKGVVNVVSGFGDPCGKALTTHNLVEKVAFTGGPETARHIIRNSAENLSEVSLELGGKSPVAVFDDAKQENAINGITAGIFGASGQSCIAGSRLYLQKGIYKEFLDKLASRAEKIKIGAPMDSDTEMGPLSNFKQLEVIEKNIKLTVEQGGKIKCGGKRHPFSNEGYYFPPTIIECENHNLPAAENELFGPVLSVMKFDTEKEVIELMNDNQYGLSSGVYTSDLARGMRVSNAIRAGITFVNTYRLISPSAPFGGIKDSGYGKEAGIDSIKDYTRVKTTWFYTSDEPSLDPF

SEQ ID NO: 78491 - protein, 249 aa, Unknown
  Bacterial polypetide isolated from the Sargasso Sea
MQEATVYPSLSQKVVFITGGASGIGAAMVRAFAAQQAQVAFIDVDLDAAETLQQELSSSQLWFRQVDVRQPSLLQKAIQDAAKDLGAFDVLVNNVANDKRQPTAEVTSMDWQQCMQVNLDPAFFASQSAFELMKVQQHGCIINFSSINALVGQQQMAGYVTAKAGIIGMTKALAKDYGNAGIRVNAILPGWVATERQLATWFTSEEQQKWLESSAIKRLITPRDIANLALFLASDQSAFITGQTISVDG

SEQ ID NO: 78492 - protein, 363 aa, Unknown
  Bacterial polypetide isolated from the Sargasso Sea
MSKLKQYKMFIDGEWVDSESKKTFETLNPENNEPWAVVPEASTKDVDRAVKAAQKAFEGEWPKLLPRDRAKFLRAIGDQLRKNAEMLGKVETIDTGKLFRETKQQANYIAEYYDYYAGLADKVEGTVLPIDKPNVQAITTRIPIGVVAAIIPWNSQMFLTATKLAPALAMGNTVVIKSSELAPAVLFEFAKLIEQTGIPKGVVNVITGFGDPCGKTLTSHDLVEKIAFTGGPETARRIIKNSAENLSEVSLELGGKSPVAVFDDAEQENAINGITAGIFGATGQSCIAGSRLYIQKGIYNEFLDKLSSRASKIKIGAPMDLDTEMGPLSSFKQLETIEKNIKDTVDQGGKIKCGGKRRLLSNK

SEQ ID NO: 78493 - protein, 437 aa, Unknown
  Bacterial polypetide isolated from the Sargasso Sea
MPSKSSINNIIKLSIPIFFANLAIPLVAIVDTGLMGNLENGSYLVATSIASTVFSMIFWSFGFLRMGTVGMVAQAHGSNQFHEIINLVLRNIIFVLIISLLLIFLQAYIFKLALLIFELTPETTKYFKDYFNIRIYSSFGELTIFVITGLFIGLQKTKTSSIVVGVFSITNILFSLAFVVYFNLNVKGVALGTLVSSTLTSIIFLFFTFFELKKITTLEFNYKKIFNFNKIKNIFNINFNIFIRSLLLTFSFLFFTYLGNSISEDVVAANTILINLIMLSAFILDAYAFSTEGLVGYSIGSKNKKLLKEIIKNSFILSSSTGLIISFGYFFGKNHFIEIMTDLESIKIICISYSVWIVIIPFISSFCYQFDGIFVGASKTTELRNAMIMSVGIYLLTAILLVNFFGNLGLWIALSVFFILRGLTLFLYLGKIYKAAI

SEQ ID NO: 78494 - protein, 249 aa, Unknown
  Bacterial polypetide isolated from the Sargasso Sea
MDLGLTGKVAIVTGSARGLGAATARRLAQEGASVVITDIAAELAQATAKALQDDGLAAHCIVGDITREADVQRLVDQTIEHFGGVHILVNNAGAPRDKYLVKMSEDDWDFVMNVMLKGAFLAARAVMPHFIEQGWGRLINISSRAYLGNPTQANYSAAKAGLIGMAKALSMEEGRYGITANCVAPGFMETEMVQALPTYETIKERAVAAQPIKRVGRPDDIADAVAFLASERAGFISGEVLHVTGGRYG

SEQ ID NO: 78495 - protein, 246 aa, Unknown
  Bacterial polypetide isolated from the Sargasso Sea
MIQDKVVVITGASSGIGHSTAKALAKKGAKIVAGARRLDRLESLKKEITDDGGEITICETDVTKKADCDNLVKQALDKYGTVDVLVNNAGLMPLSFVKSLKVDEWDRMIDVNIKGVLYCTAAVVPTMTEKKSGHIINISSVAGRIVFPAGSVYCATKHAVTAFSEGLRQELSVRKNIRVTSIEPGVVQTELTNTITEDSLQGFIEKGKQMEALQADDISNAIIFAIDAPNHMNVNEILIRPTTQDH

SEQ ID NO: 78496 - protein, 445 aa, Unknown
  Bacterial polypetide isolated from the Sargasso Sea
MEVIPLLLLIIICSALLVGFPVALTLAGVSIIFALICIPLGIFDPTIFKSIPIRIFGIMNNVTLLAVPLFIFMGTILEKSGIAAKMLENMAKAFRGLKGGLSISIIIVGALLAASTGIVGATVVTMGLMSLPILINQGYDKSFSTGLVASTGTLGQIIPPSIALVLLGDVMSNAYQRAQNDMGIFSQKTVTVGDLFIGAIVPGILICIGYLIYTLYKNSNNLSIKDTSTELAIDKVELLKTLALPIVLIFLVLGSIFAGIATPTEAAAIGAFGALLIALINRKVNLNFLKETSEKTAVVSTMIFTILIGASIFSLIFRGVGGDELIDLIFNSLPGGSFTALIFVLIIIFLLGFILDFIEICYVIVPLVAPPLLMMGFDPVWLAILFAINLQTSFLTPPFGFSLFYLRGVADESIQTKEIYKGVVPFILIQIIILFTVMLFPVLII

SEQ ID NO: 78497 - protein, 347 aa, Unknown
  Bacterial polypetide isolated from the Sargasso Sea
MDEVLQGRVQVGQKAMINSKADLNQLVPFKYKWAWEKYLDGTANHWMPQEINMTADIALWKAADGLTDDERMIVKRSLGFFSTADSLVANNVVLAIYKHITNPECRQYLLRQAFEEAIHTHAYQYCIESLSMDEGEIFNMYREVPCVEAKAAWALKYTKELEDPSFETGTPENDKTFLSNLIAFYCVLEGMFFYCGFSQILSMGRRNKMTGVSEQFQYIMRDESMHVNFGIDMINSIINENPHIWDEEMQKRASDMIVEGTELEVNYAKDTMPRGVLGMNAKMMEEYLQYVCNRRLAQINLPEAYPGAKYPPSMQWMSEIMDLRKEKNFFETRVIEYQVGGSLQFDD

SEQ ID NO: 78498 - protein, 358 aa, Unknown
  Bacterial polypetide isolated from the Sargasso Sea
MKIEYTKETPRKIRDYNQEEIVLNAEEVEDIAEIFKTPLTGTYNWDYSVQDNRIAKLYELGKKLNWNVSMDIDWDRPMVVSDEVPPMFWDEYPPYKKLTLEEKREFLRHRGASQFSQFLHGEQGALLVASQLVSCAPTYQAKLYAASQTFDEARHVEAFTKYIQNRSKLMYPVGAGLKSLLDKILTDERWDLKLIGMQIIIEGLALAAFNTAKAVTPDPVLRDILHLIIRDEARHVTFGVNYLEDFIENLTDEEREDRAMFAYEACVISKERLFPTDVFRRFGWNEDEAREFSNKAGFATEFQRLLFSRVVPNLSRIGLLTDKVRPLYDQLGVLEFESHSSDGDITWADLEKPLDLSA

SEQ ID NO: 78499 - protein, 249 aa, Unknown
  Bacterial polypetide isolated from the Sargasso Sea
MSQFLHGEQGALLVASQLASCAPTYNAKLYAASQTFDEARHVEVFNRYLQEKIGIHYPINPALKSLLDKILTDERWDLKFIGMQIIIEGLALAAFSMLKSTSKDPLLKQLLHYVIRDEARHVTFGINYLEDFIKTLTPEEINERAEFAYEACVISRERLINTKSQQRFLGMSEEEAREFQLNTGSFEMFRNFLFSRVIPNLSRIGLLTDEVRPKFEALGLLEYENAPDDFECDWAEMRKPLEEFEKIPV

SEQ ID NO: 78500 - protein, 263 aa, Unknown
  Bacterial polypetide isolated from the Sargasso Sea
MELGLNDKVVLITGGARGIGAAAVQAFLNEKCNVVFVDRDSKSGSELAKSLGNRGKFIEAELNTSESCEQAVEMTVSFFGGIDVLVNNAGFNDGLGLDTAPEEFMDSVRTNLLHVYSMTHYSLPQLRKSQGCLVNLGSKVSETGQGNTSAYAAAKGAIQALTREWAVALAPDNIRVNCVMPAECHTDQYEKFFQTSKNPEATRQAIGNLVPLSRRLTTPEEIAQTIVFLSSNCSSHTTGQHIFVDGGYTHFDRAVGHDHDKWQ

SEQ ID NO: 78501 - protein, 239 aa, Unknown
  Bacterial polypetide isolated from the Sargasso Sea
ASGLVKPGKKVAHEMTLNDIKETIDAYASDAKICEEIGFDGVEIHGAHGYLIDNFFWSGTNIREDEYGGSIENRSQFVSDIIKSVRENVSENFIVGLRFSQWKQHDFEAKLASNPEELKTILTSPVESGLDYLHSSMRRFWESEFEGSKENLAYWTKKITKIPTIGVGSVGLDSDFIDMTAPATPTSIDKAIDDITNDKYDLIAVGRALLSDHEWVLKMKEGRVNDVIPYTKDALLNLY

SEQ ID NO: 78502 - protein, 427 aa, Unknown
  Bacterial polypetide isolated from the Sargasso Sea
MHKITSYLTLDEQAKELVDLVHGTHIGLTFSETAVLLLLLSSPNAIFTKEELLHVGWPERVVAPTSLTQCISTLRKKLEPYTEVQLKTVARRGYQLHVSEQSHVKMLAINDADAIRDAIVGVSAWTKVAGIIMLGVILTLVWYWSDHHAVVKRVAKWNADKYISLNIGGTLGTAQVLYIDDEEHLHPSWWQKHLAPEGNHISGLPYFSAFAATDGKNYSMAICPSLDAKDCNGKGIINITSIDATPAGLDMAEFIPLSKKMEERIRYNRIVLPIDDKGAGELLEHNYHADIYFPVAGELLVRTDLSMSLVYEGENRGKFYSTSCITDQDCLTTPIKYTIRGEFEQYQTQIDDLNVDVFHVKVSQKELTKPDEVSHSAMQFYRAIRKHDIRDEDLFYYRVYQNQGTAVWIVPQMGQLLAWTQYTQVKL

SEQ ID NO: 78503 - protein, 341 aa, Unknown
  Bacterial polypetide isolated from the Sargasso Sea
MRRGYAALLAARPALTWRMEIRRTREAGQPPSAQINARGSQLPRRTAKRHPALHGGLFHLESDCLNRFYRQSRRDERVSLLEEDRIGNRLPAAPAGARQAGCGAAASRAPTAAQSGPGTRSACLPQPFVRLVHPCRSAALEVGLGPFSSTSQETAMIVFVTGASAGFGAAIARAFVKGGHRVVATARRKDRLQALADELGDALLPYELDVRDRAAVEAVPASLPAEFAALDVLVNNAGLALGIEPAQKASLDEWNTMIETNCTGLVQVTHALLPGMVERNRGHIFNLGSAAGSWPYAGGNVYGATKAFVHQFSLNLRADLAGTALRVTNIEPGLCGGTEFS

SEQ ID NO: 78504 - protein, 47 aa, Unknown
  Bacterial polypetide isolated from the Sargasso Sea
MDSLSVKDKSLIFNTDLVETLEFDNLIRQAITTMDSAYHRKESRGAH

SEQ ID NO: 78505 - protein, 282 aa, Unknown
  Bacterial polypetide isolated from the Sargasso Sea
MKKTPYIWLISGCSSGFGREIALQALSAGDFVGVSSRNVKDVEDICKEYPKTALPIKLDVTNKDEIKESIQTINKVYGGLDVLVNNAGYGYLAAIEEGENEEVRKLFETNFFGALELTKAALPGMRAQRFGRIINNSSQAGIMANPGTGYYSSSKYALEGLMEALDKELRPLNISVTSVQPGAFRTDWSGRSMKRSNIEIDDYSEHVKQRIDMIGNIDGKQPGDPVRAAKIIFELSRDSNPPDKLLLGAGVLATYKEKLSALLNQIDEFEETSKSADFPQIK

SEQ ID NO: 78506 - protein, 270 aa, Unknown
  Bacterial polypetide isolated from the Sargasso Sea
MDRHRVSWNLSQFLHGEQGALLVASQLVSCAPTFNAKLYAASQTFDEARHVNCFNRYLKEKIGFQYPSTDGLKSLMDKILTDERWDLKFIGMQIIIEGLALAAFNNLKLILNDGLLKQLLHYVIRDEARHVTFGVNYLEDYLKTLSKSEIEDRAQFAFEACVVMRDRLISGEVISRFLDYTPEEAHKIAEESEQGENFKNLLFTKIIPNLTRIGLITDKVRPKYEKLGVLSYQELEDNFNVDWAEISKPYETQEEIEQEISSVFENSAQN

SEQ ID NO: 78507 - protein, 368 aa, Unknown
  Bacterial polypetide isolated from the Sargasso Sea
EKSGIAAKMLENMAKAFKGIKGGLSISIIIVGALLAASTGIVGATVVTMGLMSLPILINQGYDKSFSAGLVASTGTLGQIIPPSIALVLLGDVMSNAYQRAQNDMGIFSQQTVTVGDLFVGAIVPGILMCIGYLVYTLYKNSNNLNIKDNSTEFALDKVELFKTLALPIVLIFLVLGSIFAGIATPTEAAAIGAFGALLIALVNKKVNLHFLKETSEKTAIVSTMIFTILIGASIFSLIFRGVGGDELIDLIFNSLPGGSLTALIFVLIIIFLLGFILDFIEICYVIVPLIAPPLLMMGFDPVWLAILFAINLQTSFLTPPFGFSLFYLRGVADETIQTSEIYRGVIPFILIQLFILATVLMFPAIII

SEQ ID NO: 78508 - protein, 252 aa, Unknown
  Bacterial polypetide isolated from the Sargasso Sea
MYLQKINLKNKHALVTGAGKGLGRACSIALAEAGATVIALSRTSSDLNKLEKDIKNVKGKIIKVSCDVMNYEDLKQKLDKIKIIDVLVNNAGTNIPEPFEKIKQKSMNYLVDLNLKAAFNVAQIVVKKMLKNKKRPGSIINMSSQLGHVGMGGRNVYNMTKFGIEGLTKGMGVELAKKNIRVNTVAPTFVKTPMVKNFFKNKKFKKLALGNIPMGKAATESDVATTVCFLASSASSMITGTSIIIDGGWTAQ

SEQ ID NO: 78509 - protein, 493 aa, Unknown
  Bacterial polypetide isolated from the Sargasso Sea
MSKLKKYKMFIDGEWVDSESKKTFKTLNPETNEPWAEVPEANEKDIDKAVKAAQKAFEGSWPSLFPRERASYLRAIANELRENAELLGKIETIDTGKLFKETKNQANYIAEYYDYYAGLADKVEGTVLPIDKANMQVITTRVPIGVVAAIIPWNSQMLLTAVKLAPALAMGNTVVIKSSELAPATLFEFGKLIEKTKIPKGVVNIVSGYGEPCGKSLTSHDLVERIAFTGGPETARHIIKNSAENLSQVSLELGGKSPVAVFEDADQENALNGITAGIFGASGQSCIAGSRLYIQKNIYENFLDKIVNKAKKIKLGSPMDNATQMGPLNSLKQLEIIEKNIKLTLDQGGKLRCGGKRHSMSNKGYYFPPTVIECNNHNLPTAENELFGPVLSVMKFDTEEEVIKKMNDNQYGLSSGVYTKNINRALRVSKAIRAGITFVNTYRLISPSAPFGGIKDSGYGKEAGIESIKDYTRIKTTWFNTSDKPMDDPFTMG

SEQ ID NO: 78510 - protein, 245 aa, Unknown
  Bacterial polypetide isolated from the Sargasso Sea
MSEVSGKVVIITGASSGLGEATAKMLADKGAKLVLGARREDRLKKLVDEIESSGGQATYQTVDVTKKDEVKALAKAAIDAYGRIDVLVNNAGLMPLAPLDEMKVDEWDQMIDVNIKGVMYGVAAVLGQMREQKSGHIINLSSVAGHVVFPGATVYCATKFAVKAISEGIRRESNGEIRSTNISPGAVATELTDHISHKDSKQMADDMYDDAIDADAIARAVTFAIEQPGDVDINEMIIRPTRQEL

SEQ ID NO: 78511 - protein, 1154 aa, Unknown
  Bacterial polypetide isolated from the Sargasso Sea
MKQIKKILIANRSEIAIRISRAATELGFRTVSIYSYEDRFALHRFKTDESYLVGSGLGPIQAYLDYKGIVQIAVNSGCDAIHPGYGFLSENPEFADECAKHNIIFVGPSPKIMRSLGNKVEAKKTAGKAKVPTIPSTGPLPKDLKKCKDLAKKIGYPIMLKASWGGGGRGMRVIRKETELENQINTARREAKSAFGKDDVFFEKLIEKAFHVEVQIIGDTHGNIVHLFERDCSLQRRHQKVVERAPAAYLSDKERNEICNAGVRIGKQVNYSCAGTVEFLMDAKSRDFFFIEVNPRVQVEHTVTEEITGIDIVKAQFLLAAGAKIGDYICGVPTQKDIHMKGHAIQSRVTTEDAANDFAPDYGKINVYRSASGLGIRLDAGTASTGTVITPYYDSLLVKVTAKGQTPIEAKRRMNRALSEFRVRGVKTNIPFLLKLINHKGFDVFKYHTKFIDSEKSLFQFSGRKDRATKTLNFLAEVIVNGNPEVSNRPKLRETTPAKLSDYGISRSKKAQETVNKTYKQILDTNGPSAVAETVLKEKQLLITDTTFRDAHQSLIATRMRTQDMLGITDLYEERLKNLFSVECWGGATFDVALRFLKEDPWERLEKLREQMPSALLQMLFRGSNALGYTNYPDNVLRRFIQLSAQSGIDVFRIFDALNWIENMRVSIDEVLKSGKICEASICYSGDLSSPAEKKYTLDYYLKMAQKLEKMGVHFLAIKDMAGLCKPKAAKILFKELKKSIKIPIHFHTHDTSGNGVATLLNASEAGVDIVDVAIDSWSGFTSQPSFGAVLESLDGNKRDPKISSAVVRTAANYWEGVRKQYQPFESKTRTSMSEVYLHQMPGGQYTNLREQARSMGITDERWPELASMYAEVNKIFGDVIKVTPISKVVGDMAIYMLANNIQIQDVLDPKKDVGFPASVIEFFSGRLGQPYKGFPKALQKKILKGKKPINYRFGSKLPSLKIKNRTKELEKKYSETISEKDTISQIFFPEVFDEYIKHKKKFGNTSVIPTSNYFFGMNTGEEIYVSIEPGKTLIIRYFTLSEPNEKGYRTVYFELNGQARSVDIKDNSIAVDDLAKEIADPSNKDHVAAPIPGLLVDVAVTEGIKVPKGAKLCTIEAMKMETVIYADQPGIVERLCVKAGENIEAQQLLLIIK

SEQ ID NO: 78512 - protein, 337 aa, Unknown
  Bacterial polypetide isolated from the Sargasso Sea
MTLNLGPQHPATHGTLRIVAKLDGEKVVAAEPIMGYMHRGYEKLTEVRTYPQVTTLVNRIDWLGSFANEVPFILAAEQLMDVEAPPRAQWIRTVLFELSRIANISLFLGDMAVQVGATTPVFYAFRDREFVLNQIERVTGGRFHPNFDRIGGLKDDLPKGWIEETATVIGKMRDFCDEMEELVLGNEIFQARTRGIGVIPPEVALSYGLSGANLRASGVDWDIRRDANVGLVYDEVDWKVWTHPDGDSFARFWVRLQETREACDIIEQLLGGIPAGPIMAKVPRIIKVPAGEAYVATENPLGEMGFYVVSQGDLTPFRVKIRSASFSNMSITPWLLK

SEQ ID NO: 78513 - protein, 387 aa, Unknown
  Bacterial polypetide isolated from the Sargasso Sea
MSDNILPSQKIFSIKDARELSRKRLPKLVFDFIDGASGDEKLAEINSRALDQIRLEPKVLRNVEKRSLKKKVLGYEFNFPFGFAPMGMTNLSWPGADSMLAAESARNNIPTCVSMASTTTLEKMYELSEGHSWMQLYIFQDENFVMELLDRAKNTGYEVAILTVDVPVLSRRTRDDKNGFSYPFKIGPKQFFDFATHPIWSLSTLLSGIPKPMNYVTSNSGDGIFKRKESRGSTDWDTLKRVRDKWKGKLIIKGVMSPDDAVKIKEAGADAIQVSNHGGRQLDSATAAINMLPLIRKSVGSDFPLIFDSGIRSGSDIVRALAFGADYAMIGRPVMYAMGADGRKGLRRIVEIIKEEASTTLGLVGLNDINDVTSNIVIDNTVNKVDY

SEQ ID NO: 78514 - protein, 332 aa, Unknown
  Bacterial polypetide isolated from the Sargasso Sea
MKIKKQSGPPEDLIYFDDDLPLSQSQVEDVVEIFKTPLTGSYNWDYTVADNRIKKLYELGKELNWNGSIDLNWDYTHPADERILETDDELPHETLKAYENLSDEEKILFDRHDVAELMSQFLHGEQGALLVASQLASCAPTYNAKLYAASQTFDEARHVEVFNRYLQEKIGIHYPINPALKSLLDKILTDERWDLKFIGMQIIIEGLALAAFSMLKSSSKDPLLKQLLHYVIRDEARHVTFGINYLEDFIKTLSPEEINERAEFAYEACVISRERLINTKAQQRFLNMSEEEAREFQLNTGSFEMFRNFLFSRVIPNLSRIGLLTDEVRPKI

SEQ ID NO: 78515 - protein, 285 aa, Unknown
  Bacterial polypetide isolated from the Sargasso Sea
MGVVNSVNENGIEIGTVLATHPEIDVITFTGSSRTGKIVMEKAAPTLKRLSLELGGKSPAIVFPDADINNAVSEIVKATIVLNGQMCTCISRVLVSKKIEQELTASLKNALGSVKIGHGLDPSTNLGPLIDMENQKRAIGLIELAEKEAKMILRGEPGLGDLSKGSFISPTIFRIDDTTHSLVQNEHFIPMISIETFDNEIEAIEKSNATRYGLAASVYTNDLNLAMRVSRAIKTGTVWLNSHNRHMAEAETGGYRESGMGRLHGPEALNDFLETKHIYLEAGKN

SEQ ID NO: 78516 - protein, 277 aa, Unknown
  Bacterial polypetide isolated from the Sargasso Sea
MSSKLKIGSRVALSDGNSMPLLGLGVWDAKSGKETYDAVIHALSKGYRHIDTAELYGNEKDVGSAVIDSGIAREEIFITTKLWDSGLGYDHALNAFDVSLKKLNLEYIDLYLIHWPEKGSRREIWSALERIKKEGRSLSIGVSNFAPKHLNEILINANFTPAVNQIEMSPFLHQQEISSFCKKENIHLTGYCPLARGTRFNNPLLCRVAEETNKTAAQVMIRWAIQNGNTVIPKSVRPKRIEENANVFDFELREDQIKILDELEEGLRFCPDPLVLP

SEQ ID NO: 78517 - protein, 499 aa, Unknown
  Bacterial polypetide isolated from the Sargasso Sea
MTTQVKHYIDGEFTTGTGTSQIVVTNPANNEPIALINSATADEVHAAIASAKAAFKTWKEVPVSERARVMLRYQHLLKEHHDELATILAKETGKTFEDAKGDVWRGIEVAEHACNIASLLMGETVENVARSIDTYSYTQPLGVCAGITPFNFPAMIPLWMFPLAIACGNTFILKPSEQDPMTPQRLVELFVEAGAPKGVLQLVHGDKTAVDILLADPAVKAISFVGSVAVGQYIYKTGTDNLKRVQAFAGAKNHCVIMPDANKQQVINNLVGASVGAAGQRCMAISVAVFVGAAKEWIPELKEALAKVRPGLWDDKEAGYGPLISPAAKARVLKLIAQGKEEGAECLLDGSDFSVAGYESGNWVGPTMFTKVTTDMSIYKEEIFGPVLCCMESDSLEDAIELVNASPYGNGTSIFTASGAAARKYQHEIEVGQVGINVPIPVPLPFFSFTGWKGSFYGDQHAYGKQAVRFYTETKTITSRWFESDIAVAAGPNMSINLR

SEQ ID NO: 78518 - protein, 248 aa, Unknown
  Bacterial polypetide isolated from the Sargasso Sea
MIVFVTGASAGFGAAIARAFVTGGHRVVATARRKDRLDALAAELGDSLLPLELDVRDRAAVEAAPAALPAEFAALDVLVNNAGLALGVEPAHKASLDEWHTMIDTNCTGLVTVTHALLPGMIDRGRGHIFNLGSVAGSYPYAGGNVYGATKAFVRQFSLNLRADLLGTPLRVTDVEPGLCGGTEFSNVRYRGDDAKAANVYNNVQPLMPEDIADAIYWIATRPAHVNVNTIELMPVAQAPGGPTVHRG

SEQ ID NO: 78519 - protein, 246 aa, Unknown
  Bacterial polypetide isolated from the Sargasso Sea
MIQDKVIVITGASSGIGHSTAKALAKKGAKIVAGARRLDRLETLKKEITDDGGEITICETDVTKKADCDNLVKQALDKYGTVDVLVNNAGLMPLSFVKSLKVDEWDRMIDVNIKGVLYCTAAVVPTMTEKKSGHIINISSVAGRIVFPAGSVYCATKHAVTAFSEGLRQELSVRKNIRVTSIEPGVVQTELTNTITEDSLQGFIEKGKQMEALQADDISNAIIFAIDAPNHMNVNEILIRPTTQDH

SEQ ID NO: 78520 - protein, 429 aa, Unknown
  Bacterial polypetide isolated from the Sargasso Sea
MMRFAHLLKEHQADMAEIICRELGKTVEDAKGDVWRGIEVVEQAANIPSLMMGETVENVARSIDTYSYIQPLGVCAGITPFNFPAMIPLWMFPMAIACGNTFILKPSEQDPMTVNKIAELFALAGAPAGVLQVVHGNKEQVDVLLRHPDIKAISFVGSVNVGQYIYKTGTDHLKRVQAFAGAKNHMVVMPDANKQQVINALVGASVGAAGQRCMAISVAVFVGDSQQWIPEVAAAIAKVRPGVYTDPEAAYGPQISPQAKARILSLIEQGKVEGATCLVDGSDIKVAGYPNGNWVGPTVFSDVTPDMTIYKEEIFGPVLATVNAASLDEAIELVNNSPYGNGTSIFTASGAAARKYQHEIEVGQVGINIPIPVPLPFFSFTGWKGSFYGDQHAYGKQAVRFYTETKTITARWFDDSIPVSGPNMSINLR

SEQ ID NO: 78521 - protein, 276 aa, Unknown
  Bacterial polypetide isolated from the Sargasso Sea
MQIKDAIEYSINVLTLSDSKQIDSEVLLCFVLKCNRTKLYTHSKEELSNQNKNIFKKLVKKRAKGCPIAYITNEKEFWSHTLFVNESTLIPRPETELLVEISIKLIKNHSLNEILELGTGSGAVAIAIASENLDTNIDATDINDEAINVATKNILKHNIKNINFIKSNWFNSIGIKKYDLIITNPPYIETNDPCLTNSDIKFEPIIALASGIDGLDDLRKIISNSHNKLKNNGWLVVEHGHNQGNDVRNLFIKNCFTTTTIKDYNQLERVTYGKLI

SEQ ID NO: 78522 - protein, 368 aa, Unknown
  Bacterial polypetide isolated from the Sargasso Sea
MKIHKQDGPPEDLLYFDEDINLTQKQVEDVVEIFHTPLTGAYNWDYTVADNRIKKLYELGKELNWNGSIDLNWDYTHPADKRIMEPDEELPHEALDAYNDLTEEEKILFDRHSTAELMSQFLHGEQGALLVASQLASCAPTYNAKLYAASQTFDEARHVEVFNKYLQDKIGIHYPINPNLKLLLDKILTDERWDLKFIGMQIIIEGLALAAFQMLKAITKDPLLKQLLHYVVRDEARHVTFGINYLEDYLKTLSPEEIEDRAQFAYEACVISRDRLINTKSEQRFLKMTEEEAREFSLNTGSFELFRNFLFTRVMPNLKRIGLLTDSVRPKFEALGLLEYENAPDDFECDWAEMKKPLEKFGQIPEVV

SEQ ID NO: 78523 - protein, 366 aa, Unknown
  Bacterial polypetide isolated from the Sargasso Sea
MKIKKQSGPPEDLIYFDDDLPLSQSQVEDVVEIFKTPLTGSYNWDYTVADNRIKKLYELGKELNWNGSIDLNWDYTHPADERILETDDELPHETLEAYENLSDEEKILFDRHDVAELMSQFLHGEQGALLVASQLASCAPTYNAKLYAASQTFDEARHVEVFNRYLQEKIGIHYPINPALKSLLDKILTDERWDLKFIGMQIIIEGLALAAFSMLKSTSKDPLLKQLLHYVIRDEARHVTFGINYLEDFIKTLSPEEINERAEFAYEACVISRERLINTKSQERFLKMSEEEAREFQLNTGSFEMFRNFLFSRVIPNLSRIGLLTDEVRPKFEALGLLEYENAPDDFECDWAEMRKPLEAFEKIPV

SEQ ID NO: 78524 - protein, 525 aa, Unknown
  Bacterial polypetide isolated from the Sargasso Sea
MTTRIYVPRDSSALALGADALAAAIEAEAERRGIAIELVRNGSRGLLWLEPLVEVGTAAGRVGYANLSAADVPALFDANWLEGGTHPSAVGLVDALPYLARQQRLTFARIGLTDPLSIDDYLRYEGLVGLKNALALDGDAACETLIESGLRGRGGAAFPAGIKWRTVRQARAAQKYIVCNADEGDSGTFSDRLIMECDPYCLIEGMIIAGVATGATVGYIYVRSEYPHAIATLEAAIVRAREAGWLGEHVLGSAHAFELHVAKGAGSYVCGEETALLESLEGKRGVVRAKPPLPALAGLYGQPTVINNVITLATAPVIFARGAAFYRDYGMGRSRGTLPFQLAGNIRHGGLVELAFGVTLRELLFDFGGGTASGRPARAAQVGGPLGTYLPDHQWDVPLDYEAYTAIGAVVGHGGIVLHDDTSNLAELAEYAMKFCAIESCGKCTPCRIGSTRGVETIARIRHGDTSERQVTLLRDLCDTMLAGSLCAMGGMTPYPVLSALDHFPEDFGLAAGKHAASGPVKAAA

SEQ ID NO: 78525 - protein, 212 aa, Unknown
  Bacterial polypetide isolated from the Sargasso Sea
VAVAVGKIADPLVNSLSKKVESLKIGPGLDKKSQMGPLVTKEHLEKVKGYVDIGVKEGAKLVVDGRNLKLQGYENGFYMGGCLFDNVKKDMKIYKEEIFGPVLSVVRAKDYSEALSLVNDHEFGNGTSIFTRDGDTGRSFASNVKIGMVGINIPIPVPMAFHSFGGWKRSLFGDQSIHGPEGVRFYTKLKTITSRWPSGIKSDPEFVMPTMK

SEQ ID NO: 78526 - protein, 170 aa, Unknown
  Bacterial polypetide isolated from the Sargasso Sea
VKPNTPHENSPQSEMDKCLDRFDKIRNSKGETNTSQLRLSMQKTMQSKCAVFRTEKTLKEGVEEIRKPFEGLEDISVKDKSLLFNTDLVESLEFDNLIRQAMTTMDSAYHRKESRGAHAREDFSKRDDKKFMKHTLAWQNGKEVKVKYRDVHAKTLTNDVQYFPPKERVY

SEQ ID NO: 78527 - protein, 322 aa, Unknown
  Bacterial polypetide isolated from the Sargasso Sea
MLENPVYKPFRYPWCYDAWLTQQRIHWLPEEVPLGDDVRDWQKNLSQAEKNLLTQIFRFFTQADVEVNNCYLRHYTTVFKPTEVLMMMTAFASMETVHIAAYSHLLDTIGMPETEYSAFMKYKEMKDKYDYMQNFNVNSKEDIAKTVAVFSAFTEGLQLFASFAILLNFPRFNKMKGMGQIVTWSVRDETLHCNSMIRIFKEFIKENPEIWTPKLKKEIYEACRTIIEHEDAFIDLAFQMGPMKGLTAQEVKDYIRFIGNRRLSQLGLEPIYKVEKNPLGWLDTMLNAVEHMNFFEGRATEYSKASTKGSWAEAFSNLGSNQ

SEQ ID NO: 78528 - protein, 275 aa, Unknown
  Bacterial polypetide isolated from the Sargasso Sea
FVGSTPIAKYIYENSAKNEKRVQALGGAKNHLVVMPDCDLDGAVNGLMGAAYGSAGERCMAQSVAVAVGDIGDELVSRLSKKAEALKVGPGMDKTSEMGPLVTKEHLEKVKSYVDLGVEEGAKLVVDGRNLKLQGYENGFYIGGCLFDNVNKDMRIYKEEIFGPVLSVVRVKTFEEAAKLINDHEYGNGVSIYTRDGDAGRTFASKIQVGMVGINVPIPVPMAFHSFGGWKRSLFGDSGMHGMEGIKFYTKLKTVTSRWPSGVRTNAEFVMPTMK

SEQ ID NO: 78529 - protein, 420 aa, Unknown
  Bacterial polypetide isolated from the Sargasso Sea
MAGISILFALICIPFGIFDPTIFKSIPIRIFGIMNNITLLAVPLFIFMGTILEKSGIAAKMLENMAAAFKKTKGGLSISIIVVGALLAASTGIVGATVVTMGLMSLPILINQGYEKGFSAGLVASTGTLGQIIPPSIALVLLGDVMSNAYQRAQNDMGIFSQQTVTVGDLFIGAVIPGMMICLGYLIYTTYRNGKNKDLKDYSNKVPIQRIELLKTLALPIVLIFLVLGSIFAGIATPTEAAAIGAFGAMLIAFVNGKINFQFIKETSEKTAIVSTMIFTILIGASIFSLIFRGVGGDELINLIFSSLPGGPLTALIFVLIVIFLLGFILDFIEICYVIVPLIAPPLLMMGFDPVWLAILFAINLQTSFLTPPFGFSLFYLRGVADENIQTSEIYNGVIPFILIQLLVLLIVMIFPVFVL

SEQ ID NO: 78530 - protein, 263 aa, Unknown
  Bacterial polypetide isolated from the Sargasso Sea
MSKYANVRGLSRGLQVLQALNALENGRATSQQLSEVTGLHRTTVRRLLETLVEGGFVRRSESDDTFRLTLRVRTLSEGFTDDEHIATVAPPIMATLLQRIVWPSDLTTPDGDSMIIRETTHRFSPLSFHRSMVGRRLPMLLTASGRIYFASCQDAEREDILDLLRTGAGGEQQQRLASDDAFIRNLVRRTRADGFGSNHGDWTEQRKIGSLAVAVSAHDRVMAALNVIYLEHAINPADAVRRFLPSLQHAAQEMTSALDAPGN

SEQ ID NO: 78531 - protein, 355 aa, Unknown
  Bacterial polypetide isolated from the Sargasso Sea
MKSIFDSITLGKNTLQNALVMAPMTRSRANRDGTPGALAADYYSQRASLGLIVTEGIQPSDDGQGYIFTPGIYTQAHIDGWKPVTQAVHAKGGRIFFQLMHAGRMSHPDNTPHHRAGLAPSAIAPGTQMFTLKGMLDIPVPEAMTQVQIKQAIGEFRHAARSAIEAGADGVEIHGANAYLIQQFLAPSSNTRTDEYGGSIENRARFAIEIAKAVAEEIGAERTAIRLSPGTKLWGIDEGAEGSALYRYLVTELNKLQLVYLHVMHQGDDELLQDIRDGWDGILIVNKPGRARENIGEDIRSGLADLEAYGQMVLANPDFVERLKQDIPFNTADRNTFFGGSAQGYTDYPLAKVAG

SEQ ID NO: 78532 - protein, 359 aa, Unknown
  Bacterial polypetide isolated from the Sargasso Sea
MIFENYKLKNITLRNRIVMAPMTRNQSPGGIPTQEVVAYYSRRAKAEVGLIITEGIEVSHKASSAYPNVPRLDSNEAKEAWKKVVEGIKNNNGAVIAQLWHCGGFRKLGMQPNPEVPGHTASGLVKPGKKVAHEMTLNDIKETIDAYASDAKICEEIGFDGVEIHGAHGYLIDNFFWSGTNIREDEYGGSIENRSQFVSDIIKSVRENVSENFIVGLRFSQWKQHDFEAKLASNPEELKTILTSPVESGLDYLHSSMRRFWESEFTGSKENLAYWTKKITKIPTIGVGSVGLDSDFIDMTAPATPTSIDKAIDDITNDKYDLIAVGRALLSDHEWVLKMREGRVNDVIPYTKDALLNLY

SEQ ID NO: 78533 - protein, 360 aa, Unknown
  Bacterial polypetide isolated from the Sargasso Sea
QPLGVVAGITPFNFPAMVPMWMFPIGIACGNTFILKPSEKDPSCSIMLAQLLSEAGLPEGVFNVVNGDKESVDAILENSDIKAVSFVGSTPIAKYIYENSAKNEKRVQALGGAKNHLVVMPDCDLDGAVNGLMGAAYGSAGERCMAQSVAVAVGDIGDELVSRLSKKAEALKVGPGMDKTSEMGPLVTKEHLERVKGYVDLGVEEGAKLVVDGRDLKLQGYENGFYIGGCLFDHVDKDMRIYKEEIFGPVLSVVRVKTFEEAAKLINDHEYGNGVSIYTRDGDAGRTFASKIQVGMVGINVPIPVPMAFHSFGGWKRSLFGDSAMHGMEGIKFYTKLKTITSRWPSGIRSNAEFVMPTMK

SEQ ID NO: 78534 - protein, 256 aa, Unknown
  Bacterial polypetide isolated from the Sargasso Sea
MELANKTAFITGGASGLGLATARNFVKAGANVCLYDMNEESLELAAKEFGSKASCFRGDVADEASVKEAIKETISSFGSIHINVNSAGIGGAARTVGRDGPMPLEKFEHIIRVNLIGTFNVLRLCAEAMQLNEPQNEDQERGVIVNVASIAAFDGQTGQAGYAASKGGIVSMTLPVARDLAKRGIRVVTVAPGIFETPLLAGAPDEVKEPLIAITQFPKRLGNPEEFAEEVAHIVNCSYLNGEVIRLDAGIRMPAM

SEQ ID NO: 78535 - protein, 453 aa, Unknown
  Bacterial polypetide isolated from the Sargasso Sea
QAVLIAKKAFDEWSLKPSLQRARIMFKFKELIEKNSDELTQLIVAEHGKVYEDAKGSLTRGLEVVEFACGIPHLLKGEFSENVGTNVDSWSIRQPLGVVAGITPFNFPAMVPMWMFPIAIACGNTFILKPSEKDPSCSIRLAELLKEAGLPNGVFNVVNGDKEAVDAILANKDIKAVSFVGSTPIAKYIYENSAKNEKRVQALGGAKNHLVVMPDCDLDGAVNGLMGAAYGSAGERCMAQSVAVAVGDIGDELVSRLSKKAEALKVGPGMDKNSEMGPLVTKEHLEKVKSYVDLGVKEGAKLLVDGRNLKLQGYENGFYIGGCLFDHVKKEMRIYKEEIFGPVLSVVRVKTFEEAAKLINDHEYGNGVSIYTRDGDAGRTFASKIQVGMVGINVPIPVPMAFHSFGGWKRSLFGDSAMHGMEGIKFYTKLKTITSRWPSGIRSNAEFVMPTMK

SEQ ID NO: 78536 - protein, 182 aa, Unknown
  Bacterial polypetide isolated from the Sargasso Sea
KNSEMGPLITKEHLEKVKGYVDLGVKEGANLVVDGRNLKLQGYENGFFMGGCLFDNVKKEMRIYKEEIFGPVLSVVRAKDFHEASELVNNHEYGNGVSIFTRDGDAARSFSSKIKVGMVGINIPIPVPMAFHSFGGWKRSLFGDQHMHGPEGVRFYTKLKTITSRWPSGIRSNPEFVMPTMK

SEQ ID NO: 78537 - protein, 802 aa, Unknown
  Bacterial polypetide isolated from the Sargasso Sea
MSTQSYFKDLQQLKYRDEINLVSDLIDHNDWINEKVISQNAEEIVKNCRRDRNKTRLDNFFLEYGLSNQEGVALMCLAESLLRIPDNQTCDEIIEEKIGGKKWLAHFNSSPSLFVNATTFGLFLAEQVVELDKNISANPISWFQGLTSRLGDPILREAIKKGMEILSEEFVSGIDIDDALNKFDLPKTPCSFDMLGEAARTQSDVDFFFNAYEEAIRKVGEKNALLSKSFHEISIKLSAIHPRYEATKKDRVMDELLERVYQLCVQSAAHDIALTIDAEEQDRLELSLHLIENLAKRKDLKDWSGLGLAIQAYGKRAPVVVKFIDELGANRNGMMMRLVKGAYWDQEIKIHQIKGAADLPVFTSKSFTDLNYLSTAKIISETKNLRPYFATHNAHTIAGIMQLYQGREDQFEFQRIFGMGDLTYRNAQKVYSDFPLTRVYAPVGSKKELLPYLVRRLLENGANSSFVNKYLSKDIPVKEVVKNPIEIATKNLSGKNFLKQVPRPNKIFSDRENSQGFDFGDLMEIENLTKNITAFDNNDFYACSLLNGEEVIDKYEDKFSPTDQSKKIGRVSYLTKDNLSKINFNNGDDWKKASVENRIEVLKKVANLLQANANLFFALLVKEAGKSLKDCDAEIRESIDFINYYCLQASKIFKPIDLESPSGERNFLSVAPKGNFLCISPWNFPMAIFIGQIAAALVAGNKVLAKPAEDTSLIAFQIVKLFHESGVPESVLQLVIGGKDIGNELTKLTELNGVAFTGSTTAAKSINLNLAKSEGPIKTLIAETGGQNVMFVDSSSLKEQVI

SEQ ID NO: 78538 - protein, 349 aa, Unknown
  Bacterial polypetide isolated from the Sargasso Sea
GVIAAIVPWNSQMFLTATKLAPALAMGNTIVIKASELAPATMFEFAKLIEETEIPKGVVNVITGFGDPCGKALTTHNLVEKVAFTGGPETARHIIRNSAENLSEVSLELGGKSPVAVFNDAHQENAVNGITAGIFGASGQSCIAGSRLYLQKEIYNEFLDKLTARAEKIKIGAPMDPETEMGPLSNFKQLEVIEKNIKLTVEQGGKIKCGGKRHSYSNEGYYFPPTIIECDNHNLPVAENELFGPVLSVMKFDTEKEVIEKMNDNQFGLSSGVYTSDLARGLRVSNAIRAGITFVNTYRLISPSAPFGGIKDSGYGKEAGIDSIKDYTRVKTIWYYTSEEPTLDPFAIR

SEQ ID NO: 78539 - protein, 249 aa, Unknown
  Bacterial polypetide isolated from the Sargasso Sea
MKTVLITGCSSGFGLEIARYFLARDWRVVATMRTPREDVLPPSANLRVLALDVTNPDSIRAAIDAAGPIDVLVNNAGFGAAAPAELMPLDTVRALFETNTFGTIAVTQAVLPQLRQRGAGVVVNVTSSVTLKVLPLLAAYRASKAAVNAYTESVALELAPFGVRAHLVLPGRAPDTRFAENARAHMHGFEHEAYAEFAAAVFARIVDEAAPITHAQDVAEAVWRAATDPSSPMRIPAGADAVAWAAEAG

SEQ ID NO: 78540 - protein, 296 aa, Unknown
  Bacterial polypetide isolated from the Sargasso Sea
LNWDYTHPADERILETDDELPHETLEAYENLSDEEKILFDRHDVAELMSQFLHGEQGALLVASQLASCAPTYNAKLYAASQTFDEARHVEVFNRYLQEKIGIHYPINPALKSLLDKILTDERWDLKFIGMQIIIEGLALAAFSMLKSTSKDPLLKQLLHYVIRDEARHVTFGINYLEDFIKTLSPEEINERAEFAYEACVISRERLINTKSQQRFLNMTEEEAREFQLNTGSFEMFRNFLFSRVIPNLSRIGLLTDEVRPKFEALGLLEYENAPDDFECDWAEMRKPLEEFEKIPV

SEQ ID NO: 78541 - protein, 248 aa, Unknown
  Bacterial polypetide isolated from the Sargasso Sea
MKGKKCIVTGGSSGIGEATVRRFISEGAEVLIADINLEDSKKLSEEIGEGVDYIKCDVRLEDDIISVSEKAYEMWDQVDVLVNNAGSELNQSYDKMTEAEWDNVLNTDLKGPWLMCKHIVPKMVEAGSGSVINISSLNGLVGFPLSTAYGSAKGGLVVFTRDMAIELASTGVRINCVCPGVIQTGMMERWTDLMPDKAEAQEMLRNTMPIGRMGTAEEVAGSIFFFASDDSSLCQGSVLSVDGGFTAQ

SEQ ID NO: 78542 - protein, 368 aa, Unknown
  Bacterial polypetide isolated from the Sargasso Sea
MSDNILPSQKIFSIKDARELSRKRLPKLVFDFIDGASGDEKLAEINSIALDQIRLEPKVLRNVEKRSLKKNVLGYEFNFPFGFAPMGMTNLSWPGADSMLAAESARNNIPTCVSMASTTTLEEMYELSEGHSWMQLYIFQDENFVMELLERAKNTGYEVAILTVDVPVLSRRTRDDKNGFSYPFKIGPKQFFDFATHPIWSLSTLMRGIPKPMNYVTSKSGDGIFKRKESRGSTDWNALKRVRDKWKGKLIVKGVMSPDDAIKIKEAGADAIQVSNHGGRQLDSATAAINMLPLIRKSVGSNFPLIFDSGIRSGSDIVRALAFGADYAMIGRPVMYAMGADGKKGLRRIVEIIKEEVSTTLGLVGLND

SEQ ID NO: 78543 - protein, 262 aa, Unknown
  Bacterial polypetide isolated from the Sargasso Sea
HSRTVNDTIDFQKLKIERDWVSNKNIFTVTGEILDTTDLDTLYRNIYDPSLFTATIFKELLEDNGTKVRYLSKKPQDLSKYNTLATHLSDSLLISAINLMNESDNLTAELFVKLMGAMDTIPGTWNNGIDSIKSFLSREVEIDTSQIKLADGSGVSRYTLTSSDQLISLLTWVYKSQYKNDFISTLPGGGWPKSTLEKRLVKEGDKVRAKTGGLSGVRNLAGYIESSRYGPVAFSILMNGYIGSSSKYRHVQNQIVKSLIYD

SEQ ID NO: 78544 - protein, 153 aa, Unknown
  Bacterial polypetide isolated from the Sargasso Sea
MKKKHNINRRDFINGFALSLAAGGSLSPVEILANDKRRYPPALMGMRGSNPGSFEAAHALAWGGAKFDKPKIQTDHDYDLVVVGGGISGLSAAYFFRQRYGNDAKILILDNHDDFGGHARRNEFNGHGEGAICYGGSQSLIRPVHIHPSQQNC

SEQ ID NO: 78545 - protein, 246 aa, Unknown
  Bacterial polypetide isolated from the Sargasso Sea
MIQDKVVVITGASSGIGYSTAKELAKKGAKIVAGARRLDRLETLQKEITDDGGEIVICETDVTKKTDCDNLVKQALDKFGTVDVLVNNAGLMPLSFVKSLKIDEWDRMIDVNIKGVLYCTAAVIPTMTEKKSGHIINISSVAGRIVFPAGSVYCATKHAVTAFSEGLRQELSVRKNIRVTSIEPGVVQTELTNTITEDSLQGFIEKGKQMEALQADDISNAIIFAIDAPNHMNVNEILIRPTTQDH

SEQ ID NO: 78546 - protein, 571 aa, Unknown
  Bacterial polypetide isolated from the Sargasso Sea
VHIDVLDTVARDTKLGKEEITRDIPNVSEDALKNLDDSGIIAVGTSVKSNDILVGKVTPKGESQLNPEEKLLRAIFGEKAGDVRDTSLRVPQGVDGVVTDVVVFNREGVERDERTRQIEQELLARYEKDHYDEMRIVHSNLVNRIISVADKKPLVADVLSLQGELLASKGTKISQEILQGIPLKSTDGIQIKDKNINLKIGTFVRNALQQMYLLENVYQDRCEKVSKGDDLPPGVIRMIKVYIAIKRKLSVGDKMAGRHGNKGVVSTVQPIENMPYMEDGNPVDIVLNPLGVPSRMNVGQVLETHLGRVAKGLGKKVQEFLDQNNPAADQIRSFLKKVYDCPIAQKHFESMDDKTFLEFVKKYKPGIHMSTPVFDGAKESDIQKMAEMADLSKSGQVWLYDGITGERFSQKVTVGYAYIMKLHHLVDEKIHARSIGPYSLVTQQPLGGKAQFGGQRFGEMEVWALEAYGAAYTLQELLTVKSDDVHGRNKIYESIVKGRHQLNTGLPESFKVLINELKSLCLNIELLQKADEDELGESLEEDSGSNSIAAPDTEIESEKKPEEVVDLTVTP

SEQ ID NO: 78547 - protein, 358 aa, Unknown
  Bacterial polypetide isolated from the Sargasso Sea
MKVKYTDDTPRKIKDFNDEELELNPEQVEDIAEIFKTPLTGTYNWDYTAQDNRISKLYELGKKLNWNTSIDIDWDRPLVVSDEIPPMFWDEYPPYKQLDDDGKREFLRHRGASQFSQFLHGEQGALLVASQLVSCAPTYQAKLYAASQAFDEARHVEAFNRYIQERSKLMYPVGAGLKSLLDKILTDKRWDLKLIGMQIIIEGLALAAFNTAKAVTPDPVLRDLLHFIIRDEARHVTFGVNYLEEFIENLSDHEKEDRAMFAYEACVISKERLFPTDVFRKFGWNEDEAREFSNNAGFALEFQRLLFARVMPNLSRIGLLTDKVRPLYDKLGVLEFESHSNDGDISWAELEKPLDLSA

SEQ ID NO: 78548 - protein, 254 aa, Unknown
  Bacterial polypetide isolated from the Sargasso Sea
MQIDFTNKRILVTGGTRGIGRAIVEAFLEAGARVAVNGSTDETTDRAISELKAGDLAVAAPGSVGSVAACESIVTAAVQGLGGLDVLVNNAGVGGGGPVEETKEELFDRVMDINLKGVYFMTKYAAPHLRESGGNIINVASVMGIVGAPYGSIYGASKAAVMSLTRSHALEFGSAIRVNSVVPGGVDTDMLRGLAKKIAKDVESGYEILSKDTAAQHRIADASEIAGPVLYLASDLASFVTGSTHVVDGGEVVD

SEQ ID NO: 78549 - protein, 130 aa, Unknown
  Bacterial polypetide isolated from the Sargasso Sea
MQKTMQSKCAVFRNEKTLKEGVDEIRKPFEAMESLSVKDKSLIFNTDLVETLEFDNLIRQAITTMDSAYHRKESRGAHAREDYPSRDDDKFMQHTLSWCEGIKTKIDYRPVHRSTLTNDVQYFPPQERIY

SEQ ID NO: 78550 - protein, 128 aa, Unknown
  Bacterial polypetide isolated from the Sargasso Sea
GVGLPDGCESGYYVKPTIFSDVTNDMTIAREEIFGPVLCLIKYETEEEAIEIANDTPYGLAGYVQGEQSHAVEVASKIRAGQVTINKGARVRSAPFGGYGSSGNGREHGTHGLEECLETKAVIGALVE

SEQ ID NO: 78551 - protein, 255 aa, Unknown
  Bacterial polypetide isolated from the Sargasso Sea
MYLKKYNLKGKYALVTGAGKGLGKACAIALAEAGANLIIVSRTKKDLDTVSKTIKKLRVKCKSYVCDITNYEDLKNIINKQSRIDVLVNNAGNNIPEHFTKVKTKNMEYLVKINSIAAFNTAQLCALKMIKLKNRKKIGGSIINMSSQMGHVGGPIRSVYNMNKWGLEGLTRGMALDLAKFNIRVNTVAPTFVVTPMTKKFLKNKKFKKETLNNIPLGRFAEMSEIASTVVFLASDAASMIHGTSLLVDGGWTAK

SEQ ID NO: 78552 - protein, 50 aa, Unknown
  Bacterial polypetide isolated from the Sargasso Sea
MNYTDHKLDVVVLGAGGAGLRAALGCSEQGLKTACVSKVYPTRSHTVAAQ

SEQ ID NO: 78553 - protein, 196 aa, Unknown
  Bacterial polypetide isolated from the Sargasso Sea
SKKAEALKVGPGMDKNSEMGPLVTKEHLEKVKGYVDLGVKEGAKLLVDGRNLKLQGYENGFYIGGCLFDHVKKEMRIYKEEIFGPVLSVVRVKTFEEAAKLINDHEYGNGVSIYTRDGDAGRTFASKIQVGMVGINVPIPVPMAFHSFGGWKRSLFGDSAMHGMEGIKFYTKLKTITSRWPSGIRSNAEFVMPTMK

SEQ ID NO: 78554 - protein, 382 aa, Unknown
  Bacterial polypetide isolated from the Sargasso Sea
MTEVIPTKQMPPGLQVDKVDDRIMTLNVGPQHPGSGHMRIIVKIDGDYIVDADPDPGYVHRGEEKMAEARNYITNIPHLERPVIHDSCNILYPYVLGVEDLVGIEVPERAKYVRVIAAELNRCIYIQYWLAIYGIFLGHSTMFMWPAGDRELLIDLMEKITGARVTHAYFIPGGVRNDVPANFEDVCLRQVNYFEKRIKEYADIFYDNPILKARTEDTGVLSREDAIRLGTTGSVLRASGVDYDVRVKEPYDVYDELDVHTNVLKAGDSYARSKVPWLDMLESCNIIRQALEKMPKSGSIRTKLKPNPKGGLGEVYRRVESGRGAAGCYIISKEKPEPYRLKLSVGSFRNLIALPYLLKGEKLGNMPAVYWSLNYWPVEADR

SEQ ID NO: 78555 - protein, 248 aa, Unknown
  Bacterial polypetide isolated from the Sargasso Sea
MKDKKCIVTGGSSGIGEATVRRFINEGAEVLIADINLEDSKKLSEEIGEGVDYIKCDIRLEDDIISVSEKAYGMWDQVDVLVNNAGSELNQSYDKMTEAEWDNVLNTDLKGPWLMCKHIVPNMVEAGSGSVINISSLNGLVGFPLSTAYGSAKGGLVVFTRDMAIELASTGVRINCVCPGVIQTGMMERWTDLMPDKAEAQEMLRNTMPIGRMGTAEEVAGAIFFFASDDSSLCQGSVLSVDGGFTAQ

SEQ ID NO: 78556 - protein, 133 aa, Unknown
  Bacterial polypetide isolated from the Sargasso Sea
MKKKLSITRRDFINGVSYGLAASVAPIDFLKAKNIDPFKYPPALTGIRGNHPGSFDHAHRLALAGGNFLEEIIDLGESNDLIVVGGGISGLSAAYFYQERTALNQNILILDNHDDFGGHAKRNEFQVDGREIL

SEQ ID NO: 78557 - protein, 89 aa, Unknown
  Bacterial polypetide isolated from the Sargasso Sea
MIKTDVLIIGSGAAGMTAAIELSNQFNVTLITKNSLVDSSTWYAQGGIAAVIDSNDSIEEHLRDTLIAGDGLCDENAVRQCVSHGKEAI

SEQ ID NO: 78558 - protein, 269 aa, Unknown
  Bacterial polypetide isolated from the Sargasso Sea
DRQERHPRHPQHHRSPRTVNTFDLTGKVAIVTGSNAGLGAGMAVALATAGCDIVGVSRADAGATPTHVKAAGRRFADVRADLASIAPVEDIVRAAVEAFGRVDVLVNNAGLIRREDALDFSEADWDAVMDVNLKSVFFLSQAVARQFVQQQSRGKIINVASMLSFQGGIRVASYTASKSGVLGLTRLLANEWAAHGINVNAIAPGYMATANTAALRGDAQRNEEILSRVPAGRWGTPEDLAGPVVFLASSASDYVHGHTLAVDGGWLAR

SEQ ID NO: 78559 - protein, 386 aa, Unknown
  Bacterial polypetide isolated from the Sargasso Sea
MDNIKASKKIFSIEDAKKLSKKRLPKIVYDFIDGASGDEKLSEINSFALDQIRLEPRVLRNVEERKLKKSILGFNYDYPFGFAPMGMTNLSWPGADSMLAKESARNNIPTCVSMASTTTLEKMYELSEGHSWLQLYIFQDEAFVMELLDRAEKTGYEVAILTVDVPVLSRRTRDDKNGFSYPFKIGPKQFFDFATHPVWSISTLLNGIPKPMNYETSKSGKGIFKRKESRGKTDWETLKRVRNKWKGKLIVKGVMSSDDAVKIKEMGADAIQVSNHGGRQLDSASAAINILPFIREAVGNNFPIIFDSGIRSGSDIVRSLALGADFSMIGRPVMYAMGADGASGLRRIVDIIKEETSTTLGLVGLNDINEVSSDIIEQKLFMNTTY

SEQ ID NO: 78560 - protein, 466 aa, Unknown
  Bacterial polypetide isolated from the Sargasso Sea
YSHPSPMGEKWASWWLDLARYADTKGYESDLGRLIWKYRDWVINALNDDMPFDEFTINQLAGDLLENPTVDNYVATGFHRNTMSNDEGGTPNEEYRIASVIDRVNTTFDVWQGTTISCVQCHAHPYDPIRHKEYYEIMSFFNNTQDADHPTEEPKYRFYEEKDQQKINEVFNWIDQYGDEILKNKYEDFLFLLKPKVLANERYVEPISNSGNVNTGHELYFYNRGTALIKNVNTERNKRMVALFSFGIKGTKVILRNGSSTGEILAEFKNPYESGWISDPDPTDLIPGKPGFIIDFPLKEIDDSIDLHIEVENDNLSDKDLKINDGRLIHLHWLAFMPDLPGKNKKGYSKIKNYVSELLFTHVDTSPIMLENKNHNSRSTYLFERGSWLSPTEKVSSNVPKSFSDWKPNWERNRLGLAQWLIDKENSLTSRTLVNRIWHQIFGTGIVSTIENMGTQSEPPTHPKLW

SEQ ID NO: 78561 - protein, 119 aa, Unknown
  Bacterial polypetide isolated from the Sargasso Sea
MKDILDLQKQNFIENGHPSLEQRLDRLKRCVALIETHDDQIIESLNADYKMRSKYEIITSEISQTLRTLNFSIKNTKKWMKAIKRPSEYGAGFLGAKSYMIPSPLGSVGVIAPWNFPVG

SEQ ID NO: 78562 - protein, 199 aa, Unknown
  Bacterial polypetide isolated from the Sargasso Sea
TGQSCISAKRIIVTKSLYHDLLKKLKIQLSKMIMGDPMDNVDIGPMVTLSARDEVHDQVIRSIDSGAIPELGGEIPDLKGSFYPVTLLSNVKPGMPAFDEEIFGPVFSLIMANDEAHAITLANQTPFGLGAALFTKDIKKGEEIGRAQINAGLCFVNDFVKSDPRLPFGGVKESGYGRELSSYGLMEFVNIKTVVVNNE

SEQ ID NO: 78563 - protein, 493 aa, Unknown
  Bacterial polypetide isolated from the Sargasso Sea
MSELKKYKMFIDGEWVDSESKKTFKSLNPENNEPWVEVPEASEKDIDIAVNAAQKAFEGSWPNLFPRERAKYLKAIANELRENAELLGKIETTDTGKLFKETKTQANYIAEYYDYYAGLADKVEGTVLPIDKANMQVITTRVPIGVVAAIIPWNSQMLLTAVKLAPALAMGNTVVIKSSELAPATLFEFGKLIEKTGIPKGVVNIVSGFGEPCGRALTSHKLIERVAFTGGPETARNIIKNSAENLSQVSLELGGKSPVAVFEDADQENALNGITAGIFGASGQSCIAGSRLYIQNSIYENFLEKIVNRANKIKLGSPMDSEIQMGPLSSLKQLEIIEKNIKLTLDQGGKLRCGGKRHAMLNNGYYFPPTIIECDNHNLPTAENELFGPILSVMRFDDEKEVINKMNDNQYGLSSGVYTKDINRGLRVSNAIRAGITFVNTYRLISPSAPFGGMKDSGYGKEAGIESIKDYTRIKTIWFNTSDKPMDDPFTIG

SEQ ID NO: 78564 - protein, 152 aa, Unknown
  Bacterial polypetide isolated from the Sargasso Sea
NEDFSQQPHHKIPPTLVLNPTEDMKIMQEEIFGPVLPVKPYEDLSETVEYVNSKERPLGLYYFGKDKKDQQYVLSNTTSGGVTVNDVISHITQEDLPFGGVGPSGMGSYHGHDGFKEFSHAKAIYNQAKPNLNKLAGLVPPYKKEKDKASAS

SEQ ID NO: 78565 - protein, 313 aa, Unknown
  Bacterial polypetide isolated from the Sargasso Sea
MYEGRQRKHHPFESAARHRLFRLRGSAAFLLPSGPHGQTETAAMTGFDFSGKVVLVTGGTKGIGAAIAQAFQAAGATVYICGRTPPASTAAGMSENTPRFIAADVREIDAIDAMLARIERETGRLDVLVNNAGGAPFALAAQASPRFTEAVIRLNLLAPLHLAQRANALMQQQAEGGVLLFIGSVSGLRPSPGTAAYGAAKAGLLNAVRSLAVEWAPKVRVCAVSPSLVETEAATSGHTGSSAADAASALASIAATIPAGRLAKPGDVASACLFLASPHAAYASGSNLILEGGGEVPAFLAATDLHKAFATHS

SEQ ID NO: 78566 - protein, 475 aa, Unknown
  Bacterial polypetide isolated from the Sargasso Sea
MLKFVKLGQQNPPKREIIERKDDFNEIYKEFINEKAKEQSSRCSQCGVPFCQVHCPLSNNIPDWLKLTAEGRLKEAYELSQSTNNMPEVCGRICPQDRLCEGNCVIEQSGHGTVTIGSVEKFITENAWENKWIEPIKVKSEKKQSIGIIGAGPAGLACAEQLRKEGYQVTIYDRYDRPGGLLIYGIPNFKLEKFVVERRTNLLKKGGIKFIQNFEVGKDATLGELKEKHDAILIATGVYKPREIEIPGSDLKNIFPAMDFLTASNKKGLGDKVEMFDNGTLNAQGKDIIVIGGGDTAMDCVRTSIRQNAKSVKCLYRRDRENMPGSAREVFNAEEEGVEFVWLSSPKKFEGIDKVENILIDKIKLGEPDESGRSKPVVENNSEFSLKADIVIKALGFDPENLPYLFNETNLQITRWGTIKTDFDTMETNLQGVFAAGDIVRGASLVVWAIKDGRDAAMSISKYLKKSYEKKKQVA

SEQ ID NO: 78567 - protein, 1155 aa, Unknown
  Bacterial polypetide isolated from the Sargasso Sea
MNWAFTAIGFIVGGIAALIGDFSGITGAVLGAAIGFCLDNTLQQRKRKNNGTAPGAFAMQAPPAQPPVPLAERVARLEATVETLTREVASLRGQLAGAKAGSAATGATVYTPTGAASASASASASASASASASASASASASPSASLPPSVALPPRMPAQPAAARPDASVSASAPVPSPVRAATPAPTPAAAIRASETPAAAAPAPSAPPAPPKPREPDLVERAFRAARDWLLGGNTVVRVGIIVLFFGVAFLLKYAADNNMLPIEFRLAGTALAAAALLAIGWRVRARRAAYGLVLQGGGVGILYLTIFAATKLYALLPVGAAFPLMVAVCALSAFLAVRQNALPLAFMGTAGGFLAPVLLSTGHGNHVALFSYYALLNAGIFAIAWFKAWRPLNLLGFVFTFTIGSAWGVTAYRPALFASTEPFLILFFLMYVGIALLYAVKRELALRHYVDGTLVFGTPIVATALQASLVKDMPFGLAWSAVALSAFYVVVTAWLARRRDRLALLFESTLALAVIFATLAVPLAFSGPTTSAAWAIEGAAVVWLGVREKRMLRFGFGLLMQVAAAGAFFTSLLGPADAAALPVLNSPYIAMLLIALAGLFTGWWLHGRGEARAWHAWMPEIGAAAAAWGLLWWVSGGLHEILVYASRHVDLHADRFVVDTTALFAAGTAWLAHAARRRLAWPLAEWPALALTPVLALLALRAFDAHEAPLSGMGAFAWPVAVGAGLALLWRQSRGTAGAGSASGSARGGAPSLSAGIVAPLHTLMFWTVCGLLSLEGFWRLRAYVPEGAWSWSAWAYGFGALLLLVSGPGSRLRWPVAAFPRAYQVWGAAPLAALLWLWSIASVISDGNAAPLFWLPLLNPLDVAQCLVFVAFAVWLRRLKTLGIAWHPRVVDYAAIATVFLWFNALMLRTLHHRFHLAYDIDTVLSSFGIQQVFMVGWSLFAFAGMWLTRRDGIARMCALASLPLIVVMWVWTFYANFTQDGGSWARVPLFNPLDLVLAVVYALAASWFVRARKLGWSFGKYRVELVSAAGATAFLWLNAILLRTLHHWAGVPYELGAMAASTLVQASVSVYWTLCALAITIWATRRGLRPLWFVGAALLALTVVKLFLFDLSHVSGIERIVSFIGIGVLLLLIGYFSPLPPKAAAQQDDHA

SEQ ID NO: 78568 - protein, 262 aa, Unknown
  Bacterial polypetide isolated from the Sargasso Sea
NFAKNEKRVQALGGAKNHLVVMPDCDLDGAVNGLMGAAYGSAGERCMAQSVAVAVGDIGDELVSRLSKKAEALKVGPGMDKNSEMGPLVTKEHLEKVKSYVDLGVKEGAKLLVDGRNLKLQGYENGFYIGGCLFDHVKKEMRIYKEEIFGPVLSVVRVKTFEEAAKLINDHEYGNGVSIYTRDGDAGRTFASKIQVGMVGINVPIPVPMAFHSFGGWKRSLFGDSAMHGMEGIKFYTKLKTITSRWPSGIRSNAEFVMPTMK

SEQ ID NO: 78569 - protein, 273 aa, Unknown
  Bacterial polypetide isolated from the Sargasso Sea
MDAPLPPISAPISETEPETETVAEPRASRLHRPVALVTGSTSGIGAAIARRLAADGYAVILHSRSSADVGRAMARELGAAYVQADLADDAERVRLIREAVAVHGRLDVLVNNAGVSRVIPHDDLAAATPDVWREMHEINVIAPFRLVAEAEAALREAASHGRAGCVVNVSSHAGVRPKGASIPYAAAKAALNHTTRLLAKTLAPAIRVNAVAPGLVDTPLTADWTDAQQLWRERAPMRRAATPDDIAQTVAMLVASDYVTGEIVMLDGGMNLT

SEQ ID NO: 78570 - protein, 279 aa, Unknown
  Bacterial polypetide isolated from the Sargasso Sea
MKNVVITDYLFDDLSVEEEIFQESKIKLSSEKSPNKEELKVLTQNADYIITQFAKLDNEIINNLNKAKIIVRYGVGYDNVDIKSARLKNIPVCNVPHYCIDEVADHTIGFILNSTRALNKNHQKVIQGEWGLAVPMEEMKSLNDLKIGVIGFGRIGQAVVERLIPFKPKILIYDPFISNPVKKDGLSFVEINELFKNSDIITLHCPSTEKTKNIINDHSLSLMKKGVIIINIGRGDLIDMGSFINALKNKKINSAALDVFDTEPLTENHPIRSFDNVLF

SEQ ID NO: 78571 - protein, 365 aa, Unknown
  Bacterial polypetide isolated from the Sargasso Sea
MTTTSSARTHTINPLGTDGFEFVEYTAPDAKGIAALKALFVSLGFAEVAQHKHKQCWLYRQGDINFVVNAEPHSQAEQFASLHGPSVCGMAFRVSDAGKAQQYAIGKGAKPFVGKIGPMELNIPAIYGIGESTLSFVDRYADKGSIYDVDFVFYPDWQARMAEVDAGLYEIDHLTHNVQRGNMDVWSNFYERIGNFREIRYFDIEGKLTGLHSRAMTAPCGKIRIPINESSDDKSQIEEYLRQYKGEGIQHIAMASSDIYHTIRTLRGRGTGFMPTPDTYYEKVDSRVEGHQEDLAALKELRILIDGSPTKDGILLQIFTDTVIGPVFFEIIQRKGNEGFGEGNFQALFESIELDQIRRGVLNDA

SEQ ID NO: 78572 - protein, 67 aa, Unknown
  Bacterial polypetide isolated from the Sargasso Sea
MQNQRAISAYQRTESRGAHARDDYPDRDDENWLCHTIYDPISKKVSKRGVNFEPNKVEAFPPKVRTY

SEQ ID NO: 78573 - protein, 493 aa, Unknown
  Bacterial polypetide isolated from the Sargasso Sea
MPELKKYKMFIGGQWVDSDTKKTFETLNPEDNKPWAVVPEASASDVDKAVQAAQKAFEGDWPKILPRERAKFLRAIGNKLRDNAELLGKIETIDTGKLYRETNKQANYIAEYYDYYAGMADKVEGTVLPIDKPNIQAITSRIPIGVIAAIVPWNSQMFLTATKLAPALAMGNTVVIKSSELAPAVMFEFAKLIEETGIPKGVVNVITGFGDPCGKALTTHNLVEKVAFTGGPETARHIIRNSAENLSEVSLELGGKSPVAVFDDAHQENAINGITAGIFGASGQSCIAGSRLYLQKGIYDEFLDKLTKRAEKIKIGAPMDPDTEMGPLSNYKQLEIIEKNIKKTTEQGGKIKCGGERHPFSNEGYYFPPTIIECDNHNLPTAENELFGPVLSVMKFDTEKEVIEKMNDNQYGLSSGVYTSDFSRGLRVSNAIRAGITFVNTYRLISPSAPFGGIKDSGYGKEAGMDSIKDYTRVKTTWYYTSDEPTLDPFSIR

SEQ ID NO: 78574 - protein, 373 aa, Unknown
  Bacterial polypetide isolated from the Sargasso Sea
MRSDSFLYKTYYQWWKNIDKSIFFIISLLFIIGLFFSLVSTSLIASDKLDTNSYFFFFKHLVYVALGVFIVFVFSSFKKEQLIKYSIILFFVSLISLVLVPILGVEVKGSKRWIDLFFLPRFQPIEVLKPFLIVFLATILCTEKTNLMIKYLLTTLTISIVSLLLIIQPDIGQTLLVVFSWSVLIFTSGINIFILLVFFFLAIILLTYLIIYVPKFDYIQGRILSFFDRETGTHNFQSDKAIDSITSGGFFGKGIGEGILKNRVPEAHTDYIISVISEEFGVVAIMLILLLFLIFVYMVFKKISFETDDKTKLILIGSISLILMQATIHIGVNIRLFPTTGMTLPFLSYGGSSIISTSILAGIILNLTKRKIN

SEQ ID NO: 78575 - protein, 488 aa, Unknown
  Bacterial polypetide isolated from the Sargasso Sea
MPRTLPQLIDGQWQTSQARELIEVTDPTTQEVIALAPKATAEEIEAAVASAQKAFLAWREVPVSERARLMLRYQHLLKEHHDELAEILSAETGKTFADAKGDVWRGIEVAEHAANIASLMMGETVENVAREIDTASWIQPLGVCVGITPFNFPAMIPLWMFPLAIACGNSFILKPSEQDPMTPNRLAELFLEAGAPAGVLQVLHGGREQVDALLVHPLVRAVSFVGSVAVGQHVYRTGTQHLKRVQAFAGAKNHMVIMPDAPKDQVISNLLGASCGAAGQRCMAISVAVFVGESKQWIDELAEQMAALRPGHWQDSGAAYGPLISPQARQRVLHLIEQGKAEGAECLLDGSQCKVDGYPDGNWVGPTLFRGVTTEMGLYREEIFGPVLVCMEVATLEEAIELVNASPYGNGTSLFTRSGGAARHFQHAVEVGQVGINVPIPVPLPFFSFTGWKGSFYGDLHAYGKQAVRFYTETKTVTSRWFDDTPLG

SEQ ID NO: 78576 - protein, 396 aa, Unknown
  Bacterial polypetide isolated from the Sargasso Sea
SYLAATSIASSVFSMIFWSFGFLRMGTVGMVAQAHGSNQLHEIINLVLRNIIFVFIISLLLIFLQNYIFKLSLLIFDLSSDTKKCFKDYFDIRIYSSFGELTIFVITGLFIGLQKTKTSSIVVGFFSVTNILFSIIFVVYFNLNVQGVALGTLVSSTLTSIIFLFFTFFEFKKITNSDFNYKKIFNFKKIKNIFNINLNIFIRSILLTFSFLFFTYLGNSISEDVVAANTILLNLIMLSAFILDAYAFSTEGLVGYSIGSKNKKLLKTIIKNSFILSSSTGLIISFGYFLGKNHFIEIMTDLESIKIICLSYSVWILIIPFISSFCYQFDGIFVGASKTKELRNAMIISVGIYLLSAFFLVNFFGNFGLWISLSIFFILRGLTLFLYLGRIYKGFK

SEQ ID NO: 78577 - protein, 192 aa, Unknown
  Bacterial polypetide isolated from the Sargasso Sea
MFLKKQNLKNKIALVTGAGKGIGKACAIALAEAGASLIIVSRTKKDLNQVSKIVKKFRSKCKSYVCDVTKYSEIKSVIDSQKRIDILVNNAGTNIPEHFTKVKRKDMEYVVKINTMATFNIAQLSALKMIELKNRKKVGGVIINMSSQMGHVGGPIRSVYNMTKFGFEGLTKGMSIDLAKYNIRVNTVCPTF

SEQ ID NO: 78578 - protein, 110 aa, Unknown
  Bacterial polypetide isolated from the Sargasso Sea
GVEEIRKPFDGMSSISVKDKSLIFNTDLVETLEFDNLIRQAITTMDSAFYRKESRGAHAREDFPKRNDEKFMQHTLSWCSGSETKIDYRPVNKSTLTNDVQYFPPQERVY

SEQ ID NO: 78579 - protein, 252 aa, Unknown
  Bacterial polypetide isolated from the Sargasso Sea
MYLQKINLKKKYALVTGAGKGLGRACSIALAEAGATVIALSRTPSDLNKLEKDIKKVKGKIIKVSCDVMNYEDLKQKLEKIKIIDVLVNNAGTNIPEPFEKIKQKSMNYLVDLNLKAAFNVAQLVVKKMLKNKKRPGSIVNMSSQLGHVGMSGRNVYNMTKFGIEGLTKGMGVELAKKNIRVNTVAPTFVETPMVKNFFKNKKFKKLALGNIPMGKAATESDVATTVCFLASSASSMITGTSIIIDGGWTAQ

SEQ ID NO: 78580 - protein, 463 aa, Unknown
  Bacterial polypetide isolated from the Sargasso Sea
VNIGSIQFDDIKKIQNSLKKNNDDEWSKTAVIKRSTILNKVADLIEKDPYELIFYLINEAGKTIQNAIDEIREGIDFLRYYSEQAKEIIQEKDLDGPTGEDNKIYYSPKGKFLCISPWNFPVAILIGQISAALACGNKVIIKPSEHTSILGYLVIKKFHESGVPISCLELILGDGKYGEALTQISSLDGVAFTGSLPTAKKIQSNLIQYQDQIIHLIAETGGINTMLVDSSALLEQVTDDVVRSAFDSAGQRCSALRILCIQEEIYEDLVEMIKGNMSVQKIGDPNEFDTDIGPIISTEATKKLNNYIEECKKEGLDVFQSSEPSEKNYISPTLISVNKISDISSEQFGPILHILKYASNDIDKLINDINNTGYGLTMGIHSRIESQADHLGKNSKIGNIYINRDMVGAVVGSQPFGGVGLSGSGYKAGGPNYLLQFLNEKVISKNSVAFGGNTELLNLQEDK

SEQ ID NO: 78581 - protein, 472 aa, Unknown
  Bacterial polypetide isolated from the Sargasso Sea
MSQNVYQFIDLQRVDPPKKPLKIRKIEFIEIYEPFSEGQAKAQADRCLSCGNPYCEWKCPVHNYIPNWLKLANEGRIFEAAELSHQTNTLPEVCGRVCPQDRLCEGSCTLNDEFGAVTIGNIERYINDKAFEMGWRPDMTGVRQTDKRVAIIGAGPAGLACADVLTRNGVKAEVFDRHPEIGGLLTFGIPAFKLEKEVMTRRREIFTGMGIEFKLNVEVGRDVQLNDLLKDYDAVFLGVGTYQSMRGGLENEDADGVFDALPFLIANTKQLMGFGESSNEPYISMEGKRVVVLGGGDTAMDCVRTSVRQEASHVICAYRRDEENMPGSKREVKNAREEGVEFQFNVQPLGVEVNANGKVCGVKMARTEMGEPDAKGRRRAEIVAGSEHVVPADAVVLAFGFRPHSMEWLKEHSVELDSQGRIIAPERSDNAFQTSNPKIFAGGDIVRGSDLVVTAIAEGRKAADGILNYLEV

SEQ ID NO: 78582 - protein, 425 aa, Unknown
  Bacterial polypetide isolated from the Sargasso Sea
MTPKIVTSFIGGEWVEPNESSHKIKIIHPADEQHISTLYEADTNEVSNAAETAKKTFHSGVWSNASVDDRKSVLLAIKDLIIENKEEIAEQEVMNTGAPITQAYGRQIPRSAMNFEFFAEFISQASSPVFDQNPDYITYVRREPIGVAGLIAPWNAPMALATMKIAGAIAFGNSCILKPSELTPLGFVPFMNLLKKAGLPDGVINMVNGRGSVTGTAITQNENIDVIAFTGGTETGRVIGAESGKTLKKIVTELGGKSANIIFSDADFERALDAAMVAIFSNNGQQCLAGSRILVEKPIAKEFKKRMVERARNLIIGDPFDSKTEIGPLISKEQIEKVMSFAQTAEESDDINILCGGKRCESFQKGYYFEPTIVETKSNQNTVCQEEIFGPFATILEFDGIDEAIELANDSEFGLVSYVWSTDIK

SEQ ID NO: 78583 - protein, 387 aa, Unknown
  Bacterial polypetide isolated from the Sargasso Sea
MNNVTLLAVPLFIFMGTILEKSGIAAKMLENMAKAFRGIKGGLSISIIIVGALLAASTGIVGATVVTMGLMSLPILINQGYDKSFSAGLVASTGTLGQIIPPSIALVLLGDVMSNAYQRAQNDMGIFSQQTVTVGDLFIGAIVPGILICIGYLVYTLYKNNSNLNIKDTSTELTIDKVELFKTLALPIVLIFLVLGSIFAGIATPTEAAAIGAFGALLIALINRKVNLRFLKETSEKTAIVSTMIFTILIGASIFSLIFRGVGGDELIDLIFNSLPGGSFTALIFVLVIIFLLGFILDFIEICYVIVPLVAPPLLMMGFDPVWLAILFAINLQTSFLTPPFGFSLFYLRGVADESIQTKEIYKGVVPFILIQIIILFAVMLFPTLII

SEQ ID NO: 78584 - protein, 445 aa, Unknown
  Bacterial polypetide isolated from the Sargasso Sea
MEIIPLLLLILICTALLLGYPVAFTLAGVSILFALICVPFGIFDPTIFKSIPIRIFGIMNNVTLLAVPLFIFMGTILERSGIAAKMLENMAAAFRNTKGGLSISIIIVGALLAASTGIVGATVVTMGLMSLPILINQGYEKSFSTGLVASTGTLGQIIPPSIALVLLGDVMSNAYQRAQNDMGIFSQKTVTVGDLFIGAIVPGIMICIGYLIYTIYKNNNNKNIKANSNGLSIEKIELFKTLALPIILIFLVLGSIFAGIATPTEAAAIGAFGALVIALINRKINFNFLKETSEKTAVVSTMIFTILIGASIFSLIFRGVGGDELINLIFNSLPGGSYTALIFVLLVIFFLGFILDFIEICYVIVPLIAPPLLMMGFDPVWLAILFAINLQTSFLTPPFGFSLFYLRGVADESIQTKEIYKGVVPFILIQIIILFAVMLFPILII

SEQ ID NO: 78585 - protein, 342 aa, Unknown
  Bacterial polypetide isolated from the Sargasso Sea
IVMATGGAGELFPVHSNTPDSTGDGYALALNAGADLVDIEFLLMLGHAVLHPATVRGVLFTFQYLLTKGAKPLFNSEGNSFLSNYDPEGNDNPARHIYARAIYGEVRAGRGSPHGGAFFDPGSVSRETLMASLPSQTKYLESFGVDITKPIEVGAAAHYVCGGIKINTQSQSTVPGLFAVGECSGGPHGAGRIGGNSLTEILVFGKRAGAEAAAFANFTSLSIPDRDEVFSEVNRVTSQLSRERTGERPNVIKARLQKLMNDYVGVVRNEEGLVNTIAEFERMEREDLPAMSIAENNRIGNYDWIEALEVTAMTGFARAMAGAALLRTESRGAHYREDYPDL

SEQ ID NO: 78586 - protein, 255 aa, Unknown
  Bacterial polypetide isolated from the Sargasso Sea
MYLKKYNLKNKYSLVTGAGKGLGRACAIALAEAGSNLIIISRTKKDLDSVSKIIKKLKVKCKSYTCDVTNYNEIKTIINKQPRIDVLVNNAGNNIPEHFTKVKTKNMEYLVKVNTIATFNIAQLCAIKMMKLKNRKKVGGSIINMSSQMGHVGGPIRSVYNMNKWGLEGLTKGMAVDLAKYNIRVNAVAPTFVVTPMTKKFLKNKKFKKETLNNIPLGRFAEMSEIASTVVFLASDAASMIHGTSILVDGGWTAK

SEQ ID NO: 78587 - protein, 220 aa, Unknown
  Bacterial polypetide isolated from the Sargasso Sea
YAASQTFDEARHVESFNRYVQSRMELMYPIGNALKSILDKILTDPRWDLKFIGMQLIIEGLALAAFRTSRDLTPDPVLKDMLDLIIRDEARHVTFGINYLEEFVTTLSEKEIEERAQFAYEACYLSKERLVSIEVYEHFGWNVEDARQFQLSSEIMQTFQKLLFQRVMPNLKRIGLLTDSIRPKFEKLGILEYENDASDADIDWADLSRPLFKETAELAP

SEQ ID NO: 78588 - protein, 386 aa, Unknown
  Bacterial polypetide isolated from the Sargasso Sea
MDNIKASNKIFSIEDAKKLSKKRLPKLVYDFIDGASGDEKLSEINSFALDQIRLEPRVLRNVEERKLKKNILGFNYDYPFGFAPMGMTNLSWPGADSMLAKESARNNIPTCVSMASTTTLEKMYELSEGHSWLQLYIFQDEAFVMELLDRAEKTGYEVAILTVDVPVLSRRTRDDKNGFSYPFKIGPKQFFDFATHPVWSISTLLNGIPKPMNYETSKSGKGIFKRKESRGKTDWETLKRVRNKWKGKLIVKGVMSSDDAVKIKEMGADAIQVSNHGGRQLDSASAAINILPFIREAVGNNFPIIFDSGIRSGSDIVRSLALGADFSMIGRPVMYAMGADGASGLRRIVDIIKEETSTTLGLVGLNDINEVSSDIIEQKLFMNTTY

SEQ ID NO: 78589 - protein, 294 aa, Unknown
  Bacterial polypetide isolated from the Sargasso Sea
MDKFTLGIIAFPILFSMLALRMPIGLAMLIVGCSGTIIIAGWLPILSQVKTSAWHLFSNYSLSVIPLFLLMGNFAGKAGMSEALFKFTGACLGHRKGGVAMAAIGACAGFGAICGSSLATAATMGKVALPELRRLGYSGALSTGTLAAGGTLGILIPPSVILIIYSILTEQNIAKMFLAAFIPGILAALGYILAIALYVRFVKDSGPTKDRIGWKKRLSLFKNIWQIILIFLVMIGGIYLGWFTPTEGGAIGAGGAGLIAISSKNFKFKDLVEVIESTAITSAMIFLVLLGAEF

SEQ ID NO: 78590 - protein, 508 aa, Unknown
  Bacterial polypetide isolated from the Sargasso Sea
MAPGKMRVIKRNGKVVSFEEEKIKVAIMKAFLAVEGGSAAGSSRIHEEVDQMAQEIIKVFERRMPSGGTIHIEEIQDQVELQLMRNEHHKVARTYVLYREARKNERVEERDEKGLEKNVQEVIESAVKKACIGLDNVDEILLVTEIKNATYEGISEKDLAESMLMTARTLVEKEPNYSYVTARLLLNNMENEVGAFLGVKERKDRGKMYVEALAKTIDKGIELDFLNDELKSYDLNKLGKAILQERDFQFTYLGLQTLYDRYFITCDETRYELPQVFFMRVAMGLALNEENRDERAIEFYKLLSSFDYMSSTPTLFNSGTQRPQLSSCYLTTVPDDLSGIYGAIRDNALLSKWAGGLGNDWTNVRALGSKIKGTNGKSQGIVPFLKVSNDTAVAVNQGGKRKGAFCAYLECWHLDVEEFLDLRKNTGDDRRRTHDMNTANWIPDLFMKRLEKREKWTLFSPSDVPDLHDIYGKEFESKYTEYEKKAEAGEIKHFKTLEAKDLWRKILS

SEQ ID NO: 78591 - protein, 449 aa, Unknown
  Bacterial polypetide isolated from the Sargasso Sea
MPELKKYKMFINGEWVNSDTKKTFETLNPENNKPWAVVPEASASDVDRAVKAAQNAFEGEWPKLLPKDRARYLRMIGDKLRANAEHLGKIETIDTGKLYRETYKQANYIAEYYDYYAGLADKVEGTVLPIDKPNIQAITTRIPIGVIAAIVPWNSQMFLTATKLAPALAMGNTVVIKCSELAPATMFEFAKLIQETGIPKGVVNVISGFGEPCGKALTSHNLVEKIAFTGGPETARHIIRNSAENLSEVSLELGGKSPVAVFNDANQENAINGITAGIFGASGQSCIAGSRLYLQEGIYDEFLDKLSKKAEKIKIGAPMDPETEMGPISNYKQLEVIEKNIKLTLEQGGRLKCGGQRHSFSNEGYYFPATIIECDNHNLPVAENELFGPVLSVMKFKTEDEVISKMNDNQYGLSSGVYTSNLARGMRVSKAIRAGITFVNTYRLISPNC

SEQ ID NO: 78592 - protein, 426 aa, Unknown
  Bacterial polypetide isolated from the Sargasso Sea
SRELGRLTAPFVHRASAAEIHADALPPKTEYVIFCRLTPTQAALYAECLKSTTTRGEFLKSTPLTALQRLQRLCNSATLFFAREEDAEEKTKAAAREGRGEAPEEREARGEGHARLLPADAADPADPNVPAHHPGMSGKLAVLARLLARAPSSGPSSGRSGPGSSGSSPSRDRFVVVSGFTSTLDVVQAMCESTLGMRGKISRLDGSVAPNLRTGLVKRFNEGRGGDVFLLSCKAGGVGLNLVGANRLVLFDSDWNPANDLQALARVWREGQTKPVVIYRLLSTGTVEEKVFQRQILKGDVANAMGYASASASASASDAASASDAAPAALNSFSKAELRDLFKLNASTACDTVDALRRRGDRRGGGGAPREIPEHWRRCGEGVETGADDPPLADAARLTLAGGGETIVSAVCKLPSTARAGGGEAT

SEQ ID NO: 78593 - protein, 321 aa, Unknown
  Bacterial polypetide isolated from the Sargasso Sea
MKVGIVGDIHPSGYEFFDKNNIEYFVTNNIEENNLSKELSDVDGIIIRTAELNKNILSKSQNLKIVARHGVGYDNVDTEYLNKNKIAMAITGKANAVSVAEHVMTMMLNLTKNISKSDKLTRDNKFKEKANLPNFFELYNKKILIMGFGRIGKALAKRCLGFDMEIFVHDPFISDNEIISYNCIPINKDEGFKIADYISIHLPLNNKTKNLISSNEFKIFKSNLILINTARGGIINEDDLFDALNCNRIFGAGIDVFEQEPPINDHKLFSLENIILTPHNAALTLECRKRMAIECCENVFNFLSKSKNLIESNIINLDILS

SEQ ID NO: 78594 - protein, 351 aa, Unknown
  Bacterial polypetide isolated from the Sargasso Sea
MNERYKILFESVEIGPKVAKNRFYQVPHAMGSGNDMPNTRAAQRGIKAEGGWGVVNTGYCSIHPSSDDRPLPFARLWSEKDIESHVPMIEAVHEHDALAGIEFFHGGAYTANRHTRMPPISPSGIQQKVSELMDMHLTAPKVMDKKDIKDLIQWHVIATERAIQAGFDIIYCYAGMGFLPYHFLHPTFNNRTDEYGGSLENRSRLMRELISEMKEVAGDRAAIAVRMSTDELLTFKSESSESEAHEFFEINGEFPDLWDIKMSSWFKECPSGRFAESGHMEPYNSFVKKLTSKPVVGVGWFTSPDIMAKQINDGILDFVGAARASIADPFLPNKLKEGREDDIRECIGCNI

SEQ ID NO: 78595 - protein, 486 aa, Unknown
  Bacterial polypetide isolated from the Sargasso Sea
MSSTLFSDDHWNGKLFTGIWTTGSSNSPVIEPATGAVLGQVAMADAQIIRKSAATARECQKAWAGKSYDQRAAILRRTAVAAEQHFEEIVNLLVKESGSVRAKAQFEVSLSIKCLQESSALPASSCGEVLPSAPGQLSLARRRPLGVVGVISPFNFPMYLAMRAVAPALALGNGVVLKPDPRTAVCGGYTIARLFELADLPSGLLHVLPGDGMVGAALIADPDIAMIQFTGSTQAGRKVAESAGRHLKKVSLELGGKNSLIVLDDADIETAVANAAWGSFLHQGQICMASGRILVQRNIYDRFVIELATLASSLKVGNPADSDVALGPLINEAQLNHVAHVVRTARETGAKVMAGGNADGLFYPATVLADVSPANDAFRSEIFGPVAVLTPFDTDDEAIALANDTEYGLSAGVITRDVGRALRIGDQLRTGLLHINDQTVNDDVINPFGGIGASGNGTSIGGPANWEEFTQWQWVTVKGEAPKYIL

SEQ ID NO: 78596 - protein, 153 aa, Unknown
  Bacterial polypetide isolated from the Sargasso Sea
CLDRFDKLCNASGATKTSELRLSMQRTMQSKCAVFRTEKTLKEGMDQIRKPFEGMSDISVSDKSLLFNTDLVETLEFDNLIRQAMTTIDSAYHRKESRGAHAREDFKTRDDKKYMTHTLAWQKGNEVKVAYRPVHAKTLTNDVQYFPPRERVY

SEQ ID NO: 78597 - protein, 285 aa, Unknown
  Bacterial polypetide isolated from the Sargasso Sea
NEAGFPPGVINIVTSSGPEVPAAMVASKDVNMVSFTGSTSVGKSIYESGAATMTRVLMELGGKGALIMTEDASVDAAMGAIASVWGFHSGQICTAPTRVICHRNIYDQTVETLEAVAGMLKMGDPRERDTLVGPLISEQQRDSVEKFISSGVDSGAKLVCGGERPDEQGYFVAPTLLADCTTDMHVVREEAFGPVVVVLPHENDEEAIEMANDSDYGLFSYVYAGDTARAHHIAQSLESGNVALNSIQPHMEAPFGGFKMSGIGRDRGTWGLKAYSELQAISWLA

SEQ ID NO: 78598 - protein, 445 aa, Unknown
  Bacterial polypetide isolated from the Sargasso Sea
MEIVPLLLLIIICTALLVGFPVALTLAGVSIIFALICIPLGIFDPTIFKSIPIRIFGIMNNVTLLAVPLFIFMGTILEKSGIAAKMLENMAKAFKGLKGGLSISIIIVGALLAASTGIVGATVVTMGLMSLPILINQGYDKSFSTGLVASTGTLGQIIPPSIALVLLGDVMSNAYQRAQNDMGIFSQKTVTVGDLFIGAIVPGILICIGYLIYTLYKNSNNSNIKDTSTELAIDKVELFKTLALPIVLIFLVLGSIFAGIATPTEAAAIGAFGALLIALINRKVNLNFIKETSEKTAVVSTMIFTILIGASIFSLIFRGVGGDELIDLIFNSLPGGSFTALIFVLVIIFLLGFILDFIEICYVIVPLVAPPLLMMGFDPVWLAILFAINLQTSFLTPPFGFSLFYLRGVADENIQTKEIYKGVVPFILIQIIILFTVMLFPVLII

SEQ ID NO: 78599 - protein, 246 aa, Unknown
  Bacterial polypetide isolated from the Sargasso Sea
MIQDKVVVITGASSGIGHSTAKALAKKGAKIVAGARRLDRLESLKKEITDDGGEITICETDVTKKTDCDNLVKQALDKYGTVDVLVNNAGLMPLSFVKSLKVDEWDRMIDVNIKGVLYCTAAVVPTMTEKKSGHIINISSVAGRIVFPAGSVYCATKHAVTAFSEGLRQELSVRKNIRVTSIEPGVVQTELTNTITEDSLQGFIEKGKQMEALQADDISNAIIFAIDAPNHMNVNEILIRPTTQDH

SEQ ID NO: 78600 - protein, 196 aa, Unknown
  Bacterial polypetide isolated from the Sargasso Sea
IQKNIAEEFISKLVDRVNKIKVGNPLDPNTEVGPLISENHLEKVVSYFDVAKREGAEIAVGGKAHKKPGWFVSPTLFKNAKSGMRISQEEIFGPVLTAITFEDEEEALKISNDVEYGLTGYIWTNNVTRALRFSDELAAGMIWVNSENVRHLPTPFGGIKSSGIGRDGGDWSFEFYMEQKHIGFATGNHQIPKLGK

SEQ ID NO: 78601 - protein, 255 aa, Unknown
  Bacterial polypetide isolated from the Sargasso Sea
MFLKKYNLKNKYALVTGAGKGIGKACAIALAESGCNLIIISRTKKDLDSVAKIIKKLKVKCKTYACDITNYNQIKSIVNQQQRIDILVNNAGNNIPEHFTKVKTKNMEYLVKINTIAAFNVAQLCALKMIKLKNRKKIGASIINMSSQMGHVGGPIRSVYNMNKWGLEGLTKGMAVDLAKYNIRVNTVAPTFVVTPMTKKFLKNQKFRKETLNNIPLGRFAEMSEIASTVVFLASDAASMIHGTSILVDGGWTAK

SEQ ID NO: 78602 - protein, 151 aa, Unknown
  Bacterial polypetide isolated from the Sargasso Sea
EAAVEALAPLERGVTERNPFQLQLELQTMMQDKVGIAREDKGLTDAIGLIREISSQIADVGAGGNRWYNPGWHTALDMKHLLTVSEAIALSARERKESRGAHSRLDHPNKEEGWSTFNHVVRKGPDGEMVIERQEIPPMRQELQDIIEEEG

SEQ ID NO: 78603 - protein, 252 aa, Unknown
  Bacterial polypetide isolated from the Sargasso Sea
MYLKKINLKNKYALVTGAGKGLGRACSIALAEAGATVIGLSRTQSDLDKLQKDIKKVKGKLIKINCDVMNYSDLKFKIEKIKFIDVLVNNAGTNIPEPFEKIQQKSMNYIVDLNLKAAFNVAQLVVKKMLKNKKRGGSIINMSSQLGHVGMPGRNVYNMTKFGIEGLTKGMGVELAARNIRVNSVAPTFVETPMVKKFFKNKKFKKLAIGNIPMGKAAKESDVSTAVCFLASDAAAMITGTSILIDGGWTAK

SEQ ID NO: 78604 - protein, 232 aa, Unknown
  Bacterial polypetide isolated from the Sargasso Sea
GYEVAILTVDVPVLSRRTRDDKNGFSYPFKIGPKQFFDFATHPTWSLSTLLSGIPKPMNYVTSKSGDGIFKRKESRGSTDWDTLKRVRDKWKGKLIIKGVMSPDDAKQIKEAGADAIQVSNHGGRQLDSATAAINMLPLIRKSVGNDFPLIFDSGIRSGSDIVRALAFGADYAMIGRPVMYAMGADGKKGLRRIVEIIKEEASTTLGLVGLNDINDVTSNIVIDSTVNKVNY

SEQ ID NO: 78605 - protein, 375 aa, Unknown
  Bacterial polypetide isolated from the Sargasso Sea
VPEASTKDVDRAVKAAQKAFEGEWPKLLPRDRAKFLRAIGDQLRKNAEMLGKVETIDTGKLFRETKQQANYIAEYYDYYAGLADKVEGTVLPIDKPNVQAITTRIPIGVVAAIIPWNSQMFLTATKLAPALAMGNTVVIKSSELAPAVLFEFAKLIEKTGIPKGVVNVITGFGDPCGKTLTTHNLVEKIAFTGGPETARRIIKNSAENLSEVSLELGGKSPVAVFDDAEQENAINGITAGIFGASGQSCIAGSRLYIQKGIYNEFLDKLSSKASKIKIGAPMDLDTEMGPLSSFKQLETIEKNIKDTIDQGGKIKCGGKRDSFSNKGYYFPPTIIECDNHNLPTAENELFGPILSVMKFETEEEVINKMNDNKYG

SEQ ID NO: 78606 - protein, 365 aa, Unknown
  Bacterial polypetide isolated from the Sargasso Sea
MSPSALPSSSPSDAPSDSPSNAPSSAPSHMPPMSPSDLPSSSPSDVPSDAPSAAPSNAPSHLPSMSPSALPSSSPSDAPSDAPSNAPSSAPSHMPSMSPSDLPSSSPSDAPSDAPSAAPSNAPSHLPSMSPSALPSSSPSDAPSDSPSNAPSSAPSHMPPMSPSDLPSSSPSDVPSDAPSAAPSNAPSHLPSMSPSPLPSSSPSDAPSDAPSNAPSSAPSHMPSMSPSDLPSSSPSDAPSDAPSAAPSNAPSHLPSMSPSALPSSSPSDAPSDAPSNAPSSAPSHMPSMSPSDLPSSSPSDAPSDSPSNAPSAKPSIDGETANNAGPPGNPDFTGGNLFGNNAPGGASGGTFTSNGGSANDVRRR

SEQ ID NO: 78607 - protein, 149 aa, Unknown
  Bacterial polypetide isolated from the Sargasso Sea
MSVYQEIEHDVLVIGAGGAGLRAAVEAASAGVNVGLVCKSLLGKAHTVMAEGGMAASLANVDERDGWTTHFADTMRGGQYLSSWRMAELHAKESPERARELEKWGALFDRTPDGKILQRNFGGHKYPRLAHVGDRTGLEMIRTLQDHGS

SEQ ID NO: 78608 - protein, 255 aa, Unknown
  Bacterial polypetide isolated from the Sargasso Sea
MYLQKFELKNKTALVTGAGKGIGKASAIALAEAGADLIIVSRTLNDLNKVKKQINKLKRKCTVFECDVSNAAEVKSVFKQINSLDILVNNAGTNRPDHFTKIKKEDMDYVVDLNIKAAFHVAQMATKVMLKSKNRKVKGGSIINMSSQLGKVGAPIRSVYNMTKFGIEGLTRGMALDLAKNNIRVNTICPTFVETPLVNNFFKDKKFKKAMMDNIPLGRLATDSDIATAVVYLASNASSMITGSSLVIDGGWTAK

SEQ ID NO: 78609 - protein, 368 aa, Unknown
  Bacterial polypetide isolated from the Sargasso Sea
MKINKQDGPPEDLLYFDEDLNLSQKQVEDVVEIFKTPLTGSYNWDYSIADNRIKKLYELGKELNWNGSIDLNWDYTHPVDERIVQPDEELPHETLEAYNNLSDEEKILFDRHSTAELMSQFLHGEQGALLVASQLASCAPTYNAKLYAASQTFDEARHVEVFNRYLQEKIGIHYPINPNLKLLLDKILTDERWDLKFIGMQIIIEGLALAAFQMLKSITKDPLLKQLLHYVVRDEARHVTFGINYLEDYLTTLSPEEINERAQFAYEACVISRDRLINTKAEQRFLKMSEEEAREFSLNTGSFELFRNFLFSRVMPNLKRIGLLTDEVRPKFEALGLLEYEHAPDDFECDWAEMRKPLEKFGQIPTSL

SEQ ID NO: 78610 - protein, 277 aa, Unknown
  Bacterial polypetide isolated from the Sargasso Sea
MEKVAVVTGSSSGIGFETSLALAREGYFTYATMRDVKKADKIQKIADEESLSLKVIELDVDDEESAENAINTMIQEKGRVDVLVNNAGWGIWGTGEDVSVEEFKEQFETNFFSVVRMIQKVAPTMRNQGSGNIVNISSVAGRIGLPASTAYVSSKFAVEGLSESLRYELGQFGVNVIIIEPGVIKTNFFDSMKTAKKADEGGAYRDITIKVITGVKMMAEMGTSPKEVAQVIIKSLKEEKPLPRYIVGNDAAMFMESKKMKTDIEFENYMKKELYSE

SEQ ID NO: 78611 - protein, 106 aa, Unknown
  Bacterial polypetide isolated from the Sargasso Sea
IRKTFDGMDSLSVKDKSLIFNTDLVETLEFDNLIRQAVVTVDSAYSRKESRGAHAREDYPKRDDEKFMQHTLAWCDGKKSKISYRDVHKSTLTNEVQYFPPQERVY

SEQ ID NO: 78612 - protein, 371 aa, Unknown
  Bacterial polypetide isolated from the Sargasso Sea
VGSEVDSWSIRQPLGVCAGITPFNFPAMVPMWMFPMAIACGNSFILKPSEKDPSCSFKLAELLSEAGLPDGVLNVVNGDKEVVDSILENKDIQAVSFVGSTPIAKYIYENAARNEKRVQALGGAKNHCVVMPDCDLDQAVNGLMGAAYGSAGERCMAQSVAVAVGDIGDRLVDKLSKKVEVLKVGPGMDKNSEMGPLITKEHLQKVRGYVDIGVKEGAKLVVDGRNLKLQGYENGFFIGGCLFDNVKKDMRIYKEEIFGPVLSVVRAKDFEEASKLVNDHEYGNGVSIFTRDGDAARTFSSKIKVGMVGVNIPIPVPMAFHSFGGWKRSLFGDQHMHGPEGVRFYTKLKTITSRWPSGIRSNPEFVMPTMK

SEQ ID NO: 78613 - protein, 209 aa, Unknown
  Bacterial polypetide isolated from the Sargasso Sea
AVERFGRIDVLVNNAGFGLLGAIEESSDADVRRMYDTNVFGLLNITRAVLPVMRAQRSGHVVNMSSIGGYRSAAGFGAYCSTKFAVEGLTEALHAELRPLGIHATVVEPGYFRTDFLDASSLVVAGNVIADYDETSGNVRRRAASLNHNQPGNPEKLAAAMIELVHAPTPPLRLPLGTDTLKAIAEKNAYVAQETETWAALSASTDFPG

SEQ ID NO: 78614 - protein, 775 aa, Unknown
  Bacterial polypetide isolated from the Sargasso Sea
MGIDIVKAQFLLAAGAKIGDDICGVPLQENIHMKGHAIQSRVTTEDAANDFAPDYGKINVYRSASGLGIRLDAGTASTGTIITPYYDSLLVKVTAKGQTPIEAKRRMNRALSEFRVRGVKTNIPFLLKLINHEGFDIFKYHTKFIDSEKSLFQFSGRKDRATKTLNFLAEVIVNGNPEVANRPRLRETTPAKLSDYGISRSKKAQETVNNTYKQILDAEGPSAVAHAVLKEKQLLITDTTFRDAHQSLIATRMRTQDMLGITDLYEERLKNLFSVECWGGATFDVALRFLKEDPWERLEKLREQMPSALLQMLFRGSNALGYTNYPDNVLRRFIQLSAQSGIDVFRIFDALNWIENMRVSIDEVLKSGKICEASICYSGDLSSPAEKKYTLEYYLKMAQKLEKMGVHFLAIKDMAGLCKPKAAKILFKELKKNIKIPIHFHTHDTSGNGVATLLNASDAGVDIVDVAIDSWSGFTSQPSFGAVLESLDGNNRDPKISSAVVRTAANYWEGVRKQYQPFESKTRTSMSEVYLHQMPGGQYTNLREQARSMGITDERWPELASMYAEVNKIFGDVIKVTPISKVVGDMAIYMLANNIQIEDVLDPKKDVGFPASVIEFFSGRLGQPYKGFPKALQKKILKGKKPINYRFGSKLPSLKIKNRTKELEKNYNEIISEKDTISQIFFPEVFDEYMKHKKKFGNTSVIPTSNYFFGMNTDEEIYVSIEPGKTLIIRYFTLSEPNEKGFRTVYFELNGQARSVDIKDNSIAVDDLAKEIADP

SEQ ID NO: 78615 - protein, 496 aa, Unknown
  Bacterial polypetide isolated from the Sargasso Sea
MASIIHHWINGELQPSSAERYGDVFNPATGQVSASVSMGNSDDLNKAVESASEAFKSWSQTSVTKRAQIFFKYKELLETNREELIELITQEHGKVASDAAGSLQRGIEVVDFVCGIPHLLKGEFSEQVGTGIDCYSTRQPIGVCSGVTPFNFPAMVPMWMFPIAIACGNTFILKPSEKDPSCAMKLAELLQEAGLPKGVLNVVNGDKEVVDAILDHPSIKTFSFVGSTPVAQYVHEKASANGKRVQALGGAKNHAIVLEDASLEQTTNAIIGAAYGSAGERCMAISVVVVVEGVADELCKLLSEKASALKIGPGNEAENEMGPLITNDHKNKVIDYIQQGIDSGAKILLDGREHEMTNKPGFFLGPTLFDGVSPEMSIYKEEIFGPVLVVLRVKDFNAAIRLANEHQFGNGVAIFTNQGSKAREFVHSVEVGMVGINVAIPVPLSFYTFGGWKDSIFGSSNIYGMDGIRFFTRTKTVTARWVDDDETINLSMPTVE

SEQ ID NO: 78616 - protein, 78 aa, Unknown
  Bacterial polypetide isolated from the Sargasso Sea
EFDNLIRQAITTMDSAYHRKESRGAHAREDFPKRNDEKFMQHTLSWCDGVKTKIDYRPVHKSTLSTDVQYFPPQERIY

SEQ ID NO: 78617 - protein, 266 aa, Unknown
  Bacterial polypetide isolated from the Sargasso Sea
MYIILGTKNNKRIQALGGAKNHMVIMPDADVDKTTDAIIGSAFGSAGERCMAISVAVCVGKETNKNIKKTLLEKTSKLNVGPYTDEKTDFGPLSSEAHYKKVLGYIDSGEKEGAKLLSDGRNFKKQGYENGYFVGPTIFDDVKPDMKIYKEEIFGPVLSMMTTEKYEDALKLVNDHELGNGAAVFTKSGNIAKHFTENAKIGMIGVNVPIPVPVAYHSFGGWKRSLFGDHSIHGPDGVRFYTKLKTATITWNEDNSGPEFTIPVLS

SEQ ID NO: 78618 - protein, 210 aa, Unknown
  Bacterial polypetide isolated from the Sargasso Sea
DSKKLSEEIGEGVDYIKCDVRLEDDIISVSEKAYEMWDQVDVLVNNAGSELNQSYDKMTEAEWDNVLNTDLKGPWLMCKHIVPKMVEAGSGSVINISSLNGLVGFPLSTAYGSAKGGLVVFTRDMAIELASTGVRINCVCPGVIQTGMMERWTDLMPDKAEAQEMLRNTMPIGRMGTAEEVAGAIFFFASDDSSLCQGSVLSVDGGFTAQ

SEQ ID NO: 78619 - protein, 493 aa, Unknown
  Bacterial polypetide isolated from the Sargasso Sea
MSKLKQYKMYIDGEWVDSDTKKTFETLNPENNKPWAVVPEASANDVDRAVRAAQKAFEGEWPKLLPRERGKYLRAIADKLRNNAELLGEIETIDTGKLFRETKKQANYIAEYYDYYAGMADKVEGTVLPIDKPNIQAITTRVPIGVIAAIIPWNSQMLLTVTKLAPALAMGNTVVIKSSELAPAVLFEFAKLVEETGIPKGVVNIITGFGDPCGKALTTHNLVEKIAFTGGPETARQIIRNSAENLSEVSLELGGKSPVAVFDDANQENAINGITAGIFGASGQSCIAGSRLYLQKGIYDEFLDKLVKRAEKIKIGAPMDPKSEMGPISNFKQLEIIEKNIKLTVEQGGKIKCGGKRHSFSNEGYYFPPTIIECDNHNLPTAENELFGPILSVMQFEKEDEVINKMNDNQYGLSSGVYTSDFARGMRVSKSIRAGITFVNTYRLISPSAPFGGMKDSGYGKEAGIESIKDYTRVKTTWYYTSDEPTLDPFSMR

SEQ ID NO: 78620 - protein, 411 aa, Unknown
  Bacterial polypetide isolated from the Sargasso Sea
MRDPRYDILFEPVKIGPVTARNRFYQVPHCNGMGYVRPNSLAKMREIKAEGGWSVVCTEEVWIHHSSEIVPHAEGILWDDGDIPALTKMTEAVHKHGSLAGIELQHGGYSSSNNYSRIPPIAPSSIVSSTYNPVQARAMDKRDIANFRKWHKKAALRSKQAGFDLIYVYAAHSGTLLTNFLSRMINKRTDEYGGSLENRVRLFRELIEDTKDAVGDTCAVAVRFAVEEFLGPTGITSENEGKEIVEMLAELPDLWDVNISDWNMDSAPSRFESEGYQESYISFVKSLTTKPVVGVGRFTSPDTMVSQIKRGVMDMIGAARPSIADPFLPKKIEEGRINEIRECIGCNICVMGDQFSVPIRCTQNPTMGEEWRRGWHPEKIEPRKSDDGILVVGAGPSGLECSLALGQRGYR

SEQ ID NO: 78621 - protein, 481 aa, Unknown
  Bacterial polypetide isolated from the Sargasso Sea
MANVTYTDTQLLIDGEWVDAASGKTIDVVNPATGKPIGRVAHAGIADLDRALAAAQSGFEAWRKVPAHERAATMRKAAALVRERADAIAQLMTQEQGKPLTEARVEVLSAADIIEWFADEGRRVYGRIVPPRNLGAQQTVVKEPVGPVAAFTPWNFPVNQVVRKLSAALATGCSFLVKAPEETPASPAALLRAFVDAGVPAGVIGLVYGDPAEISSYLIPHPVIRKVTFTGSTPVGKQLASLAGLHMKRATMELGGHAPVIVAEDADVALAVKAAGGAKFRNAGQVCISPTRFLVHNSIRDEFTRALVKHAEGLKVGNGLEEGTTLGALANPRRLTAMASVIDNARKVGASIETGGERIGSEGNFFAPTVIANVPLDADVFNNEPFGPVAAIRGFDKLEEAIAEANRLPFGLAGYAFTRSFANVHLLTQRLEVGMLWINQPATPWPEMPFGGVKDSGYGSEGGPEALEPYLVTKSVTVMAV

SEQ ID NO: 78622 - protein, 637 aa, Unknown
  Bacterial polypetide isolated from the Sargasso Sea
MDRDSRYDILFDTVDIGPVKSKNRFYQVPHCNGGGYRDPSAAAEMRGIKSQGGWGVIFTEQCEMHHSSEITPFIELRLWDDADIPMIAKMADRMKEYGALAGIQLAYSGINGPNLYTKEVPLAVTGMPIRTFTNDPVSARSLDKEDIKNLRRWFVNAAKRSKTAGFNLICLYGAHGFGIFQHFLSTATNQRTDEYGGSLKNRARFVKEVVEEVRNEVGDTMGITLRLSLDEMIGDLGFANSEVRDFVEMHQDLPDLWDLAHGAWEDCSGPSRFKEEAAQFELVTGIRKLTSKPIVGVGRFTSPDVMVKQIKSGTLDFIGCARPSIADPFLPKKIEEGRIQDIRECIGCNICITGDMTMSISRCTQNPTFMEEWRKGWHPEIIDPKGKTSKVLVIGSGPAGLEAALACSNRGYDVTLTEASKILGGRVAKERKLPGLSAWGRVADYRQYQLSQKPNVETYLESSLNADQVLEFGFENVCIATGSTWRADGVSRQHVVPIVNDNSINLYTPDDIMNDKLPTGKVVIYDDDHYYMGGVIAEKLIEKGCDVTLLTPCAYVSEWSINTLEQAEIQKRLIEMGVEIELNRGLVAISNSKLISNCTYTQNEKEIETDNLVMVASRKPQDQLYKDLLLKKTIWND

SEQ ID NO: 78623 - protein, 482 aa, Unknown
  Bacterial polypetide isolated from the Sargasso Sea
DGEWVDSETKKTFETLNPENNKPWAVVPEASASDVDRAVKAAQKAFEGEWPKLLPRERGKYLRAIGNKLRENAKLLGEIETIDTGKLFRETNKQANYIAEYYDYYAGLADKVEGTVLPIDKPNIQAMTTRIPIGVIAAIVPWNSQMFLTATKLAPALAMGNTVVIKCSELAPAVMFEFAKLIEETGIPKGVVNVITGFGDPCGKALTSHNLVEKIAFTGGPETARHIIKNSSENLSEVSLELGGKSPVAVFDDANQESAINGITAGIFGATGQSCIAGSRLYIQQGIYNEFLDKLVKRAEKIKIGAPMDPETEMGPLSNFKQLEIIEKNIKLTVEQGGKIKFGGKRHPFSNEGYYFPPTIIECDNHNLPVAENELFGPVLSVMRFESEEEVIKKMNDNQYGLSSGVFSSDFSRALRVSNAIRAGITFVNTYRLISPSAPFGGIKDSGYGKEAGIDSIKDYTRVKTTWLNTSDEPMKDPFTIG

SEQ ID NO: 78624 - protein, 644 aa, Unknown
  Bacterial polypetide isolated from the Sargasso Sea
MADQRVIVIGGGLAGLAATMKIAELGTKVLLISFQPVKRSHSVCAQGGINGAVNIKGEGDSPEIHFYDTVKGGDFLANQPLCKDMCYHAPFVIYLLDRLGVPFNRTPEGNLDFRRFGGTLHHRTAFAGATTGQQLLYALDEQVRRFETQGLVEKMEWHEYLGAVLDSEGRCVGATINNLRTGEIRAERGDAVILATGGPGLVYGRSTNSMVCTGTATTSAYLQGAKYGNAEFIQIHPSAIPGRDKLRLMSESARGEGGRVWVPKNPGDERKPRDVPEDERFYFLEEKYPRFGNLVPRDVGAREIYDICINQKLGVHGEMKVYLDLTHKSREFLDDRLGGILEIYEKFTGVDPREEPMEIFPAVHYSMGGIWTDYESTDDGFINHQSPRNQMTSIPGLYAAGEADYQYHGANRLGANSLLSCIYTGLMMGPGVNNYLKNLPEAASQLPSSVFENDEKRWKERFSDISSMKGSENPYALHSELAEAMISNVLIVRENDKLQSTLDVIEDIESRWKDIECVDTQDWSNPVPSFVNQLWNMIQLSKIITMGALKRDEFRGSHYKPEFDLNQPDDFDPADYLEYEEQKANGGVHKDQFAPSHVDYMERFEKNNEDWLKSSIATYNNGKPAVDFESVDTSLIAPRPRKYD

SEQ ID NO: 78625 - protein, 490 aa, Unknown
  Bacterial polypetide isolated from the Sargasso Sea
MFEICTVSIEEIKKQNKLCEGAICYTNDVTNPNEKKYTLKYYINLVKELENAGVNIIAIKDMAGLCKPEAIKVLIKEIKNNTDLPIHFHTHDTSGTSAASVLASIDAKVDIVDLAMDSMSGGTSQPAIGSIISIIKKNNKDSLIKEENTSKASLYWEQVRKNYHSFESDFKGGSSEVYMHQMPGGQFTNLKQQAHSLGITNDNWWKVANTYAEVNKMFGDIIKVTPSSKVVGDMTLYMVANDLKADDVLDPNKEISFPDSVIEFFKGELGTPQGGFPRKLQEKVLGDLKPITKRPGSVLLSVDIEKERRNLETKFKEKIDNKKLASYLMYPKVFEDFMTHIQKYGDVSILPTELFFYGPQADVEYSLGIDKGKNLIVRYLAKSEANSNGIRSVFFEINGQPRTIEIKDNRLSKKISQKLKASDQNSKHIGSPLPGQISKIFVKDGKRIIKGDNLLVIEAMKMETTITAEKSGLIKSLFVEVGENVETKDC

SEQ ID NO: 78626 - protein, 345 aa, Unknown
  Bacterial polypetide isolated from the Sargasso Sea
MGDCGSTKGPATQNEVADKLTADFNETSASEVPQFALLLGDVVYNFGEGQYYYDQFYEPYRDYPAPILACAGNHDGMVSPEAHAASLTAYLRNFCAESFAVTPEAGGLSRTAQIQPGVFFTFEAPFLRVLVIYSNTLEDPGVIADPRIGTTQLDFLDAALKRVKAEKFSGALLIANHHPPYSAGGHGSSVDMLAQIDKICEANGVRPHAFLSGHAHNYQRFTRTRNADGTQIPYLVCGNGGHGLIKLAAQGAPAIRAPQIMQAASATTDQVVLENYDDTNYGYLRIVVTAAQLRIEYHSASDGLNTKAPNDYVTVDLASRQVAHFVAPDMGHPKAARAVRALVRR

SEQ ID NO: 78627 - protein, 217 aa, Unknown
  Bacterial polypetide isolated from the Sargasso Sea
MYGTISCSSGRRIGDKLVEKLSKKVEALKVGPGLDKNSEMGPLVTKEHLEKVRGYVDLGVKEGAKLVVDGRDIKLQGYENGFFIGGCLFDNVTKNMRIYNEEIFGPVLSVVRVKDFNDAIQLINDHEFGNGTSVYTRDGDVGRTFANKIKVGMVGINIPIPVPVAFHSFGGWKRSLFGDLHMHGPEGVKFYTKLKTITSRWPSGIGSDPEFVMPTMK

SEQ ID NO: 78628 - protein, 368 aa, Unknown
  Bacterial polypetide isolated from the Sargasso Sea
MKIHKQDGPPEDLLYFDEDLNLSQKQVEDVIEIFNTPLTGAYNWDYTVSDNRIKKLYELGKELNWNGSIDLNWEYTHPADEKIIEPDEELPHEMLDAYQSLSDEEKILFDRHNTAELMSQFLHGEQGALLVASQLASCAPTYNAKLYAASQTFDEARHVEVFNRYLQDKVGIHYPINPSLKLLLDKILTDERWDLKFIGMQIIIEGLALAAFQMLKAITKDPLLKQLLHYVVRDEARHVTFGINYLEDYLKTLSPEEINERAEFAYEACVISRDRLINTKAEQRFLKMSEEEAREFQLNTGTFEMFRNFLFTRVMPNLKRIGLLTDEVRPKFEALGLLEYENAPDDFECDWAEMKKPLEKFGQIPTNL

SEQ ID NO: 78629 - protein, 433 aa, Unknown
  Bacterial polypetide isolated from the Sargasso Sea
FMLSLQIIIFVLLSFWIVNNSFLISFEIGDLVYSLSSVTILIFLFVFLLIIFIVQTTYFRTKFQFLKFKLKNNINKKERGFNAFVNSMIALANKDFKTAIKNSYSVDKYLGSKSSINLLLQSEIYKVEKKNKNLNLVYEEMCKNEKTQNLGYRGLMEQYLRSEDYHHAFIYGEKLFNNNPYIEKIYDTLVSIISKTNNWQQLVVLTDTAYQKKIINKEFFSLNKSIAYYEIAKIKQLSEENEAIKLIEKSLELRKNFPPYVTLYIDLLIQNKKYSFAKKFIKKVWSSAPYSNYKESIRRLSLNLNMTYKELVKFITDSNPNNYESKILLAEALIEDKDWIEAKNQLKNYLDHQPKKEICQLMSKIEEGDSGDPQKVNAWLLRGRNGALSNLWICKITKNAQKDWSSLSNSGYFNSLEWRQPSMINQIELSDNN

SEQ ID NO: 78630 - protein, 241 aa, Unknown
  Bacterial polypetide isolated from the Sargasso Sea
CLGGAKNHMIVVPDADIDSAAKGLLASSMGSAGQRCMAASVAVGVADVDPIIDQLIEEAKKYVLGVDMGTIISRHAFDRIKGYIDNAENMGAKVLVDGRNSTPPEGYDNGYWLGPTILDDVSPDWPCAKEEIFGPVLSIIRTDTIDKAMKIENNNIYGNAAAVFTTSGEVAKTISETASAGMVGINIGVPVPREPYSFGGWNESKYGHGDITGKSGVEFWTDLKKVTARWPESNEAWKKYF

SEQ ID NO: 78631 - protein, 376 aa, Unknown
  Bacterial polypetide isolated from the Sargasso Sea
AGMADKVEGTVLPIDKPNIQAITSRIPIGVIAAIVPWNSQMFLTATKLAPALAMGNTVVIKSSELAPAVMFEFAKLIEETGIPKGVVNVITGFGDPCGKALTTHNLVEKVAFTGGPETARHIIRNSAENLSEVSLELGGKSPVAVFDDAHQENAINGITAGIFGASGQSCIAGSRLYLQKGIYDEFLDKLTKRAEKIKIGAPMDPDTEMGPLSNYKQLEIIEKNIKKTTEQGGKIKCGGERHPFSNEGYYFPPTIIECDNHNLPTAENELFGPVLSVMKFDTEKEVIEKMNDNQYGLSSGVYTSDFSRGLRVSNAIRAGITFVNTYRLISPSAPFGGIKDSGYGKEAGMDSIKDYTRVKTTWYYTSDEPTLDPFSI

SEQ ID NO: 78632 - protein, 254 aa, Unknown
  Bacterial polypetide isolated from the Sargasso Sea
MAKKNTQPLAVITGGASGIGLSAVKRFLDEGYEVLILDANKDAGEQSVNSLKSDTCNVNFAHCDITDHAQIDTVFADLQANNRPAHVLVNCAGISPALNPLHQYSVEEWHRTININLHGTFYACREFLKLATAQKIDAGAIVNVASIMGVRASGAQAPYAASKHAVVGLTKSIAQDYATMNIRANAIGPGVIDTPMNTELMKDENIMQYMLQRIPMNRVATSDEVANLIYFLASSEASYITGSYYPIDGGYLAS

SEQ ID NO: 78633 - protein, 209 aa, Unknown
  Bacterial polypetide isolated from the Sargasso Sea
KNNVSLNSVEGFVRQIMGWREFIRGVYQTRSHKQIGYNFFKNDRKLTKDWYEGTTGINPLDDAIKLTLEHGYTHHINRLMVVSNIMNLSGIHPDEIYKWFMEMFVDSSEWVMVPNVYGMGTFADGGVFSTKPYICGSSYIMKMSNFKKGPWCDIVDGLYWSFIKNNLDYLKTNPRLAVMPRALERLKDERKEIIFQASEDFLKEKTTSY

SEQ ID NO: 78634 - protein, 491 aa, Unknown
  Bacterial polypetide isolated from the Sargasso Sea
MEEKGCCVFLQSTYGDGEPTDTSSDFVYWARDTASDGRMPDLLEHLTFSVFGLGNRCYEQFNAAAKMVHKALVDLGATPLLKLHLGDDDQCLEQDFENWIEAFWPAFEAKFGLHSEGGDEELPRYEIVAMDGVEGERAAASQASKYAKEHSGGRFAPTATKPFLAPVKVVRELFSTGADRNCVHVEFDISGSGIKYKTGDHLGVFAENGADITQRVAKALKIDVKKVFRLSKPNGAPASLGEPFETPITAADAIAKYADVLTPPRKQALAALASVASGKDVEKLAFLASPAGKDEFAKYITQPHRSLLEVMEDFPSAVPDLGLFFGAIAPRLAPRFYSISSSPAADANTVTATVAVVKEKVATGRVHEGVASTFLQRAAEGQKIPVFVRTSTFRLPENPEAPVIMIGPGTGFAPFRGFLQERTAQKASGATLGPAMLFFGCRNESKDFIYEDEMRAALREGVITSLDVAFSRDGPKKVYVQDKIIEKASTV

SEQ ID NO: 78635 - protein, 306 aa, Unknown
  Bacterial polypetide isolated from the Sargasso Sea
ILKPSEIAPISGMLFAEMIDEAGFPSGVFNLVNGDGAGVGTHISGHPDIDMISFTGSTRAGKLISKNAADTIKRVCLELGGKGGNIVFADSYPNAVRDGIKNVMSNSGQSCDAPTRMLVEKTIYERAIKEAADEANKIKVDIASKKGDHIGPVVSKVQYDKIINLIKSGIDEGATLAAGGPEIPNNLYKGYFIKPTIFTNVTNNMQIAKKEIFGPVLSIISFETEEEAINITNDTEYGLGNYLQTEDKEKAKRVAKKLRSGIVYINGKSADSGTPFGGYRQSGNGREGGTWGLEEYLEVKNITGWD

SEQ ID NO: 78636 - protein, 162 aa, Unknown
  Bacterial polypetide isolated from the Sargasso Sea
KISNSETDKCLDRFEKLRNGNGTNRTADLRLAMQRTMQSKCAVFRTEKTLKEGVEEIRKPYEGMDSISVKDKSLIFNTDLVETLEFDNLIRQAIVTLDSAYERKESRGAHAREDHPKRDDNNFMKHTLSWCNGSKTKISYRDVHRSTLTNDVQYFPPQERVY

SEQ ID NO: 78637 - protein, 229 aa, Unknown
  Bacterial polypetide isolated from the Sargasso Sea
LLVEDDPVLSRTMAQGLENAGHRVELAHTVEEAQHWWAVQAFDAVLLDLNLPHAAHARSGLGSGLTALRAARARGDRTPVLVLSARDSTEERIAGLDAGADDYLGKPYELKEVEARLRALLRRASGTADIVTVGQLVLDRQARRVSVAGQPLELPAREFDLLWELMTPPGRVLSKGDLSSRLSDGGEVVGENALEASFSRLRRKIAGSGAAIRTLRGLGYVLEDDVGQP

SEQ ID NO: 78638 - protein, 356 aa, Unknown
  Bacterial polypetide isolated from the Sargasso Sea
DLKNANLANANLRGAVIHYIDLSGKDLNGIKLIDSNLLNVNFTDADLRNADLRNADLTTADLTNANLEGAFLHGAKLNSLNLKNTNLEFADFNTPLGEVNLYHESIEYDFTLHDLTGINLHGVYLEGIDLSGKNLSGADLSGAMLRNANLENSILLGANLEKADLTNSNLQNSELTGASLRYATLVNSNLQGIKFDYAYFKNADLSFSNLNDTNLHNADFWKVDLTNANLENSDLSKAFLRDSILINANLKNTNLQQSELSYANLSNANLSEANLKQSDLISANLSGADLSGANLLLSYSKNAIISDIKTSATTKSDACFDNELFDRILCNALRKLESDSPPFYGEYRNYHRDDLF

SEQ ID NO: 78639 - protein, 470 aa, Unknown
  Bacterial polypetide isolated from the Sargasso Sea
EAKKAPFDNKKHIGEVSYLSKDKLENIELDESWAELSLEERIKVLNKVAINIQNNRDKFFYLLANEAGKTLKDCDAEVRESIDFINYYCHQAEELFTKEELEGPTGEKNYLVHAPKGKFLCISPWNFPMAIFVGQISAALVTGNSVIAKPAEDTSIIAYEIIKLFHEAGVPGSALQLIIGGREIGNELTKNDQLNGVAFTGSSEAAKKININLANSDGPIKTLIAETGGQNVMFVDSSSLKEQVIDDVVRSAFLSAGQRCSALRVMYVQEEIADEYWDYLDEAMQELELGDPNEPTTDIGPIINQTSLDKLNVHITKLKTDKEFIECDKDCSEDGYFVKPIAFKINNISEIDGEKFGPILHFISYKTEDLDKILEEVNATGFGLTMGVHSRITEKANKIFEKAKIGNFYLNRDIVGAVVGVQPFGGQGLSGTGPKAGGPNYLKSFVTEKTFTDNVMATGGNIDLLNKNNQ

SEQ ID NO: 78640 - protein, 495 aa, Unknown
  Bacterial polypetide isolated from the Sargasso Sea
MTMTHYVNGAHTAASTRSQEIFEPATGECRGQVSLASRDEVSAAIAIAKSAFDTWSQVTPLNRARVLFKFKALVEQHMDELAQLITLEHGKVLDDARGELIRGLEVVEFACGIPHLLKGEHTQQVGGGVDAWSVNQALGVVAGIAPFNFPVMVPMWMFPIAIACGNTFIMKPSEKDPSAVMRIAELLTQAGLPAGVFNVVNGDKEAVDTLLSHEDIQAVSFVGSTPIAEYIYSTASKHGKRVQALGGAKNHMLLMPDADLDQAVSALMGAAYGSAGERCMAISVVLAVGDVGDKLVDKLLPQIQQLKVGNGLTPEMEMGPLISRQHLAKVTEFVDAGVKEGATLVVDGRQLTVADHQQGYFLGACLFDNVTPEMRIYREEIFGPVLSIVRVKDYASALALINQHEFGNGTAIFTQSGEAARHFCHHVQVGMVGVNVPIPVPMAFHSFGGWKRSLFGPLHMHGPDGVRFYTKRKAITARWPVGKQTQAEFVMPTMK

SEQ ID NO: 78641 - protein, 369 aa, Unknown
  Bacterial polypetide isolated from the Sargasso Sea
MKKNGNEFESNSISLGKSHWNNNQDLNGDYIFRLMSMSKPITALAAMQLVEKGKLNLDSPVEEVLPEIKEIPVLNADSKLVKQSKSITLRHLMSHTSGFAYNSLMMITSKKIKDLSISMKILLFLKGIITYIYPFSKGPRLFEAGTDFKYGTGLGFVGMMIEKVTGQSLEEYCKENIFNPLEMKNTFFTIPKEKRDKIVPLGIRQGKKSKVIRKMPFKGQPYLRFWRKSYYGGTEIFSSPNDYANFVKCLMNKGNFNNKQIISETSFNEMIKPGKFDQMFERDDSYNFIMGENGRLKNKMNRYGLGFTISFDPNDSRPVGSIAHGGAACTFFSFNLEKQKGALIFSNFYPYNDKEWHEMVVAFEKEIYA

SEQ ID NO: 78642 - protein, 363 aa, Unknown
  Bacterial polypetide isolated from the Sargasso Sea
LIEKNSDQLTKLIFSEHGKVYEDAKGSLTRGLEVVEFACGIPHLLKGEFSENVGTNVDSWSMRQPLGVVAGITPFNFPAMVPMWMFPIAIACGNTFILKPSEKDPSCSILLAQLLSEAGLPEGVFNVVNGDKEAVDAILENSDIKAVSFVGSTSIAKYIYENSAKNEKRVQALGGAKNHLVVMPDCDLDGAVNGLMGAAYGSAGERCMAQSVAVAVGDIGDELVSRLSKKADALKVGPGMDKTSEMGPLVTKEHLERVKGYVDLGVEEGAKLVVDGRDLKLQGYENGFYIGGCLFDHVNKNMRIYKEEIFGPVLSVVRVKTFEEAAILINNHEYGNGVSIYTRDGDAGRTFASKIQVGMVGIN

SEQ ID NO: 78643 - protein, 387 aa, Unknown
  Bacterial polypetide isolated from the Sargasso Sea
MSENIIPSNKIFSIKEARDLSKKRLPKLVFDFIDGASGDEKLSEINSTALDQIRLEPKVLRNVEKRSLKKSFLNYQFDNPFGFAPMGMTNLSWPGADAMLAKESARNNIPTCVSMASTTTLEEMYELSEGHSWMQLYIFQDEDFVMELLDRAEKTGYEVAILTVDVPVLSRRTRDDKNGFSYPFKIGPKQFFDFATHPTWSLSTLLKGIPKPMNYVTSKSGDGIFKRKESRGTTDFDTLKRVRDKWKGKLIIKGVMSPDDAVKIKDAGADAIQVSNHGGRQLDSATAAINILPLVRKALGNDFPLIFDSGIRSGSDIVRALAFGADYTMIGRPVMYAMGADGAKGLRRIVEILKEETSTTLGLVGLNDINDVSSEIVAEKIIGNTRY

SEQ ID NO: 78644 - protein, 308 aa, Unknown
  Bacterial polypetide isolated from the Sargasso Sea
WRQGDINLLSNYEKKCHAAYYAEEHGPSACGMAFRVKDSQHAYKEVLARGAQPMDTHTGPMELKLPAIKGIGGAMLYLIDRYEGENTIYDIDFNWIEGVDRHPEGCGFHTLDHLTHNVYRGRMNFWAGFYEKLFNFKEIRYFDIKGEYTGLLSKAMTAPDGKIRIPLNEEAVGGGGQIEEFLMKYNGEGIQHIAFACDDLVACLDKLKAKGMKFMTPPPNTYYDMLEERLPGHGENVDELQKRGILLDGTTENGEPRLLLQIFSETVFGPVFFEFIQRKQDEGFGEGNFKALFESIERDQVNRGVLNK

SEQ ID NO: 78645 - protein, 250 aa, Unknown
  Bacterial polypetide isolated from the Sargasso Sea
MRLKGKKCIVTGGSSGIGEATIRRFISEGAEVLIADINLEDSKKLSEEIGEGVDYIKCDVRLEDDIISVSEKAYGMWDKVDVLVNNAGSELNQSYDKMTEAEWDNVLNTDLKGPWLMCKHIVPKMVEAGSGSVINISSLNGLVGFPLSTAYGSAKGGLVVFTRDMAIELASTGVRINCVCPGVIQTGMMERWTDLMPDKAEAQEMLRNTMPIGRMGTAEEVAGAIFFFASDDSSLCQGSILSVDGGFTAQ

SEQ ID NO: 78646 - protein, 211 aa, Unknown
  Bacterial polypetide isolated from the Sargasso Sea
ESTVKGIFEPNAGQICVAMSRVIIHPKVKDEYMTKLTEKTKKLKIGSGDNADTQVTPLISQDQLQRVSNYVKSGIQSGASLAVGGEKAHIGEGNYYQPTVFDNVKTDSTIAQEEIFGPVTSVFNFNDEEEAIDIINSTKYGLASGVFTADDQKAKWTSDRIQAGIIWQNDWFVDGVNLPGGGYKRSGYGRDGGVDGVYSHGQTKRISKRLV

SEQ ID NO: 78647 - protein, 243 aa, Unknown
  Bacterial polypetide isolated from the Sargasso Sea
MKITQVENCPTGLHYFDKDDLESKLEPQDIEDIVEIFQTPLTGTYNWDYTDADNRLKKLYELGKKLNWNATLDLDWTQEPYSLKDWATNPEIQQLSGFKPYDDLSEEKKIECSWHLLASGLSQIVHGEQGALLVASQLVSCAPTYNAKLYAASQTFDEARHVEVFNKYLQERIGWNYPVMPGLKALLDKILSDPRWDLKFIGMQIIIEGLALAAFERQRAAAMDPLLKDIFYLVIRDEARHVT

SEQ ID NO: 78648 - protein, 255 aa, Unknown
  Bacterial polypetide isolated from the Sargasso Sea
MYLQQTQVKNKTALVTGAGKGIGKACAVALAEAGANLIILSRTKSDLDNVEKQIRKLKRKCKSYICDVSNYEDVKNVFNKVSSLDILVNNAGANRPDHFTKIKKEDMDYVVDLNMKAAFHVAQMAAKVMLESKNRKSKGGSIINMSSQLGKVGAPNRSIYNMTKFGLEGLTRGMALDLAKKNIRVNTVCPTFVETPMVKKFFEDKKFKKKMMNNIPLGRFGTESDIATAVVYLASNASSMITGSSLVIDGGWTAK

SEQ ID NO: 78649 - protein, 323 aa, Unknown
  Bacterial polypetide isolated from the Sargasso Sea
GNTVVIKCSELAPATMFEFAKLIEETGIPKGVVNVVSGFGDPCGKALTTHNLVEKVAFTGGPETARHIIRNSAENLSEVSLELGGKSPVAVFDDAKQENAINGITAGIFGASGQSCIAGSRLYLQKGIYNEFLDKLASRAEKIKIGAPMDSDTEMGPLSNFKQLEVIEKNIKLTVEQGGKIKCGGKRHHFSNEGYYFPPTIIECENHNLPAAENELFGPVLSVMKFDTEKEVIELMNDNQYGLSSGVYTSDLARGMRVSNAIRAGITFVNTYRLISPSAPFGGIKDSGYGKEAGIDSIKDYTRVKTTWFYTSDEPSLDPFSIR

SEQ ID NO: 78650 - protein, 150 aa, Unknown
  Bacterial polypetide isolated from the Sargasso Sea
QYEKVQRMIQIGIDEGATLSAGGVGLPEGCESGYYVKPTIFSDVTNDMTIAREEIFGPVLCLIKYETEEEAIKIANDTPYGLAGYIQGEHAHAVEVASKIRAGQITINKGARVRSAPFGGYGSSGNGREHGTHGLEECLETKAVIGALVE

SEQ ID NO: 78651 - protein, 214 aa, Unknown
  Bacterial polypetide isolated from the Sargasso Sea
KKAIPFLLKAGLQNAGQTCSASSRILVQESIYSKVENLLVKEYEKLSIGPAIQDYDLGPLISKKQAERVKKYLILGEDLKQLVTLSLENNEFEKGNFVSPSLFGNVQPDHVLAQEEIFGPVQVLIPFKDEEEAIRIANGTKFGLVAGIWTKDGSRQMRMAKQLKAGQVFVNNYGAGGGVELPFGGVGHSGFGREKGFEALKGFSIIKTVAVNHG

SEQ ID NO: 78652 - protein, 368 aa, Unknown
  Bacterial polypetide isolated from the Sargasso Sea
MKIKKQDGPPKDLLYFDDEVNLTPLQVEDVVEIFNTPLTGSYNWDYTVADNRIKKLYELGKELNWNGSIDLKWDYTHPADQKIIEPDEQLPHETLEAYENLTEEEKILFDRHSTAELMSQFLHGEQGALLVASQLASCAPTYNAKLYAASQTFDEARHVEVFNRYLQEKIGIHYPINPALKTLLDKILTDERWDLKFIGMQIIIEGLALAAFQMLKTITKDPLLKQLLHYVVRDEARHVTFGINYLEDYIKTLSQEEIEDRAEFAYEACVISRERLINTKSEQRFLGMSPDEAREFQLNTATFDMFRNFLFSRVIPNLSRIGLLTEKVRPKFEALGLLEYEHAPDDFECDWTELKKPLEAFDKIPEAI

SEQ ID NO: 78653 - protein, 309 aa, Unknown
  Bacterial polypetide isolated from the Sargasso Sea
YPFGFAPMGMTNLSWPGADSMLAKESARNNIPTCVSMASTTTLEKMYELSEGHSWLQLYIFQDEAFVMELLDRAEKTGYEVAILTVDVPVLSRRTRDDKNGFSYPFKIGPKQFFDFATHPVWSISTLLNGIPKPMNYETSKSGKGIFKRKESRGKTDWETLKRVRNKWKGKLIVKGVMSSDDAVKIKEMGADAIQVSNHGGRQLDSASAAINILPFIREAVGNNFPIIFDSGIRSGSDIVRSLALGADFSMIGRPVMYAMGADGASGLRRIVDIIKEETSTTLGLVGLNDINEVSSDIIEQKLFMNTTY

SEQ ID NO: 78654 - protein, 223 aa, Unknown
  Bacterial polypetide isolated from the Sargasso Sea
LAEAGATVIALSRTPSDLNKLEKNIKKIKGKVIKVPCDVMNYEELKTKLEKIKIIDVLVNNAGTNIPEPFEKIKQTSMNYLVDLNLKAAFNVAQLVVKKMLKNKKRPGSIINMSSQLGHVGMSGRNVYNMTKFGIEGLTKGMGVELAKRNIRVNTVAPTFVETPMVKNFFKNKKFKKLALGNIPMGKAATESDVATTVCFLASSASSMITGTSIVIDGGWTAQ

SEQ ID NO: 78655 - protein, 186 aa, Unknown
  Bacterial polypetide isolated from the Sargasso Sea
DARDFTNFMTAVIDQRAFDKISGYVERAKDDDSCEVVVGGGHDDSTGWFIEPTIIVTTNPASETMCEEIFGPVLTVYVYDDDDFEGALETCDKGSPYALTGSIFANNEEDVQRAFEALRFAAGNFYINDKPTGAVVAQQPFGGARASGTNDKAGGPLNLLRWISPRSVKRTLDIPQDWGYPFMQPE

SEQ ID NO: 78656 - protein, 614 aa, Unknown
  Bacterial polypetide isolated from the Sargasso Sea
HIPLHQHIYFPTTARIHSVEVLKGPSAVPLGPQSIGGAVNLISTPIPEVNSGKFIQEFGDNNMTRTHAYYGVNQGNFGALVEVHEHASDGFDSIANVGGDTGFDKSDIMIKARYSSGNHSVTFKRVDIEENSDQSYVGLSQASFNANPRLRYGATAYDEMMNDGEQTSITYVGDFDNFDVVFTSWQNDYYRDWFKVSDFNNKKDHGEDDDINELISNANNGSSTAQDILDGKLPVQIEYKHNNRYYTNEGYQFKVSTEVGIHAITLGYRDMEDSESRVQAHEYADQAADGSLSALYGYVGLSGSNNRLRESSATSYYIEDTMDFGKLAITLGYRSEDYEQRHRRWSDKAGPNLTEVRTGPADVRDTMAYNDHTTSSIAATYDLSDTTTLVAGFHEGMTPMFGADPEEADNMELGVRYSEGTSNMEVFYFASDYSRLAAECTLVSGAACDADESAIFSGGEAEVTGLELNGSVVFKGDGVSYPVSISWTNTDATFKNSSDSDYFGTVAAGDDLPYIPNKQSSVVAGFITDNGLSGSARWVNVGSSCSLAACGPYNKIESHSYLDLSLRKAINDSMDVYVILENTTDQADLISRAPSEGARSQKPRTMKLGFTYSF

SEQ ID NO: 78657 - protein, 378 aa, Unknown
  Bacterial polypetide isolated from the Sargasso Sea
MEETSTLKKIDVAIIGAGPAGIGISAMLLELGIKSQVILERKKIGQSFDLWPKEMKLITPSFTTNFYGHLDLNSVISATSPAYTLRKEHPSGQEYAQYLRAVSDYYKLPIIEDANVDGITHTKDSFKVKINGTELIESRFLIWAAGEFQYPNLNIFKGSELCLHNSQVRSWEHLEGDEFYIIGGFESGMDAAVNLSKLGKKVNVLDRAAPWEEHTTDPSISLSPYTVERLREQINHGRIKLIDNADIQRITKKENQYSIKIKGKSKPYVSETQPILATGFKSSLTIVDKFFDWEPEKSYALINDEDESTKTPGLFLVGPQVRHENLIFCFIYKYRQRFGVVANSIGNRLGLDTAVLEQYRHEGLYLDDLSCCGDECEC

SEQ ID NO: 78658 - protein, 135 aa, Unknown
  Bacterial polypetide isolated from the Sargasso Sea
LRTSMQHIMQQKCAVFRTHDLISKGIEEYSKVESSMDDIDIKDKSLIFNTDLVEALELHNLMAQSKVTLHSALNRTESRGAHAREDYKERDDNNWLVHSLAWLNDKGDVSMGSRGVHMNTLTNHVQPIPPKRRVY

SEQ ID NO: 78659 - protein, 125 aa, Unknown
  Bacterial polypetide isolated from the Sargasso Sea
NKDMRIYKEEIFGPVLSVVRVKTFEEAAKLINDHEYGNGVSIYTRDGDAGRTFASKIQVGMVGINVPIPVPMAFHSFGGWKRSLFGDSGMHGMEGIKFYTKLKTVTSRWPSGVRSNAEFVMPTMK

SEQ ID NO: 78660 - protein, 83 aa, Unknown
  Bacterial polypetide isolated from the Sargasso Sea
FYTSRVEAIELQNLFEVAESTAISAFQRTESRGAHARDDFPDRDDEEWLCHSLFDPVTKSVKKREVNFNPSTIEAFPPKVRSY

SEQ ID NO: 78661 - protein, 480 aa, Unknown
  Bacterial polypetide isolated from the Sargasso Sea
MKLNIDIKELLGAVDVPAQWVGIREVYEAHTPRMIRDGVPVANARSSTHGIMVEVLVNGQFGYYGTPDMTKEGVSRAAKKAYQQAEIASGHALHHFDESARPSFQGEYRSPYIKNRESLSAGNLNELLLDAYNSLKVSDKIVSASSLCQVIETSFKFASSNGSDINQEFLMLEFDLSATAADGTNQQTRTFGGMRGTCRQMGLEYFDKYEIMANAGRIGEQALELLEAEECPTGEMDIVIAPDQMMLQIHESIGHALEVDRILGDERNYAGWSFVKLEDFGTLQYGSKLMNITFDPTLESEFASYAFDDGGLKATKEYLIKDGLLVRGLGGKESQIRSGLDGVANFRSSGWNRAPIDRMANINLEPGDLTFDELIGQVENGVYMESNKSWSIDDYRNKFQFGCEYGKLIENGKLTKTVKNPNYRAISTPFWNSLKGVGNEDTFGIYGTPNCGKGEPNQSIRVGHASPACLFENVQVFGGV

SEQ ID NO: 78662 - protein, 165 aa, Unknown; identical to SEQ ID NO: 78116
  Bacterial polypetide isolated from the Sargasso Sea

SEQ ID NO: 78663 - protein, 387 aa, Unknown
  Bacterial polypetide isolated from the Sargasso Sea
MNDLIRPSTKIHTIDDAIRLSKKRLPKLVFDFIDGASGDDKLAEINSTALDQIRLEPKVFRNVENRKLSKKIFDFRFDYPFGFAPMGMTNLSWPEADKMIAKESAYNNIPTCVSMASSTTLEDMFTFSEGHSWMQIYIFQSEEFIMELLKRAEGIGYEVLILTVDVPILSRRARDDRNGFGYPFKIGPKQFLDFALHPQWSLTTLFKGAPQPMNYVTSKSGDQVFRRKESRGATDWNTLKRVRDAWKGKLIIKGVMNSEDALKIKEAGADAIQVSNHGGRQLDSATASINALPLIRKALGDDFPILFDSGIRSGSDILRALALGADFVMFGRPLMYAIGADGAKGLRRIINLIKEELSTNLGLVGLTDINEVDKKIIAEKFFKDIKY

SEQ ID NO: 78664 - protein, 129 aa, Unknown
  Bacterial polypetide isolated from the Sargasso Sea
FDHVTTDMRIYKEEIFGPVLSVVRVKTFEEATKMINEHEYGNGVSIYTRDGDAGRTFASKIQVGMVGINVPIPVPMAFHSFGGWKRSLFGDSGTHGMEGVKFYTKLKTITSRWPSGIRSNPEFIMPTMK

SEQ ID NO: 78665 - protein, 343 aa, Unknown
  Bacterial polypetide isolated from the Sargasso Sea
TPFNFPAMVPMWMFPIAIACGNTFILKPSEKDPSCAIRLAELLTEAGLPEGVFNVINGDKEAVDAILENKDIKAVSFVGSTPIAKYIYENSAKNEKRVQALGGAKNHLVVMPDCDLDGAVNGLMGAAYGSAGERCMAQSVAVAVGDIGDELVSRLSKKAEALKVGPGMDKASEMGPLVTKEHLEKVTSYVDLGVEEGAKLVVDGRGLKLQGYENGFYIGGCLFDHVNKDMRIYKEEIFGPVLSVVRVKTFEEAAKLINDHEYGNGVSIYTRDGDAGRTFASKIQVGMVGINVPIPVPMAFHSFGGWKRSLFGDSGMHGMEGIKFYTKLKTVTSRWPSGVRSNA

SEQ ID NO: 78666 - protein, 317 aa, Unknown
  Bacterial polypetide isolated from the Sargasso Sea
RIKKLYELGKELNWNGSIDLNWDYTHPADERLVEADEQLPHETLEAYENLSEEEKIEFDRHDTAELLSQFLHGEQGALLVASQLTSCAPTYNAKLYAASQTFDEARHVEVFNRYLQEKIGMHYPINKNLKLLLDKILTDERWDLKFIGMQIIIEGLALAAFQMLKGLSKDPLLTQLLHYVIRDEARHVTFGINYLEDFIKTLTPEEIEDRAEFAYEACVISRERLINTKAMQKYLKMSEDEAREFALSTSANTTFRNFLFSRIMPNLSRIGLLTDNVRPKFEALGLLEYENAPDDFECDWDELEKPLEKFGEIPQAI

SEQ ID NO: 78667 - protein, 387 aa, Unknown
  Bacterial polypetide isolated from the Sargasso Sea
MNDLIKASTKIHTIDDAIRLSKKRLPKLVFDFIDGASGDDKLAEINSKALDQIRLEPKVFRNVENRNLSKKIFDFHFDYPFGFAPMGMTNLSWPEADKMIAKESAYNNIPTCVSMASSTTLEDMFTFSEGHSWMQIYIFQSEEFIMELLKRAESIGYKVLILTVDVPILSRRARDDRNGFGYPFKIGPKQFLDFALHPQWSLTTLFKGAPQPMNYVTSKSGDQIFRRKESRGSTDWNTLKRVRDAWKEKLIIKGVMNSEDALKIKDAGADAIQVSNHGGRQLDSATASINALPLIRKALGDDFPILFDSGIRSGSDILRALALGANFVMFGRPLMYAIGADGARGLRRIINLIKEELSTNLGLVGLTDINEVDKKIIAEKFFKDIKY

SEQ ID NO: 78668 - protein, 203 aa, Unknown
  Bacterial polypetide isolated from the Sargasso Sea
PELSEIYIKKVKKIKVGDVEDFSNFMNAVIDKSAFDSITSYIDKSRKDDGTKIITGGNYDDSVGYYIEPTTILVKDPKYTTMCEEIFGPVLTIYLYDPKEWEQALNLVDNTSPYALTGCVWGTDSEAINFATEKLTHAAGNFYINDKPTGAVVGQQPFGGSRASGTNDKAGSIFNLIRWVSMRTIKETFDPPKDFEYPFMDKE

SEQ ID NO: 78669 - protein, 255 aa, Unknown
  Bacterial polypetide isolated from the Sargasso Sea
MASGKTLLITGVSSGFGRALAAEALAAGHKVVGTVRSEQAKHDFEALSANAAFGRVLDVTDFDAVGGIVAEIEATVGPVDVLVNNAGYGHEGIMEESPLSEMRRQFDVNVFGAVAMMKAVLPFMRERRRGHILNITSMGGYITMPGITYYCGSKFALEGISEALGKEVKPFGIAVTAVAPGSFRTDWAGRSMTRTPRSIADYDAIFDPIRTAREEKSGKQLGDPQKAARAMLAAIAADCPPTHLLLGSDALGLVR

SEQ ID NO: 78670 - protein, 247 aa, Unknown
  Bacterial polypetide isolated from the Sargasso Sea
QFLHGEQGALLVASQLASCAPTYNAKLYAASQTFDEARHVEVFNRYLQEKIGIHYPINPALKSLLDKILTDERWDLKFIGMQIIIEGLALAAFSMLKSTSKDPLLKQLLHYVIRDEARHVTFGINYLEDFIKTLSPEEINERAEFAYEACVISRERLINTKSQQRFLNMTEEEAREFQLNTGSFEMFRNFLFSRVIPNLSRIGLLTDEVRPKFEALGLLEYENAPDDFECDWAELRKPLEDFEKIPV

SEQ ID NO: 78671 - protein, 230 aa, Unknown
  Bacterial polypetide isolated from the Sargasso Sea
KVLILTVDVPILSRRARDDRNGFGYPFKIGPKQFLDFALHPQWSLMTLLKGAPQPMNYVTSKSGDQVFRRKESRGSTDWNTLKRIRNAWKGKLIIKGVMNSEDALKIKESGADAIQVSNHGGRQLDSATASINALPLIRKALGDDFPILFDSGIRSGSDILRALALGADFVMFGRPLMYAIGADGARGLRRIINLIKEELSTNLGLVGLTDINEVDKKIIAEKIFKDIKY

SEQ ID NO: 78672 - protein, 343 aa, Unknown
  Bacterial polypetide isolated from the Sargasso Sea
MTFDLDVENELNLTPQQVEDVAEIFNTPLTGAYNWDYTVADNRIKKLYELGKELNWNGSMDLNWDYNHPADERIMQADEDLPHETLQAYESLTEKEKIEFDRHDAAELLSQFLHGEQGALLVASQLTACAPTYNAKLYAASQTFDEARHVEVFNRYLQEKIGMHYPINKNLKLLLDKILTDPRWDLKFIGMQIIIEGLALAAFQMLKSLSKDPLLTQLLHYIIRDEARHVTFGINYLEDFIKTLTPEEIEERAEFAYEACVISRERLINTKAMQKYLKMSEEEAREFALSTTANTAFTNFLFTRIMPNLSRIGLLTDKVRPKFEALGLLEYEHAPDDFECDGT

SEQ ID NO: 78673 - protein, 654 aa, Unknown
  Bacterial polypetide isolated from the Sargasso Sea
MKKKLSITRRDFINGVSYGLAASVAPIDFLKAKNIDPFKYPPALMGIRGNHPGSFDHAHRLALAGGNFLEEVTDLGESNDLIVVGGGISGLSAAYFYQERTASNQNILILDNHDDFGGHAKRNEFQVDGREMLTYGGSQSIESPSYYEEVSKKLMVDLGIDFQKFYTAYDFDYFKNRGLTSSFFFNKETYGENKIVRNVPNYRYDINHKNNTKPENIKKVVKEMPISDKSKDEFARLFLDKTDFFPEMALEEKFYHLENMSYEEYLRKYHKVGDEVVGLFHTMLWSLWGVGTESIPAFGAFSDGLPGFSGLGFTEEEGTTEPENEMYDISTYDETIEGFMSKNEVSDEPYIFHFPDGNATIARLLVRKMIPNAISGSTMEDIVTAKADYSQLDLPDQNTRIRLDSTVISAKNVNDGVEVIYVNQGKLYKVSGKKCILACYNGIIPELCPELPKKQKEALKYNVKVPLVWIQVAMKNWHMFANKGISRAISPNSFFNNMYIDFPVSIGDYQYPQTFDEPVVFLMNHVPTRPYEGLTNREQHRKGRYDILKLSFQDYEDKIIDHLSAMFGPDFKEEDLAGITVNRWAHGYSYEYNSLFDNDFFDGRMPDSMNNEQYPHVMGRKPIGNISIANSDSGGSAYVDAAIVQADRAVNELL

SEQ ID NO: 78674 - protein, 255 aa, Unknown
  Bacterial polypetide isolated from the Sargasso Sea
MKKYQHYINGEWIDASSKDLIPVINPANEEVIGEITSAKDQDINQAVESARKAYESRILVDMNPMERAKLMRRIAEELRKVSKEGGALLCAENGKLLAASEYEFVDAANYFDYYSGLTDKIEGQTIPVNSQVMDYTVYEPYGVSGHIVPWNFPIAMIARSLACSFAAGNSTVIKPAELTPLATTSYFAQAIHNAEVPKGLINIVTGYGSEAGAALTAHPDVAQITFTGSVKTGKAILHDAAERAVPAVVELGGKS

SEQ ID NO: 78675 - protein, 123 aa, Unknown
  Bacterial polypetide isolated from the Sargasso Sea
MQIDFTNKRILVTGGTRGIGRAIVEAFLEAGARVAVNGSTDETTDRAISDLKAGGLAVAAPGSVGLVSSCESIVAAAVDSLGGLDVLVNNAGVGGGGPVEETKEEVFDQVMDINLKGIFFMTK

SEQ ID NO: 78676 - protein, 297 aa, Unknown
  Bacterial polypetide isolated from the Sargasso Sea
ISAMLFAEMIDEAGFPAGVFNLVNGDGAGVGTQISSHPDIDMVSFTGSTRAGKLITKNAADTIKRVCLELGGKGGNIVFADSYPNAVRDGIKNVMSNSGQSCDAPTRMLVEKTIYERAIKEATDETNKIKVDIASKKGDHIGPVVSKVQYDKIINLINSGIDEGATLAAGGPDLPNGLSKGYFIKPTIFTNVTNDMKIAKKEIFGPVLSIIPFETEEEAIKITNDTEYGLGNYLQTEDKEKAKRVAKKLRSGIVYINGNAAESGTPFGGYRQSGNGREGGVWGLEEYLEVKTVTGWK

SEQ ID NO: 78677 - protein, 98 aa, Unknown
  Bacterial polypetide isolated from the Sargasso Sea
EEIFGPVLSIIPFENEEEAIKITNDTEYGLGNYLQTEDKEKAKRVSKKLRSGIVYVNHKPADSGTPFGGYRQSGNGREGGTWGLHEYLEVKTITEWKN

SEQ ID NO: 78678 - protein, 278 aa, Unknown
  Bacterial polypetide isolated from the Sargasso Sea
MPTEIEQAGQDAQEPEQGETSEAVETPETEEKAAEESSGEETPEKLAEEKQKKRNSVQERISQLARQKNDANTRVQELEQQVAYLQAQSQPQAQDAPQAYPRLEDYDYDEARHQQAVLQYTSSLNAQNVQQVMQQQQQAQIAQLQAQKAQIASQEFVEKSNAFALDYKDFQATVTNPNFHQSDQVARTIVELPNGPDVAYYLGKNLKIANALNNKSERDARDDLIRISTALQVNSRKRRANTTNAPTPGKTVTPKGKVSKDLDKMSPEEYRKARGYIK

SEQ ID NO: 78679 - protein, 252 aa, Unknown
  Bacterial polypetide isolated from the Sargasso Sea
MYLQKINLKNKYALVTGAGKGLGRACAIALAEAGATVIALSRTSSDLDKLEKEIKKIKGKIIKIHCDVMNYDDLKKKIEKIKIIDVLVNNAGTNIPEPFEKIKQRSMNYLVDLNLKAAFNVAQFVVKKMLKNKKRPGSIINISSQLGHVGMSGRNVYNMTKFGIEGLTKGMGVELAKKNIRVNTVAPTFVATPMVKNFFKNKKFKKLALGNIPMSKLASESDVATSVCFLASSASSMITGTSIIIDGGWTAQ

SEQ ID NO: 78680 - protein, 362 aa, Unknown
  Bacterial polypetide isolated from the Sargasso Sea
MPKGFKEEHLEDVVEIFNTPLVGHYNWDYTDADTRIKKLYELGKELNWNGSIDLDWSNSLKKGEPPIKAELIARMEGPLAALPEEERLEYMRHDQAWTLSQFLHGEQGAMLVASQLVSCAPTYQAKLYAASQTFDEARHVEVFARYIKEIHGIEYPINKSLKALIDKILSDERWDLKFIGMQIIIEGLALAAFQTTKETSNCPLLRQLVHYVIRDEARHVTFGVNYLQEFLETLTEEEVEDRAMFAYEACVVMRARIINTELPARWFGMSEEEILEMVVNDDTQDMFNNMLFSRVMPNLKKIGLLTDKVMPLYEDLNLTSYIESESDFEIDWAELNKPLESSKEIDKQSEKELAAHTAQGLF

SEQ ID NO: 78681 - protein, 249 aa, Unknown
  Bacterial polypetide isolated from the Sargasso Sea
MKTVLITGCSSGFGLETARFFLARDWQVVATMRTPRTDLLPSSERLRVLALDVTNPQSIRAAVEAAGSIDVLVNNAGFGAAAPAELVPLATVRELFETNTFGTIAVTQAVLPQFRQRKAGVIVNVTSSVTLKALPLLAAYRASKVAVNAFIESMALELAPFGVRTHLVLPGRAPDTRFGENARAHIHGFDHEAYAGLAQDVVARMGDTSAPITHAQDVAEAVWRAATDPSSPLRIPAGADAEAWAAEVR

SEQ ID NO: 78682 - protein, 131 aa, Unknown
  Bacterial polypetide isolated from the Sargasso Sea
MFLKKFEVKDKTALVTGAGKGIGKASAIALAEAGANLIIISRTEKDLIAVKNQIKKIKRKCNYFVCDVTNLKEIKKIFSKIPKLDILVNNAGTNRPEYFTKIKRKDMSEVVDLNIKASFDIAQLATKIMLK

SEQ ID NO: 78683 - protein, 78 aa, Unknown
  Bacterial polypetide isolated from the Sargasso Sea
EFDNLIRQAMTTMDSAYHRKESRGAHAREDFSKRDDKKFMKHTLAWQDGKEVKVKYRDVHAKTLTNDVQYFPPKERVY

SEQ ID NO: 78684 - protein, 116 aa, Unknown
  Bacterial polypetide isolated from the Sargasso Sea
MQKIFRSEETLSKQTEILENLRERYENVTIFDKGKVFNTELMEAIELDYLLDMSESTVASALARKESRGAHSRQDFPDRDDGNFMKHSFAFKNGNSANLRYKDVELGKYEPMERKY

SEQ ID NO: 78685 - protein, 148 aa, Unknown
  Bacterial polypetide isolated from the Sargasso Sea
MQRVSNYVNSGIQSGATLALGGKEDENKEGNFYQPTIFDNVSTRATIAQEEIFGPVTSVFDFETEDEAIEIINSTSYGLASGVFTSDDEKAKWTAERIQAGIIWHNDWFVDGTNLPGGGYKKSGYGRDGGVDGIYSHGQTKRVSKRLY

SEQ ID NO: 78686 - protein, 387 aa, Unknown
  Bacterial polypetide isolated from the Sargasso Sea
MSHNIQPSTKIHTINDAIRLSKKRLPKLIFDFIDGASGDDKLAEINSFALDQIRLEPKVFRNVEKRILSKKFFDFDFDYPFGFAPMGMTNLSWPEADKMIAIESSYNNIPTCVSMASSTTLEDMFNFSDGHSWMQIYIFQSEEFIMELLNRAQNIGYKVLILTVDVPILSRRARDDRNGFGYPFKIGPKQFLDFALHPQWSLTTLLKGSPRPMNYVTSKTGDQIFRRKESRGATDWDTLKRIRDAWKDKLIIKGVMNFEDAKKIKESGADAIQVSNHGGRQLDSATAAINALPVIRKTVGKDFPLIFDSGIRSGSDILRALAFGADFVMLGRPLMYAVGADGAKGLRRIINLIKEELSTNLGLVGLNNINEVDEKIIAEKYLKDIKY

SEQ ID NO: 78687 - protein, 184 aa, Unknown
  Bacterial polypetide isolated from the Sargasso Sea
SCFWSSGCKRAAELIKPGMPHEEISKSETDKCLDRFDKLRNGNGDHNTADLRIAMQKTMQSKCAVFRTEKTLKEGVQEIRKPFDGMDAISVKDKSLIFNTDLVETLEFDNLIRQAITTMDSAYHRKESRGAHAREDFPKRDDKNFMQHTLSWCDGKETKIDYRPVHKSTLTNEVQYFPPQERVY

SEQ ID NO: 78688 - protein, 358 aa, Unknown
  Bacterial polypetide isolated from the Sargasso Sea
MGVAAGITPFNFPAMVPMWMFPLAIACGNSFILKPSEKDPSCPMKLAELLHEAGLPEGVFNVVNGDKEVVDAILTNRNIKAVSFVGSTPIAKYIYENAAKNEKRVQALGGAKNHLVVMPDCDLDGAVNGLMGAAYGSAGERCMAQSVAVAVGDVGDELVSRLSKKAEALKIGPGMDKSSEMGPLVTKEHLEKVKGYVDLGVKEGAKLVLDGRNLKLQGYENGFYIGGCLFDHVTTNMRIYKEEIFGPVLSVVRVKTFEEATKMINEHEYGNGVSIYTRDGDAGRTFASKIQVGMVGINVPIPVPMAFHSFGGWKRSLFGDSGTHGMEGVKFYTKLKTITSRWPSGIRSNPEFIMPTMK

SEQ ID NO: 78689 - protein, 216 aa, Unknown
  Bacterial polypetide isolated from the Sargasso Sea
WAQSVVVAVGNIADLLVKKLAKKVEILKIGPGLDKKSEMGPLITKEHLQKVKNYVDIGVKEGAKLIVDGRKLNLQGFDKGFFMGGCLFDHVEKSMKIYKEEIFGPVLSVVRVKNFDEALKLVNDHEFGNGVSIFTRDGDTGRTFSNKVKIGMVGINIPIPVPVAFHSFGGWKRSLFGDQYMHGPEGVRFYTKLKTITSKWPSGLRSDPEFTMPTMK

SEQ ID NO: 78690 - protein, 254 aa, Unknown
  Bacterial polypetide isolated from the Sargasso Sea
MLKKRIIPIQLLINNRLVKTIEFGKYRDVGNPVSSSKIYNDSDADELIFLNINREERSIEPLLTLIKKVSEVCFMPLSLGGGVKSIDDASKLIQNGADKIVLNSVIYDDLDLIEKIAYKFGNQAVVASIDVRMNDSRNKYDLYSNCGRNIESVDLIDHLKLIENQGAGEILITSIDQDGMMKGYDKNLIKIAVENTAIPIIGAGGAGTFDHLKDVFLQTDVSALACGSLFNFGDNNPIRAKAFLTNYSIPFKVI

SEQ ID NO: 78691 - protein, 445 aa, Unknown
  Bacterial polypetide isolated from the Sargasso Sea
ALADWAQTPPLVRARVLFRFKELMEQHRDDLARLISREHGKVFSDAQGELTRGLEVVEFACGIPHLLKGEHSLNVGRGVDSHSMMQPVGVCAGITPFNFPAMVPLWMFPVAIACGNTFILKPSEKDPSLSLRMAELLKQAGLPDGVLNVVNGDKEVVDVLLTDPRVGAVSFVGSTPIAQYIYATASAHGKRVQALGGAKNHMLVMPDADLELAVSALMGAAYGAAGERCMAISVAVVVGDETADALVARLSPLVAALRVGPGLGQSPENEMGPLISREHLAKVRGYVDQGVAEGAELVVDGRGLSHGEGYFIGGSLFDRVGPEMRIYREEIFGPVLAIVRAPDYETALRLVNEHEYGNGTAIFTCDGDTARDFTARVQVGMVGVNVPIPVPMAFHSFGGWKRSIFGPLNMHGPDGVRFYTRMKTVTARWPQSLRAGAEFSMPTMK

SEQ ID NO: 78692 - protein, 324 aa, Unknown
  Bacterial polypetide isolated from the Sargasso Sea
EKRSLKKKVLGYEFDFPFGFAPMGMTNLSWPGADSMLAAESARNNIPTCVSMASTTTLEKMYELSKGHSWMQLYIFQDENFVMELLDRAKNTGYEVAILTVDVPVLSRRTRDDKNGFSYPFKIGPKQFFDFATHPIWSLSTLLSGIPKPMNYVTSKSGDGIFKRKESRGSTDWDTLKRVRDKWKGKLIIKGVMSPDDAKQIKEAGADAIQVSNHGGRQLDSATAAINMLPLIRKSVGSDFPLIFDSGIRSGSDIVRALAFGADYAMIGRPVMYAMGADGRKGLRRIVEIIKEEASTTLGLVGLNDINDVTSNIVIDSTINKVNY

SEQ ID NO: 78693 - protein, 451 aa, Unknown
  Bacterial polypetide isolated from the Sargasso Sea
PATGKAIGKVAHAGIADLDRALAAAQRGFEAWRKIPANERATTMRKAAALVRERASDIARLMTQEQGKPFAEARIEVLSAADIIEWFADEGRRVYGRVVPSRNLAVQQTVLKEPIGPVAAFTPWNFPVNQVVRKLSAALACGCSFLVKAPEETPASPAALLQAFVEAGVPAGTVGLVFGDPAEISSYLIPHPVIRKVTFTGSTPVGKQLAALAGAHMKRATMELGGHAPVIVAEDADVALAVRAAGGAKFRNAGQVCISPTRFLVHNSIREEFAAALVKHAESLKLGDGLAEGTTLGPLANARRLTAMSKVLDDARKTGAKVETGGERVGSEGNFFAPTVLTNVSLESDVFNNEPFGPIAAIRGFDTLEEAIAESNRLPYGLAGYAFTKSFSNVHLLSQRMEVGMLWINQPATPWPEMPFGGVKDSGYGRKGGPEAMEGYLVTKSVSVTAA

SEQ ID NO: 78694 - protein, 338 aa, Unknown
  Bacterial polypetide isolated from the Sargasso Sea
MSLNPDQVEDIAEIFKTPLTGTYNWDYTIQDNRIAKLYELGKKLNWNTSIDIDWDRPLVVSDEIPPMFWDEYPPYKGLDEEGKREFLRHRGASQFSQFLHGEQGALLVASQLVSCAPTYQAKLYAASQAFDEARHVEAFSRYIQERSKLMYPVGSGLKSLLDKILTDERWDLKLIGMQIIIEGLALAAFNTAKAVTPDPVLRDLLHFIIRDEARHVTFGVNYLEEFIENLSDEEREDRAMFAYEACVISKERLFPTDVFRRFGWDEDEAREFSNNAGFALEFQRLLFARVMPNLSRIGLLTDKVRPLYDQLGVLEFESHSNDGDISWAELEKPLDLSA

SEQ ID NO: 78695 - protein, 355 aa, Unknown
  Bacterial polypetide isolated from the Sargasso Sea
MKSIFDSITLGKNTLQNSLVMAPMTRSRANRDGTPGALAADYYSQRASLGLIVTEGIQPSDDGQGYIFTPGIYTQAHIDGWKPVTQAVHAKGGRIFFQLMHAGRMSHPDNTPHHRAGLAPSAIAPGTQMFTLKGMLDIPVPEAMTQVQIKQAIAEFKHAARSAIAAGADGVEIHGANAYLIQQFFAPSANIRTDEYGGSIENRARFAIEIAKAVAEEIGAERTAIRLSPGTKLWGIDEGAEGPALYRYLVAELNKLQLVYLHVMHQGDDELLRDIRDGWDGILIVNKPGRARENIGDDIRSGLADLEAYGQMVLANPDFVERLKKDIPFNTADRNTFFGGAAQGYTDYPLANVAG

SEQ ID NO: 78696 - protein, 428 aa, Unknown
  Bacterial polypetide isolated from the Sargasso Sea
IFKLSIPIFFANLAIPLVAIVDTGLMGNLENVSYLAATSIASSVFSMIFWSFGFLRMGTVGMVAQAHGSKQYNEIVNLVLRNIVFVIVISLLLIFLQTYIFKLTLLIFDLSTDTKKSFKEYFDIRIYSSFGELTIFVITGLFIGLQKTKTSSIVVGFFSFTNILFSLIFVVYFNLNVQGVALGTLGSSTLTSVIFLFFTFFEFKKITNLDFSYKKIFDFNKIKNIFNTNLNIFIRSILLTFSFLFFTYLGNSISEDVVAANTILINLIMLSAFILDAYAFSTEGLIGYSIGSKNKKLLKEIIKNSFILSSSTGLIISFGYFLGKNHFIEIMTDLESIKIICLSYSAWIVIIPFISSFCYQFDGIFVGASKTKELRNAMVISVSIYLLTAFFLVNFFGNLGLWISLSIFFILRGLTLFLYLGRIYKRFK

SEQ ID NO: 78697 - protein, 243 aa, Unknown
  Bacterial polypetide isolated from the Sargasso Sea
MKRDSRYDVLFEPTEIGPVKAKNRFYQVPHCNGGGYRDPSAAAEMRGIKSEGGWGVIFTEQCEMHHTSEITPFIELRLWDDEDIPMISKMADRMKEHGALAGIQLAYSGINGPNLYTKEVPLAVTGMPIRTFTNDPVQARSLDKEDIKNLRHWFVNAAKRSRTAGFNLICLYGAHGFGIFQHFLSTATNHRTDEYGGSLENRARFVREVVEDVRNAVGDTMGITLRLSLDEMIGDLGFANSEV

SEQ ID NO: 78698 - protein, 301 aa, Unknown
  Bacterial polypetide isolated from the Sargasso Sea
MIFENYKLKNITLRNRIVMAPMTRNQSPGGIPTQEVISYYSRRAKAEVGLIITEGIEVSHKASSAYPNVPRLDSNEAKEAWKKVVAGIKNNNGAVIAQLWHCGGFRKLGMQPNPEVPGHTASGLVKPGKKVAHEMTLNDIKETIDAYASDAKICEEIGFDGVEIHGAHGYLIDNFFWSGTNIREDEYGGSIENRSQFVSDIIKSVRENVSENFIVGLRFSQWKQHDFEAKLASNPEELKTILTSPVESGLDYLHSSMRRFWESEFEGSKENLAYWTKKITKIPTIGVGSVGLDSDFIDMTA

SEQ ID NO: 78699 - protein, 184 aa, Unknown
  Bacterial polypetide isolated from the Sargasso Sea
LLDLVVFGRATGKHIQSELKSGGGVDSATKDDIENSLQRLNKLNESREGFDPADVKKELQECMQNYFGVFRRGEFMKKGLDQLNELKHKVQNLHLKDKSDAFNTSRVEAIELQNLFEVAESTAISAYQRTESRGAHARDDYPDRDDKNWLCHTIYDPISKSVSKREVNFNPSKVDAFPPKVRSY

SEQ ID NO: 78700 - protein, 200 aa, Unknown
  Bacterial polypetide isolated from the Sargasso Sea
VGAMRSGAQIVSYELSVGLSLFTIVILTGSLQFSDIISSQADGWWIWKGHIPAIISFIVFMIAATAETNRGPFDLAEAESELTAGFHTEYSGIKFSFFFLAEFANMFILSAIAATVFFGGWMPLHFGSFEAFNQIMDYIPPIVWFLMKTGFVVFLMMWFRWTFPRLRIDQLLTLEWKYLLPINLINILFMAFIALMGWHL

SEQ ID NO: 78701 - protein, 298 aa, Unknown
  Bacterial polypetide isolated from the Sargasso Sea
NLSWPGADSMLAAESARNNIPTCVSMASTTTLEKMYELSEGHSWMQLYIFQDENFVMELLDRAKNTGYEVAILTVDVPVLSRRTRDDKNGFSYPFKIGPKQFFDFATHPIWSISTLLSGIPKPMNYVTSKSGDGIFKRKESRGSTDWDTLKRVRDKWKGKLIIKGVMSPDDANQIKEAGADAIQVSNHGGRQLDSATAAINMLPLIRKSVGNDFPLIFDSGIRSGSDIVRALAFGADYAMIGRPVMYAMGADGRKGLRRIVEIIKEEASTTLGLVGLNDINDVTSNIVIDSTVNKVNY

SEQ ID NO: 78702 - protein, 350 aa, Unknown
  Bacterial polypetide isolated from the Sargasso Sea
MPELKKYKMFINGEWVDSEGKKTFETLNPENNKPWAVVPEASAKDVDKAVKSAQKAFEGEWSKILPRERAKYLRAIGSKLRENAELLGKVETVDTGKLYRETYKQAHYIAEYYDYYAGLADKIEGTVLPIDKPNIQAITTRIPIGVIAAIVPWNSQMFLTATKLAPALAMGNTIVIKASELAPATMFEFAKLIEETGIPKGVVNVITGFGDPCGKALTTHNLVEKVAFTGGPETAKHIIRNSAENLSEVSLELGGKSPVAVFNDAHQENAVNGITAGIFGASGQSCIAGSRLYLQKEIYNEFLDKLTARAEKIKIGAPMDPETEMGPLSNFKQLEVIEKNIKLTVEQGGK

SEQ ID NO: 78703 - protein, 164 aa, Unknown
  Bacterial polypetide isolated from the Sargasso Sea
NKVNQNELDKIIDKFDSIRFSKGSLPTAEIRAEMQSIMQKHASVFRTEELMKEGVEKLSSCIDSFKDVSVSDRGLVWNTDLIETLELENLLGQGIITIQSGQVRKESRGAHARDDYPDRDDENWLIHSLGWMDANNNVTIGSSPVHLDTQTDEVESIPLKARVY

SEQ ID NO: 78704 - protein, 209 aa, Unknown
  Bacterial polypetide isolated from the Sargasso Sea
GVSSCFLNTGQSCNAPTRMLVSSKNYDKAVEVAANTANAMKVGNPFDADTKMGPISNKNQYEKVQRMIQIGIDEGATLSAGGVGLPDGCESGYYVKPTIFSDVTNDMTIAREEIFGPVLCLIKYETEQEAIEIANDTPYGLAGYVQGEQAHAVEVASKIRAGQVTINKGARVRSAPFGGYGSSGNGREHGTHGLEECLETKAVIGALVE

SEQ ID NO: 78705 - protein, 287 aa, Unknown
  Bacterial polypetide isolated from the Sargasso Sea
MFQNLNNQQKGSLLAFVGVMFITPDSLLIRLSNIETWGMLFYRGAIPFVFVLTGLIFFYKKNFFKALLSIGYPGIFYVISFSACNITFIISIQNTNVANTLVMIALAPMLSAILGAIFLREVPDKKTLAAIVITFTACVYIFHDSLKLGNIYGDLFGLITAFGLACNATLARYAKNRDLVPSAVIGKLCVAVFAFFFVENFELLERDLFYVPLMCIMCVAIPFVLVTIAPRFITGAEVNLFFLLETILGPIWVWLVIKEQPSLETILGGSIIILTIAIHSFLALKKT

SEQ ID NO: 78706 - protein, 172 aa, Unknown
  Bacterial polypetide isolated from the Sargasso Sea
QSAFDSIKNYIDYAKKSSSAEVITGGNYDDADGYFIEPTTIVTSDPNFKTMCEEIFGPVLTIYIYEPNEWSKVLKLIDSTSEYALTGCVISEDRSAIIEAKDALNHSAGNFYINDKPTGAVVGQQPFGGSRASGTNDKAGSMFNLIRWVSMRTIKESSNSPTDYRYPFMDES

SEQ ID NO: 78707 - protein, 362 aa, Unknown
  Bacterial polypetide isolated from the Sargasso Sea
TVLPIDKPNIQAITTRIPIGVIAAIVPWNSQMFLTATKLAPALAMGNTVVIKASELAPATMFEFAKLIEQTGIPKGVVNVITGFGDPCGKALTTHNLVEKVAFTGGPETARHIIRNSAENLSEVSLELGGKSPVAVFNDAHQENAVNGITAGIFGASGQSCIAGSRLYLQKEIYNEFLDKLAARAENIKIGAPMDPNTEMGPLSNFKQLEVIERNIKLTVEQGGKIKCGGKRHSFSNEGYYFPPTIIECDNHNLPVAENELFGPVLSVMKFENEKEVIEKMNDNQFGLSSGVYTSDLARGLRVSNAVRAGITFVNTYRLISPSAPFGGIKDSGYGKEAGIESIKDYTRVKTIWYYTSDEPTL

SEQ ID NO: 78708 - protein, 428 aa, Unknown
  Bacterial polypetide isolated from the Sargasso Sea
AGYPVALTLGGISILFAFICIPFGIFDPTIFKSIPIRIFGIMNNVTLLAVPLFIFMGTILEKSGIAASMLKNMALAFRSVKGGLSISIIVVGALLAASTGIVGATVVTMGLMSLPILINQGYDKSFSSGLVASTGTLGQIIPPSIALVLLGDVMSNAYQRAQNDMGIFSQQTVTVGDLFVGAIVPGILICLGYLIYTIYINQKNPSITDHAENSNINILDLFKTLALPFLLIFLVLGSIFAGIATPTEAAAIGAFGALIIALLNGKMSFAFIKESSEKTAIVSTMIFTILIGASIFSLIFRGVGGDELINLIFGSIPGGSYTALIFVLVVIFLLGFILDFIEICYVIVPLVAPPLLMMGFDPVWLAILFAINLQTSFLTPPFGFSLFYLRGVADQSIQTAEIYRGVIPFILIQLFVLIMVMLFPIFIL

SEQ ID NO: 78709 - protein, 135 aa, Unknown
  Bacterial polypetide isolated from the Sargasso Sea
YKEGYWLGATILDNVDPEWPSAKEEIFGPVLSIIRADTIEDAMKIENDNPYGNAAAVFTTSGQIAKVVSEKASAGMIGVNIGVPVPRDPYSFGGWNESKYGHGDITGKSGVGFWTNLKKVTARWPESDEAWKKYF

SEQ ID NO: 78710 - protein, 275 aa, Unknown
  Bacterial polypetide isolated from the Sargasso Sea
LLEAYNNLSDEEKILFDRHSTAELMSQFLHGEQGALLVASQLASCAPTYNAKLYAASQTFDEARHVEVFNRYLQEKIGIHYPINPNLKLLLDKILTDERWDLKFIGMQIIIEGLALAAFQMLKSITKDPLLKQLLHYVVRDEARHVTFGINYLEDYLTTLSPEEINERAQFAYEACVISRDRLINTKAEQRFLKMSEEEAREFSLNTGSFELFRNFLFSRVMPNLKRIGLLTDEVRPKFEALGLLEYEHAPDDFECDWAEMRKPLEKFGQIPTSL

SEQ ID NO: 78711 - protein, 255 aa, Unknown
  Bacterial polypetide isolated from the Sargasso Sea
MYLQQTQVKNKTALVTGAGKGIGKACALALAEAGANLIILSRTKSDLDKVEKQILKLKRKCKSYICDVSNYDDLKSVFNKISSLDILVNNAGTNRPDHFTKITKEDMDYVVNLNMKAAFHVAQMAAKVMLRSKNRKIKGGSIINMSSQLGKVGAPNRSIYNMTKFGIEGLTKGMALDLAKNNIRVNSICPTFVETPLVKNFFKDKKFKKAMIDNIPLGRLATDSDIATAVVYLASNASSMITGSSLVIDGGWTAK

SEQ ID NO: 78712 - protein, 465 aa, Unknown
  Bacterial polypetide isolated from the Sargasso Sea
MTDLKKYKMYINGEWVDSESKKTFETLNPEHNEPWAVVPEASAKDVDNAVKAAQKAFEGEWPKLLPRERAKYLRAIGNQLRENAEMLGEIETIDTGKLYRETKKQAVYIAEYYDYYAGLADKVEGTVLPIDKPNVQAITTRIPIGVIAAIIPWNSQMFLTATKVAPALAMGNTVVIKSSELAPAVLFEFAKLIEKTGIPKGVVNVITGFGDPCGKSLTKHNLVEKVAFTGGPETARHIIRNSAENLSEVSLELGGKSPVAVFDDAEQENAINGITAGIFGASGQSCIAGSRLYLQKGIYDEFLDKLSKRASQIKIGAPMDPETEMGPLSNFKQLEVIEKNIKDTIDQGGKIKCGGERHSFSNKGYYFPPTIIECDNHNLPVAENELFGPVLSVMKFDTEEEVISKMNDNQYGLSSGVYTSNLSRGMRVSKAIRAGITFVNTYRLISPSAPFGGIKDSGYGKEAGI

SEQ ID NO: 78713 - protein, 432 aa, Unknown
  Bacterial polypetide isolated from the Sargasso Sea
MSLWGPAMFFSVLAMIFTGYPVAFALGGTALIFALIGSAAGVFDIPLLFALPERTFGTMSNFTLLAVPFFIFMGTVLEKSKLAEQLLETIGLLFGRFRGGLAVGVVFVGALLAAATGVVGASVTAMGLISLPVMLRNGYKDEISLGVIAAAGTLGQIIPPSIVLIVLGDQMGVPVGSLFRAALLPGLALTGAYALYIALVAFAKPDVAPALPEDIRIAGAELLKRVVLSLVPPLALIVVVLGSIFAGVATPTEAGALGSVGAILLAMMNRSLSFDALNRAMEETSRLTIMVVFLLIGSTAFALVFRGFDGDIWIETMLTGIPGGALGFLLVVNVVVFILGFFIDFFEIAFIIVPLIVPAAEILGVDLTWLGIVLAVNLQTSFLTPPFGFSLFYLRGVTPSKIPTTSIYRGVIPFIVIQLVVLAAITWMAVPK

SEQ ID NO: 78714 - protein, 307 aa, Unknown
  Bacterial polypetide isolated from the Sargasso Sea
MILKPSEIAPISAMLFAEMIDEAGFPEGVFNLINGNGEGVGTDISSHEYIDMISFTGSTRAGKLISRNASNTIKRVCLELGGKGGNIVFADSYSNAVRDGIKNVMSNSGQSCDAPTRMLVEKSIYERAVKEAVDEANKIKVDLASKKGDHIGPVVSKIQYDKIRNIIQSGVDEGATLAAGGPELPDNLNEGYFIKPTIFTDVTNDMAIAKKEIFGPVLSIIPFETEEEAINITNDTEYGLGNYLQTDDKQKAQRVAKNLRSGCVYINGNGADSGTPFGGYRQSGNGREGGNWGLEEYLEVKTITGWN

SEQ ID NO: 78715 - protein, 145 aa, Unknown
  Bacterial polypetide isolated from the Sargasso Sea
MYLQKINLKNKYALVTGAGKGLGRACSIALAEAGATVIALSRTPSDLNKLEKDIKKVKGKIIKVSCDVMYYEDLKQKLDKIKIIDVLVNNAGTNIPEPFEKIKQQNMNYLVDLNLKAAFNVAQLVVEKMLKNNKRPGSIINMSSQ

SEQ ID NO: 78716 - protein, 468 aa, Unknown
  Bacterial polypetide isolated from the Sargasso Sea
MSKHPLQYLELPRKDPEKDIPEVRIKHYDEIYASYDGAEAASQAGRCISCGIPYCEWKCPVHNYIPNWLELIEEGKLFEAAELSHQTNSLPEICGRVCPQDRLCEDACTLNNGVGAVSIGNIEKYITDEAIKQGWRPNMDHVKDTGKKVAIIGAGPAGLSAADVLARAGIRPVVFDAYPEIGGLLTFGIPPFKLNKDVVKTRRHLLEGMGVEFVLSTYVGKDRSFSSIYDEYDAVFIGTGTYKEISGGFKGENLKGVYKALPYLIGNVNEELGISDSENPYVDLKKKNVVVLGGGDTGMDCNRTAIRQGASKVSCVYRRNEENMPGSRREVSNSKEEGVSFLFNKQPLEIIGTDCVTGVKLASTELGPPDESGRRAPKIIQGSEEIIEANAVIVAFGYLPDAPDWVSKNAIKINDYGCIDVASEENLPFQTTNTKVFAGGDIVRGSDLVVTAVFEGREAAKSIISFLK

SEQ ID NO: 78717 - protein, 356 aa, Unknown
  Bacterial polypetide isolated from the Sargasso Sea
IDVTKDNNFKNFIRRKPLGVVFVIAPWNYPYLTAVNSIIPAMAAGNTVVLKHSAQTPLCAEQLYKSAQKTLPKDVFNYLHLNHQDGLRVVSDARINFVSFTGSVKAGYEVQKATHTKFIDMALELGGKDPAYARYDCDLEKTVENLVDGSFFNSGQSCCGIERIYVDEKIYDKFLESFISLTCNYKFGNPLKKETNLGPVVKLSAAEFIINQINSAIDKGAKKMIDENKFNYPKEHKNYLIPQVLTNVNHEMSFMMEETFGPCVGIMKVKDENEAINLMNDSPYGLTASIWTKDIEIAEKVGNKVQTGTFFMNRCDYLDPALSWTGVKETGKGCSLSEVAYEKLTAPKSFHLRKEQ

SEQ ID NO: 78718 - protein, 244 aa, Unknown
  Bacterial polypetide isolated from the Sargasso Sea
MNKRVLITGGGRGIGAATARHLAGQGYHLCLNYRHDKGSAEALVAEILAHHPVRCIAVQADVGVEAEVVRLFEEMDARLGPVTHLVNNAGRLQPQMRVLEMSAERINQTLTTNVTSCFLCCREAVRRMTAGGAIVNVSSAAARLGSAGEYVDYAAAKGAVDVLTKGLSLEVAAQGIRVNGVRPGFIYTDMHADGGEPGRVDRVKGQIPLQRGGQPAEVAAAIAWLLSDEASYVTGTFIDVAGGR

SEQ ID NO: 78719 - protein, 493 aa, Unknown
  Bacterial polypetide isolated from the Sargasso Sea
MTQIKNYKMYVDGKWIESSSGKKIETLNPENNKVWATVPEANEKDVDLAVNAAQKAFENSWSKMHPRDRAKYLRELANQLRQNAEHLGKIETIDTGKLFRETKTQANYIAEYYDYFAGLADKVEGTVVPIDKDNMQVVTTRIPIGVVAAIIPWNSQMLLTAVKLAPALAMGNTVVIKASELAPVTLLEFAKLVENSGIPKGVVNVITGLGEPCGKSLTTHNLVERIAFTGGPDTAKHIIKNSAENLSQVSLELGGKSPVVVFKDADQENALNGITAGIFGASGQSCIAGSRLYLQKDIYDDFLNKLIKKAEKIKLGSPMDKDAQMGPLNSFKQLEIIEKNIKATIDQGGKLRCGGKRSKISNEGYYFPPTIIECQNHNLPTAENELFGPVLSVMKFNTEEEAINKMNDNKYGLSSGVYTMNFARAMRVSKSVRAGIVFVNTYRLISPMAPFGGIKDSGYGKEAGIESIKEYTRIKTTWYNSSEKPMSDPFTMG

SEQ ID NO: 78720 - protein, 198 aa, Unknown
  Bacterial polypetide isolated from the Sargasso Sea
SCSSTSRVLVHRDLHREVLKEMKRLAENLPVGLPWLEKNELGPIVSEIQYKKILNYISSAKNEGADLITGGEIPKEEELQDGFFIQPTIFDRVTMDMKIGKEEIFGPVMSVIEWDDYESMISLANGIEYGLTAMIVTDNLKLAMETAERVEAGYVWINSTGRYLGAPYGGWKQSGFGQEECFDELLSYTQIKNVNMRW

SEQ ID NO: 78721 - protein, 284 aa, Unknown
  Bacterial polypetide isolated from the Sargasso Sea
HLDEPPPIFWDDYEPYIKMSDNEKLRFLRHRQAWSMSQFLHGEQGALLVASQLTSCAPTYNAKLYAASQTFDEARHVESFNRYVQSRMELMYPIGNALKSILDKILTDPRWDLKFIGMQLIIEGLALAAFRTSRDLTPDPVLKDMLDLIIRDEARHVTFGINYLEEFVTTLSEKEIEERAQFAYEACYLSKERLVSIEVYEHFGWNVEDARQFQLSSEIMQTFQKLLFQRVMPNLKRIGLLTDSIRPKFEKLGILEYEDDASDADIDWADLSRPLFKETAELAP

SEQ ID NO: 78722 - protein, 341 aa, Unknown
  Bacterial polypetide isolated from the Sargasso Sea
MSANDVTDVVEIFNTPLTGSYNWDYTIQDNRIKKLYELGKELNWNSNMDINWDRPVVHLDEPPPIFWDDYEPYIKMSDKEKLRFLRHRQAWSMSQFLHGEQGALLVASQLTSCAPTYNAKLYAASQTFDEARHVESFNRYVQSRMELMYPIGNALKSILDKILTDPRWDLKFIGMQLIIEGLALAAFRTSRDLTPDPVLKDMLDLIIRDEARHVTFGINYLEEFVTTLSEKEIEERAQFAYEACYLSKERLVSIEVYEHFGWNVEDARQFQLSSEIMQTFQKLLFQRVMPNLKRIGLLTDSIRPKFEKLGILEYEDDASDADIDWADLSRPLFKETAELAP

SEQ ID NO: 78723 - protein, 134 aa, Unknown
  Bacterial polypetide isolated from the Sargasso Sea
LRTSMQKTMQSKCAVFRTEKTLKEGVEEIRNTFKGIDSISVKDKSLIFNTDLVETLEFDNLIRQAITTMDAAYNRKESRGAHAREDFPNRDDKKYMQHTLTWLNGLNTKIDYRPVHTSTLTNEVQYFPPQERVY

SEQ ID NO: 78724 - protein, 355 aa, Unknown
  Bacterial polypetide isolated from the Sargasso Sea
MIKVGIVGTGGIAEWHASAFKDNKSSDVVAACDVNNDRLNEFCDKFNIDNRYNSVDELLEKSDVDAISNTTPDAFHKEISIKAIEKNKHIFCEKPLAENFADAQLMCDALKGKNLINMVNFSYRNSSGYQELCKMVKEGKIGNIMHMDANYNQSWLTSNYWGNWKEQDKWLWRLSTNHGSKGTLGDIGVHIFDFASRPIGKIKRLNSFIKTFHSKGEKIKDYILDANDTFLSMVEFDNGAIGTINATRFATGYSNRLELRIFGDKGAVKIEFDDPINEGNKFMFTNDTEREFSSKEDKLEWKEIKCPPSPTNFERFIESIESNTNHEPDFKRGAEIQQILDKCYESSDSGKWLNI

SEQ ID NO: 78725 - protein, 379 aa, Unknown
  Bacterial polypetide isolated from the Sargasso Sea
MKIKVVDNPPVDPREFDLPESFDEGNIEDVVEIFNTPLVGHYNWDYTDADSRIKKIYELGKKLNWNGSIDLDWSKAIKKGEAPVKAELIARMEGPLAALPEEERIEYMWHDTAWSLSQFLHGEQGALLVASQLVSCAPTYQAKLYAASQTFDEARHVEVFARYLREVSGVEYPINKNLKSLLDKILSDPRWDLKFIGMQIIIEGLALAAFQTTKETSNCALLRQLVHYVIRDEARHVTFGVNYLEEFLETLTEEEVEDRAMFAYEACVVMRNRIINTELPSRWFNISEEEILEMVVNNETQDMFTNMLFSRVMPNLKRIGLLTDKVLPLYEKLNLTSYMDAEDEFEIDWAELNKPLESSEEIDKQSEKELAAHTAQGLF

SEQ ID NO: 78726 - protein, 493 aa, Unknown
  Bacterial polypetide isolated from the Sargasso Sea
MPELKKYKMFIGGEWVDSDTKKTFETLNPEDNKPWAIVPEASASDVDKAVQAAQKAFEGDWPKILPRERAKFLRAIGNKLRDNAELLGKIETIDTGKLYRETNKQANYIAEYYDYYAGMADKVEGTVLPIDKPNIQAITSRIPIGVIAAIVPWNSQMFLTATKLAPALAMGNTVVIKSSELAPAVMFEFAKLIEETGIPKGVVNVITGFGDPCGKALTTHNLVEKVAFTGGPETARHIIRNSAENLSEVSLELGGKSPVAVFDDAHQENAVNGITAGIFGASGQSCIAGSRLYLQKGIYDEFLDKLTKRAEKIKIGAPMDPDTEMGPLSNYKQLEIIEKNIKKTTEQGGKIKCGGERHPFSNEGYYFPPTIIECDNHNLPTAENELFGPVLSVMKFDTENEVIEKMNDNQYGLSSGVYTSDFSRGLRVSNAIRAGITFVNTYRLISPSAPFGGIKDSGYGKEAGMDSIKDYTRVKTTWYYTSDEPTLDPFSIR

SEQ ID NO: 78727 - protein, 205 aa, Unknown
  Bacterial polypetide isolated from the Sargasso Sea
SKIIKKLKVKCKSYVCDITNYQEIKEIIDKQSKIDVLVNNAGTNIPELFTKAKRENMEHMVKINNIAAFNLAQLCANKMIKARNRKKIGGSIVNMSSQMGHVSGPKRTVYSMNKFGIEGLTKGMALELAKFNIRVNSIAPTFVVTPMTSKFLKDKKFKKDMLNSIPLGRFAEMSEISSAVVFLASDAASMITGTSLLVDGGWTAR

SEQ ID NO: 78728 - protein, 376 aa, Unknown
  Bacterial polypetide isolated from the Sargasso Sea
MSELKQYKMFIDGEWVDSESKKTFKSLNPENNEPWVEVPQASEKDIDIAVNAAQKAFDGSWPNLFPRERAKYLKAIANELRENAELLGKIETIDTGKLFKETKTQANYIAEYYDYYAGLADKVEGTVLPIDKANMQVITTRVPIGVVAAIIPWNSQMLLTAVKLAPALAMGNTVVIKSSELAPATLFEFGKLIEKTGIPKGVVNIVSGFGEPCGRALTSHKLVERVAFTGGPETARHIIRNSADNLSQVSLELGGKSPVAVFEDADQENALNGITAGIFGASGQSCIAGSRLYIQNSIYDNFLEKIVSRANKIKLGPPMDTKTQMGPLNSLKQLEIIEKNIKLTLEQGGKLRCGGKRHTFSNKGYYFPPTIIECDN

SEQ ID NO: 78729 - protein, 434 aa, Unknown
  Bacterial polypetide isolated from the Sargasso Sea
MSKLKQYKMFINGEWVDSESKRTFETLNPEHNEPWAVVPEASAKDVDNAVKAAQKAFEGEWPKLLPRERAKYLRAIGDQLRENAEMLGEIETIDTGKLYRETKKQAVYIAEYYDYYAGLADKVEGTVLPIDKPNVQAITTRIPIGVIAAIIPWNSQMFLTATKVAPALAMGNTVVIKSSELAPAVLFEFAKLIEKTGIPKGVVNVITGFGDPCGKSLTTHNLVEKVAFTGGPETARHIIRNSAENLSEVSLELGGKSPVAVFDDAEQENAINGITAGIFGASGQSCIAGSRLYLQKGIYDEFLDKLSNRASKIKIGAPMDPETEMGPLSNFKQLEVIEKNIKDTIDQGGKIKCGGERHSFSNKGYYFPPTIIECDNHNLPVAENELFGPVLSVMKFDTEDDVISKMNDNQYGLSSGVYTSNLSRGMRVSKAIRA

SEQ ID NO: 78730 - protein, 304 aa, Unknown
  Bacterial polypetide isolated from the Sargasso Sea
LSSGFLLFGISMIYYDTGSFNMQNLYNFTAISEIGLSLVLISLFFKVSAAPFHIWTPDVYEGSPTISTLFFATLPKFASLIFLFRVYQELNISDIKSLNYIFQMVCAISLLVGVYGAITQKVIKRLLAFSSINHIGFMLLGIMSYQFMSEGTLFFYLIIYLITTFGIFAVLLNLRTVDGEFTKISQLKGLRFTSNSKSISMLVFFFSLAGIPPFAGFFAKFFILSASINDGFILLSIIAVLSSVIAAFYYLTIIKNMFFNKSEIELLDDNNKTGKVIFISSGIIITLFFIYPDPLINLVDNLFK

SEQ ID NO: 78731 - protein, 168 aa, Unknown
  Bacterial polypetide isolated from the Sargasso Sea
KVGAGDEDGTQVTPLISTDQMQRVSNYVKSGIQSGATLTLGGDKADRDDGNFYQPTIFDNVKVEATIAQEEIFGPVTSIFNFEDEEEAINIANSTKYGLASGVFTADDQKAKWTADRIQAGIIWQNDWFVDGTNLPGGGYKRSGYGRDGGVDGIYSHGQTKRISKRLY

SEQ ID NO: 78732 - protein, 371 aa, Unknown
  Bacterial polypetide isolated from the Sargasso Sea
VAADRRDSHRTAALREFCFASSTRTGSGHHARLGQDRPLTARYAQGRKHHHELTVHSLTAKNIKRRRYPMNKQAIDALLQKINDSAINEGNPRTKQIVNRIVRDLFYTIEDLDVQPDEFWTALNYLGDAGRSGELGLLAAGLGFEHFLDLRMDEAEAKAGVEGGTPRTIEGPLYVAGAPVSDGHARLDDGTDPGQTLVMRGRVFGEDGKPLANALVEVWHANHLGNYSYFDKSQPAFNLRRSIRTDAEGKYSFRSVVPVGYSVPPQGQTQLLLDQLGRHGHRPAHIHFFVSAPGFRKLTTQINIDGDPYLWDDFAFATRDGLVPAVRQAEGAEGKPYGVDGQFALIDFDFTLFKERDNLPGAEVERVRAEA

SEQ ID NO: 78733 - protein, 219 aa, Unknown
  Bacterial polypetide isolated from the Sargasso Sea
LSRRTRDDKNGFSYPFKIGPKQFFDFAIHPTWSISTLLSGIPKPMNYVTSKSGDGIFKRKESRGTTDWDTLKRVRDKWKGKLIIKGVMSPDDAKQIKEAGADAIQVSNHGGRQLDSATAAINMLPLIRKSVGNDFPLIFDSGIRSGSDIVRALAFGADYAMIGRPVMYAMGADGRKGLRRIVEIIKEEASTTLGLVGLNDINDVTSNIVIDSAVNKVNY

SEQ ID NO: 78734 - protein, 458 aa, Unknown
  Bacterial polypetide isolated from the Sargasso Sea
MFETITPIDNSVLVKREYATEEDIEKSLSNSYSVREHWKNISLEERKKSVLNFVEIFLKNKDVSSNLCKQIGRPIAQCPGEMRGFEERARYMIENADRALSRVVSIKNDEFDNYIKKEPLGTIFVIAPWNYPFNTSVNSIVPSLLAGNAVILKHSSQTPLCAEELYEAAKQSSLPKNIFQYLHLDHDQTSRIISDSRINHVLFTGSVSGGKQIKKSIGTRFIGAGLELGGKDPAYVRADCDLDHAVENLVDGSYFNSGQSCCGIERIYVDKKIYNTFVEKFKDVTEKYVLGNPLEMETNLGPVVKQSAANYIRSEVNNAISQGGKNIIDNKKFNLDDGNNCYVSPSALINVDHSMKYMMEEIFGPSVGIMKVENENEALSLMNHSSYGLTASIWTNDKSFAENFGKNVETGTFFMNRCDYLDPGLAWTGVKDTGIGVTLSVLGFDHLTRAKSYHIRNI

SEQ ID NO: 78735 - protein, 163 aa, Unknown
  Bacterial polypetide isolated from the Sargasso Sea
GVELKDASNDDIDKALERLNKLNASTEGDQVAVLKEKMQQNMQNNFGVFRRGDLMEKGIDELAKTREEVDSIFLKDKSATFNTARIEALEMQNLFEVAEATAITANARKESRGAHARDDFTERDDENWLKHSIYYADTKEVSKRDVNYRPKTVQAFQPMVRSY

SEQ ID NO: 78736 - protein, 132 aa, Unknown
  Bacterial polypetide isolated from the Sargasso Sea
MYLQKINLKNKYALVTGAGKGLGRACSIALAEAGASVIALSRTPSDLNKLEKDIKKVKGKIIKVSCDVMNYEDLKQQLDKIKIIDVLVNNAGTNIPEPFEKIKQKSMNYLVDLNLKAAFNVAQLVVKKMLKK

SEQ ID NO: 78737 - protein, 340 aa, Unknown
  Bacterial polypetide isolated from the Sargasso Sea
MSPLTGSYNWDYIVVEDRIKKLYELGKELNWNVSSDLDWSQNYPKDELMINYELFQTPESVLRGYDDLSDEKKVEMDRHRVSWNISQFLHGEQGALLVASQLVSCAPTFNAKMYAASQTFDEARHVEGFNRYLKEKIGFQYPATNGLKSLMDKILTDERWDLKFIGMQIIIEGLALAAFNNMKFILNDGLLKQLLHYVIRDEARHVTFGVNYLEDYLKTLSKSEIDDRAEFAFEACVVMRNRLISGDVIARFLDYTPEEAQAAAENTEQGQNFRTLLFTKIIPNLKRIGLLNDKVMPKYEKLGVLSYAELEDNFDIDWADMSKPYETQEEIERFINAGHH

SEQ ID NO: 78738 - protein, 208 aa, Unknown
  Bacterial polypetide isolated from the Sargasso Sea
MLQPLNAGRLKLKNRVVFPAHQTLLSEDGVVGPRMRAYYAERAKGGVAAVVVEGGAVHDTTVKFPNYLWGHKEEIIPSYTALHKELSQYGCKTIIQLVHSGGRMSSHDSRLPLWAPSDVRSAISPEIPHAMTTEEISQVLDGYEKSFKNAVEGGVDGIEIHAAHEYLLGQFLSPLNNLRTDEYGGSMDNRMTLLNEVVMLARKTVGDD

SEQ ID NO: 78739 - protein, 223 aa, Unknown
  Bacterial polypetide isolated from the Sargasso Sea
KDFYYLKICWQIILIFLTMIGGIYLGWFTPTEGGAIGAGGAGLIAILNKNFKFKDLVEVIENTAITSGMIFLVLLGAEFFNSFIALTQLPNQLGEIALENNLSPFLIVACILVLYLFLGCLMDSLAMILLTIPVFFPLIMTLEFGMTAEETAIWFGILTLIVVEVGLITPPVGLNVFIINKMAGDVSISETFKGVLPFLVSDIFRVILLFSFPGITLFLLNIF

SEQ ID NO: 78740 - protein, 292 aa, Unknown
  Bacterial polypetide isolated from the Sargasso Sea
MSKIENFKMYIDGQWVDSSSGKKIETLNPENNEVWATVPEANEKDVDKAVQSAQKAFENNWSKLHPRDRAKYLRSIADQLRLNAEHLGKIETIDTGKLYRETKTQANYIAEYYDYFAGLADKVEGTVVPIDKPDMQVTTTRIPIGVVAAIIPWNSQMLLTAVKLAPALAMGNTVVIKASELAPVTLLEFAKLIEKAQVPKGVINIITGLGEPCGKALTTHHLVERIAFTGGPETAKHIVKNSAENLSQVSLELGGKSPVVVFDDAEQENALNGITAGILELVDKVVLLDQDF

SEQ ID NO: 78741 - protein, 219 aa, Unknown
  Bacterial polypetide isolated from the Sargasso Sea
MAEKNYDLVVIGSGPGGEKGAAQAAYFGKKVALIEKEQELGGAAANTGTLPSKTLRETSLYLSGFKQRGLYGMEVNFKDQVTARDFLYREKIVSQAERERIKTNIELHDIDLFKGNASFIDQNTISIKPNNSKEIFIKGEVILIATGSYPFRPPNIPFEYPGVYDSDTILKILKIPKTMLVAGGGVIGCEYACMFAALGVEVTLVEGRDTVLAFLDKEI

SEQ ID NO: 78742 - protein, 340 aa, Unknown
  Bacterial polypetide isolated from the Sargasso Sea
ESELAGDDIILAPGSVPVEIPAAPLDDNLIVDSTGALEFNAVPKTLGIIGAGVIGLELGSVWSRLGSKVVLIEALDEFLPVADQRIARDALKILEGQGLDIKLGALVTEAKAQKNGVKVTYKDSDGEHQAKFDKLIVAVGRRPYTEGLLAPDSGVNLDERGFLYVNDLCSTDAPNVYAVGDVVRGPQLAHKGMEEGIMVAERIAGKKPLVNYDAVPSVVYTHPEIAWVGKTEQELKAEGQEFEVGTFPFAASGRAMASGETQGLVKIIAEKSTDRILGVHILGPQASEMIAQAVISMEFSASAEDLGLTMFAHPSLSESVHEAALAVGGHAIHMVNRKKK

SEQ ID NO: 78743 - protein, 305 aa, Unknown
  Bacterial polypetide isolated from the Sargasso Sea
MVWTVDDIPSQEGRVALVTGANSGLGLATARAMSARGATVIMACRSRRKAETARTQLLEAGLTGLDLLDLDLADLNSVRRAAAEVSDRYGHLDLLFNNAGVMAPPRQLTVQGHELQLGVNHLGHMALTLQLLPLMQGRNDARVVTVTSGAQYFGRIRWDDPSWAQGYDRYGAYSQSKLANVMFALELEARQQEQGGGIRSLAAHPGLARTDLQPTAIASGGNRLEAVAYRLMDPLFQSAAMGALPQLHAATAATAQGGEHYGPDQLGGMRGHPTRCRIAPAALDREQRQRLWQLSEELAGGLLMP

SEQ ID NO: 78744 - protein, 242 aa, Unknown
  Bacterial polypetide isolated from the Sargasso Sea
LVTGAGKGIGKACAIALAEAGASLIIVSRTKKDLDQVSKIIKKFRSKCKSYVCDVTRYSEIKSVIDSQKRIDILVNNAGTNIPEHFTKVKRKDMEYVVKINTMATFNIAQLCSLKMIELKNRKKVGGVIINMSSQMGHVGGPIRSVYNMTKFGFEGLTKGMSIDLAKYNIRVNTVCPTFVVTPMTSKFLKDKKFMREVLGNIPLGRFAELSDVASAVVFLASDQASMITGTSLLVDGGWTSK

SEQ ID NO: 78745 - protein, 499 aa, Unknown
  Bacterial polypetide isolated from the Sargasso Sea
MTTQVKHYIDGEFTTGTGTSQIVVTNPANNVPIAVINSATADEVHAAIASAKAAFKTWKEVPVSERARVMLCYQHLLKEHHDELATILAKETGKTFEDAKGDVWRGIEVAEHACNIASLLMGETVENVARSIDTYSYTQPLGVCAGITPFNFPAMIPLWMFPLAIACGNTFILKPSEQDPMTPQRLVELFVEAGAPKGVLQLVHGDKTAVDILLADPAVKAISFVGSVAVGQYIYKTGTDNLKRVQAFAGAKNHCVIMPDANKQQVINNLVGASVGAAGQRCMAISVAVFVGAAKEWIPELKEALAKVRPGLWDDKEAGYGPLISPAAKARVLKLIAQGKEEGAECLLDGSDFSVAGYESGNWVGPTMFTKVTTDMSIYKEEIFGPVLCCMESDSLEDAIELVNASPYGNGTSIFTASGAAARKYQHEIEVGQVGINVPIPVPLPFFSFTGWKGSFYGDQHAYGKQAVRFYTETKTITSRWFESDIAVAAGPNMSINLR

SEQ ID NO: 78746 - protein, 248 aa, Unknown
  Bacterial polypetide isolated from the Sargasso Sea
RVTGDYVSQVEPLVECEEALFVPSSGIVDQASLMRSYLGELELSGSIAYNSKFIKSELKNNVHVSTVLNEGNEIKIESSILINAAGLYAEDVAKSISSMDKTLIPKTYFAKGNYFETSKDLNIRHLIYPIPNEASLGLHLGLDIGMQVRFGPDVEWIDEINYDVDENRLESFYNDIRKYIPTFDKGLLKKGYSGVRPKLKNRGEGKSDFIIQGEEIHKSKNLINLFGIESPGLTSSLVLGEHIVELVS

SEQ ID NO: 78747 - protein, 318 aa, Unknown
  Bacterial polypetide isolated from the Sargasso Sea
MKKVVISNKVHTEVIELLEKNFEVISNQNDKPLTYEKLKFLCKDAHGVMVFMPDRIDKNFLDNSKNLEIISGALRGFDNIDLEECIKRNIKFTMIPDLLASPTAELTLGLLIGLSRNLLIGDEYVRSEKFKGWEPKFFSNGIEGKNVCLLGMGKLGVEVARKIKGFNVKLFYHDLQKLDSIDEQQLNTKYLELNDLFEKADYLVILLPLKNDTYHFINFENILKIKKNCLLINTSRGSVVDESAIAQAINSGHIGGYASDVFEFEDLSIKDRPKKINQELLNLKDKTFFTPHLGSAVDEVRLFIELEAAQNIINFLYH

SEQ ID NO: 78748 - protein, 357 aa, Unknown
  Bacterial polypetide isolated from the Sargasso Sea
MTWVGLSLRNRVVMAPMTRNFSPDGVPKDYAPTYYARRAQGGVGLIITEGVEVSHHAASGYPNCPNLESDDAKRMWEKVVNEVHENNSSIFCQLWHVGGIRKPGMPPNPEVPGFTPSGYVRPGKKVAHEMSHEEIQELINIYSEDTKACEELGFDGVEIHGAHGYLIDQFFWDQINHRDDEYGGSIKNRSRFASEILQAAKSNTSENFKVGIRISQWKQQDYDAKITSEPHELNEFFQILKSAGADFVHCSNRRFWEGEFEPNGLNLAGVAKKATGLPTISVGSVGLDKDFIKLYAGDHQTQTVDLKTLHEKLNKSEFDLIAVGRALLSDPDWANKVQDGLEDQIVPFDKSFVENYV

SEQ ID NO: 78749 - protein, 324 aa, Unknown
  Bacterial polypetide isolated from the Sargasso Sea
LYELGKKLNWDGSIDLDWSKAIKKDEPPLKAELIARMEGPLAALPEDERIEYMRHDSAWSLSQFLHGEQGALLVASQLVSCAPTYQAKLYAASQTFDEARHVEVFARYLKEVTGIEYPINKNLKSLIDKILSDPRWDLKFIGMQIIIEGLALAAFQTTKETSNCPLLRQLVHYVIRDEARHVTFGVNYLEDFLSTLSEEEVEDRAMFAYEACVVMRDRIINTELPARWFNISEEEIREMIINDETQDMFTNLLFSRVMPNLKRIGLLTDKVLPLYEKLNLTSYMDADSEFEIDWAELNKPLESSKEIDQQSEKELAAHAAQGLF

SEQ ID NO: 78750 - protein, 274 aa, Unknown
  Bacterial polypetide isolated from the Sargasso Sea
AKVFDDVIERVAKIAASLKIGPGMDPSTQIGPLVSAKQRQRVCGYIDSGFGEGARAAVGGRAIDGPGFFVEPTVLVDTTQAMRVVREEIFGPVLVAMPDLSKGEQFEEKFVKISPFSKIPVIRDSETKKNVFGSGAILIYLAEKSNKFYDKNNKLNIDQWLMAQMGLVGPMIGQYHSFYRFNKGKSKYGEERYFKITKDLYSRLNIRLSESTYLAGEDYSIADIATWPWIARHKWHDIGLKNHENLCRWYEVISNREPVKKGYDFMGAGEIPKP

SEQ ID NO: 78751 - protein, 419 aa, Unknown
  Bacterial polypetide isolated from the Sargasso Sea
CDSVDTDDDNDGFLDTNDDFDFDPEVWVDTDGDGLADFIDPNSTVVAYTTVQLCSNTPWYTMSSYPSPATGAYLAVSSSDDDSNADGEEDAECTFTLPAGQTLDVVLQTASYGGEAMLQIVKPDGTAVTYGSGSFSTGNTYNIGSFTDAGSYTIYYGDSWGDGCNPSTFYGACFVQASYTYVSGTTVPSTTTAGTSVDSDDDGDGYSDLDEGDAYDTATAALCDDGGAYASSSNSLDSSSTPADMDGDFTCDALDSDRDGDSYSNTVDVFPDDSTEWVDYDGDGTGDNADTDDDADGTLDVNDAFPYDICADTDTDNDGKADTMTAGCTSATVLDMDDDDDSVMDADDAFPLDSAETLDTDGDGIGNNADTDDDGDGVIDTTDVWPLNACASSDFDSDGSPDTLVAGCTSAVASIGFEA

SEQ ID NO: 78752 - protein, 258 aa, Unknown
  Bacterial polypetide isolated from the Sargasso Sea
MAQKRILITGAGTGFGREVALRLAERGHDVTAGVRVIAEIDALTAAAKQRGTALRAIKLDVTSPHDRARAAELGIDVLVNNAGVGEAGALVDLPVEIVRELFDVNVFGPLELTQQIARGMLARGHGKIVFVSSIAGLITGPFTGAYCASKHAVESVAEAMHAELAPHGIKVAVVNPGPYSTGFNDRMMETTRRWRDPAVHTVTPERLTFPLEQHDPEEMIAKMVDVIDSGGGAFRNVLPASSEAFVRAEQAHAWERRQ

SEQ ID NO: 78753 - protein, 353 aa, Unknown
  Bacterial polypetide isolated from the Sargasso Sea
MSDSRFHRLTVADVIAESDDACSFVFDVPAALRDAFAYRPGQFLTLNVPCADAPVARCYSLSSAPGIDAAPKITVKRVRDGRASNWLCDRIRAGDALDVLPPAGVFTPRTLDGDLLLFAGGSGITPVLSILKSALVHGRGMLTLIYANRDERSVIFRAELQQLAQRHPGRVRVIHWLDSVQGIPQQRHLEELARPFSQQETFICGPALFMENALAAMLGLGLPRSRVHVERFASLPDAPAPGAASADATASSVAAAASASGDGAAIETVLDGDAFAFDSAPGETLLDAMLRAGVPAPNSCRMGQCGACMCRIERGEVALDSNHVLDDDEIAAGWTLACCARPASDALRVVFPD

SEQ ID NO: 78754 - protein, 247 aa, Unknown
  Bacterial polypetide isolated from the Sargasso Sea
MSDRVVLVTGAARGLGAVIAERFHAAGYRVALADIAADAIEAHARELDPSGERAIALPLDVTSKRDFEAARDALVARWGAIDVLVNNAGASKVVPAMEITAEQFDQVIDVNLRSVLFGCQVFGQYFATRGAGRIVNIASLAGQNGGSATGAHYAAAKGGTLTLTKVFARDLAARGVTVNAISPGPLDLPIVYESVAPEKLRQVLASLPGGKLGSAGFVADAAVLLASGDAHFANGACWDINGGLYMR

SEQ ID NO: 78755 - protein, 225 aa, Unknown
  Bacterial polypetide isolated from the Sargasso Sea
IALAEAGATVIALSRTSSDLNKLEKDIKKVKGKIIKVSCDVMNYEDLKQKLDKIKIIDVLVNNAGTNIPEPFEKIKQKSMNYLVDLNLKAAFNVAQLVVKKMLKNKKRPGSIINMSSQLGHVGMSGRNIYNMTKFGIEGLTKGMSVELAKKNIRVNTVAPTFVETPMVKNFFKNKKFKKLALGNIPMGKAATESDVATTVCFLASSASSMITGTSIIIDGGWTAQ

SEQ ID NO: 78756 - protein, 1064 aa, Unknown
  Bacterial polypetide isolated from the Sargasso Sea
MKIAILHLSDIHIKETKTHVLDRWEKICATANNLLPDVRAVFVVVTGDIAYGGAEAEYTLAERFFSNLLDCIRARVASDAIVYMVTVPGNHDGTFKQQNAARKAIIDSVINDGVIDNSVIDACVAPQVHYFSFSERFSSDYVTFRDRLWVEHEVKVDNHVIAFSAINASWLSQVPETPGKLVFPVKRYLNLAKGNASVRIALMHHPLNWYAQGTYHPLRELCRSQYQVVMSGHEHSASASTVSDLQFGDSLNLEAGALDPHEADGVSSFSVVKLDLDKQLFAKVDFSWDGQRYMPTDGDAVWDSFVPLPPRRNDGFALTDETKARLEDVGATFTHPSKERIVLSDIFVYPDLHELSGLELDGPKTISAEILAKQINKIGKALVRGDDQFGKTALLHTLYKAYFNAGYVPVLVTGRDLLSESDERLERMLHNAIESQYGPDTATRYGQLEKTSKVLLVDDLDRTSHRPETLAKALEYVDRHFQQAVVSVSERFDIAELSSARTAEVGARFSQYRLLGFGYKLRSSLIRRWLTLGDAYPHADLQARVHDAETIIDAVIGKGLVPTTAFNVLVLLQSLEVSAKGSLANSGMAEYYEFLIRRSLFQAKLRGEELDEVFSYLAHLAWLFHSNSVKSLDETDLERFNSEFSTNIHRTDLATRLELLTRCKVLAKTGSSYSFRYEYIRYFFAAKYIADNIEDRPELRDMVLHACQHLYLRDNANIVLFLTHHSASKWIIREVAGVLAKLVADVSPFDLQRDTAVLNKWVTQRAKIIVDASNVEANRSSERERADEASRLPEHEPEEEVASLEELDQVAQLNLLFKTSEILGQILKNRYGSLDKSFKRELVRELFEGPLRGINRFLILVNEAPEALMEEVSAKLIDRLPKLSKEDADRHAQRLIFYSLGMFAEGLLARQGELVGSPKLKETVEQVAREGHDTFNLVSIAAQLSYPGHVPMAAIEQLAKKVKANVFGHRLLQGIVARHMYMFSLPIDERQQLAQAVGIDLRIQLANEVRADAKKLPGHSRQPSNTRNLLGRLHKSFLLRNEKAIDAVLEKTKDAKNEGNGESS

SEQ ID NO: 78757 - protein, 169 aa, Unknown
  Bacterial polypetide isolated from the Sargasso Sea
MYLKNFNLKNKTALVTGAGKGIGKACAIALAQAGANLIIISRTKKDLLGVQKKIISYKRKCTFFECDLFDIEKLDTVFKKIRKIDILVNNAGTNRPAHFTKIKREDMDYMIDLNLKIAFHVAQLSIKKMMVNKNRKSIGGSIINMSSQLGKVGAPNRSIYNMSKFGIEG

SEQ ID NO: 78758 - protein, 131 aa, Unknown
  Bacterial polypetide isolated from the Sargasso Sea
MQKIMQKKCAVFRTEDLIKSGIKEFETVERKMENIQVKDQSLIFNTDLVETLELHNLMEQSKVTLYSALNRKESRGAHAREDYPERDDKNWLVHSLVWLDKEGNIKLDKKPVNLNTLTNHVQPIPPKRRVY

SEQ ID NO: 78759 - protein, 254 aa, Unknown
  Bacterial polypetide isolated from the Sargasso Sea
MQHKVVIVTGGASGIGAAISMRLAEEGAIPVVFARHAPDDAFWRVLAQKQPQAACIPVELQDDAQCRDAVAETIARFGRLDGLVNNAGVNDSIGLEAGRDAFVASLERNLIHYYVMAHYCVPHLKAARGAIVNISSKTAVTGQGNTSGYCASKGAQLALTREWAVALRDDGVRVNAVIPAEVMTPLYRNWLAGFDDPDAKLAGIAGKVPLGQRFTTADEIADTAVFLLSARASHTTGQWLFVDGGYTHLDRAIS

SEQ ID NO: 78760 - protein, 324 aa, Unknown
  Bacterial polypetide isolated from the Sargasso Sea
MQTQGFNIVKNYRSYVMRKIVHFIAGKDFEDSSENTASVFAPNTGEVQAEVSLANTSTLAYAIETAQAAQVEWAATNPQRRARVMFKFKELVEANRDRLAALLSSEHGKVLVDAQGDIQRGLEVIEFACGIPHAQKGEYTEGAGPGIDVYSMRQALGVVAGITPFNFPAMIPMWMFGVAIACGNAFILKPSERDPSVPVELAKLMIEAGLPAGVLNVVHGNKEVVDGILDHQTIKAVSFVGSSDIANYVYERGARAGKRVQAMGGAKNHGIVMPDADLDQVVTDLVGAAYGSAGERCMALPVVVPVGDETAEKLKAKLIPAIKD

SEQ ID NO: 78761 - protein, 140 aa, Unknown
  Bacterial polypetide isolated from the Sargasso Sea
MTTSIPVVVAGALGRMGAEVIKAVVGATDCTLVGAVDNTPGKEGCDVGLELGLGELEVAITADFEGCLCAVSQSARDAQAGAVLVDFTHPSVVYEHTRAAIAYGVHPVIGTTGLSPEQLSDLTQFSAKASIGGAVIPNFS

SEQ ID NO: 78762 - protein, 397 aa, Unknown
  Bacterial polypetide isolated from the Sargasso Sea
ECAPAIGAALALESGKSVADATNEAIYAGQITRYHAEWARRIEGEVIPSDTPDENLVLHREPIGVVACLIPFNYPVYTFMRKVAPALIAGNTVVVRPSNNTPTSAFEIARAVEKAGLPAGVVNILAMNHATAEALCTHPKVGMITLTGSVGAGRKVLDYCKANIAKPSLELGGKTPAIIEADADLEKAARDLVASKTTHCGQLCTAIERVYVQESVHDRFVALLKKNMSAVESGDRSEQPALMGPLVNEASRESIHGMVERAIAAGATLETGGRLPQGKGFFYPATLLSNCRQDMEIIQEETFGPIMPVVKYRTLDEALEMANDHQFGLSSVLYTENYRSAMKIANGIEAGELYVNRTPADPYQGFHAGWKRSGLGGDDGKHGMLEFTQTRLVVMKY

SEQ ID NO: 78763 - protein, 278 aa, Unknown
  Bacterial polypetide isolated from the Sargasso Sea
ALTTHNLVEKIAFTGGPETARHIIRNSAENLSEVSLELGGKSPVAVFDDAHQENAINGITAGIFGASGQSCIAGSRLYLQKGIYNEFLDKLTKRAEKIKIGAPMDPESEMGPIGNFKQLEIIEKNIKLTVEQGGKIKCGGKRHPFSNDGYYFPPTIIECDNHNLPVAENELFGPVLSVMKFDNEEEVINKMNDNQYGLSSGVYTSDFSRGMRVSKAIRAGITFVNTYRLISPSAPFGGMKDSGYGKEAGIDSIKDYTRVKTTWYYTSDEPTMDPFSMR

SEQ ID NO: 78764 - protein, 136 aa, Unknown
  Bacterial polypetide isolated from the Sargasso Sea
YYIGGCLFDHVKENMRIYKEEIFGPVLSVVRVKDFNEATKLINEHEFGNGTSIYTRDGDVGRTFASNIKIGMVGINIPIPVPVAFHSFGGWKRSLFGDQHMHGVEGVRFYTKLKTITSRWPSGLRSDPEFVMPTMK

SEQ ID NO: 78765 - protein, 324 aa, Unknown
  Bacterial polypetide isolated from the Sargasso Sea
VIAYYSRRAKAEVGLIITEGIEVSHKASSAYPNVPRLDSNEAKEAWKKVVEGIKNNNGAVIAQLWHCGGFRKLGMQPNPEVPGHTASGLVKPGKKVAHEMNLNDIKETIDAYASDAKICEEIGFDGVEIHGAHGYLIDNFFWSGTNIREDEYGGSIENRSQFVSDIIKSVRENVSENFIVGLRFSQWKQHDFEAKLASNPEELKTILTSPVESGLDYLHSSMRRFWESEFAGSKENLAYWTKKITKIPTIGVGSVGLDSDFIDMTAPATPTSIDKAIDDITNDKYDLIAVGRALLSDHEWVLKMKEGRVNDVIPYTKDALLNLY

SEQ ID NO: 78766 - protein, 155 aa, Unknown
  Bacterial polypetide isolated from the Sargasso Sea
GANLVVDGRNIKLQGYENGFYIGGCLFDNVKKDMRIYKEEIFGPVLSVVRAKDFDEATQLINDHEFGNGTSIYTRDGDVGRTFASKIKVGMVGINIPIPVPVAFHSFGGWKRSLFGDQHMHGPEGVRFYTKLKTITSRWPSGVRSNPEFVMPTMK

SEQ ID NO: 78767 - protein, 595 aa, Unknown
  Bacterial polypetide isolated from the Sargasso Sea
VDFFFDAYENAIRKVGEKNALLSSSFHEISIKLSAIHQRYEATKKDRVTSELLERVYELCLQSAQHDIALTIDAEEQDRLELSLYLIKELASRKKIQDWGGLGLAIQAYGKRAPIIVKFIEELASKRNGMMMRLVKGAYWDQEIKIHQTKGAPDLPVFTSKSFTDINYLATAKIISKTKNIRPYFATHNAHTIAGIMDLYKGRENEFEFQRIFGMGDLTYRNAKKVYEDFPLTRVYAPVGSKKELLPYLVRRLLENGANSSFVNKYLSKEIPVSDVVKNPIEIASANLEEGNFLKIVPRPMDIFSNRDNSIGFDFGDLEDIKELENNMKDFHNNEFKACSIINGLDVAEEYEAKKAPFDNKKHIGEISYLSKDKLENIELDESWAELSLEERIKVLNKVAINIQNNRDKFFYLLANEAGKTLKDCDAEVRESIDFINYYCHQAEELFTKEELEGPTGEKNYLVHAPKGKFLCISPWNFPMAIFVGQISAALVTGNSVIAKPAEDTSIIAYEIIKLFHEAGVPGSALQLIIGGREIGNELTKNDQLNGVAFTGSSEAAKKINVNLANSDGPIKTLIAETGGQNVMFVDSSSLKEQV

SEQ ID NO: 78768 - protein, 513 aa, Unknown
  Bacterial polypetide isolated from the Sargasso Sea
EGSTLTDPVTGEALVRVSSQGLDLPRVFDFAREQGGAALRALTYAERAARLADIVKLLQAKRDDYYAIATANSGTTHNDSAVDIDGGIFTLSYYAKLGATLGDVHALRDGHVVSLSKDQSFSVQHVLTPTRGVALFINAFNFPSWGLWEKAAPALLSGVPVIVKPATATAWLTQRMVADVVDAGILPQGALSVICGSSAGLLDQVQAFDVVSFTGSAETAAILRAHAAFVQRGARLNVEADSLNSAILCADAAPDTPAFELFIKEVVREMTVKSGQKCTAIRRAFVPEALLEAVLDTLKAKLAKITVGNPRNDSVRMGSLVSREQYESVLAGIAALREEAVLAFDGSAVPPVDVDPAIAACIAPHLFVVNDPDRATLLHDVEIFGPVATVAPYEPASDAGELREAHAIALARRGRGSLVASVYSNDDAHLARVALELADTHGRVHAVSPSVQGSHTGHGNVMPMSLHGGPGRAGGGEELGGLRALEFYHRRAAIQASNTGIDVLTQTAHSLES

SEQ ID NO: 78769 - protein, 119 aa, Unknown
  Bacterial polypetide isolated from the Sargasso Sea
APGVTKENPAFSEEIFGPVAVVVPFDTDEEAIALANDTEYGLAMAIVTSNVGRALRMGERLRSGLLHINDQTVNDEVINPFGGVGASGNGTSVGGPANWEEFTQWQWLTVKGEAPLYPL

SEQ ID NO: 78770 - protein, 394 aa, Unknown
  Bacterial polypetide isolated from the Sargasso Sea
PIRIFGIMNNVTLLAVPLFIFMGTILEKSGIAASMLKNMALAFRSIKGGLSISIILVGALLAASTGIVGATVVTMGLMSLPILINQGYDKSFSAGLVASTGTLGQIIPPSIALVLLGDVMSNAYQRAQNDMGIFSQQTVTVGDLFIGSIVPGALICIGYLIYTIYKNQINPNINDHTIDSKINIINLFKTLALPFLLIFLVLGSIFAGIATPTEAAAIGAFGALIIALVNGKITFAFIKESSEKTAIVSTMIFTILIGASIFSLIFRGVGGDELINLIFSSIPGGSYTALIFVLVVIFLLGFILDFIEICYVIVPLIAPPLLMMGFDPVWLAILFAINLQTSFLTPPFGFSLFYLRGVADQSIQTAEIYKGVIPFIGIQLLILILVIIFPILIV

SEQ ID NO: 78771 - protein, 251 aa, Unknown
  Bacterial polypetide isolated from the Sargasso Sea
VKVNFAEVSLELGGKSPFIVFDDANIESAVNASIAGIFGATGQSCVAGSRLYLHEDIADEFLEKMIALTRQIIIGDPLEEDTQMGPLCTLGQLENIEIEVKNAKQEGAKILVGGKQPEDKSGLFYEPTIIECPNQGLRIVDKELFGPVLCVQRFKTEDEVLSLANDTEHGLAAGIFTQNSARSLRMAGAVRAGIVWVNTYRVVSPIAEFGGVKGSGYGRESGFQAIYDYTRPKTIWMNTSDDPMANPFVMR

SEQ ID NO: 78772 - protein, 280 aa, Unknown
  Bacterial polypetide isolated from the Sargasso Sea
MSKLKKYQMYIDGQWIDAENNKTFETLNPENNEPWAIVPEASSKDTDKAVKAAQKAFEGEWPKLLPKERAKFLRAIGDELRENAEMLGEIETIDTGKLFRETKKQAIYIAEYYDYYAGLADKVEGTVLPIDKPNIQAITTRIPIGVVAAIIPWNSQMFLTATKLAPALAMGNTVVIKSSELAPAVLFEFAKLIEKTGIPKGVVNVITGFGDACGKTLTTHDLVEKIAFTGGPETARYIIKNSAENLSEVSLELGGKSPVAVFDDAEQENAINGITAGIFG

SEQ ID NO: 78773 - protein, 199 aa, Unknown
  Bacterial polypetide isolated from the Sargasso Sea
NELAKKVEALKIGPGMDKSSEMGPLVTKEHLEKVKGYVDLGVKEGAKLVVDGRDIKLQGYENGYYIGGCLFDHVKKDMRIYKEEIFGPVLSVVRAKNFDEAVQLVNDHEFGNGTSIYTRDGDSGRTFANKIKIGMVGINIPIPVPVAFHSFGGWKRSLFGDQHMHGPEGVRFYTKLKTITSRWPSGMRSNPEFIMPTMK

SEQ ID NO: 78774 - protein, 131 aa, Unknown
  Bacterial polypetide isolated from the Sargasso Sea
MQNIMQKKCAVFRTNDLIQSGIEDFNTIENSLNNIFVKDKSLIFNTDLVETLELHNLMSQAKVTLHSALNRKESRGAHAREDFTERDDINWLMHSLVWLNNKGEIKLGRRPVHMNTLTNHVQSIAPSKRVY

SEQ ID NO: 78775 - protein, 366 aa, Unknown
  Bacterial polypetide isolated from the Sargasso Sea
VLEELPRKVLEFPLDNDLNLTEKEVEDVAEIFKTPLTGSYNWDYTIQDNRIKRLYELGKELNWNVEKDIDWDQPLPEKEDNPPAIFWDEYEPYQKLSTEDKFKFLQHRASWSISQFLHGEQGALLVASQLVSCAPTYNAKLYAASQTFDEARHVEAFNKYIQKRVGLSYPIGHGLKSLLDKILSDPRWDLKFIGMQIIIEGLALAAFNVARQGTNDPVFKDMLYLITRDEARHVTFGVNYLEEFVQTLSEEEREDRAMFAYEAAVVMRSRLMAADVYSNFGWDIDETVAFQSKADVTANFQHLLFTRVMPNLSKIGLITDKVRPLYDDLGVLDLESWPNDGEIDWVSLERPLDAKEDNSESEIVAI

SEQ ID NO: 78776 - protein, 367 aa, Unknown
  Bacterial polypetide isolated from the Sargasso Sea
MKITQVDNCPPGLRYFDKDDLESKLEPQDIEDIVEIFQTPLTGSYNWDYTEADNRLKRLYELGKKLNWNATLDLDWSNQPYSLEEWATDPQHQQLAGFKPYDDLPEEKKIECSWHLLASSLSQIVHGEQGALLVASQLVSCAPTYNAKLYAASQTFDEARHVEVFNKYLQERIGWNYPVMPGLKLLLDKILSDPRWDLKFIGMQIIIEGLALAAFERQKAAAMDPLLKDIFYLVIRDEARHVTFGVNYLEEFVATLSDKEREDRAEFAYEACVVMRNRFGSDNVMKHYGWNVEEAQEVLNQSENAKLFNNLLFAKIMPNLKRIGLLTEKTQEKYEEMDILQFQDLEDHGNIDWDELSQPLEYSSKTA

SEQ ID NO: 78777 - protein, 246 aa, Unknown
  Bacterial polypetide isolated from the Sargasso Sea
MKNKQYKIDKGLMLFTQPRSPFFYGKIRLNRKYVTKSFAPITDLEEAKAMLFDWQRELLIKNTMPLESASSSENFKSRSEYIEHVPVENDFQFLEVGRFDPNKKNIEERKINFVEIYGDYNQSEASNQSHRCLDCGNPYCEWKCPVHNYIPDWLKLVNEGNIWEAADLCHQTNSLPEMCGRVCPQDRLCEGACTLNDGFGAVSIGNIEKFITDKAIDMGWKPDLSNRVWTNKKVAIIGAGPAGIGC

SEQ ID NO: 78778 - protein, 287 aa, Unknown
  Bacterial polypetide isolated from the Sargasso Sea
MSKNISKLSGRKGLKDNLFKRMINTANKSKNGKEIKQLAEEYHVGMSTIHGAESFYEFLRPEHKEKKAWICNGSACMCAGTQGKVRKKLSEKLGEDKIGMMFCLGHCYETSSFHYNGHNYSGNDIDQIDEIIKGKKINTKNINSASHATKSILMGEDLSSVEKFKDLLSQILKKDKKEILKTITESNLCGRGGAGFPTGMKWNFCSQQKVKKKYVVCNADEGDSGAFSDRYLLEDQPLKVLFGMIVCGYIIGSDEGVLYIRGEYPKSIEIINHTINELKKLNLLGKD

SEQ ID NO: 78779 - protein, 269 aa, Unknown
  Bacterial polypetide isolated from the Sargasso Sea
MILKNKTFDNSLAFFFISILPISIIIGPAISLLNILCISFLFIIIYFKSKDINFQKKELILFFLIFYIYLILNSFLGIDFENSSTRSFGFLRFILLFLAINYFFLKIENFNKIFKIWAIILSLLAIDGLYEVIFKANIFGWGDFSDSANQGQRIVSFFKDEPVVGSFLFCFILLLSGYMLENKELKNKKIFFTLFFSFLFLIILLSGERSNFLKTIFASVIFIFISREFSKAYIVKLFLFLTIALVIIFNSYSYLFKQYSYLVNSLSFS

SEQ ID NO: 78780 - protein, 374 aa, Unknown
  Bacterial polypetide isolated from the Sargasso Sea
MRSKKVNNQPQEITDYPEIDPKDQNAIECINEIFMSPLTGSYNWDYIVVEDRIKKLYELGKELNWNVSSDLDWSQDYPKDKLMINYELFQTPESVLKGYDDLSDEKKVEMDRHRVSWNISQFLHGEQGALLVASQLVSCAPTFNAKMYAASQTFDEARHVEGFNRYLKEKIGFQYPATNGLKSLMDKILTDERWDLKFIGMQIIIEGLALAAFNNMKFILNDGLLKQLLHYVIRDEARHVTFGVNYLEDYLKTLSKSEIDDRAEFAFEACVVMRNRLISGDVIARFLDYTPEEAQAAAENTEQGQNFRTLLFTKIIPNLKRIGLLNDKVMPKYEKLGVLSYAELEDNFDIDWADMSKPYETQEEIERFISNPHH

SEQ ID NO: 78781 - protein, 521 aa, Unknown
  Bacterial polypetide isolated from the Sargasso Sea
MAEQYFMGLDGFIWFVGVVENRNDPAELGRVQVRCLGYHTEDLSLIPTADLPWAHVMHPATDPAVQGLGNSPSFLVEGTWVVGFFQDAKDKQQPIVMGTLPGYPQSTPDTTKGFNDPTGTYPSQNRELTGEAISKFKSSGHSLNESDVSRLARGGDSEQHSSLIKRRALKQDSVPIATEPYNTKTDNTQVTGPKRESWNEPDPRGHSSSKSPYPTANYPYNHVHESEAGHIHEVDDTPGGERLMQQHSSGSFTEIHPDGSKVVKVVGDNYEIIAGKSNILVVGDTNITYDGNVRQLIKKDYVLEVEGDYSIKVHKNNRVKIGAGGAGNLYEEVTGSHTYNINGGVRGRVGRDIDINVGRNESRLIGGTYAIVGTRGMTLNSAFGSTVITSTKDISITSGSLGSIDIKAGTTASMAGVAVTQLGGLAIAVGDITTTTISLSSNLSVGLTSPTFNIGVSAITAAQAVLASDIRAAIPCIVNITGATNITGVTNIVGATNVVGSLAATTMTAPIAHFPLHSVHI

SEQ ID NO: 78782 - protein, 368 aa, Unknown
  Bacterial polypetide isolated from the Sargasso Sea
MKIRNQDGPPEDLLYFDEDLDLSQKQVEDVVEIFKTPLTGAYNWDYTIADNRIKKLYELGKELNWNGSIDLNWDYTHPTDEKLVEPDEELPHEALEAYQALSEEEKILFDRHNTAELMSQFLHGEQGALLVASQLASCAPTYNAKLYAASQTFDEARHVEVFNRYLQDKIGIHYPINPSLKLLLDKILTDERWDLKFIGMQIIIEGLALAAFQMLKAITKDPLLKQLLHYVVRDEARHVTFGINYLEDYLTTLSKEEINERAQFAYEACVISRDRLVNTQAEQRFLKMTAEEAREFQLSTGTFEMFRNFLFSRVMPNLKRIGLLTDEVRPKFEALGLLEYEHAPDDFECDWAEMKKPLEKFGQIPTNL

SEQ ID NO: 78783 - protein, 379 aa, Unknown
  Bacterial polypetide isolated from the Sargasso Sea
MKIKVVENPPIDPREFDLPEGFSEENIEDVVEIFNTPLIGHYNWDYTDADTRIKKLYELGKKLNWDGSIDLDWSKAIKKDEPPLKAELIARMEGPLAALPEDERIEYMRHDSAWSLSQFLHGEQGALLVASQLVSCAPTYQAKLYAASQTFDEARHVEVFARYLKEVSGIEYPINKNLKSLIDKILSDPRWDLKFIGMQIIIEGLALAAFQTTKETSNCPLLRQLVHYVIRDEARHVTFGVNYLEDFLSTLSEEEVEDRAMFAYEACVVMRDRIINTELPARWFNISEEEIREMLVNDETQDMFTNLLFSRVMPNLKRIGLLTDKVLPLYEKLNLTSYMDADSEFEIDWAELNKPLESSKEIDQQSERELAAHAAQGLF

SEQ ID NO: 78784 - protein, 368 aa, Unknown
  Bacterial polypetide isolated from the Sargasso Sea
MKIRKQNGPPEDLIYFDEDLNLTQSNVEDVVEIFNTPLTGSYNWDYTISDNRIKKLYELGKELNWNGSIDLKWDYTHPADERLVETDEPLPHEALEAYEKLSDEDKILFDRHSTAELMSQFLHGEQGALLVASQLASCAPTYNAKLYAASQTFDEARHVEVFNRYLQEKIGIHYPINPSLKLLLDKILTDERWDLKFIGMQIIIEGLALAAFQMLKAITKDPLLKQLLHYVVRDEARHVTFGINYLEEFIKTLSPEEIEERAQFAYEACVISRERLINTKAEQRFLNMSADEAREFQMNTKTFDMFRNFLFSRVIPNLSRIGLLTDNVRPKFEALGLLEYENAPDDFECDWAEMKKPLEKFGQIPTAL

SEQ ID NO: 78785 - protein, 374 aa, Unknown
  Bacterial polypetide isolated from the Sargasso Sea
MKSKKVNNQPQEITDYPEIDPKDQNAIECINEIFMSPLTGSYNWDYIVVEDRIKKLYELGKELNWNVSSDLDWSQDYPKDQLMINYDLFQTPESVLRGYDDLSDEKKVEMDRHRVSWNISQFLHGEQGALLVASQLVSCAPTFNAKMYAASQTFDEARHVEGFNRYLKEKIGFQYPATNGLKSLMDKILTDERWDLKFIGMQIIIEGLALAAFNNMKFILNDGLLKQLLHYVIRDEARHVTFGVNYLEDYLKTLSKSEIDDRAEFAFEACVVMRNRLISGDVIARFLDYTPEEAQAAAENTEQGQNFRTLLFTKIIPNLKRIGLLNDKVMPKYEKLGVLSYAELEDNFDIDWADMSKPYETQEEIERFISNPHH

SEQ ID NO: 78786 - protein, 357 aa, Unknown
  Bacterial polypetide isolated from the Sargasso Sea
GQWSTDLDFRLHCLDQLHQGLVNHVEELTEITIAEVGATRMACSTIQVVEPLKFLPFYMEVARNYDWRTDLGTAETLGGECVRWYEKEPVGVLAAITPWNVPNQINLAKIVPALAAGCTVILKPAPDTPWTGLALGRIVTEHTDIPDGVVNVVTASDPASGAYLTADPRVDMISFTGSTATGKKVMEAASANVTKVFLELGGKSALIALDDVDDFGMVAATAAFGMATVSGQGCALSTRILLPESRYEEGIEAIASMMAAVPPGDPTDAATMMGPLINARQRDRVESYVQSAVDDGARIVCGGARPDHLEKGFYYEPTLIGGVDNAMRVAQEEIFGPVLVAIPYEDDDEAIAIANDS

SEQ ID NO: 78787 - protein, 284 aa, Unknown
  Bacterial polypetide isolated from the Sargasso Sea
MVGTTKYVNASQILSYASATSSTDINGGTIDGVTLGTNSAVTQAVVDDINLNGATIGHTSDTDLMTLADGSVTFTGSTVIATADVNGGAVDAVTLGTNSAVTQAVIDNVNIDGAIIGHTSDTDLMTLADGSVTFTGSTVIPAADVNGGAIDAVTLGTNSAVTQAVIDNVNINGVEIGHTADTDLMTLANGSVTFTGSTVIPTADVNGGAIDAVTLGTNSAVTQAVIDDINLNGTTIGHTDDTDLLTLANGSVTFTGSTVIPTADVNGGAIDAVTLGTNSAVTQA

SEQ ID NO: 78788 - protein, 349 aa, Unknown
  Bacterial polypetide isolated from the Sargasso Sea
FDGAANVFDYYAGLTDKIENKLIPSGNDTFNYIVLEPFGVSLQIVPWNYPIALFARSVAVSLVVGNTIVIKPPELCPISSNIFGEIFKEVELPDGVINIVHGYGEVTGKKLVDHNSIDQVVFTGSPEVASEILKRTADRIIPCHLELGGKSAAIIYPDANIDNAVDSTIKGIFKPNAGQICVAMSRVIIHQKIKDEYMTKLFEKTKKLKIGAGSDNNTEVTPLISTEQLQRVSNYCQSGVQSGAELIIGGEKHDQENGNYYKPTIFDNVDPKSTIAQEEIFGPVTSIFNFETEEEAIEIANSTDYGLASGVFTNNDEKAKWTADRIEAGIVWHNDWFVDGVNLPGGGYK

SEQ ID NO: 78789 - protein, 266 aa, Unknown
  Bacterial polypetide isolated from the Sargasso Sea
MNRFENRVALVTGGASGIGAASVRRLVTEGAQVMIADLDGQGAEQLASEIGAMTDTFEVDVADSSAVDDMVKATVERFGRLDVLFNNAGIVSTGTVDTLSDEHWKRVMDVDLSSVMYGCRAVIPVMRAQGGGAIVNTASISGLFGDWGIPAYNAAKGAVVNLTKAMAADHARDNIRVNAVCPGGVETPLVAEVVASRRAQVEYKRLVPQGRMGKPEEIAAAVAFLASDDASYVTGHNLVVDGGVTVTTGQPNFTAIAERWWDPLKN

SEQ ID NO: 78790 - protein, 234 aa, Unknown
  Bacterial polypetide isolated from the Sargasso Sea
KLNLELGGKAPAIVLEDADLDLAVNAIKASRVINTGQVCNCAERIYVHTAVADKFIEKLSSAMAATRYGDPMKQSDLEMGPLINQASLDKVISMVSKAKSEGAQVITGGKVADIGPGFHYEPTVLAGCHSDMEIMQKEIFGPVLPVQVVASLEEAVELANASEYGLTSSVYTRDLRQAMRAIDLLDYGETYINRENFEAMQGFHAGTRKSGIGGADGKHGLYEYTRTHVAYVQN

SEQ ID NO: 78791 - protein, 305 aa, Unknown
  Bacterial polypetide isolated from the Sargasso Sea
GAIDAVTLGTNSAVTQAVIDNVNINGTEIGHTSDTDLMTLADGSVTFTGSTVIPTADVNGGAIDAVTLGTNSPVTQAVIDNVNINGAQIGHTTDTDLMTLTSGTVTVAGTVAATAITGDGSGLTGITASVMKSDDISQGDAAVTISTSSGAVNINPASGSPILLDNTINIDGAIIGHTDDTDLMTLANGSVTFTGSTVIPTADVNGGAIDAVTLGTNSAVTQAVIDNVNINGAEIGHTSDTDLMTLADGSVTFTGSTVIGTVDVNGGAIDAVTLGTNSAVTQAVIDNVNINGSTIGHTDDTDLLT

SEQ ID NO: 78792 - protein, 145 aa, Unknown
  Bacterial polypetide isolated from the Sargasso Sea
IKLQGFENGFFIGGCLFDKVEKNMRIYKEEIFGPVLSVVRVKSFEDATKLINEHEYGNGVSIYTRDGDAGRTFSSKIQVGMVGINVPIPVPMAFHSFGGWKRSLFGDSAMHGIEGVRFYTKLKTITSRWPSGIRSNAEFVMPIMK

SEQ ID NO: 78793 - protein, 288 aa, Unknown
  Bacterial polypetide isolated from the Sargasso Sea
MTLADGSVTFTGSTVIPTADINGGAIDAVTLGTNSAVTQAVVDNVNIDGALIGHTSDTDLMTLADGSVTFTGSTVIPTADVNGGAIDAVTLGTNSAVTQAVIDNINLNGVEIGHTSDTDLMTLADGSVTFTGSTVIPTADVNGGAIDAVTLGTNSAVTQAVIDNINLNGVEIGHTSDTDLMTLADGSVTFTGSTVIPTADINGGAIDAVTLGTSSPITQAVIDNINMNGAQIGHTTDTDLMTLSNGTLTVAGTVAATTVTGDGSGLTGITASEMKSDDISQGDAAVTI

SEQ ID NO: 78794 - protein, 268 aa, Unknown
  Bacterial polypetide isolated from the Sargasso Sea
GKDTLNYVVLEPFGVALQIVPWNYPVSIFSGMVAQNWIVGNTIVIKPPELCPISSNFYGQIFEDVGVPKGIINILHGYGETTGRKLVQHPGSDYIVFTGSPEVASEILKETADRIIPTHFELGGKSAAIIYPDADIDKAVDSTVKGIFKPNAGQICVAMSRVIVHPKIKDEYMTKLVAKTQKLKIGAGDEDGTEVTPLISTDQMQRVSNYVKSGVQSGATLTIGGDKAVRDDGNFYQPTIFDNVKVDATIAQEEIFGPVTSIFDFEDE

SEQ ID NO: 78795 - protein, 298 aa, Unknown
  Bacterial polypetide isolated from the Sargasso Sea
MNDFIKPSNKIHTIDDAIKLSKRRLPKLVFDFIDGASGDDKLAEINSAALDQIRLEPKVFRNVENRKLNKKIFDLNFDYPFGFAPMGMTNLSWPEADKMIAKESAYNNIPTCVSMASSTTLEDMFTFSEGHSWMQIYIFQSEEFIMELLKRAENIGYKVLILTVDVPILSRRARDDRNGFGYPFKIGPKQFLDFALHPQWSLTTLLKGAPKPMNYVTSKSGDQIFRRKESRGATDWNTLKRVRDAWKGKLIIKGVMNSEDALKIKEAGADAIPVSNHGGRQLDSATASINALPLIRKS

SEQ ID NO: 78796 - protein, 290 aa, Unknown
  Bacterial polypetide isolated from the Sargasso Sea
SQMCFTAVKLAPALAMGNTVVIKASELAPVTLLEFAKLIEKTGIPKGVVNVITGLGDPCGKALTQHNLVERIAFTGGPETARHIVKNSSHNLSQVSLELGGKSPVAVFDDADQENALNGITAGIFGASGQSCIAGSRLYIQSSIYDDFLNKLINKAKNIKLGPPMSEATQMGPLNSLKQLELIEKNITETESQGGKIRCGGKRSNISNKGYYFPPTIIECKNHSLPTAENELFGPILSVMKFENEEELINLMNDNKYGLSSGVYTKDLGRGMRVSKAIRAGIVFVNTYRS

SEQ ID NO: 78797 - protein, 266 aa, Unknown
  Bacterial polypetide isolated from the Sargasso Sea
MSEHKDIDMMHFTGSTRAGVAVAQASAPTVKRVAQELGGKSANIVLDDADIEKAVSAGVSSCFLNTGQSCNAPTRMLVSSKNYDKAVEVAVNTANAIKVGDPFDADTKMGPISNKTQYEKVQRMIQIGIDEGATLSAGGVGLPDGCESGYYVKPTIFSDVTNDMTIAREEIFGPVLCLIKYETEEEAIEIANDTPYGLAGYVQGEHAHAVEVASKIRAGQITINKGARVRSAPFGGYGSSGNGREHGTHGLEECLETKAVIGALVE

SEQ ID NO: 78798 - protein, 319 aa, Unknown
  Bacterial polypetide isolated from the Sargasso Sea
AIGSGVIVNADINASAAIADSKLSTITTADKVSGAAIQVDDATSGTGITLADDDKFLVDDGGTTKYVNASQVLSYASATSSTDINGGTIDGVTLGTNSAVTQAVIDNVNIDGAVIGHTSDTDLMTLADGSVTFTGSTVIPTADVNGGAIDAVTLGTNSAITQAVVDNVNIDGAVIGHTSDTDLMTLADGSVTFTGSTVIPTADVNGGAIDAVTLGTNSAVTQAVIDNVNINGVEIGHTADTDLLTLANGSVTFTGSTVIPTADVNGGAIDAVTLGTNSAVTQAVIDDINLNGATIGHTDDTDLLTLANGSVTFTGSTVI

SEQ ID NO: 78799 - protein, 235 aa, Unknown
  Bacterial polypetide isolated from the Sargasso Sea
STSIPLSLDVTDAGQIQKCVDTMIKNFEKIDVLVNNAGYGYLSAIEEGESQEVKNLFETNFFGALELTKKVLPHMRHKKFGRIINNSSQAGLMANPGTGYYSASKFALEGLMEALDKEVRPLNISVTSVQPGAFRTDWSGRSMKKSKINISDYDEHVGSRINMISQIDGKQPGDPKRAAKIIFSLTRDDNPPNKLLLGAGVLTTYKERLEELRADLESYESLTLSADFPNDLEEQ

SEQ ID NO: 78800 - protein, 175 aa, Unknown
  Bacterial polypetide isolated from the Sargasso Sea
LVTKEHLEKVTSYVDLGVKEGAKLVVDGRGLKLQGYENGFYIGGCLFDHVNKDMRIYKEEIFGPVLSVVRVNTFEEAAKLINDHEYGNGVSIYTRDGDAGRTFASKIQVGMVGINVPIPVPMAFHSFGGWKRSLFGDSGMHGMEGIKFYTKLKTVTSRWPSGVRSNAEFVMPIMK

SEQ ID NO: 78801 - protein, 252 aa, Unknown
  Bacterial polypetide isolated from the Sargasso Sea
MENSFANYPSLQGKNILITGGASGIGKELVKGFAEQGANVAFLDLNDEAGERLSLDIGENVYFQKCDLKEVGNLKSSIEKLRAKIGLFDVLVNNAAHDDRHNWQDVTEAYWDERFATNLRHQFFTIQSVASDMIQKGGGSIVNIGSNSWIEAVGNFPAYATAKSAVHGLSRTLARDLGKHRIRVNTVVPGWIMTDRQKELWVTPEGLENQYKRQCLPDLIEPVYVARMVLFLASDDGAMCTANNYMVEAGSI

SEQ ID NO: 78802 - protein, 249 aa, Unknown
  Bacterial polypetide isolated from the Sargasso Sea
MLDISKEPMEVAPTAHYSMGGIVLNAEKHSTPIKGLYAAGEVAGGLHGANRLGGNSLAEILIFGRRAGIASIEYSNNLSAQIRSKKVVKEAHENINSHIKKGKELAIPLYNELSNIMWKYCGVLKNEGLLKEGFEKVKEIKNLVKEIDVRIHDRNCNDLIQIFDLQACSISAEATIRSALCRKESRGAHQRSDFPELDNSKKCNFHINMEKSSFNLSVKEISTKPLKENLREILTKSNKVVNLKGKLLE

SEQ ID NO: 78803 - protein, 243 aa, Unknown
  Bacterial polypetide isolated from the Sargasso Sea
GVPAGVFNVVNGYGPLVGAALSDHPDVAMMSFTGSTEAGIAVAQASAVSVKRVHQELGGKSSNIILDDVADLEKSIKGGAGHCFLNSGQSCNAPTKMLVSEKNYDKAVEVAVQTANSTTVGDPQGEFRIGPIANKPQYEKILKMIEIGINEGATLVAGGIEKPEGYEKGYYVKPTVFANVTNDMTIAKEEIFGPVLSILKYSSEEEAIKIANDTEYGLAGYVQGEPEHANKVARKIRAGQVII

SEQ ID NO: 78804 - protein, 201 aa, Unknown
  Bacterial polypetide isolated from the Sargasso Sea
GNTVVIKTSELAPVTLLEFAKLIEKTGIPKGVVNVITGLGDPCGKALTQHNLVERIAFTGGPETARHIIKNSSHNLSQVSLELGGKSPVAVFDDADQENAINGITAGIFGASGQSCIAGSRLYIQSSIYDDFLNKLIDKANTIKLGPPMSEATQMGPLNSLKQLELIEKNITETVSQGGKIRCGERDLIFQIKDIIFHQLL

SEQ ID NO: 78805 - protein, 151 aa, Unknown
  Bacterial polypetide isolated from the Sargasso Sea
KKQYDKIINLIQSGIDEGATLIAGGIERPESLSKGYFIQPTVFVDVLNDMKIAKEEIFGPVLSIIPFESEEEAISIVNDTSYGLGNYLQTQDKEKARRVARQVRSGGVYINGNSADPGTPFGGYRQSGNGREGGTWGLEEYLEVKTICGWK

SEQ ID NO: 78806 - protein, 285 aa, Unknown
  Bacterial polypetide isolated from the Sargasso Sea
FADKCSKILTTHPKVNRIAFTGGMHTAKHIIRNSAENLSQVSLELGGKSPVAIFDDARIDNAINGVTAAIFGASGQSCIAGSRLYLQKGIYKEFLEKITDKAKKIKIGDPMKDNTQMGPLATHNQIKNIQENIYKTIKQGGKLITGGTTVKEFKKGWYFEPTIIECDHHNLPAAENELFGPVLSVMKFSDEAEITKSMNDNKYGLAAGIFTENNGVALRLSKALRAGIVFVNTYRLISPVAPFGGFKNSGYGRESGIETMKDYSNLKTTWINTSKDNIDDPFIVR

SEQ ID NO: 78807 - protein, 325 aa, Unknown
  Bacterial polypetide isolated from the Sargasso Sea
REKEEEGGKLLSQENGKTIKQCIDEFKGAADTFDFYAGLTDKIENKLIPSGHDTLNYVVLEPFGVALQIVPWNYPVSIFSGMVAQNWIVGNTIVIKPPELCPISSNFYGQIFEDVGVPKGIINIVHGYGETTGRKLVQHPGSDYIVFTGSPEVASEILKETADRIIPTHFELGGKSAAIIYPDADIDKAVESTVKGIFKPNAGQICVAMSRVIVHPKIKDEYMTKLVAKTQKLKIGAGDEDGTEVTPLISTDQMQRVSNYVKSGVQSGATLTIGGDKAERDDGNFYQPTIFDNVKVDATIAQEEIFGPVTSIFDFEDEKEAISIA

SEQ ID NO: 78808 - protein, 269 aa, Unknown
  Bacterial polypetide isolated from the Sargasso Sea
YYDYFAGLADKVEGTVVPIDKPDMQVTTTRIPIGVVAAIIPWNSQMLLTAVKLAPALAMGNTVVIKASELAPVTLLEFAKLIDKAGLPKGVINIITGLGEPCGKALTTHTLVERIAFTGGPETAKHIVKNSAENLSQVSLELGGKSPVVVFDDADQENALNGITAGIFGASGQSCIAGSRLYLQSKIYDEFLKKLISKAEKIKLGGPMEKDTQMGPLNSFKQLENIERNIKATIEQGGKIRCGGKRSSVSNKGYYFPATIIECKNHNLP

SEQ ID NO: 78809 - protein, 170 aa, Unknown
  Bacterial polypetide isolated from the Sargasso Sea
MSRFGSSMSVLDFLHLGSSLSLRSFTRAGSAVSVRGLSRFGSSMSVLDFLHLGSSLSLRSFTRAGSAVSVRGLSRFGSSMSVLDFLHLGSSLSLRSFTRAGSAVSVRGLSRFGSSMSVLDFLHLGSSLSLRSFARLGSSLSVAGTTLLGSEVKFDSDNGVNIIGSAASEV

SEQ ID NO: 78810 - protein, 292 aa, Unknown
  Bacterial polypetide isolated from the Sargasso Sea
FYQATSFNGDLSNWDVSSVTNMFYIFLNATSFNGDLSSWDVSSVTNMYAMFYSATSFNQDISDWDVSSVTNMYAMFYSATSFNQDISGWDVSSVTDMTAMFYSATSFNQDISGWDVSSVTDMYQMFGWSDALSDGNKCAIHASFQSSDAWPYDWSEFCYQFTSREELETALDLWISDNSSALATYGTINGWDVSLITDMSDLFKLKTTFNDDISNWDVSNVINMSEMFENAQAFNINISAWDVSSVTDMGAMFNGATSFNRDISIWDVSSVTDMSYFFSNASNFNQDISSWD

SEQ ID NO: 78811 - protein, 255 aa, Unknown
  Bacterial polypetide isolated from the Sargasso Sea
MYLKKINLKNKTALVTGAGKGIGKACAIALAEAGADLVILSRTQKDLDIVSKVIKKFRSKCMAYVCDVTNYNQIKNIISKQKKIDILVNNAGNNIPEHFTKVQKKNMEYLVKLNTISTFNIAQLCTLKMLESRNRRKIGGSIINMSSQMAHVGGPIRSVYNMTKSGLEGLTRGMAIDLAKNNIRVNTVCPTFVVTPMTKKFLKSKKFKNDTLKKIPMGKFAELSDVATTVAFLASDASSMITGTSILVDGGWTAI

SEQ ID NO: 78812 - protein, 263 aa, Unknown
  Bacterial polypetide isolated from the Sargasso Sea
HEDIDMMHFTGSTRAGVAVAQASAPTVKRVAQELGGKSANIVLDDADIEKAVSAGVSSCFLNTGQSCNAPTRMLVSSKNYDKAVEVAANTANAMKVGDPFDADTKMGPISNKTQYEKVQRMIQIGIDEGATLSAGGVGLPDGCESGYYVKPTIFSDVTNDMTIAREEIFGPVLCLIKYETEEEAIEIANDTPYGLAGYVQGEQAHAVEVASKIRAGQVTINKGARVRSAPFGGYGSSGNGREHGTHGLEECLETKAVIGALVE

SEQ ID NO: 78813 - protein, 209 aa, Unknown
  Bacterial polypetide isolated from the Sargasso Sea
AVGNIGDELVSRLSKKVEALKVGPGMDKNSEMGPLVTKEHLDKVKNYVEIGVKEGADLVSDGRNIKLQGFENGFFIGGCLFDKVEKNMRIYKEEIFGPVLSVVRVKTFEDATKLINEHEYGNGVSIYTRDGDAGRTFSSKIQVGMVGINVPIPVPMAFHSFGGWKRSLFGDSAMHGIEGVRFYTKLKTITSRWPSGIRSNAEFVMPIMK

SEQ ID NO: 78814 - protein, 216 aa, Unknown
  Bacterial polypetide isolated from the Sargasso Sea
SYPEAVRDGVRTIMSNTGQSCDAPTRMLVQRSIYDRAVKEAVDEANKIKVDVASKKGDHIGPLVSKVQYDKVVNLINEGIKEGATLAAGGPDLPNGLNKGYFVKPTIFTDVNNDMKIAREEIFGPVLSIIPFDTEEEAIKITNDTSYGLGNYLQTEDKEKAQRVARKVRAGTVYINGQGAETGAPFGGFKQSGNGREGGLWGFTEYLEVKAITGWN

SEQ ID NO: 78815 - protein, 263 aa, Unknown
  Bacterial polypetide isolated from the Sargasso Sea
SSKKIDMISFTGSVETGSAIMTEAAKNITKVNLELGGKAPALVLADADIDLAVSKIRDARVINSGQVCNCVERVYVDKKIADEFTEKLTKAMQNTKFGNPNTKTDIDYGPLINEDGSKKVSELVNSAKGSGAEILTGGNRDESSEGIYYHPTVIANCKQDMRIIQEEIFGPVLPLVEFEDLDQAIEYANDSDYGLTSSIFTNNLKTALKACNEIRFGETMINRDNMEIFQSFHAGLRKSGIGGADGKHGLYEYMQTHAVYMRA

SEQ ID NO: 78816 - protein, 154 aa, Unknown
  Bacterial polypetide isolated from the Sargasso Sea
MTTGDPQNEEIFLGPISNQTQYEKVQSLIQEGIAEGATLACGGTGRPDGLEKGYYVKPTVFTNVNNKMTIAREEIFGPVICLIPYKDLDEAIEIANDSPYGLSSMISCADETKGHEIAKRVRTGQVIVNRQSRGEFPAPFGGFKMFRKRQGARN

SEQ ID NO: 78817 - protein, 275 aa, Unknown
  Bacterial polypetide isolated from the Sargasso Sea
EIDEGRGVDGCVLLDLRHLGREKIEERLGYLQEVATEFRDIDLAEQPIQVKPTMHYIMGGIKTDSSGATDIPGLYAAGECANVSVHGGNRLGANSLLDTIVFGRRSARAAIEYISTVKSHSTSNVELKNETERIKNIVDRSNGERSATLRNEMGIAMTSGIGVYRDTASIEMAKNKISELLDRYPNTSIDNKGKVFNTDLIFNLELKYMLDVALTMCIGAEQRKESRGAHYRTDMTERDDANWLKHTHVKNENGNPKFYTSDVKITDWKPEIRKY

SEQ ID NO: 78818 - protein, 317 aa, Unknown
  Bacterial polypetide isolated from the Sargasso Sea
KTAIQAELEVAQAGQKELQSQITELESKHAKAEAEQSKQAEGKQAELQASTAALEIAQAKLSRLEEEKAALGARTIELAAAVNQELQAKEEALAQATAALEAKAQEEKAALEAKAQEENAALEAKAQEANAALEAKKAELEVAQAGQKELQSQITELESKHAKAEAEQSKQAEGKQAELQASTAALEIAQAKLSRLEEEKAALGARTIELAAAVNQELQAKEEALAQATAALEAKAQEEKAALEAKAQEENAALEAKAQEANAALEAKKAELEVAQAGQKELQSQITELESKHAKAEAEQSKQAEGKQAELQASTAA

SEQ ID NO: 78819 - protein, 298 aa, Unknown
  Bacterial polypetide isolated from the Sargasso Sea
MGNTVVIKASELAPVTLLEFAKIIEKTEIPKGVVNIITGLGDPCGKALTQHNLVERIAFTGGPETARHIIKNSSHNLSQVSLELGGKSPVAVFDDADQENALNGITAGIFGASGQSCIAGSRLYIQSSIYEEFLNRLVEKAKNIKLGPPMSEETQMGPLNSLKQLELIEKNINETESQGGKIRCGGKRSNFSNKGYYFPATIIECDNHNLPSAENELFGPILSVMKFEKEEELISLMNDNKYGLSSGVYTKDLGRGMRVSKAIRAGIVFVNTYRLISPMAPFGGMKDSGYGKEAGKES

SEQ ID NO: 78820 - protein, 299 aa, Unknown
  Bacterial polypetide isolated from the Sargasso Sea
ILKPSEQTPFSLIKLANLLKDVLPEGVLNLVNGRGPVTGSSLVNNPGVDRISFTGGTVTGRQVMMDAGKQLTPCTMELGGKSANIVFASADYQRALDGALIGIFSNNGQQCLAGSRILVEEKIFDQFVEEFVQRTKKIVVGDPLNNETEIGPIASKQHMERILSFAEGVQKDGDKLLVGGKRLSEQKDGYFIEPTAVLASSNNSRVCQEEIFGPFASFISFKSEEEAVSIANDTEFGLVSYVWSDHMPTILNVSESMRSGVVWVNTPMMRELRAPFGGYHNSGVGREGGYSCEQFTQRK

SEQ ID NO: 78821 - protein, 224 aa, Unknown
  Bacterial polypetide isolated from the Sargasso Sea
SGAEVFFLGLNAQKGGKLESELCSENFKVSFFRCDVTKEDEVKEIFDKIVFHAGNIDVLVNNAGGWENQQSVLKTSLDEWEKIISRNLRSVFLCSKQIIPVFQSQKSGRIVNISSIGSLTIVKSASSPPYIAAKAGVNALGRVLAAELADYNVAVNTLAPSTTETERLVRVRSEDQRKQMAERTLFRRLSTVEEIANWVLFLAAPESSYLTGQTISVNGGRLMI

SEQ ID NO: 78822 - protein, 186 aa, Unknown
  Bacterial polypetide isolated from the Sargasso Sea
MENSFANYPSLQGKNILITGGASGIGKELVKGFAEQGANVAFLDLNDEAGERLSLDIGENVFFQKCDLKKVGNLKSSIEKLRAKIGLFDVLVNNAAHDDRHNWQDVTEAYWDERFATNLRHQFFTIQSVARDMIQKGGGSIVNIGSNSWMEAVGNFPAYATAKSAVHGLSRTLARDLGKHRIRVNT

SEQ ID NO: 78823 - protein, 226 aa, Unknown
  Bacterial polypetide isolated from the Sargasso Sea
RQSANIILDDADIEKAAAAGANHCFMNTGQSCNAPTRMLVSSNNYEKAVEAAADVANSTIVGSPEEEGVKIGPISNKVQYEKVQKLIQIGIDEGARLVAGGLGRPEGISEGYFVKPTVFADVTNDMTIAREEIFGPVLCILKYESEDEAIEIANDTEYGLAGYVQSGDEDHAKQVARKIRAGQISINGGTRGPAAPFGGFKTSGNGREHGLSGLNECLETKAIIGN

SEQ ID NO: 78824 - protein, 286 aa, Unknown
  Bacterial polypetide isolated from the Sargasso Sea
VGEVEKCAWICDYYKEFAPEFLSDRLIKTEYYKSMVTLQPIGLILGIMPWNFPFWQVFRFAIPALIAGNGAILKHASNVQGCAFAIESSFLEAGFPADIFRNISVSGKNVKDVIKNKAISAVTITGSTPAGSAVAQTAGKYLKKTVLELGGNDPYIILDDADLDNAIEACISGRILNTGQSCISAKRLIVTKSLYHDFLKKLKVKLAKMIMGDPMDNVDIGPMVSINARDEIHDQVTRSIYSGAQLELGGKVPDLKGCFYPVTLLSNVKPGMAAFDEEIFGPVFSV

SEQ ID NO: 78825 - protein, 180 aa, Unknown
  Bacterial polypetide isolated from the Sargasso Sea
MKLLEIAKNVAEKLITGDPTKEDTDIGPLVSQAQFDKVQRLIESGIKAGAQLVTGGLGKPTGLNAGYFVKPTVFGDVNNTMEIAQEEIFGPVLSVIPYENIDNAVQIANDTSYGLSAYVCGSDPRKLRSVARQIRAGQIHINYGSGGTNAPFGGFKQSGNGREKAEWGLEEFLETKAIME

SEQ ID NO: 78826 - protein, 195 aa, Unknown
  Bacterial polypetide isolated from the Sargasso Sea
NRLGSNSLIDLVVFGKSAAKRAAELVKPGTPHEEIPQSETDKCLDRFDKLRNASGATKTSELRLSMQRTMQSKCAVFRTEKTLKEGMDQIRKPFEGISDISVSDKSLLFNTDLVETLEFDNLIRQAMTTIDSAYHRKESRGAHAREDYKTRDDKKYMTHTLAWQKGNEVKVAYRPVHAKTLTNDVQYFPPRERVY

SEQ ID NO: 78827 - protein, 192 aa, Unknown
  Bacterial polypetide isolated from the Sargasso Sea
GANRLGANSLLDTVVFGRRSAEKASDYVKSISNEVIPTDEYVKRDLDMIKKILDSEGKFKVAEVRNKMATAMTKGIGVFRDQESMEYAKKIVDQTKIDYRDSVRIDNKGKIYNTDLLFALELGNMIDCAESIVHGALTRKESRGAHFRTDIPGRNDEEWLKHTLIYKSSEGEISVKTPDVTITEWQPVERVY

SEQ ID NO: 78828 - protein, 270 aa, Unknown
  Bacterial polypetide isolated from the Sargasso Sea
MLLTAVKLAPALAMGNTVVIKASELAPVTLLEFAKLIEKTGMPKGVINIITGLGEPCGKALTTHNLVERIAFTGGPDTAKHIVKNSAENLSQVSLELGGKSPVVVFDDADQENALNGITAGIFGASGQSCIAGSRLYLQSKIYDEFLKKLIDKAENIKLGSPMEEDAQMGPLNSFKQLENIEKNIKATIEQGGKIRCGGKRSSISNKGYYFPATIIECENHNLPVAENELFGPILSVMKFENEKEVIEKMNDNKYGLSSGVYTSNFARGL

SEQ ID NO: 78829 - protein, 128 aa, Unknown
  Bacterial polypetide isolated from the Sargasso Sea
AGGLGRPDGFSEGYFVKPTVFADVTNDMTIAREEIFGPVLSILKYETEDEAIDIANDTEYGLAGYVQSGDESHAKDVARRIRAGQISINRGNTGPAAPFGGFKTSGNGREHGLSGLNECLETKAILGS

SEQ ID NO: 78830 - protein, 157 aa, Unknown
  Bacterial polypetide isolated from the Sargasso Sea
MKRFLNNKALVTGGASGIGKAICQRLVEEGADLVFIDRNIDAGKAFEQELSNQESSSLFIAADMTILAEVEKAFAETKNFLPHIDVLVNNAGDAFAENYEDTTIENWNADLSLNLTSHYMLTSLVLPEMEKREKGVVINISSVNGIQALGCPAYSAA

SEQ ID NO: 78831 - protein, 238 aa, Unknown
  Bacterial polypetide isolated from the Sargasso Sea
VPNGVFNVVNGYGPTVGAALSEHPDVAMMSFTGSTRAGIAVAQASASSVKRVHQELGGKSSNIILDDVPDLEKSVKGGAGHCFLNSGQSCNAPTKMLVSSKNYDKAVEIAAATANSTTVGDPNGEYRLGPIANKVQYKKIIKLIEIGIEEGATLVAGGVEKPDGCEKGYYVRPTVFANVTNDMTIAKEEIFGPVLVMIKYNNEEEAINIANDTEYGLAGYVQGDPDHAREVAQKIRAG

SEQ ID NO: 78832 - protein, 122 aa, Unknown
  Bacterial polypetide isolated from the Sargasso Sea
MRIYKEEIFGPVLSVVRAKDFDSAVNLVNEHEFGNGTSIYTRDGDVGRTFANKIKIGMVGINIPIPVPVAYHSFGGWKRSLFGDQHMHGPEGVRFYTKLKTITSKWPSGLRTDPEFVMPIMK

SEQ ID NO: 78833 - protein, 280 aa, Unknown
  Bacterial polypetide isolated from the Sargasso Sea
FRENKTQATYIAEYYDYFAGLADKVEGTVLPIDKPNMQVITTRVPIGVVAAIVPWNSQMLLTAVKLAPALAMGNTIVIKASELGPATLLEFAKLVEKTGIPKGVVNVITGFGEPCGKALTSHNLVERVAFTGGPETAKHIIKNSAENLSQVSLELGGKSPVAVFDDADQENALNGITAGIFGASGQSCIAGSRLYLQKNIYEDFLNKLIDKAKKIKIGAPMEPDTQMGPLNSLKQLEVIEKNIKLTIDQGGKLKCGGKRHTLSNKGYYFPATIIECDNHS

SEQ ID NO: 78834 - protein, 276 aa, Unknown
  Bacterial polypetide isolated from the Sargasso Sea
MTLANGTLTVSGTLAATAVTGDGSGLTGITASVIKSDDISQGDSTVTISTSSGAVNIYPASGSSILLDNTINIDGSLIGHADDTDLMTLANGSVTFTGSTVIPTADVNGGAIDAVTLGTNSAVTQAVIDNVNIDGAVIGHTSDTDLMTLADGSVTFTGSTVIPTVDVNGGAIDAVTLGTNSAVTQAVVDDINLNGATIGHTDDTDLMTLADGSVTFTGSTVIPTADVNGGAIDAVTLGTNSAVTQAVVDDINLNGATIGHTDDTDLMTLADGSVTL

SEQ ID NO: 78835 - protein, 251 aa, Unknown
  Bacterial polypetide isolated from the Sargasso Sea
PEVASEILKETADRIVPTHFELGGKSAAIIYPDADIDKAVDSTVKGIFKPNAGQICVAMSRVIVHPKIKDEYMTKLVAKTQKLKIGAGDEEGTEVTPLISTDQMQRVSNYVKSGVQSGATLTIGGDKAERDEGNFYQPTIFDNVKVDATIAQEEIFGPVTSIFDFEDEEEAISIANSTKYGLASGVFTADDQKAKWTADRIQAGIIWQNDWFVDGNNLPGGGYKRSGYGRDGGVDGVYSHGQTKRISKRLY

SEQ ID NO: 78836 - protein, 298 aa, Unknown
  Bacterial polypetide isolated from the Sargasso Sea
SAQKAFDTSWSKLHPRDRAKYLQLIANELRNNAEHLGKIETIDTGKLFRETKTQANYIAEYYDYFAGLADKVEGTVVPIDKEDMQVTTTRVPIGVVAAIIPWNSQMLLTAVKLAPALAMGNTVVIKASDLAPVTLLEFAKLIEKTGIPKGVVNVVTGLGDPCGKALTQHNLVERIAFTGGPETARHIINNSSHNLSQVSLELGGKSPVAVFDDADQENALNGITAGIFGASGQSCIAGSRLYIQSNIYDDFLNKLIDKAKNIRLGPPMSEETQMGPLNSLKQLELIEKNIIETEAQGG

SEQ ID NO: 78837 - protein, 149 aa, Unknown
  Bacterial polypetide isolated from the Sargasso Sea
SELAPVTLLEFAKLIDKAGLPKGVINIITGLGEPCGKALTTHNLVERIAFTGGPETAKHIVKNSAENLSQVSLELGGKSPVVVFDDADQENALNGITAGIFGASGQSCIAGSRLYLQSKIYDEFLKKLISKAEKIKLGGPMEKKILKWT

SEQ ID NO: 78838 - protein, 221 aa, Unknown
  Bacterial polypetide isolated from the Sargasso Sea
SADITGIFTEAGAPAGLFGDLPILISESPAVIANPLVRGITLTGSERAGREVAAEAGRNLKKCVLELGGSDPYLILADADLELAADCCVTSRMLCAGQVCIAAKRIIAVDDIYERFRNIVIDKIDQYEMDDPAKSNCRLGPLAREDLRDTVHRQVVESVEAGADLACGGHITGRAGWWYPPTVLENVHPGMPAFEEEIFGPVVSLVRAADTTHAIALAGDT

SEQ ID NO: 78839 - protein, 286 aa, Unknown
  Bacterial polypetide isolated from the Sargasso Sea
YFRTIFNEIDAPEGILYIVHGYGETTGRKLVDHHSVNQVVFTGSPEVASEIIKRTADRIIPCHLELGGKSGAIIYEDANIEKAVDSTIKGIFKPNAGQICVAMSRIIIHPKVKDEYISKLYEKTKNLNIGAGDDEKSDVTPLISKDQLKRVSDYCKSGLQSGANLVIGGGIHEKEKGNFFQPTIFDNVNPDSAIAKEEIFGPVASIFNFETEDEAINIANATDYGLASGVFTSNDQKAKWTAERIEAGIIWHNDWFVDGVNLPGGGYKKSGYGRDGGIDSLYSYGQ

SEQ ID NO: 78840 - protein, 144 aa, Unknown
  Bacterial polypetide isolated from the Sargasso Sea
LLEFAKLIDKAGLPKGVINIITGLGEPCGKALTTHNLVERIAFTGGPETAKHIVKNSAENLSQVSLELGGKSPVVVFDDADQENALNGITAGIFGASGQSCIAGSRLYLQSKIYDEFLKKLISKAEKIKLGGPMEKDTQMGPLN

SEQ ID NO: 78841 - protein, 307 aa, Unknown
  Bacterial polypetide isolated from the Sargasso Sea
FDGAANVFDYYAGLTDKIENKLIPSGKDTFNYIVLEPFGVSLQIVPWNYPVSLFARSVAVSLVVGNTIVIKPPELCPISSNIFGEIFNEVEVPDGILNIVHGYGEVTGKKLVDHSSIDQVVFTGSPEVASEILKRTADRIIPCHLELGGKSAAIIYPDANIDIAVDSTIKGIFKPNAGQICVAMSRVIIHPKVKDEYMTKLIEKTKNLMIGAGSDNMTEVTPLISTEQLQRVSNYCQSGVQSGAELIIGGEKHDQENGNYYKPTIFDNVDPKSTIAQEEIFGPVTSIFNFETEEEAIEIANSTDYGL

SEQ ID NO: 78842 - protein, 235 aa, Unknown
  Bacterial polypetide isolated from the Sargasso Sea
ITLADGSVTFTGSTVIPTADVNGGAIDAVTLGINSPVTQAVIDNVNINGAQIGHTTDTDLMTLTSGTVTVAGTVAATAITGDGSGLTGITASVMKSDDISQGDAAVTISTSSGAVNINPASGSPILLDNTINIDGAIIGHTDDTDLMTLANGSVTFTGSTVIPTADVNGGAIDAVTLGTNSAVTQAVIDNVNINGAEIGHTSDTDLMTLADGSVTFTGSTVIGTVDVNGGAIDAV

SEQ ID NO: 78843 - protein, 248 aa, Unknown
  Bacterial polypetide isolated from the Sargasso Sea
TGSAIMTEAAKNITKVNLELGGKAPALVLADADIDLAVSKIRDARVINSGQVCNCVERVYIDKKIADEFTEKLTKAMQNTKFGNPNTKTDIDYGPLINEDGSKKVSELVNSAKSSGAEILTGGNRDDSSEGIYYHPTVIANCKQDMRIIQEEIFGPVLPLVEFEDLDQAIEYANDSDYGLTSSIFTNNLKTALKACNEIRFGETMINRDNMEIFQSFHAGLRKSGIGGADGKHGLYEYMQTHAVYMRA

SEQ ID NO: 78844 - protein, 287 aa, Unknown
  Bacterial polypetide isolated from the Sargasso Sea
GPRGPSGPSGSWGPSGSSGSSGSSGALGGPRGPRGPSGALGVPRGPRGPRGPRGPLGSLCYAMRCFALLCYALLCFALLCYAMLCFAWLCFAMLCYALFCFALLCFALRCFAVLCYAMLCFAWLCFAMLCYALFCFALLCYAMLCFALLCYAVICFVLLCYAMLCFVLLGFALLCYALLCFALLCYAMRCFAMLCYALFCFAMLCYALFCLALLCYALLWFALLCYAMLCFAWLCFAMLCYALFCLALLCYAMLCFVLLCYAMLCYALLCFAMLCFVLLCYAMLCFV

SEQ ID NO: 78845 - protein, 307 aa, Unknown
  Bacterial polypetide isolated from the Sargasso Sea
PVGVAGLITPWNLPLYLLSWKVAPALLMGNTIVAKPSEMTPMTASLLAEVIEDVGLPSGVFNLVHGNGLDAGAPLTAHPDVNLISFTGGTATGSEVAKSASSGFKKLSLELGGKNATIIREDVDIESMMPGIVRASFLNQGQVCLCGSRILIHESIYDVFVEAFLNAVNDMIVGDPADEDTELGALISAAHRDKVMSYIDLAEDEGGDILCGGGPPVGIPDAFANGFWISPTVIDGLTPDSRCATEEIFGPVVTLHPFFDDAEAIEIANMTDYGLAGSIWTQDVDAGSHLAEQIESGMVWVNCWLHR

SEQ ID NO: 78846 - protein, 285 aa, Unknown
  Bacterial polypetide isolated from the Sargasso Sea
MPNGILNIVHGYGEITGKKLVDHKEVNQVVFTGSPEVASEILKRTADKIIPCHLELGGKSAAIIYPDANIDKAVESTIKGIFKPNAGQICVAMSRVIIHPKIKDEYMSKLFKKTKNLKIGPGSDEKTDVTPLISKEQLQRVSNYCQSGIQSGADLVTGGKIKEENEGNYFQPTIFDNVDPQSTIAQEEIFGPVTSVFNFESDEEAIEIANSTDYGLASGVFTSNDEKAKWAADRIESGIVWHNDWFVDGVNLPGGGYKKSGYGRDGGIDSLYSYGQTKRVSKRLT

SEQ ID NO: 78847 - protein, 171 aa, Unknown
  Bacterial polypetide isolated from the Sargasso Sea
MFTLVSLYFSLYCSLYFSLVFSLFFILCFTLFVTLFFILFFTLFFILCFTLFSLYFSLYVSLYFSLFFHCTFHFTFHFIFTLCFTLFFTSFVTLFFTLFFTLFVTLCFTLCFTLFFIIFFTLFFTLLFTLCSPYFSLIFHVYCSLYFSLYFSLYVSLYVHFIFHFMFYFIF

SEQ ID NO: 78848 - protein, 261 aa, Unknown
  Bacterial polypetide isolated from the Sargasso Sea
MNRFENRVALVTGGASGIGAASVRRLVTEGAQVMIADLDGEGAEQLASEIGAMTDTFQVDVADSSAVDDMVKATVERFGRLDVLFNNAGIVSTGTVDTLSDEHWKRIMDVDLSSVMYGCRAVIPVMRAQGGGAIVNTASISGLFGDWGIPAYNAAKGAVVNLTKAMAADHARDNIRVNAVCPGGVETPLVAEVVASRRAQIEYKRLVPQGRMGKPEEIAAAVAFLASDDASYITGHNLVVDGGVTVTTGQPNFTAIAERWW

SEQ ID NO: 78849 - protein, 167 aa, Unknown
  Bacterial polypetide isolated from the Sargasso Sea
MGDPMDNVDIGPMVSINARDEIHDQVTRSIYSGAKLELGGKVPDLKGCFYPVTLLSDVKPGMAAFDEEIFGPVFSVIMAEDEEEAINLGNNTQFGLGAAIFTENIKKAEEIAKSSLNAGLCFVNDFVKSDPRLPFGGVKESGYGRELSSYGLMEFVNIKTVVVNHDY

SEQ ID NO: 78850 - protein, 238 aa, Unknown
  Bacterial polypetide isolated from the Sargasso Sea
HPDVNMISFTGSTRAGALISKNAAKDFKRVSLELGGKGANIVFKDADNEAIERGALRCFRNSGQSCNAPTRMLVEKSIYSDALERLKKYTDEFKVDTPDKEGDHIGPVISETQYNKIQTLIKKGVEEGAKLISGGPGKPEGLEAGYYVKPTVFADVKNSMEIARTEIFGPVLSVIPFETEEEAIEIANDTPYGLTNYIQSEDQEKVKRVARKLRSGMIVANTSSLAVDAPFGGFKHSG

SEQ ID NO: 78851 - protein, 276 aa, Unknown
  Bacterial polypetide isolated from the Sargasso Sea
TKVSAAIASGCTMILKPSEISPYCAMLLAEVIDKAGLPKGVFNLVNGYGPIVGAALSEHVNVDMMSITGSTRAGIAVAQASAASVKRVSQELGGKSANIILDSVADLEKSVKGGVGHCFLNSGQSCNAPTRLLVSEKNYEKAVEVAVEVANSTTVGDPNGEYRIGPISNRTQYEKIIRMIEIGIEEGAKLVAGGIDKPDGYEKGFYVKPTVFADVTNDMTIAQEEIFGPVLCIIKYNTEDEAINIANDSEYGLAGYVQGELSHAQEVEEKLEQGKL

SEQ ID NO: 78852 - protein, 192 aa, Unknown
  Bacterial polypetide isolated from the Sargasso Sea
MGIYLKDINLKGKTAVVTGATKGIGRATAIALHQIGAKVIAFGRNESELIDLKKKLKKKITYYRCDMNDYEKLKEIIYSQKRIDVLVNNAGTNLPEKFLNVKQTSLDHLLNVNTKAAFNMAKLCTDKMIKLKNRKKVGGSIVNISSMFGIVGGPDRTVYSMTKFGIEGLTKGMSIDLASKNIRVNCVAPYVC

SEQ ID NO: 78853 - protein, 248 aa, Unknown
  Bacterial polypetide isolated from the Sargasso Sea
RAGKLITKNAAETIKRVCLELGGKGGNIVFADSYPNAVRDGIKNVMSNSGQSCDAPTRMLVEKSIYERAVSEAVDEANKIKVDIASKKGDHIGPVVSKVQYDKIINLIKDGVNEGATLAAGGPEMPNGLNKGYFIKPTIFTDVTNDMQIAKKEIFGPVLSIIPFETEEEAIRVTNDTEYGLGNYLQTEDKEKAKRVSKKLRSGIVYINGNSPDSGTPFGGFKQSGNGREGGSWGLEEYLEVKTITGWK

SEQ ID NO: 78854 - protein, 272 aa, Unknown
  Bacterial polypetide isolated from the Sargasso Sea
GNAFILKPSERDPSVPVELAKLMMKAGLPAGVLNVVHGNKEVVDGILDHQTIKAVSFVGSSDIANYVYERGARAGKRVQAMGGAKNHGIVMPDADLDQVVTDLVGAAYGSAGERCMALPVVVPVGDETAEKLKAKLIPAIKDIMVSHSEDPNAHYGPVVTAAHKERVEGYIDLCIEEGAELVYDGRTSQIPDDSQGYFIGPTFFDHVTKDMRSYQEEIFGPVLQMVRAKDFNEAVNLASDHQYGNGVAMYTRNGHAAREFAQRVNVGMVGIN

SEQ ID NO: 78855 - protein, 295 aa, Unknown
  Bacterial polypetide isolated from the Sargasso Sea
MAFDASIDTDKKVITVDPLIDFDYSETIYLSIGDFEDFGGNTLTSNPSTMFNVIANVKPVAIAQDVTLNEDSKISIELKGTDSENAPLAYVFSLPRFGELAGDVPNIVYTPMANFFGPDSFRFIVNDGFDNSDSSFIKINVQPINDSPKLQLINLDTLKINQVSNEGYLFPKNNNQNSTEILSISDVDNDKIAKTIIKIEPFISGEDTLFIENGNIYPNIKSDGSGKVFTFTTPDLIGANHSYSLSLIKYKNLLGKDLTKGTRAILGFVSDGDSLSNSLSRIINLNIVNSIPEVL

SEQ ID NO: 78856 - protein, 238 aa, Unknown
  Bacterial polypetide isolated from the Sargasso Sea
NYPLAMIGRSLSCSFATGNSTIIKTAELTPLSATIFAKAINNAEVPKGLINIICGYGNEAGSYLVSHEDVNHVVFTGSVATGKKILHACADKAIPAVVELGGKSAGIVYPDADLNDVLDSAKSGIFGVAGQICTAMSRLVVHKSIKDELVDKLVDLSKSLKIGPGIDKDTDLTPVISENQLQKVEGYARSGIQEGAEAAHGGKRVDREGYFMEPTVLNNVKQDMTVAREEIFGPVLSV

SEQ ID NO: 78857 - protein, 274 aa, Unknown
  Bacterial polypetide isolated from the Sargasso Sea
LSARKTLKKSSWRRLSVEKRIEILESCRKLILDNIEELARLECLGTGLILREIKGFHIHRAAYNFRFFAQYISQAHGERYDNTEGYITLVNREPAGVVGLIAPWNAPLALATMKIASAIAFGNCAILKPSEQTPFSLIKLASLLQDVLPEGVLNLVNGRGPITGSSLVSHPEVDRISFTGGTVTGREVMMDAGKQLTPCTMELGGKSANIIFASADYQRAIDGALIGIFSNNGQQCLAGSRILIEEKIFNQFVEEFEERTKKIVVGDPLNDETE

SEQ ID NO: 78858 - protein, 238 aa, Unknown
  Bacterial polypetide isolated from the Sargasso Sea
KYLKKTVLELGGNDPYIILDDADLDNAIEACISGRILNTGQSCISAKRLIVTKSLYHDFLKKLKVKLAKMIMGDPMDNVDIGPMVSINARDEIHDQVTRSIYSGAKLELGGKVPDLKGCFYPVTLLSNVKPGMAAFDEEIFGPVFSVIMAEDEEEAINLGNNTQFGLGAAIFTENIKKAEEIARSSLNAGLCFVNDFVKSDPRLPFGGVKESGYGRELSSYGLMEFVNIKTVVVNHDY

SEQ ID NO: 78859 - protein, 263 aa, Unknown
  Bacterial polypetide isolated from the Sargasso Sea
GPETAKHIVKNSAENLSQVSLELGGKSPVVVFDDADQENALNGITAGIFGASGQSCIAGSRLYLQSTIYDKFLEKLISKAEKIRLGGPMEKDTQMGPLNSFKQLENIEKNIKNTIEQGGKIRCGGKRSSVSNKGYYFPATIIECENHNLPVAENELFGPILSVMKFDKEEEVIEKMNDNKYGLSSGVYTSNFARGLRVSKAIRAGIVFINTYRLISPMAPFGGIKDSGYGKEAGIESIKEYTRIKTTWYNSSDKPMSDPFTMG

SEQ ID NO: 78860 - protein, 235 aa, Unknown
  Bacterial polypetide isolated from the Sargasso Sea
PCHLELGGKSAAIIFPDANIDQAVESTINGIFKPNAGQICVAMSRVIIHPEVKNEYLKKLINKTEDLKIGPGDDKNSDVTPLISREQLKRVSNYCYSGIQSGANLAFGGNEFIHKKGNYFSPTIFDNVDKNSTIAQDEIFGPVTVVLDFESDEEAIDIINSTDYGLASGIFTSNDQKAKWVADRIEAGIVWHNDWFVDGVNLPGGGYKKSGYGRDGGLDSLYSYGQTKRVSRRLF

SEQ ID NO: 78861 - protein, 433 aa, Unknown
  Bacterial polypetide isolated from the Sargasso Sea
MIEKKNFYINGSWVTPKNEKDIQVINPATEKSCAVISLGGKEDIHDAVLAAKEAFKTWGYSSKQERIELLEKFYVLYKKRWNDITEAIIQEMGAPKDFASKLQTGTGASHTKSFIRYLKEFEFEKPLGDHAKNQRLIYEPKGVCALITPWNWPINQVTLKVIPALASGCTMILKPSELAPLSAMIIAELIDEAKFPKGVFNLVNGDGATTGDALTSHPDVNMISFTGSTRAGALISQNAAKDFKRVSLELGGKGANIIFKDADTEAIERGAFRCFRNSGQSCNAPTRMLVEKPIYDDAIERLKKYANEFKVDDPNKEGEHIGPVISEVQFDKIQGLIQKGIDEGAKLIAGGPGKPEGLKDGYYVKPTVFADVNNDMEIARTEIFGPVLSVIPFETEEEAIQIANDTDYGLQIIFKLKIMIKYKGLRENLDLEW

SEQ ID NO: 78862 - protein, 433 aa, Unknown
  Bacterial polypetide isolated from the Sargasso Sea
MELRNFIDGKFIDSLSKKNIPVLNPANQKIVGNIDEALDEEIDLAFKAAKKAFDKRILVDMDAKDKSNMMRAIAKKLRERKEEGGKLLSQENGKTIKQCIDEFKGAADTFDFYAGLTDKIENKLIPSGNDTLNYVVLEPFGVALQIVPWNYPVSIFSGMVAQNWIVGNTIVIKPPELCPISSNFYGQIFKDVGVPDGIINIVHGYGETTGRKLVQHPGSDYIVFTGSPEVASEILKETADRIIPTHFELGGKSAAIIYPDADIDKAVDSTLRGVFKPNAGQICVAMSRVLLHPKIKDEYMTKLVGKTQKLKVGAGDEDGTEVTPLISTNQMQRVSNYVKSGVQSGATLTMGGDKADRDDGNFYQPTIFDNVKIDSTIAQEEIFGPVTSIFDFEDEEEAISIANSTKYGLASGVFTADDQKARWTADRIQAGII

SEQ ID NO: 78863 - protein, 277 aa, Unknown
  Bacterial polypetide isolated from the Sargasso Sea
MNNFSGKNVLITGASSGIGLAMAKDFANRGANLILTARSEDKLMQLAEDLSDKNIKTHVFIEDISLPNSAQKLFNQVNEAGLKVDVLVNNAGYGRWGNFDECPIEDYENMVHLNVTSLTELSYLFVDQMVKRGSGGIINVASTAAFFPIPYSAVYAATKAYVLSLSEALNFEYSKKGVHVMAVCPGATESKFINVATENSERLKQRLINVDRAKNKLTTSKIQTAEDCSKEALDAYLKGKIYVITGQNNRNLYTMSRFFSRKTNLNWSGKIFKKIAG

SEQ ID NO: 78864 - protein, 333 aa, Unknown
  Bacterial polypetide isolated from the Sargasso Sea
MEKYQHYINGKWTDGSSKETINVVNPANGKDIGQVVCAKNDDVNAAVEAALNSYKSRVLVDMLPMERAKLMRSIANELRAVSKEGGKLLCHENGKLLANAEYEFVDGANYFDYYSGMTDKLEGSTIPVNNKVVDYTLLEPYGVSGHIIPWNFPISMLARSLACAFAAGNSTVIKTAELTPLATASFFAKAIDNAGVPPGLINVICGHGNEAGAELTAHKDVGQITFTGSVATGKKILHAAADRAVPAVVELGGKSAAIVYPDADLDKVVASAKAGIFGQAGQICSAMSRVVAHKSIKNELVEKLANLASTIKVGPGDVEGKELTPVISEEQVQ

SEQ ID NO: 78865 - protein, 144 aa, Unknown
  Bacterial polypetide isolated from the Sargasso Sea
DDSVGYFIQPTIILTKNPTYRTMCEEIFGPVLTIYLYDPSDWKKTLELVDSTSPYALTGCVMANDKQAIAEASNALTHAAGNFYINDKPTGAVVGQQPFGGSRASGTNDKAGSMFNLARWVSQRTVKENFDPPTDYRYPFLEEN

SEQ ID NO: 78866 - protein, 478 aa, Unknown
  Bacterial polypetide isolated from the Sargasso Sea
MEVRNFINGNFVDSFSKHNIRVVNPANQTDVGFIDEALDDEIEFAFDAASQAYQKRVLQDMTSSKKSFYLRSIAEKLRHYKSYGSQILSKENGKTLLQCEGEFEGAASVFEYYAGITDKIEFKMIPSGDNTFNYVVLEPYGVSLQIIPWNYPISLFARSVAVSLVVGNTIVIKPPELCPISSNIFGMIFKEIDLPPGLVNIVHGYGEVTGKKLVKNKNVNQIVFTGSTEVASEIIKETADRIIPCHLELGGKSAAIIFPDANIDQAVSSTINGIFRPNAGQICVAMSRVIIHPKVKNEYLNKLKTKTEELKIGPGSNKDSDVTPLISKEQLQRVLNYCKSGIQSGANLITGGNEYNLKQGNYFQPTIFENVDKNTTIAQEEIFGPVTTILDFQSDEEALDIINCSEYGLASGIFTTNDVKAKWIADRIEAGIVWHNDWFVDGVNLPGGGYKKSGYGRDGGLDSLYSYGQTKRVSKRLY

SEQ ID NO: 78867 - protein, 468 aa, Unknown
  Bacterial polypetide isolated from the Sargasso Sea
MNLIQHFIDGKVFTGSSNKKGKIFNPATGKQESEVILGSKSDLDLAVEKAKTAFETWSNVPAIQRARIIFKFKELIEKNSDELTKLIVAEHGKVYEDAKGSLTRGLEVVEFACGIPQMLKGEFTENVGTDIDSWSTRQPLGVCAGITPFNFPAMVPMWMFPMAIACGNTFILKPSEKDPSCAMKLAHLFKEAGLPDGVFNIVNGDKEVVDAILENKNIPAVSFVGSTPIAKYIYENAAKNEKRVQALGGAKNHCVVMPDCDLDQAVNGLMGAAYGSAGERCMAQSVAVAVGNIGDDLVEQISKKVENLKVGPGMDKTSEMGPLVTKEHLERVKGYVDLGVKEGAKLVVDGRDIKLQGYENGYYIGGCLFDHVKKDMKIYKEEIFGPVLSVVRVDNFDEALQLINDHEFGNGTSIYTRDGDAGRTFASKIKVGMVGINIPIPVPVAYHSFGGWKRSLFGDQHMHGPEGV

SEQ ID NO: 78868 - protein, 253 aa, Unknown
  Bacterial polypetide isolated from the Sargasso Sea
MESTKKKLAIVTGAARGIGLATAKLFSQNDYKVAIVDRDKNELSNLSLANNLMKSFCYDISDFNNVDMMYQEILEWHDRVDVLVNNAGVADFGSIETTDFKRWNEVMKTNLDGAFMCSQKAINYLKLTKGSIINIASISGLRASTLRVAYGTSKAAIIQLTKQQAAELGEYGIRVNCVAPGPVKTKLAMAVHTQDIIDAYHDAIPLNRYGTENEIANAIYFLASEKASYITGQILAVDGGFEATGVGLPSLRK

SEQ ID NO: 78869 - protein, 650 aa, Unknown
  Bacterial polypetide isolated from the Sargasso Sea
MKTTQQYKSLLSPFKINKLEFKNRILLAPMGDNLCNKDGSISKKQEGYFLARAKGGCAGIILGSVGVSRPAGQATPLELSLASDSLIKKYKKFVNLMHKNDCKVIAQIKHGGSKAAYAASIGVPFLVPSLKEMSSKDIEHGKSMVEKLTPEEMNAFVSNLKGAGNFKVMDLDDIKKVVEQFKDAAERAFKAGIDGIEIHAGHGYIISSFLSKATNLRTDEYGGSLKNRMRLLDEIIDAIRTKVPRNFPIIVRLDGEEINIKNGLTSSEVCKIAKHIESKIDAIHVSSYANPTSGPDFTKAPLNHKKEGFIKVTNLIKNIVKIPIIAVGRIEPEKAEKYISEGKFNFLAMGRKLLADPNLPNKLKNNEQDKIKPCQYSYECVSRIFLNGQMVCVSDVGLGKKDKNYSKKNLIIIGAGPAGLELSLQAAKRNINVSIYEKQEFIGGNLIGASLIYEPYRKLLNYYQASIKNKLIDVHLNKEIILDDIEKKFSDCQNVVIASGGVPSSSIPNAINVQSWLNPFIENNGGEIDSIKLDLKKEKYGNCAIFGTDTIQLHLASFLSSIGVNVSLVRSNKTIGSSMPVVLRWRILDELANQVPVIYEEDYLSRKFDITLDATFESKPNLKKLESIGDSKHGLAYLPQTAKDAVGYFK

SEQ ID NO: 78870 - protein, 485 aa, Unknown
  Bacterial polypetide isolated from the Sargasso Sea
MYINGEWVDSSCGKKIETLNPETNEVWASVPEANEQDVDLAVSSAQKAFDSSWSNLHPRERAKYLRRIANELRHNAEHLGKIETIDTGKLFRETKTQANYIAEYYDYFAGLADKVEGTVIPIDKEDMQVTTTRVPIGVVAAIIPWNSQMLLTAVKLAPALAMGNTVVIKASELAPVTLLEFAKIIEKTEIPKGVVNIITGLGDPCGKALTKHNLIERIAFTGGPETARHIIKNSSNNLSQVSLELGGKSPVAVFDDADQENALNGITAGIFGASGQSCIAGSRLYIQSNIYEEFLNKLVEKAKNIKLGPPMSEETQMGPLNSLKQLELIEKNINATESQGGKIRCGGKRSNFSNKGYYFPATIIECDNHNLPSAENELFGPILSVMKFEKEEELISLMNDNKYGLSSGVYTKDLGRGMRVSKAIRAGIVFVNTYRLISPMAPFGGMKDSGYGKEAGQESIKEYTRVKTTWFNASQKPMSDPFTMG

SEQ ID NO: 78871 - protein, 308 aa, Unknown
  Bacterial polypetide isolated from the Sargasso Sea
MPKIQNFKMYINGEWVDSSSGKKIQTLNPENNEVWATVPEANEKDVDKAVQSAQNAFENSWSILHPRDRAKYLRLIADQLRENAEHLGKVETIDTGKIYRETKTQANYIAEYYDYFAGLADKVEGTVVPIDKPEMQVTTTRIPIGVVAAIIPWNSQMLLTAVKLAPALAMGNTVVIKASELAPVTLLEFAKLIEKTGIPKGVINIITGLGEPCGKALTTHNLVERIAFTGGPETAKHIVKNSAENLSQVSLELGGKSPVVVFDDADQENALNGITAGIFGASGQSCIAGSRLYLQYKIYNEFLDKLNN

SEQ ID NO: 78872 - protein, 489 aa, Unknown
  Bacterial polypetide isolated from the Sargasso Sea
MQQFKNYINGEFTESKSGKSFKSVDPSTEKEFAEISLAEEYEVNSAVEAAHNAFYGEWSKIFPSKRANYLRAIGDQLKEKAELLGTIETKDTGKLFKETRFQANYIAEYYYYYAGLVDKIEGSTLPIDKEDMHVFTTRVPVGVVAAIIPWNSQMFLTAVKLAPALAMGNTIIIKASEIAPTPLLEFAKIIDKVGIPKGVVNIITGFADTCSKLLTSHPKINKIAFTGGVHTAKHIVRNSAENLSQISLELGGKSPVVVFKDARKDNAINGIMASIFGASGQSCIAGSRLYLQEDIYNEYLEELKSRVEGIKIGDPLSTTTQLGPLATLTQLQNIEEKIKQTIEQGGKIITGGNKVSEFKHGYYFEPTIIECANHNLPVAENELFGPVLSVMRFKDEENAIKLMNDNSFGLAAGIFTENNGIAMRVSKAVQAGIVFVNTYRLISPVAPFGGFKNSGYGRESGLEVMKDYSNTKTTWISTSIEPLSDPLTS

SEQ ID NO: 78873 - protein, 374 aa, Unknown
  Bacterial polypetide isolated from the Sargasso Sea
MKIKAAVLRQSGLPRPYTESKPLSIEEVELDPPKSNEVMIKVKAVGLCHSDLVAISGERGKPMPIVLGHEAAGIITEIGNNVEGFEIGDHVVPSYVASCGLCEMCSSGRPALCEPATVANAKAVLRDGTTRLSQKGKSIHHHSGVAGFAEYSVLSKEALVKIDKSIPFEQAALFGCGVVTGVGSVINTADAKAGQFIGVVGLGGVGLSAVLASLALGAGKVIAIDLSEEKLEFAKELGVHHTVNAADGDAVDQVHKITNGGVHVAVETAGSGRALQTAYEITRRGGTTVAAGMPGPEAEINLSHLKIAAEERCLRGSYMGSCVAKRDIPRYLNMFQTGVLPVDKLMSRKINFSDLNEAMDRLDDAKTIREVLIP

SEQ ID NO: 78874 - protein, 284 aa, Unknown
  Bacterial polypetide isolated from the Sargasso Sea
TRWIFNLVNGMGPVVGASMSEHKDIDMMHFTGSTRAGVAVAQASASTVKRVAQELGGKSANIVLDDADIEKAVSAGVSSCFLNTGQSCNAPTRMLVSSKNYEKAVEVAINTANAMKVGDPFDADTKMGPISNKTQYEKVQRMIQIGIDEGATLSAGGVGLPDGCERGYYVKPTIFSDVTNDMTIAREEIFGPVLCLIKYETEEEAIEIANDTPYGLAGYVQGEQAHAVEVASKIRAGQVTINKGARVRSAPFGGYGSSGNGREHGTHGLEECLETKAVIGALVE

SEQ ID NO: 78875 - protein, 190 aa, Unknown
  Bacterial polypetide isolated from the Sargasso Sea
MLVQRSIYDRAVKEAVDEANKIKVDVASKKGDHIGPLVSKVQYDKVVNLINEGIKEGATLAAGGPDLPNGLNKGYFVKPTIFTDVNNDMKIAREEIFGPVLSIIPFDTEEEAIKITNDTSYGLGNYLQTEDKEKAKRVARKVRAGTVYINGQGAETGAPFGGFKQSGNGREGGLWGFTEYLEVKAITGWN

SEQ ID NO: 78876 - protein, 277 aa, Unknown
  Bacterial polypetide isolated from the Sargasso Sea
MDNFSGKNVLITGASSGIGLAMAKDFANRGANLILTARSEDKLMQLAKDLSGKGIKTHVFIEDISLPNSAQKLFNQVNAAELEVDVLVNNAGYGRWGNFDECPMEDYENMVHLNVTSLTELSYLFVDQMVKRGSGGIINVASTAAFFPIPYSAVYAATKAYVLSLSEALNFEYSKKGVHVMAVCPGATESKFINVATENSERLKQRLINVDRVKNKLTTSKIQTAEDCSKEALDAYLKGKIYVITGQNNRNLYTMSRFFSRKTSLNWSGKVFKKIAG

SEQ ID NO: 78877 - protein, 134 aa, Unknown
  Bacterial polypetide isolated from the Sargasso Sea
GANLVAGGLNRPAGLNRGYFVKPTIFSDVNNNMKIAREEIFGPVVSIIPFDTEEEAISITNDTDYGLTNYVQTQDKEKAKRVAKNLRSGGVEINGFGVSGGTPFGGFKQSGNGREGGKWGLEEYLEVKAISGWK

SEQ ID NO: 78878 - protein, 414 aa, Unknown
  Bacterial polypetide isolated from the Sargasso Sea
MRKTLLASAALLALGCSGYAMANPCSSNASSTCSQKADDGSNTLSNSVSSSQTSTTGSNANEVSPGASVYQDSYNSTKIVAISKLDGYVSNVQVWGIGNNATNSGSAAGGSGGKGGNGYGYGGAGGNGGSGGAGGGGGKGGSAHNGSATAGNASNGSATAGTGNGGSGGTGGSPDASGGAGGKATASGGYGSGKGGGAIAASVGVGGSGSGTGTGWGGGGGTADAGSAWAKNHGSGSASASAGSGTGTGTGTGSGSGSGTGGAGSAGASTASGGSGSGTGGSGAAAGGTGGAATAAAGNGGAGGAGTGGGATNGGATTTASNGSATAGSGAVGAMGGAGGAGGTGNGGVGNGAVGGAGGAGGANTVNAGTFNMSNAMASVGQTAAGIMVANQNSGMASLVQQAVTVQANLSVGR

SEQ ID NO: 78879 - protein, 235 aa, Unknown
  Bacterial polypetide isolated from the Sargasso Sea
GPLELGGKSPQIVFADADLDAALPVLVSAIVQNAGQTCSAGSRVLIDRAIYEPLLDRLSGAFHALRVGPSHADLDCGPLINAKQQQRVWDFLSDAQHDGIPMAAHGEVIPEAPESGFYQAPTLLRDVPASHRLARDEVFGPVLAAMSFSDEDEALSLANGTQYGLVAGIWTRDGARQMRLARRLRSGQVFINNYGAGGGVELPFGGVKHSGHGREKGFEALYGFTVLKTIAIRHG

SEQ ID NO: 78880 - protein, 261 aa, Unknown
  Bacterial polypetide isolated from the Sargasso Sea
MKRFLNKKALVTGGASGIGKAICQRLVEEGADLVFIDRNIDAGKAFEQELSNQESSSFFIATDLTIQAEVEKAFAETKNFLSHIDVLVNNAGDAFAENFGDTTIENWNADLALNLTSHYMLTSLVLPEMEKREKGVVINISSVNGIQALGCPAYSAAKAGLISFTQTVATEYGPKGIRCNVVLPGTVETPVWKNRVEARPDVFEKVKSWYPVGRIGRPEDIAAAVAFLSADEAGFVNGASLAVDGGLTAGSFKMIKDMIGK

SEQ ID NO: 78881 - protein, 336 aa, Unknown
  Bacterial polypetide isolated from the Sargasso Sea
AFTAVKLAPALAMGNTVVIKASELAPVTLLEFGKLIEKAGIPKGVINIITGLGEPCGKALTTHNLVERIAFTGGPETAKHIVKNSAENLSQVSLELGGKSPVVVFDDADQENALNGITAGIFGASGQSCIAGSRLYLHKKIYDEFLKKLIDKAEKIKLGSPMEEDAQMGPLNSFKQLENIEKNIKATVEQGGKIRCGGKRSSISNKGYYFPATIIECENHNLPVAENELFGPILSVMKFENEKEVIEKMNDNKYGLSSGVYTSNFARGLRVSKAIRAGIVFINTYRLISPMAPFGGLKDSGYGKEAGIESIKEYTRIKTTWYNSSDKPMSDPFTMG

SEQ ID NO: 78882 - protein, 189 aa, Unknown
  Bacterial polypetide isolated from the Sargasso Sea
SLIDLVVFGRAAAKRAAELVKPGTPHEEISDAETDKCLERFEKLRNGNGSNRTADLRLSMQKTMQSKCAVFRTEKTLKEGVEEIRKPYEGMDSISVKDKSLIFNTDLVETLEFDNLIRQAIVTLDSAYERKESRGAHAREDHPNRDDNKFMKHTLSWCEGSKTKISYRDVHKSTLSNDVQYFPPQERVY

SEQ ID NO: 78883 - protein, 654 aa, Unknown
  Bacterial polypetide isolated from the Sargasso Sea
GDGSGLTGITASVMKSDDISQGDAAVTISTSSGAVNINPASGSPILLDNTINIDGAIIGHTDDTDLMTLANGSVTFTGSTVIPTADVNGGAIDAVTLGTNSAVTQAVIDNVNINGAEIGHTSDTDLMTLADGSVTFTGSTVIGTVDVNGGAIDAVTLGTNSAVTQAVIDNVNINGSTIGHTDDTDLLTLANGVATVAGEVSLTTLDIGGTDVTATAAELNKLDGVTATTAELNYMDVTTLGTSEASKVVTVDANGDLLVPDSDKYKFGTGSDMQLYHDGTNSFITNATGTMKVATETSGIAVTIGHSTSETTVGDNLTVGGDAAVTGDVTITGNDITFGNGETISNATDGDFLFTTGTQTGALTVKNSNTTDGIASLELVSDNSGDAGDGYELKSLNGTFTVTSDHSTKGTYEDTYITIVGNSTPASSSTTIAGDLTISGDDLTMGTNTSGAALIGDGTNYNPVVISGDLSIGANGVAAIGSGVIVNADINATAAIADSKLATITTADKVSGAALQVDGATSGTGITIADDDKFLVDDGGTTKYVNASQVLSYASATSSTDINGGTIDGVTLGTNSAVTQAVIDDINLNGATIGHTDDTDLLTLADGSVTFTGSTVIPTADVNGGAIDAVTLGTNSAVTQAVIDNVNIDGAVIG

SEQ ID NO: 78884 - protein, 424 aa, Unknown
  Bacterial polypetide isolated from the Sargasso Sea
TITTTGSVLPASVDGAGLGSSSAEFSDVYLADGAVINLGNNQDVTLTHIDDEGIRLNSVNQLQFGDSGTKISQSADGVLDLVSDNEVEINGTTIDINGNVELENATIDYVKIDGTYIGHADDTDLMTLANGTLTVSGTLAATTLIGDGSNLTGISASSIMADDISQGNAAVTIGTSSGAININPAAGSPILLDNTINVDGSLIGHADDTDLMTLANGSVTFTGSTVIPTADVNGGAIDAVTLGTNSAVTQAVIDNVNIDGAVIGHTSDTDLMTLADGSVTFTGSTVIPTADVNGGAIDAVTLGTNSAVTQAVVDDINLNGATIGHTDDTDLMTLADGSVTFTGSTVIPTADVNGGAIDAVTLGTNSAVTQAVVDDINLNGATIGHTDDTDLMTLADGSVTFTGSTVIPTADVNGGAIDAVTLGT

SEQ ID NO: 78885 - protein, 252 aa, Unknown
  Bacterial polypetide isolated from the Sargasso Sea
MGNSFARYPSLCGKNILITGGASGIGKELVKGFAEQGSNVAFLDLNDKAGERLSLDTGENVFFQKCDLKKVDNLKSSIEKLRAKIGLFDVLVNNAAHDDRHNWQEVTEAYWDERFATNLRHQFFTIQSVAKDMIQKGGGSIVNIGSNSWMEAVGNFPAYATAKSAVHGLSRTLARDLGQHRIRVNTVVPGWIMTDRQKELWVTPEGLENQYKRQCLPDLIEPVYVARMVLFLASDDAAMCTANNYMVEAGSI

SEQ ID NO: 78886 - protein, 214 aa, Unknown
  Bacterial polypetide isolated from the Sargasso Sea
MSRAYLPKSKWAEIHEKLVSEIETIDVGPPEDFKNFVNAVIDETAFDKIASYLDFAKSSNDCEVLCGGGYDKSKGYFVEPTVILAKDPHFKTLEEEIFGPVLTIFVYENENWDKTLELIDNTSPYALTGCVFSEDRDIVDEVRSKLRFSAGNFYINDKPTGAVVGQQPFGGSRASGTNDKGGSMLNLLRWTSPRTIKETFEPPHNYRYPFMDEE

SEQ ID NO: 78887 - protein, 287 aa, Unknown
  Bacterial polypetide isolated from the Sargasso Sea
MGFADTCSKLLTSHPKINKIAFTGGVHTAKHIVRNSAENLSQISLELGGKSPVVIFKDARKDNAINGIMASIFGASGQSCIAGSRLYLQEDIYNEYLDELKSRVEGIKIGDPLSTTTQLGPLATLTQLQNIEEKIKQTIEQGGKIITGGNKVSEFKHGYYFEPTIIECANHNLPVAENELFGPVLSVMRFKDEENAIKLMNDNSFGLAAGIFTENNGIAMRVSKAVQAGIVFVNTYRLISPVAPFGGFKNSGYGRESGLEVMKDYSNTKTTWISTSTEPLSDPFNIR

SEQ ID NO: 78888 - protein, 262 aa, Unknown
  Bacterial polypetide isolated from the Sargasso Sea
SGCDYIVFTGSPEVASEILKETADRIIPTHFELGGKSAAIIYPDADIDKAVDSTVKGIFKPNAGQICVAMSRVIVHPKIKDEYMTKLVAKTQKLKVGAGDEDGTQVTPLISTDQMQRVSNYVKSGIQSGATLTLGGDKADRDDGNFYQPTIFDNVNVEATIAQEEIFGPVTSIFDFEDEEEAINIANSTKYGLASGVFTADDQKAKWTADRIQAGIIWHNDWFVDGKNLPGGGYKRSGYGRDGGVDGVYSHGQTKRISKRLY

SEQ ID NO: 78889 - protein, 280 aa, Unknown
  Bacterial polypetide isolated from the Sargasso Sea
DHVYLKLDHLGPEIVHKRLPGITELSKTFAHVDPVEHPIPVVPTCHYAMGGIPTNVHGQVLTQATDGTDNVVHGLYAAGEAACVSVHGGNRLGGNSLLDLIVFGRSAGLHIENALKDGITLSKATNDDIDQALVNLNRVNISSTGEDVATVKAELQKNMQLNFGVFRTGDLMEKGLVELENIREKTQNIHLTDKSSRFNTARVEALELLNLIEVAQATAVCANERKESRGAHARDDFQERDDENWLKHSIYFADTKEVTKRDVNFRPKTVQAFQPIVRSY

SEQ ID NO: 78890 - protein, 480 aa, Unknown
  Bacterial polypetide isolated from the Sargasso Sea
MSDNYNIQNYINGSFSVSVNTEEIKNINPSDSNIINSFKETSIEDVESAIDVAKKSQSKWSKTPAIERASYLKKIAEGIRKNEDEFVRIIVEEQGKIKDLAKGEVQGAANYLDYTAEWARRIEGEIVTSDSPDENIFIFKIPMGVVSGILPWNFPFFLIVRKLAPALVTGNTIVIKASEETSNNAYMFSKLLDEAGVPKGVVNFVYGRGQTVGKLLSSSKKIDMISFTGSVETGSAIMTEAAKNITKVNLELGGKAPALVLADADIDLAVSKIRDARVINSGQVCNCVERVYVDKKIADEFTEKLTKAMQNTKFGNPNTKTDIDYGPLINEDGSKKVSELVNSAKGSGAEILTGGNRDESSEGIYYHPTVIANCKQDMRIIQEEIFGPVLPLVEFEDLDQAIEYANDSDYGLTSSIFTNNLKTALKACNEIRFGETMINRDNMEIFQSFHAGLRKSGIGGADGKHGLYEYMQTHAVYMRA

SEQ ID NO: 78891 - protein, 451 aa, Unknown
  Bacterial polypetide isolated from the Sargasso Sea
MLQKKNFYINGAWVKPKKENNIEVINPATEKSCAVISLGGKEDINDAVLAAKEAFRTWGFSTKEERVALLENFYELYKKRWNDITDAIILEMGAPKDFASKLQTGTGASHTKSFIKYLKEFEFEKTLGDHAKNQRILYEPKGVCALITPWNWPMNQVCLKVIPALSAGCTMILKPSELAPLSSMILAELIDEAKFPKGVFNLVNGDGAVTGDALTSHPDVNMISFTGSTRAGALISQNAAKDFKRVSLELGGKGANIIFKDADAEAIERGALRCFRNSGQSCNAPTRMLVEKPIYDEAIERLKKYATNFKVDDPNKEGDHIGPVISETQFNKIQNLIQKGIDEGAKLVAGGPGKPDGIKEGYYVKPTVFADVNNNMKIARTEIFGPVLSVIPFETEEEAIQITNDTDYGLTNYIQTQDNNKVQRVARKLRSGMVDVNGAGIAVDAPFGGFK

SEQ ID NO: 78892 - protein, 485 aa, Unknown
  Bacterial polypetide isolated from the Sargasso Sea
MRIEHLINGKSSAAKDYFETVNPATQEVLAEVASGGAQEVDAAVRAAKEAFPAWAGKPATERAKAIRKLGELIAKNVPEISETETKDTGQTISQTRKQLVPRAADNFTYFAEMCTRVDGHTYPTDTHLNYTLFHPVGVCALISPWNVPFMTATWKVAPCLAFGNTAVLKMSELSPLTASMLGNLALEAGIPAGVLNVVHGFGKETGEPLVAHPDVHAVSFTGSTATGNRIVQTAGLKKFSMELGGKSPFVIFDDADFERALDAAVFMIFSNNGERCTAGSRILVQRSIYARFAERFVERAKRLTVGDPLADSTIVGPMISQGHLAKVRSYIELGPKEGATLACGGLDAPDLPQAMRKGNFVQPTVFVDVDNRMRIAQEEIFGPVACLIPFDDEADAIRLANDISYGLSSYIWTESTGRALRVAAAVQAGMCFVNSQNVRDLRQPFGGTKASGVGREGGTWSYEVFLEPKNVCVSLGSHHIPHWGA

SEQ ID NO: 78893 - protein, 478 aa, Unknown
  Bacterial polypetide isolated from the Sargasso Sea
MELRNFIDGKFVDSLSKKNIPVLNPANQKIVGNIDEALDQEIDLAFEAAKKAFDKRILVDMDSKDKSNMMRAIAQKLRERKDEGGKLLSQENGKTIKQCVDEFKGAADTFDFYAGLTDKIENKLIPSGHDTLNYVVLEPFGVALQIVPWNYPVSIFSGMVAQNWIVGNTIVIKPPELCPISSNFYGQIFEDVGVPKGIINIVHGYGETTGRKLVQHPGSDYIVFTGSPEVASEILKETADRIVPTHFELGGKSAAIIYPDADIDKAVDSTVKGIFKPNAGQICVAMSRVIVHPKIKDEYMTKLVAKTQKLKIGAGDEEGTEVTPLISTDQMQRVSNYVKSGVQSGATLTIGGDKAERDDGNFYQPTIFDNVKVDATIAQEEIFGPVTSIFDFEDEEEAISIANSTKYGLASGVFTSDDQKAKWTADRIQAGIIWQNDWFVDGNNLPGGGYKRSGYGRDGGVDGVYSHGQTKRISKRLY

SEQ ID NO: 78894 - protein, 490 aa, Unknown
  Bacterial polypetide isolated from the Sargasso Sea
MQKFKNYINGEFVNSKSGSSFKSIDPSNEKVFAEINLAEEFEVDSAVEAAYKAFHGEWSKILPSKRAQYLRAIGDQLKDKAELLGTIETKDTGKLFKETKFQANYIAEYYYYYAGLVDKIEGSTLPIDKEDMHVFTTRVPVGVIAAIIPWNSQMFLTAVKLAPALAMGNTIVIKASEIAPTPLLEFAKIIDKVGLPKGVVNIITGYADTCSKILTSHPKINKIAFTGGVHTAKHIVKNSAENLSQVSLELGGKSPVVVFNDARKDNAINGIMASIFGAGGQSCIAGSRLYLQKNIYEEYIEELKTKAEAIKIGDPMSTTTQLGPLATLNQLQNIEDKIKQTLEQGGRIITGGNRVNDFKNGFYFEPTIIACDHHSLPAAENELFGPVLSVMKFTDEDEAIKLMNDNTFGLAAGIFTENNGIAMRVSKAVQAGVVFVNTYRLISPMAPFGGFKNSGYGRESGIEVMKDYSNIKTTWISTSKEPLSDPFNLR

SEQ ID NO: 78895 - protein, 490 aa, Unknown
  Bacterial polypetide isolated from the Sargasso Sea
MQQFKNYINGEFTESKSGKSFKSVDPSTEKEFAEISLAEEYEVNAAVESAHNAFYGEWSKIFPSKRANYLRAIGDQLKEKAELLGTIETKDTGKLFKETRFQANYIAEYYYYYAGLVDKIEGSTLPIDKEDMHVFTTRVPVGVVAAIIPWNSQMFLTAVKLAPALAMGNTIIIKASEIAPTPLLEFAKIIDKVGIPKGVVNIITGFADTCSKLLTSHPKINKIAFTGGVHTAKHIVRNSAENLSQISLELGGKSPVVVFKDARKNNAINGIMASIFGAGGQSCIAGSRLYLQEEIYDEYLEELKNRVEEIKIGDPLSTTTQLGPLATLNQLQNIEEKIKQTKELGGKIITGGNKVDKFKNGYYFEPTIIECANHNLPVAENELFGPVLSVMKFKDEENAIKLMNDNSFGLAAGIFTENNGIAMRVSKAVQAGIVFVNTYRLISPIAPFGGFKNSGYGRESGLEVMKDYSNTKTTWINTSTKEIDDPFIIR

SEQ ID NO: 78896 - protein, 472 aa, Unknown
  Bacterial polypetide isolated from the Sargasso Sea
MTLPVLINNQWQEGNGPSLSSLNPAMGEVFWQGNAADEAQVASAVEAARAASTGWSRAGFEHRVAIARRFGELLGENKEAMARCIASETGKPFWEALTEVAAMMGKVEISVKAYNERTGQRSTDMPGAKAVLRHKPHGVVAVFGPYNFPGHLPNGHIVPALIAGNTVVFKPSEQTPAVAGKTAELWLEAGLPAGVLNLVQGARETGIALANHPDIDGLFFTGSSPTGEILHRQFAGNPGKILALEMGGNNPLIVDDTVDVTAAVHETIQSAYITSGQRCTCARRLMVPAGEWGDNFLDALARAVEAIQVSGAFDEPAPFMGSVISEAAAQGVLEAQSRLLELGGRALVASQHLKPGTGLLSPGLIDVTSAVNVPDEEIFGPVLQVYRYQDFDEAIRQANNTRFGLSAGLFSESRERFEDFYDRIRAGIVNWNKQLTGASSAAPFGGIGASGNHRASAYYAADYCSYPVAGMR

SEQ ID NO: 78897 - protein, 114 aa, Unknown
  Bacterial polypetide isolated from the Sargasso Sea
RPTVFGNVTPNMTIAREEIFGPVLSILGYDSEDEAVAMANDSLYGLAGYVQSASIEHAYAVAKRLRTGTIYLNYADYSPDAPFGGFKQSGNGREYGEFGLEDFLEIKGVVGYAS

SEQ ID NO: 78898 - protein, 178 aa, Unknown
  Bacterial polypetide isolated from the Sargasso Sea
AAKRAAELVKPGKPHSEIDSVETERCLDRFDKIRNSKGKTKTSELRLSMQKTMQSKCAVFRTEKTLKEGVDAIREPFAGMEDLSIKDQSLLFNTDLVETLEFDNLIRQAMTTMDSAYHRKESRGAHAREDFSKRDDKNFMKHTLAWQRGKEVNVKYRDVHSRTLTNDVQYFPPKERVY

SEQ ID NO: 78899 - protein, 497 aa, Unknown
  Bacterial polypetide isolated from the Sargasso Sea
MNLIQHYVNGKIFPGSSKRSGKVFNPATGSQESEVSLGTKNDLDQAVDIASKAFETWSLKPPIQRARVMFKFKELIEKNSDELTKLIVSEHGKVYEDAKGSLTRGLEIVEFACGIPQMLKGEFTENVGTEIDSWSIRQPLGVCAGITPFNFPAMVPMWMFPMAIACGNTFILKPSEKDPSCSIKLAELFSEAGLPDGVLNVVNGDKEVVDAILTNKKIQAVSFVGSTPIAKYIYENAAKNEKRVQALGGAKNHCVVMPDCDLDQAVNGLMGAAYGSAGERCMAQSVAVAVGKIGDELVGKLSKKVEALKVGPGMDKSSEMGPLVTNEHLEKVKGYVDLGVKEGAKLVVDGRNIKLQGYEKGFFIGGCLFDHVSKDMRIYKEEIFGPVLSVVRAKDFNEAINLINEHEFGNGTSIYTRDGDVGRTFASKIKVGMVGINIPIPVPVAFHSFGGWKRSLFGDQHMHGPEGVRFYTKLKTITSRWPSGVRSNPEFIMPTMK

SEQ ID NO: 78900 - protein, 259 aa, Unknown
  Bacterial polypetide isolated from the Sargasso Sea
MNGFDYSGKTVLVTGGTKGIGRRIAERFLAAGARVFVCGRSAPDTPPSAGGRTAAFVAADLRDIEQVDAMLATIRAAAGGLDVLVNNAGGSPFALAADASPRFTESIVRLNLIAPLQLAQRVNAIMQPQPEGGVMLFIASVSASRPSPGTAAYGAAKAGLVNAVTSLAVEWAPRVRVCAISPSLVQTESATEGHYGDAAALDAIRATIPAGRLATPDDVAAACLFLASPAASYTSGANLRLDGGGERPAFLSAAQAAAR

SEQ ID NO: 78901 - protein, 275 aa, Unknown
  Bacterial polypetide isolated from the Sargasso Sea
MRDRFDFHGKTALVTGASSGIGRAFAYALAKRGARLLLVARSRDKLHDLAAELRRDYACDADFLTVDLSTADAVHTIDCHLKVTGKVVDVLVNNAGFAAYGRFETIPWTRQRDEVLVNCMAAIELTHLLLPGMQARSAGAVINVASTAAFQPDPYMAVYGATKAFLLSFSEAVWAENRHRGIRVVALCPGATQTAFFDVVGAQEAAVGTPMPVASVVEDALWALDRNRSHRIVGTRNRLLANLQRLLSRETSARLVEKILRPRGGQDPVTRETNA

SEQ ID NO: 78902 - protein, 280 aa, Unknown
  Bacterial polypetide isolated from the Sargasso Sea
MSVLDFLHLGSSLSLRSFTRAGSAVSVRGLSRFGSSMSVLDFLHLGSSLSLRSFTRAGSAVSVRGLSRFGSSMSVLDFLHLGSSLSLRSFARVGSSLSVRGGVLSLSVRGLSRFGSSMSVLDFLHLGSSLSLRSFTRAGSAVSVRGLSRFGSSMSVLDFLHLGSSLSLRSFTRAGSAVSVRGLSRFGSSMSVLDFLHLGSSLSLRSFTRAGSAVSVRGLSRFGSSMSVLDFLHLGSSLSLRSFARLGSSLSVAGTTLLGSEVKFDSDNGVNIIGSAASEV

SEQ ID NO: 78903 - protein, 342 aa, Unknown
  Bacterial polypetide isolated from the Sargasso Sea
TDLSTPFSNNLFKQGYQQPYEQTISRPTTYEVTIPRPTTYEQTIPRPTQVQNSRPTNYQTSRPSSYEVTIPRPTNYQTSRPASYEVTIPRPTQVQNSRPASYEVTIPRPTQVQNSRPASYEVTIPRPTQVQNSRPASYEVTIPRPTTYQIQNHRPQQYNYQIQNHRPQQYNYQTQNHRPAQYNYQIQNHRPQQYNYQIQNHRPANYQTTGHSHRPVNNQQTYQVQVYIAANPKFGIAASQTQTPNAQLYWAGISWPQYQPEGPWEPNQVNTQQPYNYQIQNSRPTNYQTTGHATRPQNYQTQGHATRPQNYQTQNHATRPQNYQTQGHATRPQNYQTTGNRP

SEQ ID NO: 78904 - protein, 169 aa, Unknown
  Bacterial polypetide isolated from the Sargasso Sea
MLLVTCFLLLASWLLLLASCFLLLASCFLLCCFLLLVTCFLLLACCFLLLGSCFLVLASCYLLLASCYLLVGSCFLLLASCFLLLSCCFLLLASCFLLLASCFFASWFLLLFTCFLPLASCFLLLITCFLLLASCFLLVASCLLLLASCFLLLASCFLVLASCFVASYF

SEQ ID NO: 78905 - protein, 176 aa, Unknown
  Bacterial polypetide isolated from the Sargasso Sea
NPPKKLNGPITNVSIVAAADNDETHVNATKGCIRQSGLTPFKEYSYYAKFCTIAGCTTSKTAAGKSGEAAPEDQPAPSLERGADGLSVTVTWTPPDVPNGVLTAYRVDYHRQKRSRARRSLLEPNSDSVVTRYRRQDDGGAGAGGAGAGGAGAGAGAGAGGAGAGGAGAGGAGAGA

SEQ ID NO: 78906 - protein, 248 aa, Unknown
  Bacterial polypetide isolated from the Sargasso Sea
MPKIENDPKLDFSSVLIRPKRSELSSRSLVNLNRKITFKHAKIERCDPNHSRAFCEERSWEGVPIVSANMDTTGTFEVYNTLKDHNIVTAIHKFYSVEDFKKANQEYTLNPDLFMVSTGISSTDYNKLITILSVVNCNWICVDIANGYIKQFVEFCRKVRQTYPDKIIVAGNVATREMVEELILNGGVDVVKVGIGPGSACTTRIKTGVGIPQLSAILECSDAAHGAGGRIIADGGITCPGDMAKAFG

SEQ ID NO: 78907 - protein, 1041 aa, Unknown
  Bacterial polypetide isolated from the Sargasso Sea
MGHNLKLTGVALSVATVFGVLASGSAMAGALDALPIPQVIVNPPTNSVSVGLVATGTSPLGSVTVAAGGAGAIQTSLGDPGQVLSGAVGAVTGALGGGGGTVQPLAPVQGVLNQVTGALGGGNPAGALTGALNTATGTLSNAVGTVTGALGGIGGGSNPLAPVQGVVNQVTGALGGGNPAGALTGALGTVTGALGGIGGGSDPLAPVQGVVNQVTGALGGGNPAGALTGALGTVTGALGGIGGGSNPLAPVQGVVNQVTGALGSGNPAGALTGALGTVTGALGGIGGGSNPLAPVQGVVNQVTGALGSGNPAGALTGALGTVTGALGGIGGGSDPLAPVQGVVNQVTGALGGGNPAGALTGALGTVTGALGGIGGGSSPLAPVQGVVNQVTGALSGGNPAGALTGALNTATGALSSALGTATGALGGIGGGSNPLAPVQGVVNQVTGALGSGNPAGALTGALGTVTGALGGIGGGSNPLAPVQGVVNQVTGALGSGNPAGALTGALGTVTGALGGIGGGSDPLAPVQGVVNQVTGALGGIGGGSNPLAPVQGVVNQVTGALGSGNPAGALTGALGTVTGALGGIGGGSNPLAPVQGVVNQVTGALGSGNPAGALTGALGTVTGALGGIGGGSNPLAPVQGVVNQVTGALGSGNPAGALTGALGTVTGALGGIGGGSNPLAPIQSVVDQVTGTLGSGNPAGALSNAVNTITGTLGNVGGAGSPLAPVQGVVTQLAGTLGGAGSPLAPVQGVVNQVVGTLSGAGGGSPITPITNLVNGLQNALPTGGNAAGALTGALGSVTGALGNLGGSNPLAPVQGVVNQVVGTLGSSNAVGTATNALGNAVGSVVGALGNLGGSSPLAPVQGVVNQVVGTLGNLGGSNPLAPVQGVVNQVVGTLSGAAGSNPIAPITNLVSGLTGGSNPAGALTGALGSVTGALANGPVALGQAAGALSGAAGSTAAAGGSLLGSGANAAGGTAGAVGSLLTTGANATATVVNAVGTTVGTALGSAPGLSVTPHSGNSAPGNPLAPVSSLLQSLTGALPK

SEQ ID NO: 78908 - protein, 2716 aa, Unknown
  Bacterial polypetide isolated from the Sargasso Sea
MNRTYRSIWNESLGAWVAASEHDSARGKPNKSAVVKAVAAAIMVAGAAGGNVAYAQCSTSGYSAGGGNSTSSTSIAIGSGSFGSCVPGQSPTASAGGAIAIGANSPTNTVASGSNSTAFGTGSSATNTASSAFGQGTSATGQFATAVGSGTKATGNYATAMGSTSAVNGIQTLASGAGSTAIGSNSTAGAQATAQDSISIGGQSSVTSSATSGIAIGRGATTNGAYGIAQGDGVVSGATGQNVAIGSSGTTADSGSATGGAVAIGRSQTASGDGAVALGTSNSASGTGAVTLGSGNSANGTGAVALGSANSVTGAGSVGIGSSAKSTYAGSTAIGASSYAGGASAPASAYGNGSSATANYATAIGVNASAAGGGSVALGVATASALQSVAIGQQSTASQAGNISIGSFATASGNGNAVAMGYQSTASAGNAMALGYLSTANVANSVALGNNSATIGAANTATGGTGSVSSATIGSQTFGNFAGASAANGVVSVGTAGNERRIQNVAAGLVTSTSTDAINGSQLYSVASTTTSSITSLSTSASTGLSSANSSITSLSTSTSTGLSSATSSIGSLSTGLSSTNSSVTSLSTSTSTGLSSATSSVGSLSTGLSSTNSSVTSLSTSTSTGLSSATSSIGSLSTGLSSTNSSVTSLSTSTSTGLSSATSSIGSLSTGLSSTNSSVTSLSTSTSTGLSSATSSIGSLSTGLSSTNSSVTSLSTSTSTGLSSATSSIGSLSTGLSSTNSSVTSLSTSTSTGLSSATSSIGSLSTGLSSTNSSVTSLSTSTSTGLSSATSSIGSLSTGLSSTNSSVTSLSTSTSTGLSSATSSIGSLSTGLSSTNSSVTSLSTSTSTGLSSATSSIGSLSTGLSSTNSSVTSLSTSTSTGLSTITTKTNNLGTSTAAALGGGSTYDPTTGTVSAPAYTTYNANGTTSTANSVGSAINNINSQGIKYFHANSTGADSTATGTDAVAIGTGAVAGTNNSVALGANSATAAANPTSSATVNGVTFSGFAGATPVGTVSVGDLNKERQITNVAAGRVTGTSTDAINGSQLYSVAQAVGSATSAISSLSTSTSTGLSSANSSIGSLSTGLSSTNSSVTSLSTSTSTGLSSATSSITSLSTSTSTGLSSATSSIGSLSTGLSSTNSSVTSLSTSTSTGLSSANSSITSLSTSTSTGLSSATSSIGSLSTGLSSTNSSVTSLSTSTSTGLSSATSSITSLSTSTSTGLSSANSSITSLSTGLSSTNSSVTSLSTSTSTGLSSANSSITSLSTSTSTGLSSANSSITSLSTSTSTGLSSATSSIGSLSTGLSSTNSSVTSLSTSTSTGLSSANSSITSLSTSTSTGLSSANSSITSLSTSTSTGLSSANSSITSLSTSTSTGLSSANSSITSLSTSTSTGLSSATSSIGSLSTGLSSTNSSVTSLSTSTSTGLSSANSSITSLSTSTSTGLSSANSSITSLSTSTSTGLSSANSSIGSLSTGLSSTNSSVTSLSTSTSTGLSSANSSITSLSTSTSTGLSSANSSIGSLSTGLSSTNSSVTSLSTSTSTGLSSANSSITSLSTSTSTGLSSANSSITSLSTSTSTGLSSANSSITSLSTSTSTGLSSATSSIGSLSTGLSSTDSSVTSLSTSTSTGLSSATSSIGSLSTGLSSTNSSVTSLSTSTSTGLSSATSSIGSLSTGLSSTDSSVTSLSTSTSTGLSSATSSIGSLSTGLSSTNSSVTSLSTSTSTGLSSANSSITSLSTSTSTGLSSANSSIGSLSTGLSSTNSSVTSLSTSTSTGLSSANSSITSLSTSTSTGLSSANSSITSLSTSTSTGLSSANSSITSLSTSTSTGLSSANSSITSLSTSTSTGLSSANSSITSLSTSTSTGLSSANSSITSLSTSTSTGLSSANSSITSLSTSTSTGLSSANSSITSLSTSTSTGLSSANSSITSLSTSTSTGLSSANSSIGSLSTGLSSTDSSVTSLSTSTSTGLSSANSSIGSLSTGLSSTDSSVTSLSTSTSTGLSSATSSIGSLSTGLSSTNSSVTSLSTSTSTGLSSANSSITSLSTSTSTGLSSANSSIGSLSTGLSSTNSSVTSLSTSTSTGLSSANSSITSLSTSTSTGLSSANSSITSLSTSTSTGINSLSTGLSSTNSTILSLSTSTSTGIGSLSTGLSSTNSSVSSLSTSTSTAINDAKTHYYSVNDNGVQQANYDNKGATGINALAAGVNASAAGNSSVAVGDGSNAQSAGAVAIGQNASATGGKAVSIGSGNTATGDGAVAIGDPSIATGTGAVAMGANDTATGNGAVALGNANTANGASALALGSSNQATADNTIALGNQATASATGAQAYGSAAQATAADALAFGTNAQANVANSIALGANSVTSAANPTSSATIGGVTYPFAGGSPVGVVSVGAPGAERQITNVAAGRISASSTDAINGSQLNATNNAINTLSTSTASNVASLSTGINSLSTGLSATNSNVASLSTSTSTAINSLSTGLSTTNSNVNSLSTSTSTGIGSLSTGLSTTNSNVASLSTGVTNINNQLNQLSTTLNNNTTRAANNNGVAADMNGTGTDHPTVTAGSNSVAIGANSTDGGRSNVVSVGSDTQQRQITNVAPGTQGTDAVNVNQLTQVQTTLSTALSGQQAQINSLGSQLQQTDQMAKQGIAAVGAMASIPQLDRDANFGMGVGTSTFLGQKAMAVNMQARITENLKASINGGFSGGQKVIGAGMLYQWK

SEQ ID NO: 78909 - protein, 490 aa, Unknown
  Bacterial polypetide isolated from the Sargasso Sea
MELVSDNSGDVGDGYELKSVNGTFTVTSDHSTKGTYEDTYLTIVGNSTPASSSTTIAGDLTIAGDDLIMGTNTSGAALIGDGTNYNPVVISGDLSIGTNGTAAISSNVIVNADINASAAIADSKLATITTADKVSGAAIQVDGATSGTGITLADDDKFLVDDGGTTKYVNASQVLLYASATSSTDINGGTIDGVTLGTNSAVTQAVIDNVNINGAEIGHTSDTDLMTLADGSVTFTGSTVIPVADVNGGSVDGVTLGTNSAVTQAVVDNINLNGTTIGHTDDTDLMTLADGSVTFTGSTVVPNADINGGAVDGITLGTNSAVTQAVIDNVNINGVEIGHTLDTDLMTLANGSVTFTGSTVIASADVNAGTIDGVTLGTNSAVTQAVIDNVNINGAEIGHTSDTDLMTLADGSVTFTGSTVIPVADVNGGSVDGVTLGTNSAVTQAVVDNINLNGTTIGHTDDTDLMTLADGSVTFTGSTVVPNADINGGA

SEQ ID NO: 78910 - protein, 574 aa, Unknown
  Bacterial polypetide isolated from the Sargasso Sea
AAGSPILLDNTINIDGSLIGHADDTDLMTLANGSVTFTGSTVIPTADVDGGAIDAVTLGTNSAVTQAVIDNVNIDGAVIGHTSDTDLMTLADGSVTFTGSTVIPTADVNGGAIDAVTLGTNSAVTQAVIDNVNIDGAVIGHTSDTDLMTLADGSVTFTGSTMIPTADVNGGAIDAVTLGTNSAVTQAVVDDINLNGATIGHTDDIDLMTLADGSVTFTGSTVIPTADVNGGAIDAVTLGTNSAVTQAVIDNVNINGVEIGHTSDTDLMTLADGSVTFTGSTVIPTADVNGGAIDAVTLGTNSPVTQAVIDNVNINGAQIGHTTDTDLMTLSSGTVTVAGTVAATAVTGDGSGLTGITASVMKSDDISQGDAAVTISTSSGAVNINPASGSSILLDNTINIDGAEIGHTDDTDLMTLANGSVTFTGSTVIPTADVNGGAIDAVTLGTNSAVTQAVIDNVNINGAEIGHTSDTDLMTLADGSVTFTGSTIIGTVDVNGGAIDAVTLGTSSAVTQAVIDNVNINGSNIGHTDDTDLLTFADGIATVAGEMSLTTLDIGGTDVTATAAELNKLDGVTA

SEQ ID NO: 78911 - protein, 257 aa, Unknown
  Bacterial polypetide isolated from the Sargasso Sea
MKAIDLFSGAGGLSLAAHQCGIDVIAAIELDTAATVTYQRNLIERLKAPTKLINGDINAVDLPALMTELKLKPGKLDLLLGGPPCQGFSTHRINGAGIDDPRNQLLLKYFDFVDGLRPKAFLIENVAGLLWKRHENYLNQLLALAETHGYTIHFCDILNAKDYGVPQNRKRVFIFGTRKDLNIDAANFPPAATHFSPSSNKSPYWKTASTVFEKIPADLIEQYIEEYFRPKTKLADDEARDLILNLEYGEAVKEGDP

SEQ ID NO: 78912 - protein, 323 aa, Unknown
  Bacterial polypetide isolated from the Sargasso Sea
GLSLAAHQCGIDVIAAIELDTAATVTYQRNLIERLKAPTKLINGDINAVDLPALMTELKLKPGKLDLLLGGPPCQGFSTHRINGAGIDDPRNQLLLKYFDFVDGLRPKAFLIENVAGLLWKRHENYLNQLLALAETHGYTIHFCDILNAKDYGVPQNRKRVFIFGTRKDLNIDAANFPPAATHFSPSSNKSPYWKTASTVFEKIPADLIEQYIEEYFRPKTKLADDEARDLLLNLEYGEAVKEGDPCNITMRPTPKMIRQFEATPLNGSREDAGEEFRLPCHSNGYKGHKDVYGRVMIHLPSNTITTGCNNPSKGRFVHPWKN

SEQ ID NO: 78913 - protein, 292 aa, Unknown
  Bacterial polypetide isolated from the Sargasso Sea
SNINGMVVTRGDKHNYDRWRDAGCSGWGYEDVLPIFKRIEKFRNKGNSSRGTKGPIDVMEIAHKDILSEAFMHACSDIDIPIADDYNGGNYEGAHYAQMSQTNAKRCSTEVGYLRGARQRPNLTVVTRALVEKLTIKNDQVRGLKYLEFDSSGHRGDAHEVTVSGEVILSAGAICSPMILERSGVGKAEFLEEKGIKVITDLPGVGENLQDHLNVRTTYECTKPITVNDLFTKRAFAIRSGIQYFVLRRGLMATPTITCFAHVKTDHELETPDLKLGIAHVSGKDRFAMADG

SEQ ID NO: 78914 - protein, 193 aa, Unknown
  Bacterial polypetide isolated from the Sargasso Sea
MQEKDKTRRKVLIGLTSAVGLSGLPFAATPFIAAWNPSAKAKAAGAPVKLDVSKMQYGQQIQVAWRKQPVFIVRHTKESLASLDLSVSKLADPNSDQIEEPYKGLNASRSRSPEYSVFSGICTHLGCAPKYFPEVESKPWDATWNGGFFCPCHGSMFDIVGRVFKGVPAPTNLIVPPHMFEGSILTIGEDKEL

SEQ ID NO: 78915 - protein, 326 aa, Unknown
  Bacterial polypetide isolated from the Sargasso Sea
LYPRGKGLGGSSLLNGMIYMRGAPGDFNRWRQKGLEGWSYNDVLPYFKRSASAFHREKNEYHSHSGPLKLTPAGNYNSIDKAFIDACVEAGAEINNDFYNGNLNGVGRYDVKVWNGKRQSSAEAYLKFKPSNLTIYKNTSVIKILIEKNKAKGLLLSNGEVYASSEIILSLGAFGSPKCLMLSGIGPEEHLKEKNIELLINLPGVGENLHDHPVMPMNWAFQNNNLSFSKYQRIDRAIIVGLKYILFKQGLAAAPFWSTNLFHAIREKDMPEIQVFMTPMCFKEEKDNWSMSLDNLLNFGSLFFSRGKKAFPGLHFQINLLRPKST

SEQ ID NO: 78916 - protein, 83 aa, Unknown
  Bacterial polypetide isolated from the Sargasso Sea
MNKIYDIFIIGGGINGAGIARDASGRGLKVALADKGKVGKATSSWSTKLIHGGLRYLENYEFRLVNESLKERTIINNIAPKIT

SEQ ID NO: 78917 - protein, 79 aa, Unknown
  Bacterial polypetide isolated from the Sargasso Sea
MNIKNVVVIGSGTMGSGIAAQLCNANIPVTLLDLKTEISEKAKKRIFESRPPLLVDKSKIENIKVGNIDQNFDVIKKLT

SEQ ID NO: 78918 - protein, 212 aa, Unknown
  Bacterial polypetide isolated from the Sargasso Sea
MTAEGDASQQKEERASYLSAEVNLGRRYFIIGATGGVASVGVVGAAIPFLQYWQPSAKAKALGAPVKIDISKLRPGEILSPILSYRGQPVFVIYRDQESLALLEEDSGRLADPNSESSEQPEFALNPYRSSRPEIGVFLGICTHLGCSPKHQVANIFPDSEQGGFFCPCHGSGFDLAGRVAAGVPAPTNLIVPPYRFSSDTEIIVGELEADA

SEQ ID NO: 78919 - protein, 205 aa, Unknown
  Bacterial polypetide isolated from the Sargasso Sea
MSFNKQIYDIFIIGGGINGAGIARDAAGRGLKVFLAEKNKVGSATSSWSSKLIHGGLRYLENYEFKLVKESLKEREVITSIAPTITKPLPFVIPHSKKLRSKLLIRLGLFLYDNLGGKTKIPKSSKINFNKKYSNILKSHFKVGFQYYDVQVDDKKLVEMNIEDAKKMGAQIVENRKVINANRSKKGWEIFLDNDDVVNSKILIN

SEQ ID NO: 78920 - protein, 131 aa, Unknown
  Bacterial polypetide isolated from the Sargasso Sea
MSEDKKVKRRDFIFTASYALGAVGVGAAAWPLIDQMNPDASERALASTEVDISGIERGQSITVLWRGKPVFIKRRTEEEIQKARQVDLKELPDPEKDEDRAKNPEWLVMLGMCTHLGCVPLGNKGEYEGWF

SEQ ID NO: 78921 - protein, 288 aa, Unknown
  Bacterial polypetide isolated from the Sargasso Sea
MNKYYDLFIIGGGINGAGIARDASGRGLSVYLAEKGKVGSATSSWSSKLIHGGLRYLENYNFKLVRESLKEREVITNIAPTITRPLPFIIPYTKKLRSKLLIRLGLFLYDNLGGKSNIPKSSKINLNKKYSKILHQKFSFGFQYYDVQVNDKKLVEMNIDDAKKLGATIIEDRKVINAFRIDDGWKIILDNNEIIKSKILINAAGPWINEVVNNVIKINANKSIRLVRGSHIIINKLYEEEVAFTLQNEDNRIIFVIPYKKKYSLIGTTEVDVKTADNPSISVEEKYI

SEQ ID NO: 78922 - protein, 181 aa, Unknown
  Bacterial polypetide isolated from the Sargasso Sea
VGGVATVIPFAASLAPSAKAKAAGAPVEVDISGLKPGEMVTVPWRGKPVWILNRTDAMLADVVKADKEVADPTTEKPYTMPLPAYCANEYRARADRKNILVVMAVCTHLGCTPSQRFTPGPQPNLPDDWPGGFLCPCHGSTYDLAGRVFKNKPAPQNLDIPPYMFTSATTLVIGKDEKGEA

SEQ ID NO: 78923 - protein, 254 aa, Unknown
  Bacterial polypetide isolated from the Sargasso Sea
MSSKMLKFVSTEKAMPEKRLAKNRVGDFEEIYDEFDKSEAETQASRCSQCGVPFCQVNCPLHNNIPDWLMMTAEGRMREAYELSSQTNNFPEICGRICPQDRLCEGSCVIEKGFESVTIGAVEKHITEIAFSEGWVKPVAPRNERRETVGIIGAGPAGLSAAEMLRHRGYQVHVYDRYDRVGGLLMYGIPGFKLEKSIVERRGKLLRDSGVHFHLNVDVGAEISFEDIWAEHDAILLATGVYKARDIAAPGSSL

SEQ ID NO: 78924 - protein, 131 aa, Unknown
  Bacterial polypetide isolated from the Sargasso Sea
MSEKQVTRRNFLYVTTGAFAAAGAASLAWPFVDQMNPDASVKALASTEIDLRPIIPGQSITVMWRGKPVFIRRRTQAEIDEAKKVNLADLPHPEEDSDRAQNPEWLVMVGICTHLGCVPLGQKGDYNGWFC

SEQ ID NO: 78925 - protein, 235 aa, Unknown
  Bacterial polypetide isolated from the Sargasso Sea
CVAPLGNTGWGWNDVLPYFLKSENNELGKSEFHNDSGPISVANKKINLKLLDEFQNAAEEVGIPKTIDFNKGDNFGVGFFQFTTSYSKFGLKLRCSAAKGYLNPVKKRKNLKILVNAHVQKLNFNNKSVESVSFFIGDKLNHIKVNKEVILSAGAIGSPHLLQLSGIGDSDKIKKHGIEVVHELKGVGKNLQDHLMFRPVYKLKNIKSLNRDVESLYSKFLMGLQYILKQSGPIT

SEQ ID NO: 78926 - protein, 264 aa, Unknown
  Bacterial polypetide isolated from the Sargasso Sea
MSKKIGIIGGGISGLVVGIFLAKEGHQVSIFEKKSLLSETSSKTTKLLHGGLRYLENFHIKEVQKGLHDRYWWLKNFPQHTNKIKILIPFKNLFSLELFKFYIGIKFYGFLAGKKKLGKSKLSIRKVSQDINLDNNFKGHLSFFDGVMDDELLGKDLIHLAKELKINLYENNEVSNFDIYGNIDNKKFDKVILAVGPWTKILLEKNKIKSLKDIDYIKGSHLILNKKIKSGLMFKGVCKSRYVFAFAYKRFTLLGTTEGKGKIA

SEQ ID NO: 78927 - protein, 291 aa, Unknown
  Bacterial polypetide isolated from the Sargasso Sea
AYFQMTKRRGVRWNATKAYLRPVENRPNLTVLSDVLVEKVEIEDSSQGARATGVKVCRTEGSMIFNADREVILSAGAIGSPQILQLSGVGNSELLSNSNIPVKVDLPGVGENLQDHLQVRSVYRVENTVTLNQKAGSLIGKALMGLEYFLFKTGPLTMPPSQLGAFAKSNPNRPTPNIEWHVQPLSLDKFGDPLHTFNAITPSVCNLRPTSRGQVKIRSNNPEEHPTIQLNYLSTPEDEQVAVEGLRFTRQIMQAKALKKFDPIELKPGTEIRTDTQLLDAARDLGTTIFH

SEQ ID NO: 78928 - protein, 186 aa, Unknown
  Bacterial polypetide isolated from the Sargasso Sea
MKAIDLFSGAGGLSLAAHQCGIDVIAAIELDTAATVTYQRNLIERLKAPTKLINGDINAVDLPALMTELKLKPGKLDLLLGGPPCQGFSTHRINGAGIDDPRNQLLLKYFDFVDGLRPKAFLIENVAGLLWKRHENYLNQLLALAETHGYTIHFCDILNAKDYGVPQNRKRVFIFGTRKDLNIDAA

SEQ ID NO: 78929 - protein, 284 aa, Unknown
  Bacterial polypetide isolated from the Sargasso Sea
ILVSAFGTRFGIPILVIFLGVGMLAGTDGPGGIIFNNYPLAYLVGNLALAVILLDGGMRTRVSSFRVALWPSLSLATVGVMITAGLTGLAAAWLFDLTLLEGLLIGAIVGSTDAAAVFSLLGGRGLNERVSSTLEIESGSNDPMAVFLTITLIAMLASGQTGFSWDLPIQLVQQFGLGTLLGLGGGWLLLNLINRMELATGLYPLLVVSGGLIIFAITTAVGGSGILAIYLCGLLLGNRPIRSRHGILHMLDGLTWLAQIGMFLVLGLLVTPHELLPIALPALA

SEQ ID NO: 78930 - protein, 259 aa, Unknown
  Bacterial polypetide isolated from the Sargasso Sea
MKAIDLFSGAGGLSLAAHQCGIDVIAAIELDTAATVTYQRNLIERLKAPTKLINGDINAVDLPALMTELKLKPGKLDLLLGGPPCQGFSTHRINGAGIDDPRNQLLLKYFDFVDGLRPKAFLIENVAGLLWKRHENYLNQLLALAETHGYTIHFCDILNAKDYGVPQNRKRVFIFGTRKDLNIDAANFPPAATHFSPSSNKSPYWKTASTVFEKIPADLIEQYIEEYFRPKTKLADDEARDLLLNLEYGEAVKEGDPCN

SEQ ID NO: 78931 - protein, 165 aa, Unknown
  Bacterial polypetide isolated from the Sargasso Sea
RVAAACQFVSYWSPSEKAKALGAPVKIDVSKLQPGEMLTPVVAWRGKPVFIVRRTEAMLKSLKETTLSLADPNSENAEMQPDFAVNPWRSSNPEFAVLLGLCTHLGCSPKLVSVANFEDASGGFFCPCHGSKFDLAGRVVAGVPAPTNMEVPPYRFESENVIVVG

SEQ ID NO: 78932 - protein, 124 aa, Unknown
  Bacterial polypetide isolated from the Sargasso Sea
MSDKPVTRRNFLYITTGTFTAAGAASLVWPFVDQMNPDASVKALASTEVDLRPIALGQSITVLWRGKPVFIRRRTPEEISEAKAVSLDELPDPQDDSARAKNPEWLVMVGICTHLGCIPLWSKG

SEQ ID NO: 78933 - protein, 173 aa, Unknown
  Bacterial polypetide isolated from the Sargasso Sea
MSEEKTIPNAAVGSSPENAFKVPDSDRRSFLSWLSVGWLAYIGVTGGFFTIIVRFLFPNVLFEPPQTFKIGFPDDFSTNSVDIKFKKQFNAWIVRDEESIFALSTVCTHLGCTPNWLPVESKFKCPCHGSGFRMTGIHFEGPAPRPLERFKISLANDGQILVDKTKSYKWGKR

SEQ ID NO: 78934 - protein, 265 aa, Unknown
  Bacterial polypetide isolated from the Sargasso Sea
EVVKAYADREVIVCGGAINSPQILQLSGIGKGDYIKKWGLKVVADLPGVGENLQDHLDVLSHYECTQPVTEAKYTAGGLAVFRMAAILAQWMITKKGPGNDIGLSGVSFLKTDDTLDLPDIQMHFIGSLLKDHGKTRPDSHAFSNHVCMLRPESRGYIALKSLDPTVPPIIQPNYFATQKDRDTLIKGVKMSREIMNQSAFDEYRGKEMTPGVHVQTDAEIEEFIRNAAETIYHPVGTCKMGSDEFAVVDDKLRVRGVENLRVID

SEQ ID NO: 78935 - protein, 185 aa, Unknown
  Bacterial polypetide isolated from the Sargasso Sea
MKAIDLFSGAGGLSLAAHQCGIDVIAAIELDTAATVTYQRNLIERLKAPTKLINGDINAVDLPALMTELKLKPGKLDLLLGGPPCQGFSTHRINGAGIDDPRNQLLLKYFDFVDGLRPKAFLIENVAGLLWKRHENYLNQLLALAETHGYTIHFCDILNAKDYGVPQNRKRVFIFGTRKDLNIDA

SEQ ID NO: 78936 - protein, 76 aa, Unknown
  Bacterial polypetide isolated from the Sargasso Sea
MKDIYDIFIIGGGINGAGIARDASGRGLKVYLVDKGKVGSATSSWSTKLIHGGLRYLENYEFKLVRESLMKEKSFV

SEQ ID NO: 78937 - protein, 265 aa, Unknown
  Bacterial polypetide isolated from the Sargasso Sea
DHWRQLGNSGWGWDDALKFFKKSELHFGGGDEVHGADGEWRVEEQRLSWEILDAFREAAAQTGIPKIDDFNRGDNEGCGYFSVNQNKGVRWSAADAFLHPVKTRSNLTILTQAHVEKIKFHEHQAKEINFLLKGQRSLAAVKKEIILASGAVGSPQILQTSGIGPGELLRDLDIKPVRELPGVGENLQDHLQMRLVFKVKNTRTLNLRANSLIGRIGMGMEYFIFKRGPMTMAPSQLGGFAKSDPSIESANLQYHIQPLSTEKLG

SEQ ID NO: 78938 - protein, 61 aa, Unknown
  Bacterial polypetide isolated from the Sargasso Sea
METQNIKYDIFIIGGGINGAGIARDASGRGLKVYLAEKGKVGSATSSWSSKLIHGGLRYLE

SEQ ID NO: 78939 - protein, 130 aa, Unknown
  Bacterial polypetide isolated from the Sargasso Sea
LNRTDAMLADVVKADKEVADPTTEKPYTMPLPAYCANEYRARADRKNILVVMAVCTHLGCTPSQRFTPGPQPNLPDDWPGGFLCPCHGSTYDLAGRVFKNKPAPQNLDIPPYMFTSATTLVIGKDEKGEA

SEQ ID NO: 78940 - protein, 169 aa, Unknown
  Bacterial polypetide isolated from the Sargasso Sea
MIPNAAVGSSAENAFKGPETDRRGFLSWLSVGWVAYLGVTGGFFTIIVRFLFPNVLFEPPQTFKIGFPEDFSKNSVDIKFKKSFNAWIVRDEESIFALSTVCTHLGCTPNWLPVESKFKCPCHGSGFRMTGVHFEGPAPRPLERFKIGLANDGQILVDKTKSYKWEKGE

SEQ ID NO: 78941 - protein, 229 aa, Unknown
  Bacterial polypetide isolated from the Sargasso Sea
MGNIGWGWKDVLPYFLKSENNELGKSEFHNDNGPISVVNKRIKLKILDEFQNAAEEKGIPKTEDFNKGDNFGCGYFQFTNKKSGFRCSASVGYLNPVKKRNNLKIIVNAHVQKINFEGKKAIGLSYYKGEKLITVKANKEVILSAGAIGSPHILQVSGIGESNKLKDQGIKIVHELIGVGKNLQDHLMFRPIYKVKNIKSLNKKINSIFGKLLIGMEYVFKRSGPMTMG

SEQ ID NO: 78942 - protein, 188 aa, Unknown
  Bacterial polypetide isolated from the Sargasso Sea
MNEIFDILVIGGGINGAGIVRDASGRNLKVCLVEKNTVGSATSSWSTKLIHGGLRYLENYEFRLVRESLKEREVIKKIASNITTPLPFIIPHQKSLRPKWLIKLGLFLYDNIGGKMTIPKSSTINIKKEIPNILKDQFKIGFQYYDLQVDDKKLVQLNVEDAKKKGAMIIQNRKVIDAKRNKNIWDIT

SEQ ID NO: 78943 - protein, 301 aa, Unknown
  Bacterial polypetide isolated from the Sargasso Sea
KGIPKVNDFNKGDNFGCGYFQVTEKNGLRCSAAVGYLNPIKNRKNLKIQTNCLVQKINFDGTKAISVSFLKNNQLITVKVNKEIILSAGSIGSTQILQTSGVGDGNKLSKLGIKIIKDLKGVGQNLQDHLMFRPVFKIKNIKSLNKKINSLFGNLLIGLEFIFNRSGPMTMGASQLCLFAKSDTSRETPNLQFHVQPISTDKLGGAALHNFHAFTPTVANIRPTSRGEINVVSSDSREKPKIKMNYLSTEDDRKVAADGLRLVRDIVFKTQTFKKYDPEELRPGPQFQSDEELVKKEVNYS

SEQ ID NO: 78944 - protein, 253 aa, Unknown
  Bacterial polypetide isolated from the Sargasso Sea
MKNLYDLFIIGGGINGAGIARDAAGRGLKVCLVDKGLVGSATSSWSSKLIHGGLRYLENYEFKLVRESLIEREVIKRIASEITKTIPFIIPYNSQIRSKLLIKIGLALYDNLGGKTSIPKSSTINLNENYQDILENEFSVGFKYFDLQVDDKKLTEMNVADAKKNDAVIFENTKVISASRNKNNWIIKLNNNKIIESKILINASGPWINDVIKNVIKIPSKKDIRLIKGSHIITKKLYDHQVAFTLQNFDKRI

SEQ ID NO: 78945 - protein, 182 aa, Unknown
  Bacterial polypetide isolated from the Sargasso Sea
GVGGVATVIPFAASLAPSAKAKAAGAPVEVDISGLKPGEMVTVPWRGKPVWILNRTDAMLADVVKADKEVADPTTEKPYTMPLPAYCANEYRARADRKNILVVMAVCTHLGCTPSQRFTPGPQPNLPDDWPGGFLCPCHGSTYDLAGRVFKNKPAPQNLDIPPYMFTSATTLVIGKDEKGEA

SEQ ID NO: 78946 - protein, 190 aa, Unknown
  Bacterial polypetide isolated from the Sargasso Sea
MIATSVAGGVGGVATVIPFAASLAPSAKAKAAGAPVEVDISGLKPGEMVTVPWRGKPVWILNRTDAMLADVVKADKEVADPTTEKPYTMPLPAYCANEYRARADRKNILVVMAVCTHLGCTPSQRFTPGPQPNLPDDWPGGFLCPCHGSTYDLAGRVFKNKPAPQNLDIPPYMFTSATTLVIGKDEKGEA

SEQ ID NO: 78947 - protein, 304 aa, Unknown
  Bacterial polypetide isolated from the Sargasso Sea
TKSITNKLLFDGNKCVGLEYLKGKNINKVFAYKEVIVCGGAINSPQILQLSGIGKGDYIKKWGLNVVADLPGVGENLQDHLDILSHYECTQPVTEAKYTAGGLAIFRMASILGQWLVTRKGPGVDIGLSGLSFLKTDDSLDVPDIQMHFVGSLLKDHGKTRPDSHAFSNHVCMLRPESRGYIALKSLNPKVQPIIQPNYFATQKDRDTMIKGVKMSREIINQKAFDEYRGKEINPGDHVQTDQEIEEFIKGHAETIYHPVGTCKMGSDEFAVVDDRLKVRGVENLRVVDASVMPTLIGGNTNAP

SEQ ID NO: 78948 - protein, 210 aa, Unknown
  Bacterial polypetide isolated from the Sargasso Sea
MSNVSVDATESAHNENQPENNTRRRFLTVATSVVGGVGVVGAAVPFIASWNPSAKAKAAGADVEVDISGIEPGQLVRVMWRSKPVWIVRRTPEILEELGAHEDKLKDPNSEAEQQPAFAQNRFRSMKEEYLILVGICTHLGCSPQHLKDGAFEEVVEGVPDGFFCPCHGSKFDMAGRVFQNVPAPLNLVVPPYQFVDDNNIIIGSEAEAV

SEQ ID NO: 78949 - protein, 146 aa, Unknown
  Bacterial polypetide isolated from the Sargasso Sea
MGFAAATGGFFTVIIRFLFPNVLFEPPQTFKIGYPEEFAPNTVDTRFKKEFNAWIVRDDESLFALSTVCTHLGCTPNWLATDNKFKCPCHGSGFRMTGIHFEGPAPRPLERFKIGIANDGQVLVDKTKSFKWEKGEWENKDSYLKV

SEQ ID NO: 78950 - protein, 296 aa, Unknown
  Bacterial polypetide isolated from the Sargasso Sea
LIEAGGSGKSLFTQMPGGNGYIFGNPKFDWCFESIPQPSLNNRKILYPRGKGLGGSSLLNGMIYMRGAPGDFNRWRQKGLEGWSYNDVLPYFKRSASSFHREKNEYHSHSGPLKLTPAGNFNSIDKAFIDACVEAGAEINNDFYNGNLNGVGRYDVKVWNGKRQSSAEAYLKFKPSNLTIYKNTSVIKILIEKNKAKGLLLSNGEVYASSEIILSLGAFGSPKCLMLSGIGPEEHLKEKNIELLINLPGVGENFHDHPVMPMNWAFQNNNLSFSKYQRIDRAIIVGLKYILFKQGL

SEQ ID NO: 78951 - protein, 265 aa, Unknown
  Bacterial polypetide isolated from the Sargasso Sea
NWICSCGGPPCQGFSTHRINGAGIDDPRNQLLLKYFDFVDGLRPKAFLIENVAGLLWKRHENYLNQLLALAETHGYTIHFCDILNAKDYGVPQNRKRVFIFGTRKDLNIDAANFPPAATHFSPSSNKSPYWKTASTVFEKIPADLIEQYIEEYFRPKTKLADDEARDLLLNLEYGEAVKEGDPCNITMRPTPKMIRQFEATPLNGSREDAGEEFRLPCHSNGYKGHKDVYGRVMIHLPSNTITTGCNNPSKGRFVHPWKNQGMTL

SEQ ID NO: 78952 - protein, 173 aa, Unknown
  Bacterial polypetide isolated from the Sargasso Sea
MAEAKEKKESEVDTIWSRRDFFSLAGWGSFMAALGLSSLYFARLLFPRVLFEPSPIFKAGYPSDYTVGAVSTKYIKDQRVWIVRDEEGIYVIYGLCTHLGCTPRWLNTERKYKCPCHGSGFTQEGINFEGPAPRPLERLKISLAPDGQIIVDKSKKFLWEKGQWGQPGSKLLV

SEQ ID NO: 78953 - protein, 278 aa, Unknown
  Bacterial polypetide isolated from the Sargasso Sea
DYDNWRQQGNTGWGWDDVLPYFLKSEDNELGKSEFHNDKGPITVSNKQINLDMLEEFQNAAEEIGIPRTNDFNKGDNFGIGYFQFTTSRQKLLKLRCSAAKGYLNPVKKRSNLKIIVNAHVQKINFEGKKAVGVSYYTGDKLNSVKTKKEVLLSAGSIGSPHILQVSGLGDGQKLKKHGIDVIHELKGVGKNLQDHLMLRPVYKVKNLKSLNSKINSLFGNFLIGLEYVFKQSGPMTMGASQVCGFVKSDPSRATPNLQFHVQPISTDILGATKMHDF

SEQ ID NO: 78954 - protein, 80 aa, Unknown
  Bacterial polypetide isolated from the Sargasso Sea
YFIAVCICTHLGCSPTYLPDSFGEQVQGVTSGFFCPCHGSKFDMAGRVFQGVPAPLNLVIPPHQYVDDGTVIIGVDKGVA

SEQ ID NO: 78955 - protein, 184 aa, Unknown
  Bacterial polypetide isolated from the Sargasso Sea
MAEEKIVPKAAIGSSAENAYKGPETDRRGFISWLSFGWLAYLGVTGGFFTMIVRFLFPNVLFEPPQTFKIGYPDDFSKNSVDIKYKKQFNAWIVRDEESIFALSTVCTHLGCTPNWLPVESKFKCPCHGSGFRMTGIHFEGPAPRPLERFKIGLANDGQILVDKTKSFKWEKGEWENPESFLKV

SEQ ID NO: 78956 - protein, 174 aa, Unknown
  Bacterial polypetide isolated from the Sargasso Sea
MNVDKQIYDIFIIGGGINGAGIARDASGRGLKVFLAEKNKVGSATSSWSSKLIHGGLRYLENYEFKLVRESLIEREVITKIAPKITKPIPFIIPHTKKLRSKLLIRLGLFLYDNLGGRTKIPKSSKINFNKKFTNILQSHYKVGFQYYDVQVDDKKLVEININDAKKLGANVIE

SEQ ID NO: 78957 - protein, 319 aa, Unknown
  Bacterial polypetide isolated from the Sargasso Sea
IKMSKIFDLFIIGGGINGAGIARDAAGRGLSVCLADKGEIGGATSSWSTKLIHGGLRYLENYEFKLVRESLKEREIVYKIAKHISKPIPFIIPYADKIRPAWLIKIGLFLYDNLGGKSNIPKSKTFDLRKKFSNILKEKYKTGFQYFDIQIDDKKLTKLNTKDAKRNNAKILEYNKVKKAEIIGNEWIISLENGEKVKSKILINASGPWINETLNKNIKIKSKKKIRLVKGSHIITKKLYKENVAFTFQNTDKRIIFVIPYKGKFSLIGTTEEEVKSPENKGISKKEIRYLISSVNNYLKKQITSKDIVDTYSGIRPLM

SEQ ID NO: 78958 - protein, 83 aa, Unknown
  Bacterial polypetide isolated from the Sargasso Sea
EEFLVVIGICTHLGCSPSFVLKGEGASISVDWKGGFFCPCHGSRFDLAGRVFKGVPAPRNLVIPPYKFISPTRLLIGDDSEAV

SEQ ID NO: 78959 - protein, 243 aa, Unknown
  Bacterial polypetide isolated from the Sargasso Sea
GLSLAAHQCGIDVIAAIELDTAATVTYQRNLIERLKAPTKLINGDINAVDLPALMTELKLKPGKLDLLLGGPPCQGFSTHRINGAGIDDPRNQLLLKYFDFVDGLRPKAFLIENVAGLLWKRHENYLNQLLALAETHGYTIHFCDILNAKDYGVPQNRKRVFIFGTRKDLNIDAANFPPAATHFSPSSNKSPYWKTASTVFEKIPADLIEQYIEEYFRPKTKLADDEARDLLLNLEYGEAVKE

SEQ ID NO: 78960 - protein, 196 aa, Unknown
  Bacterial polypetide isolated from the Sargasso Sea
MSNAPVDNGRRRFLTIATSVVGGVGAAGAAVPFIASWNPSERAKSAGAPVEVDISKLEPGQLIRVEWRGKPVWVVSRTPKMLEQMKEHEGQLRDPQSQEPQQLESSTNDYRSLRPEIFVAVGICTHLGCSPSFLQGGFGEKVEGTDDGFYCPCHGSKFDMAGRVFQSVPAPLNLEIPPYTFLDETTILVGEETGVA

SEQ ID NO: 78961 - protein, 181 aa, Unknown
  Bacterial polypetide isolated from the Sargasso Sea
MEAARAGTKPGPTSKAEAPAFSKPTAKPAAKKVAKAPPRPVPPRPAREKTVKASKVSKTEERRGFLAYTVGSFMAVGFTALSVTGGLFSMGLARFLFPNVLAEPPSSFKVGSKEGFPSGVVETKFVAQYGVWVVNADFEGVQQIYALKTVCTHLGCTPNWLEAEQKFKCPCHGSGFTKTES

SEQ ID NO: 78962 - protein, 139 aa, Unknown
  Bacterial polypetide isolated from the Sargasso Sea
MNIKNVVVIGSGTMGSGIAAQLCNANVPVTLLDLKTEISEKAKKRIFESRPPLLIDKSKIDNIKVGNINENFDSVTKADWVVEAVVERIDIKHNLYEKILKARKKDSIISSNTSTIPLKVLSAKMTDEDKKDFCITHFF

SEQ ID NO: 78963 - protein, 184 aa, Unknown
  Bacterial polypetide isolated from the Sargasso Sea
AGGVGGVATVIPFAASLAPSAKAKAAGAPVEVDISGLKPGEMVTVPWRGKPVWILNRTDAMLADVVKADKEVADPTTEKPYTMPLPAYCANEYRARADRKNILVVMAVCTHLGCTPSQRFTPGPQPNLPDDWPGGFLCPCHGSTYDLAGRVFKNKPAPQNLDIPPYMFTSATTLVIGKDEKGEA

SEQ ID NO: 78964 - protein, 146 aa, Unknown
  Bacterial polypetide isolated from the Sargasso Sea
MGFAAATGGFFTVIIRFLYPNVLFEPPQTFKIGYPEEFSPNSVDIRFKKDFNAWIVRDDESIFALSTVCTHLGCTPNWLATDNKFKCPCHGSGFRMTGIHFEGPAPRPLERFKIGIANDGQILVDKTKSYKWEKGEWENKDSFLKV

SEQ ID NO: 78965 - protein, 84 aa, Unknown
  Bacterial polypetide isolated from the Sargasso Sea
MSKKIGIIGGGISGLVVGIFLAKEGHQVSIFEKKSLLSETSSKTTKLLHGGLRYLENFHIKEVQKGLNDRYWWLTNFPQHTNKI

SEQ ID NO: 78966 - protein, 122 aa, Unknown
  Bacterial polypetide isolated from the Sargasso Sea
GQQISGASAVVLSNHGGRQLDNVCSPISLLREVKEAVGDRIEIVLDGGVRRGTDVLKALALGAQACMIGRPYLYGLGAGGKYGVARALQLLRAEIERDMALLGVTSVDQITEAHVRERKRYV

SEQ ID NO: 78967 - protein, 166 aa, Unknown
  Bacterial polypetide isolated from the Sargasso Sea
VPFIASWNPSEKAKSAGAPVEVDISKLESGQLIRVEWRGKPVWIVNRTTQMLDELSEHEGQLRDPNSDKPQQPEFAKNEYRSLKENIFVAVGICTHLGCSPTFLKGGFGEKVEGTEDGFFCPCHGSKFDMAGRVFEGVPAPLNLEIPPYIFIDDTTILVGGEEGVA

SEQ ID NO: 78968 - protein, 293 aa, Unknown
  Bacterial polypetide isolated from the Sargasso Sea
KCVGLEYLKGKEVIKAYAEREVIVCGGAINSPQILQLSGIGKGDYIKKWGLKVVADLPGVGENLQDHLDVLSHYECTQPVTEAKYTAGGLAVFRMAAILAQWMITKKGPGNDIGLSGVSFLKTDDTLDLPDIQMHFIGSLLKDHGKTRPDSHAFSNHVCMLRPESRGYIALKSLDPTVPPIIQPNYFATQKDRDTLIKGVKMSREIMNQSAFDEYRGKEMTPGVHVQTDAEIEEFIRNAAETIYHPVGTCKMGNDEFAVVDDKLRVRGVENLRVIDASVMPTLIGGNTNAPTI

SEQ ID NO: 78969 - protein, 251 aa, Unknown
  Bacterial polypetide isolated from the Sargasso Sea
MKAIDLFSGAGGLSLAAHQCGIDVIAAIELDTAATVTYQRNLIERLKAPTKLINGDINAVDLPALMTELKLKPGKLDLLLGGPPCQGFSTHRINGAGIDDPRNQLLLKYFDFVDGLRPKAFLIENVAGLLWKRHENYLNQLLALAETHGYTIHFCDILNAKDYGVPQNRKRVFIFGTRKDLNIDAANFPPAATHFSPSSNKSPYWKTASTVFEKIPADLIEQYIEEYFRPKTKLADDEARDLQLNLEYGKP

SEQ ID NO: 78970 - protein, 308 aa, Unknown
  Bacterial polypetide isolated from the Sargasso Sea
GIHGVGILHDLHSRGWKDVHLLEKNKLGSGTSSRSTKLIHGGLRYLASPSQIPLVSECLKERQLLLELVPDLVHPIEILIPIYKNSPEKSWKIKAGLSLYDFLAGKKNIHKHRKLNKVELEKLKSFIKTKDLSNVFSYWDAQTNDKKLVTHIALSAEKLGAQISENTKVILLSKDKLKWRIKVEDKEKNKCDIKADYIINCLGPWAHSIYDKKINITKLNSINNKGTHLVLKDIGINHAFLFYSPFDQRIFFLTPWQGKTLLGTTESQYTDDPSNVEVKQEEVDYLLKSVNTYLSAKLTESDVIDSFQ

SEQ ID NO: 78971 - protein, 56 aa, Unknown
  Bacterial polypetide isolated from the Sargasso Sea
MPRILVIGGGATGCGVARDLVLRGYQTTLIESGNLGSGTSSRSHGMLQSGARYAVS

SEQ ID NO: 78972 - protein, 145 aa, Unknown
  Bacterial polypetide isolated from the Sargasso Sea
SILSLTGGFFTMIARFLFPNVLFEPPQTFKIGFPEDFSRNSVDIKYKKEFNAWIVRDEESIFALSTVCTHLGCTPNWLPVESKFKCPCHGSGFRMTGIHFEGPAPRPLERFKVSLASDGQILVDKTKSYKWEKGEWDNPDSFLKV

SEQ ID NO: 78973 - protein, 184 aa, Unknown
  Bacterial polypetide isolated from the Sargasso Sea
MNETFDILVIGGGINGAGIVRDASGRNLKVCLVEKNTVGSATSSWSTKLIHGGLRYLENYEFRLVRESLKEREVIKKIASDITTPIPFIIPYQKSLRPKWLIKLGLFLYDNLGGKMTIPKSSTINIKNEFPNILKDQYKTGFQYYDLQIDDKKLVELNVKDAEKKGATIIENREVIRANRNKNV

SEQ ID NO: 78974 - protein, 157 aa, Unknown
  Bacterial polypetide isolated from the Sargasso Sea
AAAEAAGAPAVADIGKLAPGEMIIVEWRGTPIYVVKHSDESIKEIDKNLERLADPNSETQVQPDYAKNKYRSRKPGISVLSAVCTHLGCAPKYYPQLGVVDFDSEWQGGFFCPCHGSKFDLAGRVYAGVPAPDNLAVPPHYFKSDDILVIGEDGDVA

SEQ ID NO: 78975 - protein, 58 aa, Unknown
  Bacterial polypetide isolated from the Sargasso Sea
MNETFDILVIGGGINGAGIARDASGRNLKVCLVEKNTVGSATSSWSTKLIHGGLRYLE

SEQ ID NO: 78976 - protein, 149 aa, Unknown
  Bacterial polypetide isolated from the Sargasso Sea
VRADISKLEPGQMVVIEWRGKPVYVLRRTPEQVAGLATLNNDLKDPSSEASAQPDYIEGDGRAINEEFLVMVGLCTHLGCAPKFRPEVGAADMGGDEWLGGFFCPCHGSKFDLAGRVYKGVPASANLEIPPYSYESDSVLVIGVDAEAA

SEQ ID NO: 78977 - protein, 197 aa, Unknown
  Bacterial polypetide isolated from the Sargasso Sea
MKAIDLFSGAGGLSLAAHQCGIDVIAAIELDTAATVTYQRNLIERLKAPTKLINGDINAVDLPALMTELKLKPGKLDLLLGGPPCQGFSTHRINGAGINDPRNQLLLKYFDFVDGLRPKAFLIENVAGLLWKRHENYLNQLLALAETHGYTIHFCDILNAKDYGVPQNRKRVFIFGTRKDLNVDAANFPPAATHSSP

SEQ ID NO: 78978 - protein, 313 aa, Unknown
  Bacterial polypetide isolated from the Sargasso Sea
DVLVIGGGINGAGIVNDAVKRGLTVALCEQYDFGYGASTATSKLVHGGLRYLENYQFRLVNESINERNILLKNAPHLVKPLKFYVPLFKHSKWKMWKMRAGLTLYDWMQTDRLLPKHAVVNTFNLSKEIPWLNMDELVGAVSYYDAQMEDHRIIIELLLMAQKNGAVIHNYSKVVNIDKTSWGYSCDIKKENGEIKPIQVRSIISATGAWSNQFSEKSLVKPTKGVHIILPDMDLTASLLLMTPQDNRVFFVMPWNSYTLVGTTDQSGTFNYNEPIVTNEEVQYLLDALNAYTSTREWHSTDVIGAFCGYRPH

SEQ ID NO: 78979 - protein, 250 aa, Unknown
  Bacterial polypetide isolated from the Sargasso Sea
MSDIYDIFILGGGINGAGIARDAAGRGLKICLADKGEIGGATSSWSTKLIHGGLRYLENYEFKLVRESLKEREVIHQIANQITKPIPFIIPHTKNHRPKWLIEIGLFLYDNLGGKTVIPKSKSIDLKKEFSKILKSEYTIGFQYYDLQVDDKKLAKLNAQDAIKNNARIIEHNEVINIELIDDYWKIFLEDGLIIKSKIFINASGPWINETMKNLIKTDSSKKIRLVKGSHIITKKLYEKNIAFTLQNDD

SEQ ID NO: 78980 - protein, 280 aa, Unknown
  Bacterial polypetide isolated from the Sargasso Sea
MSKSFDLFIIGGGINGAGIARDAAGRGLSVCLADKGEIGGATSSWSTKLIHGGLRYLENYEFKLVRESLKEREIVYKIARHISKPIPFIIPHTDKIRPAWLIKFGLFLYDNLGGKTNIPKSKTYELAKKFPNILKEKYKTGFQYFDIQIDDKKLTKLNAKDAKRNKAKILEYNKVKKAEIVDNEWVISLQKGKKIKSKVLINASGPWINETLHKNIKIKSKKKIRLVKGSHIITKKLYKADVAFTFQNTDKRIIFVIPYKGKFSLIGTTEIEVKSPENKG

SEQ ID NO: 78981 - protein, 304 aa, Unknown
  Bacterial polypetide isolated from the Sargasso Sea
KEVECHNREIHLPRGKVIGGSSSINSMVYMRGHPFDYNSWSENHGLTEWSFDRCLPYFKKCESSDRGENEWRGGSGPLGVSKGKLKNPLFDALIEAGEQSGQGTSDDLNGYKPEGIARLDSTSKNNMRCSAATAHLRPALKRANVTLITRAFVTKIIIENNTAVGVEFEHQNSIKTFYSNKSIILSCGAIKSPQILMLSGIGEADYLKSFDIEPIINLKGVGKNLQDHLNIAIGYECKKNVTLHKLTQPHRMLSVGLRWLITRGGIVSSNIFEVGGQVFSNDKIKHPNLQYHFKPVYAEYEGRK

SEQ ID NO: 78982 - protein, 196 aa, Unknown
  Bacterial polypetide isolated from the Sargasso Sea
MSNAPVDHGRRRFLTIATSVVGGVGAIGAAVPFIASWNPSEKAKQAGAAVTADISKLEDGQLIRVEWRGKPVWIVKRTPAMLESLTKAVDKLRDPASEEPQQPEYAKNDHRSKKPEIFVAVGICTHLGCSPTYLMNDFDAQVEGIPSGFFCPCHGSTYDMAGRVFSGVPAPKNLMIPPYMFVDDTTILIGEDEGTA

SEQ ID NO: 78983 - protein, 195 aa, Unknown
  Bacterial polypetide isolated from the Sargasso Sea
MSAEVNLGRRYFIIGATGGVASVGVVGAAIPFLQYWQPSAKAKALGAPVKIDISKLRPGEILSPILSYRGQPVFVIYRDEDSLALLEEDSGRLADPNSESSEQPEFALNPYRSSRPEIGVFLGICTHLGCSPKHQVANVFPDSEQGGFFCPCHGSGFDLAGRVAAGVPAPTNLIVPPYRFSSDTEIIVGELEADA

SEQ ID NO: 78984 - protein, 223 aa, Unknown
  Bacterial polypetide isolated from the Sargasso Sea
MSKVFDLFIIGGGINGAGIARDAAGRGLSVCLADKGEIGGATSSWSTKLIHGGLRYLENYEFKLVRESLKEREIVYKIAKNISKPIPFIIPHTDKIRPAWLIKFGLLLYDNLGGKTNIPKSRTLDINKNFPNILKEKYKTGFQYFDIQIDDKKLTKLNAQDAKRNKAKILEYNKVKKAEIINNEWVISLQNRKKIKSKVLINASGPWINETLQKNIKIKSKNK

SEQ ID NO: 78985 - protein, 348 aa, Unknown
  Bacterial polypetide isolated from the Sargasso Sea
MSKKIGIIGGGISGLVVGIFLAREGHQVSIFEKKALLSETSSKTTKLLHGGLRYLENFHIKEVQKGLNDRYWWLKNFPQHTNKIKILIPFKNIFSLELLKFYIGIKFYDFLAGKKKLGKSKLCIRKVLKDLNLYSDYKGHLSFFDGVMDDVLLGKDLIHLAKELKINLYENNEVSNFDIYGNIDNKKFDKVILAVGPWTKILLEKNKVKSLKDIDYIKGSHLILDKKIHSGLMFKGICQSRYVFALPYKGYTLLGTTEVKVKSPDIPKIDINEENYLIDSINQVFRDPVTRKDIVSSYSGVRPLIRSKNDFHKSSRDFFIQKDSNLISIFGGKWTTSPSIGRKIATIV

SEQ ID NO: 78986 - protein, 189 aa, Unknown
  Bacterial polypetide isolated from the Sargasso Sea
MPDGKNTVTKPPEPKAPAALSKASTDNAELNRRSFFSWLSFGWLGFVAATGGFFTMLLRFLFPNVLFEPVQTFRAGFPDDYIIGEVNTNWKDKYGVWIVRNDQGIYALSTVCTHLGCTPNWLGTSKKFKCPCHGSGFKMTGINFEGPAPRPLERYRIVLADNGEIIIDKTQKYQQEKGQWTDPEAFLTV

SEQ ID NO: 78987 - protein, 219 aa, Unknown
  Bacterial polypetide isolated from the Sargasso Sea
MSKVFDLFIIGGGINGAGIARDAAGRGLSVCLADKGEIGGATSSWSTKLIHGGLRYLENYEFKLVRESLKEREIVYKIARHISKPIPFIIPHTDKIRPAWLIKFGLFLYDNLGGKTNIPKSKTLDLKKKFPNILKEKYKTGFQYFDIQIDDKKLTKLNVKDAKRNKAKILEYNKVKKAEIIGDDWIISLQNGKKIKSKVLINASGPWINETLKKNIKIK

SEQ ID NO: 78988 - protein, 301 aa, Unknown
  Bacterial polypetide isolated from the Sargasso Sea
MNLSVVETFDILIVGGGINGAGIVRDAAGRNLRVCLVEKNSVGSATSSWSTKLIHGGLRYLENYEFRLVRESLKEREIIKKIASEITTPLPFIIPHQRSLRPKWLIKLGLFLYDNIGGKMTVPKSSTINIKREIPNILKDKFKIGFQYYDLQVDDKKLVQLNVEDAKKRGATIIENRKVVNAKRNKNIWDVILDDNTILKSKILINAAGPWINEVLSNVIKLNSNKSIRLVKGSHIITKSLYSQKKAFTLQNEDNRIIFVIPYKDEYSLIGTTGTEVFSPENPKIDESEIDYFINFSNKYF

SEQ ID NO: 78989 - protein, 232 aa, Unknown
  Bacterial polypetide isolated from the Sargasso Sea
MPTPFAQTSGGRSDVKEKSNSEVGRVMRDKEDERVDGGRRAWLIATTVAGGIGGVATVVPFVSSFAPSEKAKAAGAPVEVDISDLKPGDMKTVAWRGKPVWIINRTDRMLTDVQKADNEVADPHTKNPFSMPLPEYCNNEFRSRTDHKNLFVAVAVCTHLGCTPTPRFQEGPQPNLPDDWPGGFLCPCHGSTYDMAGRVFKNKPAPQNLDIPPYMFTSATSLVIGKDEKGEA

SEQ ID NO: 78990 - protein, 198 aa, Unknown
  Bacterial polypetide isolated from the Sargasso Sea
MQPKSPPNPGRRKFLIGATSAVGAVGIAGAAVPFISAFNPSAAAEAAGAPAVADISKLAPGEMIIVEWRGTPIYVVKHSEESINEIDKNLERLADPDSNTEVQPEYAKNKYRSRKPGISVLSAVCTHLGCAPKYYPELGVVDFDSEWQGGFFCPCHGSKFDLAGRVYAGVPAPDNLTVPPHYFKSDDILIIGEDGDLA

SEQ ID NO: 78991 - protein, 190 aa, Unknown
  Bacterial polypetide isolated from the Sargasso Sea
MSKIFDLFIIGGGINGAGIARDAAGRGLSVCLADKGEIGGATSSWSTKLIHGGLRYLENYEFKLVRESLKEREIVYKIAKHISKPIPFIIPYADKIRPAWLIKIGLFLYDNLGGKSNIPKSKTFDLRKKFSNILKEKYKTGFQYFDIQIDDKKLTKLNTKDAKRNNAKILEYNKVKKAEIIGNEWIISLE

SEQ ID NO: 78992 - protein, 79 aa, Unknown
  Bacterial polypetide isolated from the Sargasso Sea
FVAVGICTHLGCSPSYLPDSFGEQVQGVTSGFFCPCHGSKFDMAGRVFQGVPAPLNLVIPPYKYLSDTTILVGADGKEA

SEQ ID NO: 78993 - protein, 131 aa, Unknown
  Bacterial polypetide isolated from the Sargasso Sea
MKVAVLGIVDPKGLSFLKENEFKVIEIENFEIQNLREQLEDVDGILLRTTRLDKEILQHCNNLKIISRHGVGYDNVDLDFLNQNKIALSITSTSNAVSVAEHVLSFFIYLTKNLTLSDSLVKEGNFEKRSQ

SEQ ID NO: 78994 - protein, 196 aa, Unknown
  Bacterial polypetide isolated from the Sargasso Sea
MSNAPVDTGRRRFLTAATAVVGGAGAVAVAVPFIKSWNPSAKAKAAGAPVEVNISKVEPGQLIRVEWRGKPVWVVRRTEAVINELPTHDDKLRDPASAEMQQPEYATNPLRSIKPEYFIAVGICTHLGCSPTYLPDSFAEQVQGVTSGFFCPCHGSKFDMAGRVFQGVPAPLNLVIPPHQYVDDGTVIIGVDKGVA

SEQ ID NO: 78995 - protein, 358 aa, Unknown
  Bacterial polypetide isolated from the Sargasso Sea
MTSKKMDGILLSKKIGIIGGGISGLVVGIFLAKEGHQVSIFEKKSLLSETSSKTTKLLHGGLRYLENFHIKEVQKGLNDRYWWLTNFPQHTNKIKILIPFKNIFSLELLKFYIGIKFYGFLAGKKRLGKSKLSIRKVLQDLNLYNDYKGHLSFFDGVMDDELLGKDLIHLAKELKINLYENNEVSNFDIYGNIDNKKFDKVILAVGPWTKILLEKNKVKSLKDIDYIKGSHLILNKKIHSGLMFKGICQSRYVFALPYKGYTLLGTTEVKVKSPDKPEIDSNEENYLIDSINQAFRDPVTRKDIVSSYSGVRPLIRSKNDFHKSSRDFFIQQDANLISIFGGKWTTSPSIARKIATIV

SEQ ID NO: 78996 - protein, 198 aa, Unknown
  Bacterial polypetide isolated from the Sargasso Sea
MQPKSPPNPGRRKFLIAATSTVGAVGIAGAAVPFISAFNPSAKAEAAGAPAVADISKLAPGEMIIVEWRGTPIYVVKHSQESMNEIDKNLDRLADPDSNTEVQPQYAKNKYRSRKPGISVLSAVCTHLGCAPKYYPQLGVVDFDSNWQGGFFCPCHGSKFDLAGRVYSGVPAPDNLAVPPHYFKSDDILVIGEDGDIA

SEQ ID NO: 78997 - protein, 95 aa, Unknown
  Bacterial polypetide isolated from the Sargasso Sea
GVWMVRNDEGIYALSTTCTHLGCTPNWQPTAKKFKCPCHGSGFRITGIHFEGPAPRPLERFKITLADDGQIIIDKNTKYQQEKGQWTDPEAFLKV

SEQ ID NO: 78998 - protein, 184 aa, Unknown
  Bacterial polypetide isolated from the Sargasso Sea
MSEKSNADAPRAAVGSVSKGRPSTIERRSFFSWLAVGWLGFAAATGGFFTVIIRFLFPNVLFEPPQTFKIGYPEEFAPNTVDTRFKKEFNAWIVRDDESLFALSTVCTHLGCTPNWLATDNKFKCPCHGSGFRMTGIHFEGPAPRPLERFKIGIANDGQVLVDKTKSFKWEKGEWENKDSYLKV

SEQ ID NO: 78999 - protein, 196 aa, Unknown
  Bacterial polypetide isolated from the Sargasso Sea
MSNAPVDTGRRRFLTAATAVVGGAGAVAVAVPFIKSWNPSAKAKAAGAPVEVNISKIEPGQLIRVEWRGKPVWVVRRTEAVINELPTHDDKLRDPASAEMQQPEYATNPLRSIKPEYFIAVGICTHLGCSPTYLPDSFGEQVQGVTSGFFCPCHGSKFDMAGRVFQGVPAPLNLVIPPHQYVDDGTVIIGVDKGVA

SEQ ID NO: 79000 - protein, 194 aa, Unknown
  Bacterial polypetide isolated from the Sargasso Sea
MSETIDQNKRHFLGMATAATGLVGVGFATVPFLSSLKPSARARALGAPVEVPLSSLEPGEMIRVVWRGKLVYVLRRTSDMLKRLSDVTDLLRDPDSLEADIQPDYTVNEHRSLNPEYLVVEGSCTHLGCAPLPQFEVTPSSDWFGGFFCPCHGSKFDLSGRVYKGVPAPTNLKVPPYNFSQTNVITIGIDPSDA

SEQ ID NO: 79001 - protein, 136 aa, Unknown
  Bacterial polypetide isolated from the Sargasso Sea
MNKYYDLFIIGGGINGAGIARDASGRGLSVYLAEMGKVGSATSSWSSKLIHGGLRYLENYNFKLVRESLKEREIITSIAPTITRPLPFIIPYTKKLRSKLLIRLGLFLYDNLGGKSNIPKSSKINFNKKYSKILNQ

SEQ ID NO: 79002 - protein, 255 aa, Unknown
  Bacterial polypetide isolated from the Sargasso Sea
ELKHELNGVGKNLKDHLEFNLQYKCKQPITLNGSMSLHKKLLIGLRWLLFKKGLGATNHFESCGFIKSSEKIKIPDIQYHFLPGAMRYDGKQANQGHGYQVHVGFNKPKSHGSIEIKSNDPRHPPKITFNYLKHEDDIKGFRLALKLTRNIMNQSAFKPFHDKEIQPGKDIQSDDDIDNFIKNSVESAYHPCCSCKMGSDNDSVVDNQTRVIGLNGLRVVDASIFPDILNGNLNAPTMMVAEKAADMILKKPPPR

SEQ ID NO: 79003 - protein, 198 aa, Unknown
  Bacterial polypetide isolated from the Sargasso Sea
MQPKSPPNPGRRKFLISATSAVGAVGVAGAVVPFISAFNPSAAAEAAGAPAVADIGKLAPGEMIIVEWRGTPIYVVKHSDESIQEIDKNLERLADPNSETQVQPEYAKNKYRSRKPGISVLSAVCTHLGCAPKYYPQLGVVDFDSEWQGGFFCPCHGSKFDLAGRVYAGVPAPDNLAVPPHYFKSDDILVIGEDGDVA

SEQ ID NO: 79004 - protein, 64 aa, Unknown
  Bacterial polypetide isolated from the Sargasso Sea
MDGILLHKKIGIIGGGISGLVVGIFLARQGHKISIFEKKSLLSETSSKTTKLLHGGLRYLENLH

SEQ ID NO: 79005 - protein, 190 aa, Unknown
  Bacterial polypetide isolated from the Sargasso Sea
MSDKPTKKTSTISPQSPPPAALNKVEKDSSVNRRTFFSWLSLGWVAFVAATGGFFTMMLRFFFPNVLFEPVQTFRAGYPDDYTVGEVDLRWKEKYGVWMVRNDEGIYVLSTTCTHLGCTPNWQPSARKFKCPCHGSGFRASGIHFEGPAPRPLERFKITLADDGQIIVDKTQKYQQEKGQWNDPESFLKV

SEQ ID NO: 79006 - protein, 179 aa, Unknown
  Bacterial polypetide isolated from the Sargasso Sea
MIPNAAVGSSPENAFKGPETDRRGFLSWLSVGWLAYLGVTGGFFTIIVRFLFPNVLFEPPQTFKIGYPEDFSKNSVDIKYKKSYNAWIVRDEESIFALSTVCTHLGCTPNWLPVESKFKCPCHGSGFRMTGIHFEGPAPRPLERFKISLANDGQILVDKTKSYKWEKGEWENPESFLKV

SEQ ID NO: 79007 - protein, 198 aa, Unknown
  Bacterial polypetide isolated from the Sargasso Sea
MQPKSPPNPGRRKFLISATSAVGAVGVAGAVVPFISAFNPSAAAEAAGAPAVADIGKLAPGEMIIVEWRGTPIYVVKHSDESIMEIDKNLERLADPNSETQVQPEYAKNKYRSRRPGISVLSAVCTHLGCAPKYYPQLGVVDFDSEWQGGFFCPCHGSKFDLAGRVYAGVPAPDNLAVPPHYFKSDDILVIGEDGDVA

SEQ ID NO: 79008 - protein, 149 aa, Unknown
  Bacterial polypetide isolated from the Sargasso Sea
FGWLGFVAATGGFFTMLLRFLFPNVLFEPVQTFRAGFPDDYIIGEVNTNWKDKYGVWIVRNDQGIYALSTVCTHLGCTPNWLGTSKKFKCPCHGSGFKMTGINFEGPAPRPLERYRIVLADNGEIIIDKTQKYQQEKGQWTDPEAFLTV

SEQ ID NO: 79009 - protein, 85 aa, Unknown
  Bacterial polypetide isolated from the Sargasso Sea
MQKGDHLDWDIIVIGGGITGAGILREARRRGFKALLLEQQDFSWGTSSRSSKMVHGGLRYLASGDYKLTKESVQERQRLLNEAPG

SEQ ID NO: 79010 - protein, 326 aa, Unknown
  Bacterial polypetide isolated from the Sargasso Sea
MASLKNGKDGRLVVVSRDLERAVAVPAIAATMLDAVERWSECEPKLLEIYENLNAGAVADAFAFDSRQAAAPLPRAPQWCDGSAFLNHGRLMEKAFGLPPVPDVETIPLMYQGASDDFLGAHDDVPLPDEADGIDFEAEFGVVVNAVPMACSVEAARAHIILLVQINDVSLRSMGPREMKTGFGFLQAKPSSAFAPVAVTPDELGDAWHQSRVQLDLQISWNGAWFGNPNGREMNFGFDQLIAHAARTRRLSAGTVIGSGTVSNAERSRGSGCIAERRAIEVIDQGAPSTPFMKYGDWVRMEALLEGKPLFGVIDQCIVSANLTQG

SEQ ID NO: 79011 - protein, 232 aa, Unknown
  Bacterial polypetide isolated from the Sargasso Sea
MATPFAQTSGGMKSRDGKSNSEVGRVMRDKEEKRVDSGRRTWLIATSVAGGVGGVATVIPFAASLAPSAKAKAAGAPVEVDISGLKPGEMVTVPWRGKPVWILNRTDAMLADVVKADKEVADPTTEKPYTMPLPAYCANEYRARADRKNILVVMAVCTHLGCTPSQRFTPGPQPNLPDDWPGGFLCPCHGSTYDLAGRVFKNKPAPQNLDIPPYMFTSATTLVIGKDEKGEA

SEQ ID NO: 79012 - protein, 462 aa, Unknown
  Bacterial polypetide isolated from the Sargasso Sea
EQQDFSWGTSSRSSKMVHGGLRYLASGDIKLTKESVQERQRLLKEAPGLVDPISFYFTFRKGKFPGRIAMKIILTIYDFFAGAQDNRFCNNEELLERFKGLDDNKLQGASCYTDAMVDDSRLVLRVLQDSIDDGGYAVNYTKVEDLLLTDGRVSGVSIQDRGHSGLIHLNAPVVINATGAWADRLRNVVNNETRIRPLRGSHIIIAKSLFPISDVMTFLHVDDKRGVFVYPWEGTTVIGTTDIDHNEDIDIEAGISDQEVDYLLKAFNSQFPSNALKRSDVLSTWAGVRPVIGAEKSKDPSKERRDHAVWSDNGLITVSGGKLTTFRLIALDALAAAKDNLPAAKEITDDRVFLTPKVSAETLLPKNISWAQRLLGRYGEKAIELLNESSKEEHDNLDATEFSLAECRWAIKYEAVEHLDDLMLRRTRLGMCLPNGGSTLFPALKNYFYPIIAGTTNGGKKR

SEQ ID NO: 79013 - protein, 287 aa, Unknown
  Bacterial polypetide isolated from the Sargasso Sea
MNDSTDKYLTLRGANNDIYFFQKRVNDTIAEVIGTNFIKKSLKTKILSEALAKRDEILDALANIEKLKLTNISDEVLNLFKDEDLSTEKLDQASHERSLQRRKVLIGLTSAVGIAGLPFAATPFIAAWNPSAKAKALGSSVKLDVSKMQYGQQIQVAWRKQPIFIIRHTSEALNQLDKSVPKLADPESLSIDEPYRGRFVTRSLNSEYSVLSGICTHLGCSPKYHPEVEPKPWDSSWNGGFFCPCHGSMFDLVGRVYKGVPAPSNLTVPPHFFEGSILTIGEERSNV

SEQ ID NO: 79014 - protein, 392 aa, Unknown
  Bacterial polypetide isolated from the Sargasso Sea
DVLVVGGGITGVGCALDAASRGMSVALVEQGDIASGTSSRSSKLIHGGLRYLEQFQFALVKEALSERNLLLTNIAPHLVHRVDFLYPLKGLSERLYAGLGIGLYDLLARRKGSPLPRHRHLSKKRVAAKAPALNSRLNKGAIMYSDATVDDARYTICAARTAAGLGASIISSARVTGLTKTNDRVAGALIKCLESGQEFEVGCKTVVNATGVWTSEIEAHAGMRQSRVTASKGIHLVVAADRLNLKSGMILRTSTSVLFVIPNGDHWVIGTTDSEWQLNKAHPAATKCDIRYLLQTINSVIASPLSEEDVIGVYAGLRPLLTGESDTTSQLSREHAVTHPAPGLVSISGGKYTTYRVMAAETIDAVGVDQDRKLPHSKTENLPLIGANGFDT

SEQ ID NO: 79015 - protein, 320 aa, Unknown
  Bacterial polypetide isolated from the Sargasso Sea
MKVAVLGKVDQKGLSFLKENEFKVIEIENFEIQNLKERLKDVDGILLRTTRLDKEILQHCDNLKIVSRHGVGYDNVDLDFLNENKIALSITSTSNAVSVAEHVLSFFIYLTKKISLSDSLVKEGNFEKRSSLPNFFELYKKKVLIIGFGRIGKEVAKRCLGFDMEVYVYDPFLDNEIIIRSQCIPIEKNQGLAIADFITIHLPLNIDTKNFISQTELNVMKKNSILVNTSRGGIVNENDLCIALESKKIQGAGMDVFVSEPPESNHPFFKLDNILLTPHNAALTLECRERMSLEASQNIVFFLKNMSELNVQNLVNKKYL

SEQ ID NO: 79016 - protein, 337 aa, Unknown
  Bacterial polypetide isolated from the Sargasso Sea
MNTFDYIIAGAGSAGCVLANRLSKDPGTKVLLIEAGGTTWHPFVKMPAGVLELISGEGAGKFYNYGYWTEGQPHLNNRKLFFPRGKGLGGSSNINGMLYVRGHSRDYDIWRQLGNEGWSYEEVLPYFKRAEKNENGSSEFHGSDGELSVQNPVFTNNPLHRCFLNAGKEAGYKYIEDINEYDNEGFGPCPQTISKGYRASTSFSFLNPIKERKNLTIATNSTTNKLLFEGTKCVGLEYLKGKEVIKAYAEREVIVCGGAINSPQILQLSGIGKGDYIKKWGLKVVADLPGVGENLQDHLDVLSHYECTQPVTEAKYTAGGLALFRMAAILAQWMITK

SEQ ID NO: 79017 - protein, 380 aa, Unknown
  Bacterial polypetide isolated from the Sargasso Sea
MNTFDYIIAGAGSAGCVLANRLSKDPDIKVLLIEAGGTTWHPFVKMPAGVLELISGEGAGKFYNYGYWTEGQPHLNNRKLFFPRGKGLGGSSNINGMLYVRGHSRDYDIWRQLGNEGWSYEEVLPYFKRAEKNENGSSEFHGSDGELSVQNPVFTNNPLHRCFLNAGKEAGYKYIEDINQHDNEGFGPCPQTISKGYRASTSFSFLNPIKDRKNLTIATNSITNKLLFDGTKCVGLEYLKGKEVIKAYAEREVIVCGGAINSPQILQLSGIGKGDYIKKWGLKVVADLPGVGENLQDHLDVLSHYECTQPVTEAKYTAGGLAVFRMAAILAQWMITKKGPGNDIGLSGVSFLKTDDTLDLPDIQMHFIGSLLKDHGKTRP

SEQ ID NO: 79018 - protein, 381 aa, Unknown
  Bacterial polypetide isolated from the Sargasso Sea
ITITCRLREHEQNLEKLVQKQTLELSEQALELKQAQSLSGVGSWHLSPDKSIRQLSSQAKSLFKEQSKAQSITDVCKKIDSFYKNSFLNFIHTKPSSPTEIEYTIKLNGEKRWFHEHAEWNPKTNTLVGTIKDISAEKQRQHELYQQAHFDSVTGLANRHYSEKYIASLCPEDQYSSGLTLLCAEIKGYRQLEDIYGQDYLNELQTTLANRLIEFSDLHQAFCAHIKPGCFLILLKEAIFDEKLAALLDRLQHQVGGIIETAGSAHFYHLYIGVGYPHLQNIDAAEQINTALIAMNECPRTQKPFTVYSQSLKDKLIAQSNLESDLRHALSANEQLSMVYQPIVNTLDGTLIGCEALVRWQHPVRGFVSPVEFIAIAEQSE

SEQ ID NO: 79019 - protein, 448 aa, Unknown
  Bacterial polypetide isolated from the Sargasso Sea
MKLSRRDFMKANAVAAAAAVAGVSAPTLAANLITSTDKTAITWDKAPCRFCGTGCSVLVGSQDGRVVATQGDPDAPVNRGLNCIKGYFLSKIMYGQDRLTQPMLRMTDGKFDKNGNFAPISWDQAFDIMAEKFKATLKEKGPTAVGMFGSGQWTVWEGYAAAKLMKAGLRTNNLDPNARHCMASAVVGFMRTFGMDEPMGCYDDIEQADAFVLWGSNMAEMHPILWSRISDRRLSHQDVQVHVLSTFEHRSFELADNGMVFTPQTDLAILNYIANYIIQNDKVNWEFVNKHTQFRKGVTDIGYGLRPTNPLQQKAKNPDSGDSTPMSFDDFAKFVADYDLESVSKLSGVPKDKLEKLAQLYADPSKKVVSYWTMGFNQHTRGVWANNLCYNIHLLTGKISTPGSGPFSLTGQPSACGTAREVGTFAHRLPADMVVTEPKHRAIAEKIW

SEQ ID NO: 79020 - protein, 483 aa, Unknown
  Bacterial polypetide isolated from the Sargasso Sea
PVNAQYIRNLIIAAHNIHDHIVHFYQLSALDWVDITAALQANPQKAADLLKGVSTWSLNSADELTKVQDKIRALVASGQLGIFANGYWGHKAMKLSPEVNLIAVAHYLQALECQRDANRIVAILGGKTPHIQNLAVGGVANPINLDAPSVLNLERLLYVKSFIDRLGEFIEQVYKVDAAIIAAHYPEWLNLGQGAKHYLSVPELPTDGDGGSFLMPGGYIENGDLAGYRPIESHQDVWLMDGIAESNKHAWYKDDEPLKPWEGKTEPNYTGWQDDGKYSWVKSPTFYGKVVEVGPLADLLVKLAAKHPETVAHFDQLNGLYKTLTGSAIKTEQLHSTLGRIIGRAVRCCVLKDTLSHQWKALVDNIGKGDFSAYIKTEIPADKEFRGVGFEEAPRGMLSHWIVIKGGKIENYQAVVPSTWNSGPRNFNDEPGPYEQSLVGTPVVDPAKPLEVVRTIHSFDPCMSCAVHVVDTQSGDVTQVKVL

SEQ ID NO: 79021 - protein, 191 aa, Unknown
  Bacterial polypetide isolated from the Sargasso Sea
MDTHAALYEQGKARLDALRQLAPRQQQTLLDKLQQHGITRRDFMKWSAMVTGMLALPLPFSNLVAEAAELADRVPLIWLHMAECTGCSESLVRADTPNLDSLIFDHISLEYHETLMAAAGWQAEENLEHALETYKGRYLLAVEGAIPTANNGSFLTVGCKGHTGLEIIKHAAESAAAIISVGTCASFGGVP

SEQ ID NO: 79022 - protein, 131 aa, Unknown
  Bacterial polypetide isolated from the Sargasso Sea
MSKRVVIDPITRIEGHLRIEVEVDENNVINKAWSSSTLWRGIEVILKGRTPMDVGLIVQRICGVCTYSHYRCGTEAVENALGIQIPLNAKYLRSLMQTSLYMHDHIVHFYHLHGLDWVDVVSALSADPAKA

SEQ ID NO: 79023 - protein, 129 aa, Unknown
  Bacterial polypetide isolated from the Sargasso Sea
MDTHAALYEQGKARLDALRQLAPRQQQTLLDKLQQHGITRRDFMKWSAMVTGMLALPLPFSNLVAEAAELADRVPLIWLHMAECTGCSESLVRADTPNLDSLIFDHISLEYHETLMAAAGWQAEENLEH

SEQ ID NO: 79024 - protein, 567 aa, Unknown
  Bacterial polypetide isolated from the Sargasso Sea
MSKRVVIDPITRIEGHLRIEVEVDENNVINKAWSSSTLWRGIEVILKGRTPMDVGLIVQRICGVCTYSHYRCGTEAVENALGIQIPLNAKYLRSLMQTSLYMHDHIVHFYHLHGLDWVDVVSALSADPAKAAQVALKYTDKPIAAGEGELRAVQERVKGFVETGKLGPFANAYWGNGTYKFTPEQNLIALSHYLKALEVQRVAAEMLAIFGGKQPHPQSLVVGGVTSVRDMLSPARLQEWKQKHAIVTDFILRAYQADIVMAAEAFGTEPSVLGGVNVKNFMATHDFVLANGEYMFDQGVIMNGDLAGVSDINPDLIAEDVSHAWYNADAPQHPYDGTTIPNYTGFIERDTVYGKLPTLDGDGKYSWVKSPRYQGEPVEVGPLSCLLVSYARGNKVVVDAVNALLTRTGLPVEALFTTLGRTAARMLQTVIVAQEGLKTFEALLTNIQSDETTYVKPHIDPSKEYVGHAMIEAPRGMLSHWIRIKNGVIENYQAVVPTTWNAGPVDANGKIGPYEASLIGLKLEDPTKPLEVIRIIHSFDPCMACSVHVMDFKGQALSEFRVSPNGQ

SEQ ID NO: 79025 - protein, 567 aa, Unknown
  Bacterial polypetide isolated from the Sargasso Sea
MSKRVVIDPITRIEGHLRIEVEVDENNVINKAWSSSTLWRGIEVILKGRTPMDVGLIVQRICGVCTYSHYRCGTEAVENALGIQIPLNAKYLRSLMQTSLYMHDHIVHFYHLHGLDWVDVVSALSADPAKAAQVALKYTDKPIAAGEGELRAVQERVKGFVETGKLGPFANAYWGNGTYKFTPEQNLIALSHYLKALEVQRVAAEMLAIFGGKQPHPQSLVVGGVTSVRDMLSPARLQEWKQKHAIVADFILRAYQADIVMAAEAFGGEASVLGGVNVKNFMATNDFVLANGEYLFDQGVIMKGDLAGVSDINPELIAEDVSHAWYTADAPQHPYDGTTIPNYTGFVERDTVYGKLPTLDGDGKYSWVKSPRYQGEPVEVGPLSCLLVSYARGNKVVVDAVNALLARTGLPVEALFTTLGRTAARMLQTVIVAQEGLRTFDALLTNIQSDETTYVKPHIDPSKEYVGHAMIEAPRGMLSHWIRIKNGVIENYQAVVPTTWNAGPVDANGKIGPYEASLIGLKLEDPTKPLEVIRIIHSFDPCMACSVHVMDFKGQALSEFRVSPNGQ

SEQ ID NO: 79026 - protein, 290 aa, Unknown
  Bacterial polypetide isolated from the Sargasso Sea
KAHVNKINFEGKKAIGISYWRDNELITVKANKEVILSAGSIGSPHILQVSGIGDEKKLGSLGISVKHHNSSVGQNLQDHLMLRPVYKVKNIKTLNKTINSFFGKMMIGMEFVFFRRGVMTMGASQLCGFAKSDDSRETPNLQFHVQPISTDRLGGASLHKFNAFTPTVANIRPTSRGEVYIISSDSRDYPKIKMNYLSTEDDRQVSAAGIRLVRKIIFESETFKKYQPEEFRPGINYQSDEEIIEASSAHVQTIFHPVGTCKMGSDSTSVVSDKLKVHGIENLRVVDASN

SEQ ID NO: 79027 - protein, 162 aa, Unknown
  Bacterial polypetide isolated from the Sargasso Sea
MNRIRIFLFLCFVLLFSCEKNIDWNVYGGSYKRTQFVNSEKLNLNNISNLKKVWEYSSADNDNFSQIQTNPLIINDKFYGVSPKLKLFSLEAKSGSEIWVFDPFNSDYNFFDNDDSRVNVCRGITYFKDNSKQAFIFYAVGSKLFKVNIKNGIADSSFGNNG

SEQ ID NO: 79028 - protein, 254 aa, Unknown
  Bacterial polypetide isolated from the Sargasso Sea
MDNVLVIGAGGVSHVTIHKMAQNSNYFKNIILASRSIKKCFQIKKSVKNSYNINIEVAELDADNVDETVELIKKFKPFLVVNLALPYQDLNIMDACLFTNTHYLDTANYEPRNEAKFEYKWQWNYHKKFKQKGLMALLGSGFDPGVTNVFTTFTRKHHLDNIDFLDILDCNDGDHGHPFATNFNPEINIREVTANSKHWDNNKWEIGPALKKKVSFKFPEIGNKNMYLMYHEELESLTKHFPEIKRARFWMTFG

SEQ ID NO: 79029 - protein, 303 aa, Unknown
  Bacterial polypetide isolated from the Sargasso Sea
MIPNNLSKEINSNKIFVSISSNYKQITIIIFSSLFILGIIGSTFLKVENSFVDYFKKDTEIYKGMKLIDEKLGGTTPLDIIIEFDTNTTEAENFDDEDLLDFGIAYDPTDYWFTKEKIDLIKNIHDHLETYNFAGKVLSLASVIRVAESLNSGNEFDSLELAVLYKKLPTKLKDQILKPYVQIEKNQARITMRLIDTHPDLKRSDFVNDLNDYFTENINTDNINAYSTGVLILYNNMLESLFDSQIKSLGIVLIGIFVMLVFLFKSLSIAIIAIIPNIIACFVILGTMGYLGIPLDLMTITIA

SEQ ID NO: 79030 - protein, 251 aa, Unknown
  Bacterial polypetide isolated from the Sargasso Sea
MGYTTPYARKLYRILTKESFLFTEMIASKSMIYSKSKDLIIENDEHNPVALQVGGSDLEDLRKCSKIAHQYNYNEINLNVGCPSKAVQKGSFGACLMQDKVLVKECLEVMQNNKIQVSLKCRIGLGKKLNYNFFEEFIDEVVKSGIKIIYVHARNAILTGISPAQNRSIPPLDYSFIRKIKLKYPNILFVLNGGIDSLENAKLLLREFDGVMVGRLIQNNPFLLKKVDSYIYNLDDSSNINEKLIFDYFNY

SEQ ID NO: 79031 - protein, 284 aa, Unknown
  Bacterial polypetide isolated from the Sargasso Sea
FQVTERNGLRCSTAVGYLNPVKKNKNLKIETNCHVQKINFDGNNADSVTYLKGHETFTVKAEKEILLCAGSIGSPHILQASGVGEASKIKDLGINIIKDLKGVGKNLQDHLMFRPVYKVKNIKTLNKKINSMFGKLLIGIEYVFKRRGPMTMGASQLCGFAKSDPSRDTPNLQFHIQPISTDKLGGANLHDFHAFTPTVANIRPTSRGEISISSSDTKVNPKIKMNYLSTDEDRKVAADGIKLIRKIVMETNEFKKYEPEEFRPGSHLNEKEEIVKACSHYAQT

SEQ ID NO: 79032 - protein, 354 aa, Unknown
  Bacterial polypetide isolated from the Sargasso Sea
MVESKINRWVKQEILNQSIYKVNNKNTPIKLNQNESPVDWPIEIRKKLLSSFNDYQWNRYPEINGENLRKKLAKKLQLSKSQIVIGKGSNEVIQAITTATLTHGDIVCHLSPTFTIYSLLSQQRGAKIVESKLDSEFNVVLEDLINKSSMAKLTFIANPNSPTGKLLPVEIIKKVAEQTSGLLIVDEAYIDFSGGSALPLLESNDNIIITRTFSKAWSLASFRLGYGIMSDDLASEIQKCMLPFNIDSPATLAGHLLLDHADIIKELISSIVKEREKLIIKLNELHDIKAWPSSTNFFMLETPILPSVLFHKLAEDGILVRDISSYPLCKKVVRVTVGTAKENKCFYKTITNLL

SEQ ID NO: 79033 - protein, 294 aa, Unknown
  Bacterial polypetide isolated from the Sargasso Sea
WITSDGNAGPSGTGGFKAEIGRYHLYVSLACPWAHRTLILRSLKGLEPFISVSVVHWFMAGDGWTFEPGEDVIPDTINGFKFLHQVYTAAAPDYSGRVTVPVLWDKKSKTIVSNESSEIIRMLNNTFDDLGAKPGDYYPEEFRPEIDDINKRVYSSLNNGVYKCGFATTQTAYEEALVPLFDTLDWLEEKLSSNRYLLGNFITEADWRLFTTLVRFDPVYVGHFKCNIRRLMDYPNLSGYVRDLYQVPGVAETVNMQHIKKHYYGSHETINPTRIIPAGPYIDYSEPHSRADLN

SEQ ID NO: 79034 - protein, 200 aa, Unknown
  Bacterial polypetide isolated from the Sargasso Sea
MFDRHLIPVIRSPLTRLARPLCHAGISANQVSLTGFAIGMLALPLLAFGCYQWALAAILLNRLLDGLDGAVARETGITDCGGFLDITLDFIFYAAVVLGFALATPANALPAATLLFAFMGTGSSFLAFAIMAGKRGIDNPVYHHKSLYYLGGLTEGSETIALFVLMCLWPAAFAPLAYGFALLCAITTLTRLWSGYHTLR

SEQ ID NO: 79035 - protein, 184 aa, Unknown
  Bacterial polypetide isolated from the Sargasso Sea
EKIGYWRYIAIYRHLEKNPDSKIFPIFNFFENWCQDENRHGDFFDALMKAQPDTVRGPIARLWCRFFLLAVFATMYVRDVARKEFYESLGLDARTYDRMVIDKTNETSARVFPVVLDVRNDKFWERLEQLVSNNAALQAADAGTSPAPVRLIRKLPHWIGNVSVMAKLFLMSPIPSDRFQPAVR

SEQ ID NO: 79036 - protein, 55 aa, Unknown
  Bacterial polypetide isolated from the Sargasso Sea
FLIAAMTENANGLDALDDSFSLYRCHTIMNCAKTCPKGLNPGKAIAGIKSEMGQR

SEQ ID NO: 79037 - protein, 107 aa, Unknown
  Bacterial polypetide isolated from the Sargasso Sea
MKSYNIIDHEYDVVVLGAGGSGLRAAVGLSEAGLKTACISKVFPTRSHTSAAQGGISAALGNMGEDDWRWHMYDTVKGADWLGDQDSIEYLCKEAPKAVLELEKYGV

SEQ ID NO: 79038 - protein, 74 aa, Unknown
  Bacterial polypetide isolated from the Sargasso Sea
MSSYKIIDHEYDVVVLGAGGSGLRAAVGLSEAGLKTACISKVFPTRSHTSAAQGGISAALGNMGEDDWRWHMYD

SEQ ID NO: 79039 - protein, 101 aa, Unknown
  Bacterial polypetide isolated from the Sargasso Sea
MVEFTLPSNSKVQKGITHPVKEVSKKPKKVVIYRWNPEDKDNPRLDSYEIDLSKCGPMVLDALMKIKNEIDSSLTFRRSCREGVCGSCAMNIDGVNTLACL

SEQ ID NO: 79040 - protein, 36 aa, Unknown
  Bacterial polypetide isolated from the Sargasso Sea
KLFPTRSHTVAAQGGVAAALGNMGEDDWKWHMYETV

SEQ ID NO: 79041 - protein, 81 aa, Unknown
  Bacterial polypetide isolated from the Sargasso Sea
MDSYKIINHQHDAIVIGAGGSGLRATMGLAQSKHSVACISKVFPTRSHTVAAQGGISGALGNMGEDDWRWHMYDTVKGSDW

SEQ ID NO: 79042 - protein, 130 aa, Unknown
  Bacterial polypetide isolated from the Sargasso Sea
MVEFTLPANSKVQKGVTHPVKEVSKKPKKVVIYRWNPEDQENPRLDSYEIDLSKCGPMVLDALMKIKNEIDSSLTFRRSCREGVCGSCAMNIDGVNTLACLKPIEEVKGEISILSLPHMPVVKDLVPDLS

SEQ ID NO: 79043 - protein, 109 aa, Unknown
  Bacterial polypetide isolated from the Sargasso Sea
MKAYNIIDHEYDVVVLGAGGSGLRAAVGLSESGLKTACISKVFPTRSHTSAAQGGISAALGNMGEDDWRWHMYDTVKGADWLGDQDSIEYLCKEAPKAVLELEKYGVPF

SEQ ID NO: 79044 - protein, 119 aa, Unknown
  Bacterial polypetide isolated from the Sargasso Sea
MGFKIIFGKKSKNEQNQSVKDRSKIDGLWECILCFSCTTSCVSYWWNGEKYLGPAALLQASRWVNDSRDEERKKRLKYIEKNSNIHNCHSIMNCANSCPKGLNPAKAIADLKKQIATNL

SEQ ID NO: 79045 - protein, 119 aa, Unknown
  Bacterial polypetide isolated from the Sargasso Sea
MSSYKIIDHEYDVVVLGAGGSGLRAAVGLSEAGLKTACISKVFPTRSHTSAAQGGISAALGNMGEDDWRWHMYDTVKGADWLGDQDSIEYLCKEAPKAVIELEKYGVPFSRTEDGKIIK

SEQ ID NO: 79046 - protein, 48 aa, Unknown
  Bacterial polypetide isolated from the Sargasso Sea
KGIEKRLPGISESSKLFAEVDVTKEPIPVVPTGHYNMGGIPTNYKAEV

SEQ ID NO: 79047 - protein, 185 aa, Unknown
  Bacterial polypetide isolated from the Sargasso Sea
MVQISLPKNSKVVKGKFYKDKTGSKQLKKVNVYRWDPSVGGNPRIDTYEVDMRNCQSKVLDVLNKIKNEIDPSLAYRRSCAHGVCGSCAMNMNGKNGLACTKPHEEIKGDLNIYPLPHLKVVKDLIGDLTTLYKQYESVEPWLKTSKKDDNKENLQSKKEREKLDGLYECIMCACCSTSCPKLLV

SEQ ID NO: 79048 - protein, 48 aa, Unknown
  Bacterial polypetide isolated from the Sargasso Sea
NDHIYLYLNHLPPEVLAERLPGISETAAIFAGVDVTKEPSARPAHQTD

SEQ ID NO: 79049 - protein, 111 aa, Unknown
  Bacterial polypetide isolated from the Sargasso Sea
MAQFTLPANSKITKGKTHQLKEPANDPKKLAIYRWDPEDDKNPRIDNYEIDQENCGPMVLDALMKIKNEIDPTLTFRRSCREGVCGSCAMNIDGVNTLACLKSMSDERRNQ

SEQ ID NO: 79050 - protein, 99 aa, Unknown
  Bacterial polypetide isolated from the Sargasso Sea
MAQFTLPANSKITKGKTHQLKDPANDPKKLAIYRWDPEDDKNPRIDNYEIDQEKCGPMVLDALMKIKNEIDPTLTFRRSCREGVCGSCAMNIDGINTLA

SEQ ID NO: 79051 - protein, 102 aa, Unknown
  Bacterial polypetide isolated from the Sargasso Sea
STNERTKIDGLWECILCFCCTTSCVSYWWNGEKYLGPAALLQASRWINDSRDKEKKKRLKHIEEYSNIHNCHSIMNCANSCPKGLNPAKAIVDLKKQIATNL

SEQ ID NO: 79052 - protein, 92 aa, Unknown
  Bacterial polypetide isolated from the Sargasso Sea
MNKVINISKKNNIKEFDALIVGGGGSGMRTSLELAKSGLNTAVISKVFPTRSHTVSAQGGITCAIQSADPNDDWRWHMYDTVKGSDYIGDQD

SEQ ID NO: 79053 - protein, 37 aa, Unknown
  Bacterial polypetide isolated from the Sargasso Sea
NYKVEVITVNGFEKVVPGLMAIGEEACVFVHGANRLG

SEQ ID NO: 79054 - protein, 116 aa, Unknown
  Bacterial polypetide isolated from the Sargasso Sea
MAQFTLPANSKITKGKTHQLKEPANNPKKLAIYRWDPEDDKNPRIDNYEIDQEKCGPMVLDALMKIKNEIDPTLTFRRSCREGVCGSCAMNIDGVNTLACLKSMSEVKNEIKIYPL

SEQ ID NO: 79055 - protein, 80 aa, Unknown
  Bacterial polypetide isolated from the Sargasso Sea
MSAAIPLEEIKIIKLSVYRFDPTMDKKPYMQSLDIEVPANKDLMVLDVLHLAKEQEPSLSFRRSCREGVCGSDGMNINGK

SEQ ID NO: 79056 - protein, 44 aa, Unknown
  Bacterial polypetide isolated from the Sargasso Sea
RLSSIADKFKLFRCHTIMNCTKTCPKSLNPAKAISHIKKMIASK

SEQ ID NO: 79057 - protein, 293 aa, Unknown
  Bacterial polypetide isolated from the Sargasso Sea
FYARGQTGQQLLYGAYQSLSRQVNLGNIELITKRDVLDLVIVNDIARGVIARNLINGNLETYKAHCVVLATGGYSNVYYLSTNSLKSNATAIWRAYKRGANFANPSFTQIHPTCIPPEGIYQSKLTLMSESLRNDGRIWLPKTIDSKDDPENIPEHERDYFLERQYPKYGNLVPRDVASRRAREICEKGFGIGFGGKGVYLDLQDSIKKYGLKVIKTKYGNLLDMYQRIVGDDPTKVPMKIYPAPHYTMGGLWVDYNLMSNIDGLFVLGEANYSVHGANRLGANALLQCLCDG

SEQ ID NO: 79058 - protein, 98 aa, Unknown
  Bacterial polypetide isolated from the Sargasso Sea
MSSYNIIDHEYDVVVLGAGGSGLRAAVGLSEAGLKTACISKVFPTRSHTSAAQGGISAALGNMGEDDWRWHMYDTVKGADWLGDQDSIEYLCKEAPKA

SEQ ID NO: 79059 - protein, 71 aa, Unknown
  Bacterial polypetide isolated from the Sargasso Sea
IDISGPAILLQAYRWLIDSRDESTGERLDNLEDPFRLYRCHTIMNCTRTCPKNLNPAKAIGEIKKMMVMRR

SEQ ID NO: 79060 - protein, 72 aa, Unknown
  Bacterial polypetide isolated from the Sargasso Sea
MTNYEIIDHEHDVIVVGAGGAGLRATVGMVTKGFKTACITKVFPTRSHTVAAQGGIGAALNNMGENDSWKYH

SEQ ID NO: 79061 - protein, 62 aa, Unknown
  Bacterial polypetide isolated from the Sargasso Sea
MQAARWVNDSRDSERKNRLKAVNDKMKLYRCHSIMNCTRSCPKGLNPAKAIADLKKAIVTEL

SEQ ID NO: 79062 - protein, 202 aa, Unknown
  Bacterial polypetide isolated from the Sargasso Sea
MVLDALILIKDQIDSSLTFITSCREGVCGSCAMNIDGRNTLACQKNIKEINGDINIFPLTHMAVIKDLFVDLSQAFKQLEFIEPWLKSNLGKPSKNEQLQSMDDRSKIDGLWECILCFSCTTSCVSYWWNGNKYLGPATLLQASRWVNDSRDEERKKRLKYIEENSNIHNCHSIMNCTSSCPKGLNPAKAIADLKKQIATNI

SEQ ID NO: 79063 - protein, 194 aa, Unknown
  Bacterial polypetide isolated from the Sargasso Sea
EGNGAGPNNDFVYLDLTHLGAETIKQKLPDITDFVRTYVKIEPIDEPIPVQPTAHYAMGGIPTDVDARVLSDAQGTILPGVYSAGESACVSVHGANRLGTNSLLDIVVFGKRAGQSMVDYVSSTKPFSLSENAGEDLKNKISNFIDKEHDPNFSVAKIREELQDSMEENAKIFRSEESLTKQTEILSDLRDRYQ

SEQ ID NO: 79064 - protein, 200 aa, Unknown
  Bacterial polypetide isolated from the Sargasso Sea
MKIVKHSFDGVIVGAGGAGLRAAIEAAPHMKLAVITKLYPTRSHTGAAQGGMSAALANVEEDNWNWHAFDTVKGSDYLADQPAVDILCKEAIDAVIELEHWGLPFSRLDNGKIAQRRFGGHTVKEGESPAFRACYAADRTGHMILQTLYQKCVSMGVTFFDEFQVLDIKIEDGICQGVIAYELATGDIHILKPEQLHLQL

SEQ ID NO: 79065 - protein, 225 aa, Unknown
  Bacterial polypetide isolated from the Sargasso Sea
LNPTIENPDNVCEGLLAVGEAACVSVHGANRLGTNSLIDLIVFGKAASLTTINKVKPNSSKININQSITDEIISRFDSIRYNKGNTLTGEVRIEMQKIMQKKCSVFRTHDLISRGIKEFEKVESAMQNINVKDKSLIFNTDLTETLELHNLMSQSKVTLYSALNRKETRGAHAREDYKERDDKNWLAHSLAWLSMDGRVKLEKRRVNMNTLTNHVQPIPPAKRVY

SEQ ID NO: 79066 - protein, 103 aa, Unknown
  Bacterial polypetide isolated from the Sargasso Sea
MSSYKIIDHEYDVVVLGAGGSGLRAAVGLSEAGLKTACISKVFPTRSHTSAAQGGISAALGNMGEDDWRWHMYDTVKGADWLGDQDSIEYLCKEAPKAVIELE

SEQ ID NO: 79067 - protein, 112 aa, Unknown
  Bacterial polypetide isolated from the Sargasso Sea
IDHEYDVVVLGAGGSGLRAAVGLSEAGLKTACISKVFPTRSHTSAAQGGIFAALGNMGEDDWRWHMYDTVKGADWLGDQDSIEYLCKEAPKAVIELEKYGVPFSRTDDGKIY

SEQ ID NO: 79068 - protein, 74 aa, Unknown
  Bacterial polypetide isolated from the Sargasso Sea
MKNAYNIVDHYYDVVVIGAGGSGLRATLGCAEAGLKTACISKVFPTRSHTVAAQGGIGAALGNMGEDNWKMAYV

SEQ ID NO: 79069 - protein, 87 aa, Unknown
  Bacterial polypetide isolated from the Sargasso Sea
MNKVINISNKSNIKEFDALIVGGGGSGMRTSLELAKSGLNTAVISKVFPTRSHTVSAQGGITCAIQSADPNDDWRWHMYDTVKGSDY

SEQ ID NO: 79070 - protein, 90 aa, Unknown
  Bacterial polypetide isolated from the Sargasso Sea
NNGEGAPAMRACAAADRTGHALLHTLYQQALKNNVEFYIEYFVLDLLKDEKNKCCGVIAWCLETGTIHRFFSHQTVLATGGYGRAYFSST

SEQ ID NO: 79071 - protein, 52 aa, Unknown
  Bacterial polypetide isolated from the Sargasso Sea
MGAYDITDHHYDVVVVGAGGAGLRATLGMATSGLRTACVTKVFPTRSHTVAA

SEQ ID NO: 79072 - protein, 66 aa, Unknown
  Bacterial polypetide isolated from the Sargasso Sea
MSSYKIIDHEYDVVVLGAGGSGLRAAVGLSEAGLKTACISKVFPTRSHTSAAQGGISAALGNMGED

SEQ ID NO: 79073 - protein, 103 aa, Unknown
  Bacterial polypetide isolated from the Sargasso Sea
SVHGANRLGTNSLIDLVVFGKAASLTCKEKVKPNSRKIEISKSKTDNIIERFDKIRNSKGNYTTGELRTSMQHIMQQKCAVFRTHDLISKGIEEYSKVESSNG

SEQ ID NO: 79074 - protein, 259 aa, Unknown
  Bacterial polypetide isolated from the Sargasso Sea
MKIIKHSFDGVIVGAGGAGLRAAIEAAPHMKLAVITKLYPTRSHTGAAQGGMSAALANVEEDNWNWHAFDTVKGSDYLADQPAVDILCKEAIDSVVELEHWGLPFSRLENGKIAQRRFGGHTVKEGEAPAFRACYAADRTGHMILQTLYQKCVSMGVTFFDEFQVLDIKIDDGVCKGVVAYEIATGDIHIFEARAVTFATGGFGKIYKVSSNAHSLTGDGPGILYQKGIPLEDMEFYQFHPTGIYRLGILLSEAARGEG

SEQ ID NO: 79075 - protein, 123 aa, Unknown
  Bacterial polypetide isolated from the Sargasso Sea
EKIKPFLDNEDEVTTGHERLQSPEDRDKLDGLYECVLCACCSTSCPSFWWNPEKFVGPAALLQAYRFIADTRDKQKRARLKKLNDAFSVYRCHGIMNCTSVCPKGLNPSKAINEIKKELRRIG

SEQ ID NO: 79076 - protein, 232 aa, Unknown
  Bacterial polypetide isolated from the Sargasso Sea
MSIYRYDPSLDDKPYMQDIVIEVPTDKDIMVLDALHLAKDQEPSLSYRRSCREGVCGSDGMNINGKNGLACVTPLSEAVKRNKLTLRPMPGLPVVRDLIVDMKQFYDQLEKVKPYLITKSENPETERTQSPEEREELDGLYECILCGCCSTSCPSFWWNPDKFLGPAALLQSWRFIADSRDEATEERLDALEDSFSLYRCHGIMNCVSVCPKGLNPTEAISNIRNKLIAREK

SEQ ID NO: 79077 - protein, 233 aa, Unknown
  Bacterial polypetide isolated from the Sargasso Sea
MSIYRYDPTVDKKPYMQDIVVEIPTDKDIMVLDALHLAKNQEPSLSYRRSCREGVCGSDGMNINGKNGLACVTPLSEVLKRDKITLRPMPGLPVVRDLIVDMKQFFDQLEKVKPYLITKSDTPDIERKQTPEAREELDGLYECILCGCCSTSCPSFWWNPDKFLGPAALLQSWRFIADSRDEATEERLDDLEDAFSLYRCHGIMNCVSVCPKGLNPTEAISNIRNKLLTREKA

SEQ ID NO: 79078 - protein, 89 aa, Unknown
  Bacterial polypetide isolated from the Sargasso Sea
MEFDGIIIGGGGAGMRASLQLAESGLNTAVISKVFPTRSHTVSAQGGITCAIQSDDPDDDWRWHMFDTVKGSDYIGDQEAIEYMCSEGP

SEQ ID NO: 79079 - protein, 261 aa, Unknown
  Bacterial polypetide isolated from the Sargasso Sea
MKIIKHSFDGVIVGAGGAGLRAAIEAAPHMKLAVITKLYPTRSHTGAAQGGMSAALANVEEDNWNWHAFDTVKGSDYLADQPAVDILCKEAIDAVIELEHWGLPFSRLENGKIAQRRFGGHTVKEGESPAFRACYAADRTGHMILQTLYQKCVSMGVEFFDEFQVLDIKIEDGVCKGVVAFELSTGDIHIFESRAVTFATGGFGRIFKVSSNAHSLTGDGPGILYQKGIPLEDMEFYQFHPTGIYRLGILLSEAARGEGGI

SEQ ID NO: 79080 - protein, 408 aa, Unknown
  Bacterial polypetide isolated from the Sargasso Sea
RNKEHKVVIGGRHMTFVNVSSPPNVMDLDRGRRPGDFESFRDLLKLTQYFNCIHVAGGYPVEPIDVHSSIRHLKCIYEKLILTDKVCHAYSLGSERVEDAIEMVRIASGLEEDKFKKEARIYTNINSSSPLKHDWPMLDGAMRFSRKNQPVVVTPFTLAGAMAPVTIVGAVAQSIAEGLAAIALLQYINPGCPVVLGTFTSNVDMKSGAPAFGTPEYVRATQITGQMARYYNLPLRSSNACAANAPDGQAMWESLNSLWASATSGTNLVYHSAGWLEGGLIASYEKFVMDCEVLQQFKRYFEPELCNFSEDDLAFGAVSEVGPTGHFFGCQHTQERYSDAFYSPFLSDWRNFEAWNEAGAEWTHKKANKIWKKILDDFEPPPIDQGIKEELNEFVERRIKEGGAPTDF

SEQ ID NO: 79081 - protein, 110 aa, Unknown
  Bacterial polypetide isolated from the Sargasso Sea
MVAVKTGLPRRKFDVVIVGAGGSGMRASLQLAEAGLSVAVLSKVFPTRSHTVAAQGGIGASLGNMSEDNWHYHFYDTVKGSDWLGDQTRSNSCAARRRTWSTNWETSAWP

SEQ ID NO: 79082 - protein, 72 aa, Unknown
  Bacterial polypetide isolated from the Sargasso Sea
MSYEIEYHDYDVVVVGAGGSGLRATVGAVENGYKTACISKVFPTRSHTVAAQGGISAALGNMGEDDWRWHMY

SEQ ID NO: 79083 - protein, 72 aa, Unknown
  Bacterial polypetide isolated from the Sargasso Sea
MSSYKIIDHEYDVVVLGAGGSGLRAAVGLSEAGLKTACVSKVFPTRSHTSAAQGGISAALGNMGEDDWRWHM

SEQ ID NO: 79084 - protein, 232 aa, Unknown
  Bacterial polypetide isolated from the Sargasso Sea
MSIYRYDPSLDEKPYMQDIVIEVPTDKDIMVLDALHLAKDQEPSLSYRRSCREGVCGSDGMNINGKNGLACVTPLSEAVKRNKLTLRPMPGLPVVRDLIVDMKQFYDQLEKVKPYLITKSDNPETERTQSPEEREELDGLYECILCGCCSTSCPSFWWNPDKFLGPAALLQSWRFIADSRDEATDERLDALEDSFSLYRCHGIMNCVSVCPKGLNPTEAISNIRNKLIAREK

SEQ ID NO: 79085 - protein, 64 aa, Unknown
  Bacterial polypetide isolated from the Sargasso Sea
MLQAYRFIADSRDEATTERLDNLEDPYRLFRCHTIMNCVDVCPKGLNPTRAIGKIKELMVRRAI

SEQ ID NO: 79086 - protein, 233 aa, Unknown
  Bacterial polypetide isolated from the Sargasso Sea
MCIYRYDPTLDKKPYMQDIIVEVPTDKDIMVLDALHLAKAQEPSLSYRRSCREGVCGSDGMNINGKNGLACVTPLSEVIKRNKITLRPMPGLPVVRDLIVDMKQFYDQLEKVRPYLITKSDSPEIERTQSPEEREQLDGLYECILCGCCSTSCPSFWWNPDKFLGPAALLQSWRFIADTRDEATDERLDDLEDAFSLYRCHGIMNCVSVCPKGLNPTEAISNIRNKLLTRKKA

SEQ ID NO: 79087 - protein, 102 aa, Unknown
  Bacterial polypetide isolated from the Sargasso Sea
MSTYKIIDHEYDVVVLGAGGSGLRAAVGLSEAGLKTACISKVFPTRSHTSAAQGGISAALGNMGEDDWRWHMYDTVKGADWLGDQDSIEYLCKEAPKAVIEL

SEQ ID NO: 79088 - protein, 83 aa, Unknown
  Bacterial polypetide isolated from the Sargasso Sea
MAKFNLPVNSRVKKGKHFEAPKDAKNVRRYIIYRYNSDLDENPRMDTFDIDLDSCGPMVLDVLIKIKNEIDPSLTFRRSCREG

SEQ ID NO: 79089 - protein, 49 aa, Unknown
  Bacterial polypetide isolated from the Sargasso Sea
KRRLNELDDSFKLYRCHSIMNCTNSCPKGLNPAKAIAEIKHEISKMDNK

SEQ ID NO: 79090 - protein, 27 aa, Unknown
  Bacterial polypetide isolated from the Sargasso Sea
MNCTNSCPKGLNPAKAIGSIKKMLATS

SEQ ID NO: 79091 - protein, 90 aa, Unknown
  Bacterial polypetide isolated from the Sargasso Sea
MTSYKIIDHEYDVVVLGAGGSGLRAAVGLSEAGLKTACISKVFPTRSHTSAAQGGISAALGNMGEDDWRWHMYDTVKGSDWLGDPRLYRI

SEQ ID NO: 79092 - protein, 246 aa, Unknown
  Bacterial polypetide isolated from the Sargasso Sea
MLGNKLEVNLYRYNPEEDKFPYMKKYIIKKPERDIMVLDLLNLLKEEDQSISYRRSCREGVCGSDGMNINGKNGLACITPISEVIKRNKIELRPLPGLPVIRDLVVDMTEFYAQYEKIKPFLQNETTAPEQERLQSPEDRDKLDGLYECILCACCSTSCPSFWWNPDKFVGPAALLQAYRFLADSRDLKTQERLESLSDPFSVYRCHGIMNCVNVCPKGLNPNKAIGEIKSMLHKNKKDIIVSDGA

SEQ ID NO: 79093 - protein, 52 aa, Unknown
  Bacterial polypetide isolated from the Sargasso Sea
SRDEDRKERLKKVADELKLYRCHTIMNCTNACPKGLNPAKAIASIKKMLATG

SEQ ID NO: 79094 - protein, 220 aa, Unknown
  Bacterial polypetide isolated from the Sargasso Sea
MDLNVSLYRYNPEQDKFPYMKSYKVKKPEKDIMVLDLLNMLKEDDATISYRRSCREGVCGSDGMNINGKNGLACITPLSEVLKGNKLELRPLPGLPVIRDLIVDMTQFYEQYEKIKPFLQSDSEPPEQERLQSPQDRDKLDGLYECILCACCSTSCPSFWWNPDKFVGPAALLQAYRFLADTRDTKKQERLEELGDPFSVYRCHGIMNCVSVCPKRFKSK

SEQ ID NO: 79095 - protein, 114 aa, Unknown
  Bacterial polypetide isolated from the Sargasso Sea
MSSYKIIDHEYDVVVLGAGGAGLRAAVGLSEAGLKTACISKVFPTRSHTSAAQGGISAALGNMGEDDWRWHMYDTVKGSDWLGDQDCIEYLCKEAPRAVLELERYGVPFSRTED

SEQ ID NO: 79096 - protein, 184 aa, Unknown
  Bacterial polypetide isolated from the Sargasso Sea
MVELLLPKNSKVKSGNNFAIKEKAKAKKVFLIYRYNPDTKENPRVDRYELDVSDCGPMVLDALITIKNKVDPTITFRRSCREGVCGSCAMNIDGTNTLACTKYISDVKGPVKIYPLPHMPVIKDLVPDLSGVYKQYNSIDPWLKTKNNNHNNRERTQSPKEREELDGLYECIMCFCCSTSCPSY

SEQ ID NO: 79097 - protein, 62 aa, Unknown
  Bacterial polypetide isolated from the Sargasso Sea
FSSAYRWIIDSRDEDRKARLKKVADELKLYRCHTIMNCTNACPKGLNPAKAIASIKKMLATS

SEQ ID NO: 79098 - protein, 245 aa, Unknown
  Bacterial polypetide isolated from the Sargasso Sea
MELSVSLYRYNPEQDKFPYMKNYKVKKPEKDIMVLDLLNMLKEDDATISYRRSCREGVCGSDGMNINGKNGLACITPLSEVLKGNKLELRPLPGLPVIRDLIVDMTQFYEQYEKIKPFLQSDSEPPEQERLQSPQDRDKLDGLYECILCACCSTACPSFWWNPDKFVGPAALLQAYRFLADTRDTKKQERLEELGDPFSVYRCHGIMNCVNVCPKGLNPNKAIGEIKSMLLTGTKEDKIKVVGLE

SEQ ID NO: 79099 - protein, 189 aa, Unknown
  Bacterial polypetide isolated from the Sargasso Sea
MLVSIYRYNPESDEKPYMQDLDIKLPEGKDLMVLDVLALAKQEDPSVAYRRSCREGVCGSDGMNINGTNGLACITPISSAVGPDNKLSLRPLPGLPVIRDLVVDLTTFYKQFEKVKPYLVNDEPAPEKERLQSPEDRKKLDGLYECILCACCSTSCPSFWWNPEKFIGPAGLLQAYRFLADSRDNSTKE

SEQ ID NO: 79100 - protein, 56 aa, Unknown
  Bacterial polypetide isolated from the Sargasso Sea
WIIDSRDEDRKERLKKVADELKLYRCHTIMNCTNACPKGLNPAKAIASIKKMLATS

SEQ ID NO: 79101 - protein, 185 aa, Unknown
  Bacterial polypetide isolated from the Sargasso Sea
MAQFSLPQNSKIEVGNYFKDKTNSKNLKKINVYRWDPSTGKNPRVDTFEVDMDNCGPKVLDILFKIKNEIDPSLTFRRSCAHGVCGSCAMNIDGVNGLACIKSHSDINGDLNIYPLPHLKVVKDLIGDLTTLYKQYESIQPWLKVDQTGKEKTELKQSQKDREKLDGYYECILCACCSTSCPSYW

SEQ ID NO: 79102 - protein, 245 aa, Unknown
  Bacterial polypetide isolated from the Sargasso Sea
MIDVNIYRYNPETDKFPYTQTYSIKKPEKDIMLLELLNLLKEQDSSISYRRSCREGVCGSDGMNINGKNGLACITPISEAIKNNKIELRPLPGLPVIRDLVVDMTEFYAQYDKIKPFLQNETQPPAQERLQSPEDRDKLDGLYECILCACCSTSCPSFWWNPDKFVGPAALLQAYRFIADSRDTKTSERLEGLSDPFSVYRCHGIMNCVNVCPKDLNPNKAIGKIKSMLLSDSKKENIIASDGMS

SEQ ID NO: 79103 - protein, 252 aa, Unknown
  Bacterial polypetide isolated from the Sargasso Sea
SRTDEGKIYQRAFGGQSLQYGKGGQAYRCACAADRTGHAILHTLYGQSVRHETEFFVEYFALDLIMDAEGACVGVMGAAPPPHHARAARSPSTPRRGSSWVRPRRHTMRAPRGRPARRAVVRRRLARRAVIVPPPRTTPLARFAALRLWRRRCCHRRRLTCRVRRRSAVHGGRHAAPLQVQEHRPRDRRVRPRVVLGHVGPHVHGRRQRDGGARRPADAGPGVCAVPPHRHLRRRLPHHRGCARGSEWWVVV

SEQ ID NO: 79104 - protein, 144 aa, Unknown
  Bacterial polypetide isolated from the Sargasso Sea
RTGHALLHTLYQQSLKNNVEFYIEYFVLDLISDDQGNCIGVVTWCLEDGSIHRFLSHQTILAIGGYGRAYFSSMSAHICIGDGSAMALRQNLPLFDMEFIQFHPTGVYGAGVLIIEGARGEGGYLTNSDGERFMERYAPNAKDL

SEQ ID NO: 79105 - protein, 145 aa, Unknown
  Bacterial polypetide isolated from the Sargasso Sea
MKVLEFDGIVVGGGGSGLMASLQLAQSGFKTAVVSKVFPTRSHTVSAQGGITCAIQSADPDDDWRWHMYDTVKGSDFIGDQDSIEYMCQEGPKAVFELEHMGLPFSRTEEGKIYQRAFGGQSKDYGKGGQAERTCAAADRTGHAL

SEQ ID NO: 79106 - protein, 245 aa, Unknown
  Bacterial polypetide isolated from the Sargasso Sea
MELSVNLYRYNPEQDKFPYMKNYKVKKPEKDIMVLDLLNMLKEDDATISYRRSCREGVCGSDGMNINGKNGLACITPLSKVLKGNKLELRPLPGLPVIRDLIVDMTQFYEQYEKIKPFLQSDTEPPEQERLQSPQDRDKLDGLYECILCACCSTSCPSFWWNPDKFVGPAALLQAYRFLADTRDTKKQERLEELGDPFSVYRCHGIMNCVNVCPKGLNPNKAIGEIKSMLLTGTKEDKIKVVGLE

SEQ ID NO: 79107 - protein, 189 aa, Unknown
  Bacterial polypetide isolated from the Sargasso Sea
MVQINLPKKSEIKKGQYFKDKTGSKNIRKVNIYRWDPATGENPRIDTYEVDMDNCPSKVLDLLNKIKNEIDPSLAYRRSCAHGVCGSCAMNMDGKNGLACTKPHSEIKGDINIYPLPHLKVLKDLIGDLSTLYKQYESVQPWLKTTKKIDDTEHRQSKEDRSKLDGLYECIMCACCSTSCPSYWWNGEK

SEQ ID NO: 79108 - protein, 236 aa, Unknown
  Bacterial polypetide isolated from the Sargasso Sea
PVQPTAHYAMGGIPTDVNGRVLSDEKNTVLPGVYAAGEAACVSVHGANRLGTNSLLDIVVFGKRAGQSMLEYVSKTKSTSISNNAADDLVNKINNLIDKEHTDEFSVGRIRNELQESMEENAKIFRSEETLSKQTEILENLRERYENVTIFDKGKVFNTELMEAIELDYLLDMSESTVASALARKESRGAHSRQDFIDRDDTNFMKHSFAFKNGNSANLRYKDVELGKYKPMERKY

SEQ ID NO: 79109 - protein, 103 aa, Unknown
  Bacterial polypetide isolated from the Sargasso Sea
MNSYKIIDHEYDVVVLGAGGSGLRAAVGLSEAGLKTACISKVFPTRSHTSAAQGGISAALGNMGEDDWRWHMYDTVKGSDWLGDQDSIEYLCKEAPRAVLELE

SEQ ID NO: 79110 - protein, 137 aa, Unknown
  Bacterial polypetide isolated from the Sargasso Sea
MVEFTLPSNSKVQKGINHPVKEVSQKPKKIVIYRWNPEDQNNPRLDTYEIDLSKCGPMVLDALMKIKNEIDSSLTFRRSCREGVCGSCAMNIDGVNTLACLKPIEEVNGEIRIYPLPHMPVVKDLVPDLSKAYQQLE

SEQ ID NO: 79111 - protein, 130 aa, Unknown
  Bacterial polypetide isolated from the Sargasso Sea
MVQFVLPKNSKIQKGIIHKPKQPTTDPIKLEIYRWDPEKKENPKIDTFEVNKNKFGPMVLDALIKIKNEIDSTLTFRRSCREGVCGSCAMNIDGINTLACIKPIEEIKGTIKIFPLPHMNIIKDLVPDLS

SEQ ID NO: 79112 - protein, 119 aa, Unknown
  Bacterial polypetide isolated from the Sargasso Sea
MSSYKIIEHEYDVVVLGAGGAGLRAAVGLSEAGLKTACISKVFPTRSHTSAAQGGISAALGNMGEDDWRWHMYDTVKGSDWLGDQDCIEYLCKEAPRAVLELERYGVPFSRTEDGKIYQ

SEQ ID NO: 79113 - protein, 120 aa, Unknown
  Bacterial polypetide isolated from the Sargasso Sea
MSEYSIIDHEYDVVVLGAGGSGLRAAVGLSEAGLKTACISKVFPTRSHTSAAQGGISAALGNMGEDDWRWHMYDTVKGSDWLGDQDCIEYLCKEAPRAVLELERYGVPFSRTKDGKIYQR

SEQ ID NO: 79114 - protein, 267 aa, Unknown
  Bacterial polypetide isolated from the Sargasso Sea
FRACYAADRTGHMILQTLYQKCVSMGVEFFDEFQVLDIKIEDGVCKGVVAFELSTGDIHIFESRAVTFATGGFGRIFKVSSNAHSLTGDGPGILYQKGIPLEDMEFYQFHPTGIYRLGILLSEAARGEGGILRNKDGERFMERYAPSIKDLAPRDMVSRAIATEISQGNGAGPDSDYVYLDLTHLGAETIKKKLPDITDFVRTYVKIEPINEPIPVQPTAHYAMGGIPTDVNGRVLSDEKNTVLPGVYAAGEAACVSVHGANRLGTN

SEQ ID NO: 79115 - protein, 134 aa, Unknown
  Bacterial polypetide isolated from the Sargasso Sea
MAELTLPQNSKVQKGKEYPLEDDCENKKGFSIYRWSPDDDENPRTDYYEIDLSKCGPMVLDAIIKIKNEIDPTLTFRRSCREGICGSCAMNIDGVNTLACTKSIDDVKGDIKISPLPHQPVIKDLVPDLTNFYE

SEQ ID NO: 79116 - protein, 58 aa, Unknown
  Bacterial polypetide isolated from the Sargasso Sea
YRWINDSRDGDKKERLKKVADELKLYRCHTIMNCTNSCPKGLNPAKAIGSIKKMLATS

SEQ ID NO: 79117 - protein, 73 aa, Unknown
  Bacterial polypetide isolated from the Sargasso Sea
MTKGYEFVEHQHDVVVVGAGGAGLRATLGLVEAGLSTACVTKVFPTRSHTVAAQGGISAALGNMGEDDWRWHM

SEQ ID NO: 79118 - protein, 103 aa, Unknown
  Bacterial polypetide isolated from the Sargasso Sea
MKSYNIIDHEYDVVVLGAGGSGLRAAVGLSEAGLKTACISKVFPTRSHTSAAQGGISAALGNMGEDDWRWHMYDTVKGSDWLGDQDSIEYLCKEAPKAVLELE

SEQ ID NO: 79119 - protein, 200 aa, Unknown
  Bacterial polypetide isolated from the Sargasso Sea
MVQLSLPKNSEVKKGKYFKDKTGSKNIRKVNIYRWDPSTEENPRIDTYEVDMDNCPSKVLDILNKIKNEIDPTLAYRRSCAHGVCGSCAMNMGGKNGLACTTPHAEIDGDIDIYPLPHLKVKRDLIGDLDGLYKQYQSIEPWLKNNSTKHTTEIYQSKEDRAKLDGAYECIMCACCSTSCPSYWWNGDKYLGPAGSATGL

SEQ ID NO: 79120 - protein, 160 aa, Unknown
  Bacterial polypetide isolated from the Sargasso Sea
MELSVSLYRYNPEQDKFPYMKNYKVKKPEKDIMVLDLLNMLKEDDATISYRRSCREGVCGSDGMNINGKNGLACITPLSEVLKGNKLELRPLPGLPVIRDLIVDMTQFYEQYEKIKPFLQSDSEPPEQERLQSPQDRDKLDGLYECILCACCSTSCPSFW

SEQ ID NO: 79121 - protein, 47 aa, Unknown
  Bacterial polypetide isolated from the Sargasso Sea
KKERLKELDDTFKVYRCHTIMNCTQACPKGLNPAKAIAGIKQMIAQQ

SEQ ID NO: 79122 - protein, 234 aa, Unknown
  Bacterial polypetide isolated from the Sargasso Sea
MTIEINEGRGVGPKKDHIMLHLEHIDPETLHERLPGITETAKIFCGVDVTKDPIPVLPTVHYNMGGVPTNYHGEVLCPSDSDPNKTVQGLMAIGEAACVSVHGANRLGTNSLLDIVVFGRAAAHRASEVLTPGASHAPVSKVSTDRAISRLDRMRHSKGDKQPGELRLEMQLAMQKYAAVFRSGESLTEGVKTMDSIAGDMNNIGIQDRSLIWNTDLIEAMELENLMGQALVTI

SEQ ID NO: 79123 - protein, 172 aa, Unknown
  Bacterial polypetide isolated from the Sargasso Sea
MVEFTLPANSKVQQGIAHPVKKVSKKPKKVVIYRWNPEDQDNPRLDSYEIDLSKCGPMVLDALMKIKNEIDSSLTFRRSCREGVCGSCAMNIDGVNTLACLKPIEEVNGEIRIYPLPHMPVVKDLVPDLSKAYEQLASIKPWLQRSNDNSNAAVSISEEKKQTPKDREKLDG

SEQ ID NO: 79124 - protein, 160 aa, Unknown
  Bacterial polypetide isolated from the Sargasso Sea
MSKYEIVDHEHDVVVVGAGGAGLRATLGMVSGGLKTACITKVFPTRSHTVAAQGGIGAALNNMGENDSWQFHMYDTVKGSDWLGDQDAIEYMCKEAIPSVTELENFGVPFSRTEDGEVYQRPFGGHTLDYGKKMARRACAAADRTGHAILHTLYHNVSIS

SEQ ID NO: 79125 - protein, 157 aa, Unknown
  Bacterial polypetide isolated from the Sargasso Sea
LRPLPGLPVIRDLIVDMTQFYEQYEKIKPFLQSDSEPPEQERLQSPKDRDKLDGLYECILCACCSTSCPSFWWNPDKFVGPAALLQAYRFLADTRDTKKQERLEELGDPFSVYRCHGIMNCVSVCPKGLNPNKAIGEIKSMLLTGTKEDKIKVVGLE

SEQ ID NO: 79126 - protein, 122 aa, Unknown
  Bacterial polypetide isolated from the Sargasso Sea
MSSYKIIEHEYDVVVLGAGGAGLRAAVGLSEAGLKTACISKVFPTRSHTSAAQGGISAALGNMGEDDWRWHMYDTVKGSDWLGDQDCIEYLCKEAQRAVLELEKYGVSFSRTEDGKIIKDHL

SEQ ID NO: 79127 - protein, 97 aa, Unknown
  Bacterial polypetide isolated from the Sargasso Sea
MAEFSLPRNSKVVKGKTFDIISKSKNKKNFNVYRWSPDDDLNPRLDTYTLDLDDCGPMVLDALIKIKNEIDTTLTFRRSCREGICGSCSMNVDGTNT

SEQ ID NO: 79128 - protein, 122 aa, Unknown
  Bacterial polypetide isolated from the Sargasso Sea
MSYEIEYHDYDVVVVGAGGSGLRATVGAVENGYKTACISKVFPTRSHTVAAQGGISAALGNMGEDDWRWHMYDTVKGSDWLGDQDAIEYLCKNAPKAVLELENYGVPFSRTEDGKIYQRALA

SEQ ID NO: 79129 - protein, 111 aa, Unknown
  Bacterial polypetide isolated from the Sargasso Sea
PPAREHLQKPEQREKLDGLYECILCACCSTSCPSFWWNPDKFIGPAGLLAAYRFLIDSRDTETDSRLEGLSDAFSVFRCHSIMNCVSVCPKGLNPTRAIGHIKSMLLQRSA

SEQ ID NO: 79130 - protein, 88 aa, Unknown
  Bacterial polypetide isolated from the Sargasso Sea
MANSYEIIDHAYDVVVVGAGGAGLRATVGLAEAGLKTACISKVFPTRSHTVAAQGGVSASLGNMGADDWRWHMYDTVKGSDWLGDQDS

SEQ ID NO: 79131 - protein, 96 aa, Unknown
  Bacterial polypetide isolated from the Sargasso Sea
MSSYKIIEHEYDVVVLGAGGAGLRAAVGLSEAGLKTACISKVFPTRSHTSAAQGGISAALGNMGEDDWRWHMYDTVKGADWLGDQDCIEYLCKEAP

SEQ ID NO: 79132 - protein, 111 aa, Unknown
  Bacterial polypetide isolated from the Sargasso Sea
MVQLTLPKGSNVSMGKTHGNDGKNKVVFNVYRWNRESGENPRLDKFFIEKSKLGPMVLDALMFIKNEIDSTLTFRRSCREGICGSCSMNVNGTNTLACLKPIVGKEIIFTL

SEQ ID NO: 79133 - protein, 126 aa, Unknown
  Bacterial polypetide isolated from the Sargasso Sea
MANFALPANSKMTKGESHPAPANAQNVRTFQIYRWSPDDDVNPRIDSFDIDLDDCGPMVLDALIKIKSEQDSSLTFRRSCREGICGSCSMNIDGTNTLACLKNIDEVKGDVKIFPLPHMPVVKDLV

SEQ ID NO: 79134 - protein, 78 aa, Unknown
  Bacterial polypetide isolated from the Sargasso Sea
CPSYWWNSDKYLGPASLLHAYRWIIDSRDQASDERLSSIADKFKLFRCHTIMNCTKTCPKLLNPAKAISHIKKMIASK

SEQ ID NO: 79135 - protein, 136 aa, Unknown
  Bacterial polypetide isolated from the Sargasso Sea
MAEFTLPKNSKIKSGKIFSEANGATRKKKFHIYRWEPDSGKNPRLDVYELNLDNFGPMILDAIIYIKNEIDSTLTFRRSCREGICGSCSMNIGGTNTLACTKSIASFDGDISIYPLPHMPVVKDLVPDLSNFYKQY

SEQ ID NO: 79136 - protein, 176 aa, Unknown
  Bacterial polypetide isolated from the Sargasso Sea
MVKFNLPDNSKLTKGDYFKSDSDSSDIKKFQIYRWSPDDKRNPRMDTYEVDMNSCGPMVLDAVMKIKNEIDSSLTFRRSCREGICGSCAMNIDGTNTLACTKAISDVKGDVKIYPLPHMPVIKDLITNLKTLYTQLKSIKPWLQNNKSQAAEVENIQSRDERSKLDGLYECILCAC

SEQ ID NO: 79137 - protein, 84 aa, Unknown
  Bacterial polypetide isolated from the Sargasso Sea
AHITIIATGGYGKTYYSSTSAHTCTGDGNAMVLRAGLPLQDMEFVQFHPTGIYGHGTLISEGVRGEGGYLLNSKGERFMERYAP

SEQ ID NO: 79138 - protein, 70 aa, Unknown
  Bacterial polypetide isolated from the Sargasso Sea
MSSYKIKDHEYDVVVLGAGGAGLRAAVGLSEAGLKTACISKVFPTRSHTSAAQGGISAALGNMGEDDWRW

SEQ ID NO: 79139 - protein, 221 aa, Unknown
  Bacterial polypetide isolated from the Sargasso Sea
NGDKNSVVPGFMAIGEAACVSVHGANRLGTNSLLDIVVFGRAAAMRTDDTLKKGLSHSKIHKSITDKILDRLNRTLHAKGDTSVNDVRFAMQNAMQKHAAVFRSTKSLNEGVNKINTISRGLDDVSVKDKSLIFNTDLVESLELENLMQQALVTMRSADQRKESRGAHAHEDFPNRDDKDWMKHTVMWLDEKNKSKLQYRDVHLNTLSNEVKSIPPVARVY

SEQ ID NO: 79140 - protein, 133 aa, Unknown
  Bacterial polypetide isolated from the Sargasso Sea
MVQFSLPANSKITKGNDFKSKEKSKLPKKLIIYRWDPEKNQNPRLDTYEIDQVKCGPMVLDALMKIKNEIDPTLTFRRSCREGVCGSCAMNIDGVNTLACLKSMSDVKKDIKIYPLPHMRVGKDLVPDLSKAL

SEQ ID NO: 79141 - protein, 44 aa, Unknown
  Bacterial polypetide isolated from the Sargasso Sea
RLKKVADELKLYRCHTIMNCTNSCPKGLNPAKAIGSIKKMLATS

SEQ ID NO: 79142 - protein, 167 aa, Unknown
  Bacterial polypetide isolated from the Sargasso Sea
MKAYKIIDHEYDVVVLGAGGSGLRAAVGLSEAGLKTACISKVFPTRSHTSAAQGGISAALGNMGEDDWRWHMYDTVKGSDWLGDQDAIEHLCKEAPKAVIELEKYGVPFSRTKEGKIYQRAFGGMTKNYGNESVQRTCAAADRTGHAILHTLYGQALKHNTEFFIEY

SEQ ID NO: 79143 - protein, 302 aa, Unknown
  Bacterial polypetide isolated from the Sargasso Sea
KDLAPRDMVSRAIATEISEGNGAGPDSDYVYLDLTHLGAETIKKKLPDITDFVRTYVKIEPIEEPIPVQPTAHYAMGGIPTDVYSRVLSDEKGTVLPGVYAAGEAACVSVHGANRLGTNSLLDIVVFGKRAGQSMVDYVTQTKPNSISDNASDDLSKKIQNLIDKEHTDEFSVANIRKDLQESMEENAKIFRTKETLEKQTEILEELRERYENVTIFDKSKVHNSELVEAIELDYLLDMSEATVASALARNESRGAHSRQDFPDRDDTNFMKHSFAFKKDNTANLKYKDVELGKYEPMERKY

SEQ ID NO: 79144 - protein, 118 aa, Unknown
  Bacterial polypetide isolated from the Sargasso Sea
MAQFTLPANSKITKGKTHQLKEPANDPKKLAIYRWDPEDDKNPRIDNYEIDQEKCGPMVLDALMKIKNEIDPTLTFRRSCREGVCGSCAMNIDGVNTLACLKSMSEVKNEIKIYPLPH

SEQ ID NO: 79145 - protein, 160 aa, Unknown
  Bacterial polypetide isolated from the Sargasso Sea
MVELSLPKNSKIIQGKVFGKKTNESICFNIYRWNRESGSNPRVDKFFIPKKKLGPMALDALLFIKNEIDPTLTFRRSCREGICGSCSMNINGTNTLACLKPLQNESEINIFPLPHMKVIKDLVPDMSEFYEQYKSIKPWLENTKKGNKERKQSPEERKKL

SEQ ID NO: 79146 - protein, 240 aa, Unknown
  Bacterial polypetide isolated from the Sargasso Sea
HISMYRYNPEEDKFPYMKEYKIDKPKKDIMVLDLLNLLKEEDQSISYRRSCREGVCGSDGMNINGKNGLACITPISSVIKRNKLELRPLPGLPVIRDLVVDMTEFYAQYEKIKPFLQNETTAPEQERLQSPEEREKLDGLYECILCACCSTSCPSFWWNPDKFVGPAALLQAYRFLADSRDLKTNERLEDLSDPFSVYRCHGIMNCVNVCPKGLNPNKAIGEIKSMLHKNKKDIIATDGV

SEQ ID NO: 79147 - protein, 87 aa, Unknown
  Bacterial polypetide isolated from the Sargasso Sea
MSTKEYKFIDHEYDVVVVGAGGAGLRATLGCAESGLKTACISKVFPTRSHTVAAQGGISAALGNMGEDNWRWHMYDTVKGADWLGDQ

SEQ ID NO: 79148 - protein, 176 aa, Unknown
  Bacterial polypetide isolated from the Sargasso Sea
MELSVSLYRYNPEQDKFPYMKNYKVKKPEKDIMVLDLLNMLKEDDATISYRRSCREGVCGSDGMNINGKNGLACITPLSEVLKGNKLELRPLPGLPVIRDLIVDMTQFYEQYEKIKPFLQSDTEPPEQERLQSPQDRDKLDGLYECILCACCSTSCPSFWWNPDKFVGPSGTTSSI

SEQ ID NO: 79149 - protein, 172 aa, Unknown
  Bacterial polypetide isolated from the Sargasso Sea
MAEFTLPKNSKIKSGKIFSEANGATRKKKFHIYRWEPDSGKNPRLDVYELNLDNFGPMILDAIIYIKNEIDSTLTFRRSCREGICGSCSMNIGGTNTLACTKSIASFDGDISIYPLPHMPVVKDLVPDLSNFYIAYAFIKPWMQTETPAPENSERNTSKNDREKLDGLYDCI

SEQ ID NO: 79150 - protein, 246 aa, Unknown
  Bacterial polypetide isolated from the Sargasso Sea
MTLSINIYRYNPEKDKFPYMQSFEFEKPKRDIMVLELLNQLKEKDPTISYRRSCREGVCGSDGMNINGKNGLACITPLSSVIKKNKLDLRPLPGLPVVRDLVVDMTEFYAQYEKIKPFLQNDTPVDIGERLQSPEDRDKLDGLYECILCACCSTSCPSFWWNPDKFVGPAALLQAYRFIADSRDTKTAERLQSLSDPFSVYRCHGIMNCVSVCPKGLNPNKAIGEIKSMLLSNKSNQNIITSDKAV

SEQ ID NO: 79151 - protein, 89 aa, Unknown
  Bacterial polypetide isolated from the Sargasso Sea
MAEFALPKHSKIVKGKEYNLETEAANPKKVNVYRWSPDDDENPRIDTYTIDLDQCGPMVLDALIKIKQEIDSSLTFRRSCREGICGSCS

SEQ ID NO: 79152 - protein, 191 aa, Unknown
  Bacterial polypetide isolated from the Sargasso Sea
DGSVTYRRSCREGVCGSDGLNINGKNGLTCITPLSETVKGEKLVIRPLPGLPVIRDLVVDMSLFYAQYKKVQPYLQNPTPAPAIKRLQTPEERAQLNGLYECILCACCSTSCPSFWWNPDRFVGPAGLLQAYRFLADSRDTATEDRLAKLDDPFSVFRCHGIQNCVNVCPKGLNPTKAIGHIRTMLLNRAT

SEQ ID NO: 79153 - protein, 245 aa, Unknown
  Bacterial polypetide isolated from the Sargasso Sea
MLNINIYRYNPEKDKFPYMQTFQFEKPKRDIMVLELLNQLKEKDPTISYRRSCREGVCGSDGMNINGKNGLACITPLSSVVKKNKLDLRPLPGLPVVRDLVVDMTEFYAQYEKIKPFLQNDVPVDIGERLQSPEDRDKLDGLYECILCACCSTSCPSFWWNPDKFVGPAALLQAYRFIADSRDTKTAERLQSLSDPFSVYRCHGIMNCVSVCPKGLNPNEAIGEIKSMLLSGKNKENIIVSDGMN

SEQ ID NO: 79154 - protein, 121 aa, Unknown
  Bacterial polypetide isolated from the Sargasso Sea
KVKPYLINDQPAAGERLQSIEERDKLDGLYECILCACCSTSCPSFWWNPDKFIGPAGLLHAYRFLADSRDTATEERLADLDDAFSVFRCHSIMNCVSVCPKGLNPTKAIGQIKSMLLNRAV

SEQ ID NO: 79155 - protein, 166 aa, Unknown
  Bacterial polypetide isolated from the Sargasso Sea
MVEFSLPANSKVTTGKLHMSKEIAESPKKLVIYRWDPEDDKNPRLDTYEIDQSKCGPMVLDALMKIKNEIDPTLTFRRSCREGVCGSCAMNIDGVNTLACLKSMSDVKNDIKIYPLPHMRVVKDLVPDLTKAYEQLASIKPWLERPKSNDNNSDNLNEERKQSPQR

SEQ ID NO: 79156 - protein, 76 aa, Unknown
  Bacterial polypetide isolated from the Sargasso Sea
MKPYKIIEHQYDVVVLGAGGAGLRAAVGLSEAGLKTACISKVFPTRSHTSAAQGGISAALGNMGEDDWRWHMYDTV

SEQ ID NO: 79157 - protein, 116 aa, Unknown
  Bacterial polypetide isolated from the Sargasso Sea
MKAYKIIDHEYDVVVLGAGGSGLRAAVGLSEAGLKTACISKVFPTRSHTSAAQGGISAALGNMGEDDWRWHMYDTVKGSDWLGDQDAIEYLCKEAPRAVVELERYGVPFSRTDDGK

SEQ ID NO: 79158 - protein, 237 aa, Unknown
  Bacterial polypetide isolated from the Sargasso Sea
MTTYKIIDHKYDVLVVGAGGSGLRAAVGLSESGLKTACISKVFPTRSHTAAAQGGISAALGNAGEDDWRWHMYDTVKGSDWLGDQDCIEYLCKEAPKAVIELEHYGVPFSRTKEGKIYQRAFGGMTKNYGNEPVQRTCAAADRTGHAILHTLYGQALKHKTEFFIEYFALDLLMKNGECKGVLAWNLNDGTIHRFRSHITILATGGYGKIYYSATAAHTCTGDGNGMVLRAGLPLQD

SEQ ID NO: 79159 - protein, 63 aa, Unknown
  Bacterial polypetide isolated from the Sargasso Sea
FYCKHIRWINDSRDGDIKERLKKVADELKLYRCHTIMNCTNSCPKGLNPAKAIGSIKKMLATS

SEQ ID NO: 79160 - protein, 310 aa, Unknown
  Bacterial polypetide isolated from the Sargasso Sea
GGIAAAWGRADDCEQHFNDTMAAGCDHNTADHVRVLTSQSRAAIEYLLKHGVQFDRAANDFSLAREGAHSHARVLHYKDRTGEAIIEPLLSAVRQHSNIDILEHMTVLELALDQGRCVGAYLRSADGEIVAVSAQQVFLATGGAGQLYEHTSNPQGATGDGMVLAHAVGAELADMEFVQFHPTSVLLDASTKHYMLLSEALRGAGARLVLAAGQSIMQGNERDLASRDVVSRAIFRQMQAGKQVYLDVSMLADNFSERFPTLAKVLLKQGFDLQTDLVPIFPTAHYIMGGIKTDIHAQTRVPGLYAIGEV

SEQ ID NO: 79161 - protein, 264 aa, Unknown
  Bacterial polypetide isolated from the Sargasso Sea
HPTGIYRLGILLSEAARGEGGILRNKDGERFMERYAPSIKDLAPRDMVSRAIATEISEGNGAGPDSDYVYLDLTHLGAETIKKKLPDITDFVRTYVKIEPIEEPIPVQPTAHYAMGGIPTDVYSRVLSDEKGTVLPGVYAAGEAACVSVHGANRLGTNSLLDIVVFGKRAGQSMVDYVTQTKPNSISDSASDDLSKKIQNLIDKEHTDEFSVANIRKDLQESMEENAKIFRTKETLEKQTEILEELRDRYENVTIFDKSKVHNS

SEQ ID NO: 79162 - protein, 238 aa, Unknown
  Bacterial polypetide isolated from the Sargasso Sea
NMGGIPTNYRTEVLRPTNQNPDNICEGLMAVGEAACVSVHGANRLGTNSLIDLVVFGKEASLTCKEKVKPNSKKIEISKSKTEDIINRFDLIRNSKGNSTTGELRTSMQHVMQKKCAVFRTHDLISKGIEEFQEIESSMDQIDIKDKSLVFNTDLVEALELHNLMAQSKVTLHSALNRKESRGAHAREDFKERDDKNWLVHSLAWLNDKGDVNMGSRAVHMNTLTNHVQPIPPKKRVY

SEQ ID NO: 79163 - protein, 200 aa, Unknown
  Bacterial polypetide isolated from the Sargasso Sea
MAIRKAQELDSTLTFRRSCGQGVCGSDGVNMNGQNGLACITSVSSVSVMNKLEIRPLPGLPVIKDLIVDMKPFYDQYEKIKPFLSNEEEVDTGHERLQSPEEREKLDGLYECILCACCSTSCPSFWWNPEKFVGPAALLQAYRFIADTRDKQKKSRLKKLNDAFSVYRCHGIMNCTSVCPKGLNPSKAINEIKKELRKIG

SEQ ID NO: 79164 - protein, 222 aa, Unknown
  Bacterial polypetide isolated from the Sargasso Sea
MSAYNIIDHEYDVIVVGAGGSGLRAAVGLSESGLKTACISKVFPTRSHTAAAQGGISAALGNAGEDDWRWHMYDTVKGSDWLGDQDCIEYLCKEAPQAVIELEHYGVPFSRTKDGKIYQRAFGGMTKNYGNEPIQRTCAAADRTGHAILHTLYGQALKQKTEFFIEYFALDLLMKNGECKGVLAWNLNEGTIHRFRSHITILATGGYGKIYYSATAAHTCTG

SEQ ID NO: 79165 - protein, 142 aa, Unknown
  Bacterial polypetide isolated from the Sargasso Sea
MSYEIEYHDYDVVVVGAGGSGLRATVGAVENGYKTACISKVFPTRSHTVAAQGGISAALGNMGEDDWRWHMYDTVKGSDWLGDQDAIEYLCKNAPKAVLELENYGVPFSRTEDGKIYQRAFGGMTKNYGDGTAQRTCAAADR

SEQ ID NO: 79166 - protein, 94 aa, Unknown
  Bacterial polypetide isolated from the Sargasso Sea
MIKDLVKLEFDVVVVGAGGSGLRSVMGCASSNLKTACISKVFPTRSHTVAAQGGISAALGNMGEDDWTWHMYDTVKGSDWLGDQDAIAFMCKEA

SEQ ID NO: 79167 - protein, 245 aa, Unknown
  Bacterial polypetide isolated from the Sargasso Sea
MELSVSLYRYNPEQDKFPYMKNYKVKKPEKDIMVLDLLNMLKEDDATISYRRSCREGVCGSDGMNINGKNGLACITPLSEVLKGNKLELRPLPGLPVIRDLIVDMTQFYEQYEKIKPFLQSDSEPPEQERLQSPQDRDKLDGLYECILCACCSTSCPSFWWNPDKFVGPAALLQAYRFLADTRDTKKQERLEELGDPFSVYRCHGIMNCVNVCPKGLNPNKAIGEIKSMLLTGAKEDKIKVVGLE

SEQ ID NO: 79168 - protein, 101 aa, Unknown
  Bacterial polypetide isolated from the Sargasso Sea
FIEKYAPKAKDLASRDVVSRSIAVEINESRRVSKNKDYVNLHLDHLDPKVIEGRLPRIAESANTFCEVDVRKDPIPVVPTVHYNMGGIPTNYKAEVLTLNG

SEQ ID NO: 79169 - protein, 195 aa, Unknown
  Bacterial polypetide isolated from the Sargasso Sea
TLSFRFSCGAGVCGSDGMNVNGRNGLACVTELKDLPNKISVRPLPGMPVIRDLVVDMNLFYKQYISIKPYLQSEKPTDGKEHRQTVEQRSKLDGLYECILCACCSTACPSWWWNPDKFVGPAGLLWACRFILDSRDSKQSERLEDLEGLYRLFRCRGIMNCANVCPKGLNPSGAIASIREQLLQKKLRSKNGLDG

SEQ ID NO: 79170 - protein, 176 aa, Unknown
  Bacterial polypetide isolated from the Sargasso Sea
MVQFNLPDNSKLVKGEDYSLPDDIKNKKKISIYRWSPEDDKNPRMDTYEVDLDDCGPMVLDAIMKIKNEIDPTLTFRRSCREGICGSCAMNIDGSNTLACTKPIEDVKKEIKIYPLPHMPVIKDLVTNLKTLYKQLASIKPWLNITKKSDTDENLQSKEERAKLDGLYECILCACC

SEQ ID NO: 79171 - protein, 92 aa, Unknown
  Bacterial polypetide isolated from the Sargasso Sea
DPDDDSNPRIDTYEIDLDECGPMVLDALIKIKADFDPSLSFRRSCREGICGSCSHNINGLNTLSLHSTYKRLKGGHKSLPPASYESYQGPGH

SEQ ID NO: 79172 - protein, 58 aa, Unknown
  Bacterial polypetide isolated from the Sargasso Sea
YRWLQDSRDEERKERLKELDDTFKVYRCHTIMNCTQACPKGLNPAKAIAGIKQMIAQQ

SEQ ID NO: 79173 - protein, 196 aa, Unknown
  Bacterial polypetide isolated from the Sargasso Sea
ISYRRSCREGVCGSDGMNINGKNGLACITPISEVIKRNKIELRPLPGLPVIRDLVVDMTEFYSQYEKIKPFLQNETTAPEQERLQSPEDRDKLDGLYECILCACCSTSCPSFWWNPDKFVGPAALLQAYRFLADSRDLKTQERLESLSDPFSVYRCHGIMNCVNVCPKGLNPNKAIGEIKSMLHKNKKDIIVSDGA

SEQ ID NO: 79174 - protein, 128 aa, Unknown
  Bacterial polypetide isolated from the Sargasso Sea
MAQFSLPKNSKIGTGKTYGSDKTSAKNRSFRIYRWDPDTEENPRVDTYMIDLEDCGPMVLDAIIHIKNEIDPSLTFRRSCREGICGSCAMNIDGTNTLACTKSIESIKGDVKVYPLPHMSVLKDLVPD

SEQ ID NO: 79175 - protein, 252 aa, Unknown
  Bacterial polypetide isolated from the Sargasso Sea
DFVRTYVKIEPIEEPIPVQPTAHYAMGGIPTDVYSRVLSDEKGTVLPGVYAAGEAACVSVHGANRLGTNSLLDIVVFGKRAGQSMVDYVTQTKPNSISDSASDDLSKKIQNLIDKEHTDEFSVANIRKDLQESMEENAKIFRTKETLEKQTEILEELRDRYENVTIFDKSKVHNSELVEAIELDYLLDMSEVTVASALARNESRGAHSRQDFPDRDDTNFMKHSFAFKKDNTANLKYKDVELGKYEPMERKY

SEQ ID NO: 79176 - protein, 214 aa, Unknown
  Bacterial polypetide isolated from the Sargasso Sea
HSIKMEGHGNMMVIDAIRKAQEKDPTITFRRSCAQGVCGSDGVNMNGQNGLACITSVSSVAVANRLEVRPLPGLPVIKDLIVDMKPFYDQYEKIKPFLDNDEEINTGHERLQSPDERKKLDGLYECILCACCSTSCPSFWWNPEKFVGPAALLQAYRFIADTRDKQKLKRLKKLNDAFSVYRCHGIMNCTSVCPKGLNPSKAINEIKKELRKIG

SEQ ID NO: 79177 - protein, 63 aa, Unknown
  Bacterial polypetide isolated from the Sargasso Sea
VLLQAYRWINDSRDEDKKERLKKVADELKLYRCHTIMNCTNSCPKGLNPAKAIGSIKKMLATS

SEQ ID NO: 79178 - protein, 94 aa, Unknown
  Bacterial polypetide isolated from the Sargasso Sea
MITHEYDVIVVGAGGAGLRATLGMATEGLKTACITKVFPTRSHTVAAQGGMSAALGNMGEDDWRWHMYDTIKGSELVGDQDAIEYMCREAIPSV

SEQ ID NO: 79179 - protein, 270 aa, Unknown
  Bacterial polypetide isolated from the Sargasso Sea
GFGKIYKVSSNAHSLTGDGPGILYQKGIPLEDMEFYQFHPTGIYRLGILLSEAARGEGGILRNKDGERFMERYAPSIKDLAPRDMVSRAIATEISEGNGAGPNNDFVYLDLTHLGAETIKQKLPDITDFVRTYVKIEPINEPIPVQPTAHYAMGGIPTDVNARVLSDASGTVLPGVYSAGESACVSVHGANRLGTNSLLDIVVFGKRAGQSMVDYVSSTKPMELSDNAAEDLTNKIEKLIEKDHSLEFSVPRIREELQDSMEENAKIFRT

SEQ ID NO: 79180 - protein, 189 aa, Unknown
  Bacterial polypetide isolated from the Sargasso Sea
MAQFNLPQNSKIEVGKYYKDKTNSKNLKKVNVYRWDPSTGENPRLDTFEVDMDSCGPKVLDILFKIKNEIDPSITFRRSCAHGVCGSCAMNIDGVNGLACIKSHEEINGELNIYPLPHLKVVKDLIGDLTTLYKQYESIQPWLKVDQTGKEKIELKQSQKDREKLDGYYECILCACCSTSCPKLLGNGD

SEQ ID NO: 79181 - protein, 69 aa, Unknown
  Bacterial polypetide isolated from the Sargasso Sea
MTAEYELIQHEHDVIVVGAGGAGLRATFGLAAEGLTTACITKVFPTRSHTVAAQGGMSAALGNMGDDNW

SEQ ID NO: 79182 - protein, 258 aa, Unknown
  Bacterial polypetide isolated from the Sargasso Sea
YRLGILLSEAARGEGGILRNKDGERFMERYAPSIKDLAPRDMVSRAIATEISEGNGAGPDSDYVYLDLTHLGAETIKKKLPDITDFVRTYVKIEPIEEPIPVQPTAHYAMGGIPTDVYSRVLSDEKGTVLPGVYAAGEAACVSVHGANRLGTNSLLDIVVFGKRAGQSMVDYVTQTKPNSISDSASDDLSKKIQNLIDKEHTDEFSVANIRKDLQESMEENAKIFRTKETLEKQTEILEELRDRYENVTIFDKSKVHN

SEQ ID NO: 79183 - protein, 286 aa, Unknown
  Bacterial polypetide isolated from the Sargasso Sea
IIFKCNAVILATGGGGKAWKITSNSWEYTGDGYGMAYDAGAELMDMEFTQFHPTGMVWPPSVRGTLVTEGVRGEGGILVNSENKRFMYDNIPNRFAAETADTEEEADRWLAGDKDARRPPELLTRDVVARAIRKEVKAGRGSPHGGAFLDIANRRNAEDIKRKLPSMYHQFNVLAELDITKESMEVGPTLHYFMGGVKVDADTQMTKVPGLFACGECAAGVHGANRLGGNSLSDLLVCGKLAGSGAVNYIKSLKNKKTLNNDVVEKAIRTATDILNRENGENPYLI

SEQ ID NO: 79184 - protein, 102 aa, Unknown
  Bacterial polypetide isolated from the Sargasso Sea
PEEREKLDGLYECILCACCSTSCPSFWWNPDKFIGPAGLLQAYRFLADSRDEKTSERLASLDDPFSVFRCRGIMNCVNVCPKGLNPTRAIGHIRNMLLQSGT

SEQ ID NO: 79185 - protein, 121 aa, Unknown
  Bacterial polypetide isolated from the Sargasso Sea
MNTYKIIDHEYDVVVLGAGGSGLRAAVGLSEAGLKTACISKVFPTRSHTSAAQGGISAALGNMGEDDWRWHMYDTVKGSDWLGDQDAIEYLCKEAPKAVIELERYGVPFSRTKDGKIYQRA

SEQ ID NO: 79186 - protein, 136 aa, Unknown
  Bacterial polypetide isolated from the Sargasso Sea
MSKAYKVIDHNYDVVVVGAGGSGLRATLGSAEAGLKTACISKVFPTRSHTVAAQGGIGAALGNMGDDNWKWHMYDTVKGSDWLGDQDAIEYLCSNAAEAVIELENYGMPFTRTDDGKIYPRPFGGHLTNNGEGAPA

SEQ ID NO: 79187 - protein, 246 aa, Unknown
  Bacterial polypetide isolated from the Sargasso Sea
MFDNKLKVSLYRYNPEEDQFPYMKEYTIDKPERDIMVLDLLHLLKENDQSISYRRSCREGVCGSDGMNINGKNGLACITPISSVIKRNKIELRPLPGLPVIRDLVVDMTEFYAQYEKIKPFLQNETSAPEQERLQSPEEREKLDGLYECILCACCSTSCPSFWWNPDKFVGPAALLQAYRFLADSRDLKTQERLESLSDPFSVYRCHGIMNCVSVCPKGLNPNKAIGEIKSMLHKNKKDIIVSDGV

SEQ ID NO: 79188 - protein, 194 aa, Unknown
  Bacterial polypetide isolated from the Sargasso Sea
MVQFNLPSNSKIQKGQYYKDKTGSKNIRKVNVYRWDPSKNENPRIDTYEVDMDNCSSKVLDILNKIKNEIDPSIAYRRSCAHGVCGSCAMNMNGKNGLACTKSHSELNGDIDIYPLPHLKVLKDLIGDLSTLYKQYESVEPWLKTSKISDKENIQTKEDRAKLDGLYECIMCACCSTSCPSYWWNGEKYLGPAV

SEQ ID NO: 79189 - protein, 245 aa, Unknown
  Bacterial polypetide isolated from the Sargasso Sea
MELSVSLYRYNPEQDKFPYMKNYKVKKPEKDIMVLDLLNMLKEDDATISYRRSCREGVCGSDGMNINGKNGLACITPLSEVLKGNKLELRPLPGLPVIRDLIVDMTQFYEQYEKIKPFLQSDSEPPEQERLQSPQDRDKLDGLYECILCACCSTSCPSFWWNPDKFVGPAALLQAYRFLADTRDTKKQERLEELGDPFSVYRCHGIMNCVNVCPKSLNPNKAIGEIKSMLLTGTKEDKIKVVGLE

SEQ ID NO: 79190 - protein, 169 aa, Unknown
  Bacterial polypetide isolated from the Sargasso Sea
MKTYKIIDHEYDVVVLGAGGSGLRAAVGLSEAGLKTACISKVFPTRSHTSAAQGGISAALGNMGEDDWRWHMYDTVKGSDWLGDQDAIEHLCKEAPKAVIELEKYGVPFSRTKEGKIYQRAFGGMTKNYGNESVQRTCAAADRTGHAILHTLYGQALKHNTEFYIEYFA

SEQ ID NO: 79191 - protein, 112 aa, Unknown
  Bacterial polypetide isolated from the Sargasso Sea
MSTKEYKFIDHEYDVVVVGAGGAGLRATLGCAESGLKTACISKVFPTRSHTVAAQGGISAALGNMGEDNWRWHMYDTVKGADWLGDQDAIEYLCKNSPEAVYELEHFGVPFS

SEQ ID NO: 79192 - protein, 129 aa, Unknown
  Bacterial polypetide isolated from the Sargasso Sea
TNFYEQHKSVQPWLKTKSDQPEKEWFQSKEDREKVDGMYECIMCACCSTSCPSYWWNPDKYLGPAALLQANRWIKDSRDEYKEERLDELDDAFKVYSCRTIMNCAKSCPKGLSPAKAIADIKKELATRK

SEQ ID NO: 79193 - protein, 234 aa, Unknown
  Bacterial polypetide isolated from the Sargasso Sea
MAKRTFEIYRYDPDKDAAPRMQTYEIEIDSHERMLLDALLKLKAMDETLSFRRSCREGVCGSDAMNINGKNGLACLQNMNDLPQKIVLRPLPGLPVVRDLICDFTQFFNQYHSIKPYLINDTPPPEKERLQSPEERDELDGLYECILCASCSTSCPSFWWNPDKFVGPAGLLQAYRFIADSRDQATGERLDNLEDPYRLFRCHTIMNCVDVCPKGLNPTKAIGKIKELMVRRAV

SEQ ID NO: 79194 - protein, 156 aa, Unknown
  Bacterial polypetide isolated from the Sargasso Sea
MQDYTLENPEGRDMMVLDALLKLKEQDPTLSFRRSCREGVCGSDGLNMNGKNGLACITPLSALGKGKGGKLVIRPLPGLPVVRDLVVDMTQFYTQYEKVKPYLINDELPPAGEYLQSPEDREKLDGLYECILCACCSTSCPSFWWNPDKFIGPAGL

SEQ ID NO: 79195 - protein, 246 aa, Unknown
  Bacterial polypetide isolated from the Sargasso Sea
MTISINIYRYNPEKDKFPYMQSFEFEKPKRDIMVLELLNQLKEKDPTISYRRSCREGVCGSDGMNINGKNGLACITPLSSVIKKNKLDLRPLPGLPVVRDLVVDMTEFYAQYEKIKPFLQNDTPVDIGERLQSPEDRDKLDGLYECILCACCSTSCPSFWWNPDKFVGPAALLQAYRFIADSRDTKTAERLQSLSDPFSVYRCHGIMNCVSVCPKGLNPNEAIGEIKSMLLSNKKNHNIITSDKAG

SEQ ID NO: 79196 - protein, 238 aa, Unknown
  Bacterial polypetide isolated from the Sargasso Sea
MTKKLKLSLYRFDPAKDKRPYMSDYEIPYSSSGNMMVIDAIRKAQELDSTITFRRSCGQGVCGSDGVNMNGLNGLACITPVSKVATANRLEVRPLPGLPVIKDLIVDMKPFYDQYEKVKPFLDNDEEIKTGHERLQSPKDREKLDGLYECILCACCSTSCPSFWWNPEKFVGPAALLQAYRFIADTRDKQKRMRLKKLNDAFSVYRCHGIMNCTSVCPKGLNPSKAINEIKKELRKTG

SEQ ID NO: 79197 - protein, 123 aa, Unknown
  Bacterial polypetide isolated from the Sargasso Sea
MKQLAPEQERLQSPEERDKLDGLYECILCACCSTSCPSFWWNPDKFVGPAALLQAYRFLADSRDLKTQERLESLSDPFSVYRCHGIMNCVNVCPKGLNPNKAIGEIKSMLHKNKKDIIVSDGV

SEQ ID NO: 79198 - protein, 50 aa, Unknown
  Bacterial polypetide isolated from the Sargasso Sea
DEDRKERLKKVADELKLYRCHTIMNCTNACPKGLNPAKAIASIKKMLATG

SEQ ID NO: 79199 - protein, 148 aa, Unknown
  Bacterial polypetide isolated from the Sargasso Sea
MAEFTLPKNSKIEKGEHFSADESAENIRVFHVYRYDPSDDSNPRVDTYEIDMDKCGPMVLDGLIKIKSDFDPSLTFRRSCREGICGSCSHNINGVNTLACIKPIKDLKGDIRIYPLPHMDVVKDLVVDLTDFYEGYSSVEPWLKSDTP

SEQ ID NO: 79200 - protein, 68 aa, Unknown
  Bacterial polypetide isolated from the Sargasso Sea
MGPAVLLQAYRCIADSRDDSTGERLDALEDPFKLYRCHTIMNCSKTCPKGLNPAKAIGEIKKLMVERR

SEQ ID NO: 79201 - protein, 246 aa, Unknown
  Bacterial polypetide isolated from the Sargasso Sea
MFGNKLKVSLYRYNPEEDKFPYMKNYVIDKPERDIMVLDLLHLLKEEDQSISYRRSCREGVCGSDGMNINGKNGLACITPISSVIKRNKIELRPLPGLPVIRDLVVDMTEFYAQYEKIKPFLQNETTAPEQERLQSPEERDKLDGLYECILCACCSTSCPSFWWNPDKFVGPAALLQAYRFLADSRDLKTQERLEALSDPFSVYRCHGIMNCVNVCPKGLNPNKAIGEIKSMLHKNKKDIIVSDGV

SEQ ID NO: 79202 - protein, 316 aa, Unknown
  Bacterial polypetide isolated from the Sargasso Sea
MKIVKHSFDGVIVGAGGAGLRAAIEAAPHMKLAVITKLYPTRSHTGAAQGGMSAALANVEEDNWNWHAFDTVKGSDYLADQPAVDILCKEAIDAVIELEHWGLPFSRLDNGKIAQRRFGGHTVKEGESPAFRACYAADRTGHMILQTLYQKCVSMGVTFFDEFQVLDIKIEDGICQGVIAYELATGDIHIFETRAVTFATGGFGKIFKVSSNAHSLTGDGPGILYQKGIPLEDMEFYQFHPTGIYRLGILLSEAARGEGGILRNKDGERFMERYAPSIKDLAPRDMVSRAIATEISEGNGAGPDSDYVYLDLTHLG

SEQ ID NO: 79203 - protein, 246 aa, Unknown; identical to SEQ ID NO: 79201
  Bacterial polypetide isolated from the Sargasso Sea

SEQ ID NO: 79204 - protein, 596 aa, Unknown
  Bacterial polypetide isolated from the Sargasso Sea
MFTRKIQKTALAMLISGAMAGTAYAAPEVLADFHGEMGGCDSCHVSDKGGVTNDNLTHENGQCVSCHGDLKELAAAAPKDKVSPHKSHLIGEIACTSCHKGHEKSVTYCDACHSFGFDMPFGGKWERKFVPVDADKAAQDKAIAAGVKETTDVVVIGSGGAGLAAAVSARDAGAKVILLEKEPIPGGNTKLAAGGMNAAETKPQAKLGIQDKKQIMIDDTMKGGRNINDPELVKVLANNSSDSIDWLTSMGADMTDVGRMGGASVNRSHRPTGGAGVGAHVAQVLWDNAVKRGTDIRLNSRVVRILEDASGKVTGVLVKGEYTGYYVIKADAVVIAAGGFAKNNDRVAKYDPKLKGFKATNHPGATGDGLDVALQAGAATRDLEYIQAHPTYSPAGGVMITEAVRGNGAIVVNRDGDRFMNEITTRDKASAAILKQKGESAYLVFDDSIRKSLKAIEGYVHLNIVKEGKTIEELAKQLDIPAAELAKTVTAYNGFVKSGKDTQFERPDLPRELVVAPFYALEIAPAVHHTMGGIVIDTKAEVKSEKTGKPIEGLYAAGEVTGGVHGANRLGGNAISDIVTYGRIAGASAAKFAKDH

SEQ ID NO: 79205 - protein, 596 aa, Unknown
  Bacterial polypetide isolated from the Sargasso Sea
MFTRKIQKTALAMLISGAMAGTAYAAPEVLADFHGEMGGCDSCHVSDKGGVTNDNLTHENAQCVSCHGDLKELAAAAPKDKVSPHKSHLIGEIACTSCHKGHEKSVTYCDACHSFGFDMPFGGKWERKFVPVDADKAAQDKAIAAGVKETTDVVVIGSGGAGLAAAVSARDAGAKVILLEKEPIPGGNTKLAAGGMNAAETKPQAKLGIEDKKQIMIDDTMKGGRNINDPELVKVLANNSSDSIDWLTSMGADMTDVGRMGGASVNRSHRPTGGAGVGAHVAQVLWDNAVKRGTDIRLNSRVVRILEDASGKVTGVLVKGEYTGYYVIKADAVVIAAGGFAKNNDRVAKYDPKLKGFKATNHPGATGDGLDVALQAGAATRDLEYIQAHPTYSPAGGVMITEAVRGNGAIVVNRDGNRFMNEITTRDKASAAILQQKGESAYLVFDDSIRKSLKAIEGYVHLNIVKEGKTIEDLAKQLDVPAAELAKTVTSYNGFVKSGKDTQFERPNLPREIATAPFYALEIAPAVHHTMGGIVIDTQAEVKSDKTGKPISGLYAAGEVTGGVHGANRLGGNAISDIVTYGRIAGASAAKYAKDH

SEQ ID NO: 79206 - protein, 116 aa, Unknown
  Bacterial polypetide isolated from the Sargasso Sea
ETKTNSPAQEWKQSIEDRKKLDGLYECVMCASCSTSCPSYWWNSDRYLGPAALLHAYRWIIDSRDQATGERLEGLDDPFKLYRCHTIMNCAKTCPKGLNPALAIAEVKKLMVEKTN

SEQ ID NO: 79207 - protein, 45 aa, Unknown
  Bacterial polypetide isolated from the Sargasso Sea
ERLKKVADELKLYRCHTIMNCTNACPKGLNPAKAIASIKKMLATS

SEQ ID NO: 79208 - protein, 379 aa, Unknown
  Bacterial polypetide isolated from the Sargasso Sea
QRRFGGHTVKEGESPAFRACYAADRTGHMILQTLYQKCVSMGVTFFDEFQVLDIKIEEGICQGVIAYELATGDIHIFETRAVTFATGGFGKIFKVSSNAHSLTGDGPGILYQKGIPLEDMEFYQFHPTGIYRLGILLSEAARGEGGILRNKDGERFMERYAPSIKDLAPRDMVSRAIATEISEGNGAGPDSDYVYLDLTHLGAETIKKKLPDITDFVRTYVKIEPIEEPIPVQPTAHYAMGGIPTDVYSRVLSDEKGTVLPGVYAAGEAACVSVHGANRLGTNSLLDIVVFGKRAGQSMVDYVTQTKPNSISDSASDDLSKKIQNLIDKEHTDEFSVANIRKDLQESMEENAKIFRTKETLEKQTEILEELRDRYENVT

SEQ ID NO: 79209 - protein, 234 aa, Unknown
  Bacterial polypetide isolated from the Sargasso Sea
MKISIYRYDPDVGNKPYMQSLDIDIPKDKDIMVLDALQIAKEVDPTISFRRSCREGVCGSDGMNINGKNGLGCITPLSEAVKGNKLELRPLPGLPVVKDLIVDMTQFVDQYKKIQPYLITEKANDGKEIPQTIEDRDKLDGLYECIMCGCCSTACPSFWWNPDKFLGPAALLQAYRFISDSRDVATEERLDQLEDAFSVFRCHGIMNCVSVCPKGLNPNKAINEIKKMLIKRAV

SEQ ID NO: 79210 - protein, 189 aa, Unknown
  Bacterial polypetide isolated from the Sargasso Sea
MGGNSLLDLVVFGRSAGLHIEDSFKQGIGISEPSSENINESLKNINRVNSSLEGENSPKIKKDLQEVMQMSFGVFRSEENMKQGIEEINTIRERSEGLHLADKSSKFNTARVEALELLNLLEVAEATAICAYERKESRGAHSRDDFPERDDENWLKHSIYFKGSKEVSKRDVNFRPKIVQAFQPFTRTY

SEQ ID NO: 79211 - protein, 233 aa, Unknown
  Bacterial polypetide isolated from the Sargasso Sea
MAKRIFEVYRYDPDKDAAPRMQTYELELEHERMLLDALVKLKAVDETLSFRRSCREGVCGSDAMNINGKNGLACLTNLNDLPQKIVLRPLPGLPVVRDLIVDMTHFFNQYHSIKPYLINDAPPPEKERLQSPEERDELDGVYECILCASCSTSCPSFWWNPDKFVGPAGLLQAYRFIADSRDTATGERLDNLEDPYRLFRCHTIMNCVDVCPKGLNPTKAIGKIKELMVRRAV

SEQ ID NO: 79212 - protein, 235 aa, Unknown
  Bacterial polypetide isolated from the Sargasso Sea
MKLEFAVYRYNPDVDTKPYMQDYSLEVAAGTDMMVLDALIKLKEQDPTLVFRRSCREGVCGSDGLNMNGKNGLACITPISTFKGKKLEIRPLPGMPVVRDLVVDLTQFYKQYEKIKPFLINDDKQPAREHLQSPEQRAHLDGLYECIMCACCSTACPSFWWNPDKFIGPSGLLHAYRFLIDSRDTATEERLSELDDAYSVFRCHGIMNCVDVCPKGLNPTKAIGHIKSMLLKRAV

SEQ ID NO: 79213 - protein, 138 aa, Unknown
  Bacterial polypetide isolated from the Sargasso Sea
MKAYKIIDHEYDVVVLGAGGSGLRAAVGLSEAGLKTACISKVFPTRSHTSAAQGGISAALGNMGEDDWRWHMYDTVKGSDWLGDQDAIEHLCKEAPKAVIELEKYGVPFSRTKEGKIYQRAFGGMTKNYGNESVQRTC

SEQ ID NO: 79214 - protein, 166 aa, Unknown
  Bacterial polypetide isolated from the Sargasso Sea
MNVTFSVYRYNPDVDNVPHMKEYRLDIPEGSDMMVLDALIQLKELDPTLAFRRSCREGVCGSDGLNMNGKNGLACITPLSDLLKKGNNVVIRPLPGLPVIRDLVIDMTQFYTQWEKVKPFLINDEKLPPVREHLQSPEERAKLDGLYECILCACCSTSCPSFWWNR

SEQ ID NO: 79215 - protein, 246 aa, Unknown
  Bacterial polypetide isolated from the Sargasso Sea
MFRNKLEISLYRYNPQEDKFPYMKKYIIDKPERDIMVLDLLNLLKEEDQSISYRRSCREGVCGSDGMNINGKNGLACITPISEVIKRNKIELRPLPGLPVIRDLVVDMTEFYSQYEKIKPFLQNETTAPEQERLQSPEDRDKLDGLYECILCACCSTSCPSFWWNPDKFVGPAALLQAYRFLADSRDLKTQERLESLSDPFSVYRCHGIMNCVNVCPKGLNPNKAIGEIKSMLHKNKKDIIVSDGA

SEQ ID NO: 79216 - protein, 234 aa, Unknown
  Bacterial polypetide isolated from the Sargasso Sea
MQVSIYRYNPDIDEVPSMREMEVDLPEGKDLMVLDVLELMKTQDSTLSYRRSCREGVCGSDGINMNGRNGLACITPVSQVVKKGKLVLRPLPGLPVIRDLVVDMTQFYKNYEKVTPYLVNDEPRPAQERLQSPEDREKLDGLYECILCACCSTSCPSFWWNPDKFIGPAGLLQAYRFLADSRDTATAERLADLDDPFSVFRCRGIMNCVNVCPKGLNPTRAIGKIRTMLLETGT

SEQ ID NO: 79217 - protein, 384 aa, Unknown
  Bacterial polypetide isolated from the Sargasso Sea
MKVIKHSFDGVIVGAGGAGLRAAIEAAPHMKLAVITKLYPTRSHTGAAQGGMSAALANVEEDNWNWHAFDTVKGSDYLADQPAVDILCKEAIDAVIELEHWGLPFSRLENGKIAQRRFGGHTVKEGESPAFRACYAADRTGHMILQTLYQKCVSMGVEFFDEFQVLDIKIEDGVCKGVVAFELSTGDIHIFESRAVTFATGGFGRIFKVSSNAHSLTGDGPGILYQKGIPLEDMEFYQFHPTGIYRLGILLSEAARGEGGILRNKDGERFMERYAPSIKDLAPRDMVSRAIATEISQGNGAGPDSDYVYLDLTHLGAETIKKKLPDITDFVRTYVKIEPINEPIPVQPTAHYAMGGIPTDVNGRVLSDEKNTVLPGVYAAGEAA

SEQ ID NO: 79218 - protein, 238 aa, Unknown
  Bacterial polypetide isolated from the Sargasso Sea
MTKKLKLSLYRFDPAKDKRPYMSDYEIPYSSSGNMMVIDAIRTAQELDSTITFRRSCAQGVCGSDGVNMNGQNGLACITPVSKVVTANRLEVRPLPGLPVIKDLIVDMKPFYDQYEKIKPFLDNDEEIKTGHERLQSPEDREKLDGLYECILCACCSTSCPSFWWNPEKFVGPAALLQAYRFIADTRDKQKRMRLKKLNDAFSVYRCHGIMNCTSVCPKGLNPSKAINEIKKELRKTE

SEQ ID NO: 79219 - protein, 42 aa, Unknown
  Bacterial polypetide isolated from the Sargasso Sea
KKVADELKLYRCHTIMNCTNACPKGLNPAKAIASIKKMLATG

SEQ ID NO: 79220 - protein, 245 aa, Unknown
  Bacterial polypetide isolated from the Sargasso Sea
MDLNVSLYRYNPEQDKFPYMKSYKVKKPEKDIMVLDLLNMLKEDDATISYRRSCREGVCGSDGMNINGKNGLACITPLSEVLKGNKLELRPLPGLPVIRDLIVDMTQFYEQYEKIKPFLQSDSEPPEQERLQSPQDRDKLDGLYECILCACCSTSCPSFWWNPDKFVGPAALLQAYRFLADTRDTKKQERLEELGDPFSVYRCHGIMNCVSVCPKGLNPNKAIGEIKSMLLTGTKEDKIKVVGLE

SEQ ID NO: 79221 - protein, 324 aa, Unknown
  Bacterial polypetide isolated from the Sargasso Sea
ADRWLAGDKDARRPPELLTRDVVARAIRKEVKAGRGSPHGGAFLDIANRRSADDIKRKLPSMYHQFNVLAELDITKESMEVGPTLHYFMGGVRVDADTQMTRVPGLFAAGECAAGVHGANRLGGNSLSDLLVCGKLAGSGAVDYIKSLPNKKNLNDDDVEKVIRSATDILNRENGENPYLIHEELQELMQNNVGIVRTDELLSEGIDGLSKLWGKFNNVKADGACQFNPGWHQAISLRNLLVTSESVARSARMREESRGAHTRVDFEGERDEWLQYNVVISKSDNGEMIAEKNRRGEPDPELKRIAELSIDELEKEVSLETDSK

SEQ ID NO: 79222 - protein, 235 aa, Unknown
  Bacterial polypetide isolated from the Sargasso Sea
MKLEFAVYRYNPDVDTKPYMQDYSLEVAEGSDMMVLDALIKLKEQDPTLAFRRSCREGVCGSDGVNMNGKNGLACITPISTFKGKKLEIRPLPGMPVVRDLVVDLTQFYKQYEKIKPFLINDEKMPAREHLQSPEQRAHLDGLYECIMCACCSTACPSFWWNPDKFIGPSGLLHAYRFLIDSRDTATEERLSELDDAYSVFRCHGIMNCVDVCPKGLNPTKAIGHIKSMLLKRAV

SEQ ID NO: 79223 - protein, 88 aa, Unknown
  Bacterial polypetide isolated from the Sargasso Sea
MSEYNIIDHEYDVVVLGAGGSGLRAAVGLSEAGLKTACISKVFPTRSHTSAAQGGISAALGNMGEDDWRWHMYDTVKGSDWLGDQDCM

SEQ ID NO: 79224 - protein, 204 aa, Unknown
  Bacterial polypetide isolated from the Sargasso Sea
ACVSVHGANRLGTNSLLDIVVFGRAAAHRAVDTMKPGESLPPLPESVTQKAIDRFDRIRHSKGDVSTAELRLDMQKAMQKHASVFRNTEILDEGVKKLGDIAMDMNNVRIQDKSLIWNTELIETLELDNLMGQALVTIRSASERKESRGAHAHEDYPERDDKDWMKHTVMWLDEQNKSKLGYRDVTLSTLTNEVQSIAPVARVY

SEQ ID NO: 79225 - protein, 213 aa, Unknown
  Bacterial polypetide isolated from the Sargasso Sea
MVLDLLNMLKEDDATISYRRSCREGVCGSDGMNINGKNGLACITPLSEVLKGNKLELRPLPGLPVIRDLIVDMTQFYEQYEKIKPFLQSDSEPPEQERLQSPQDRDKLDGLYECILCACCSTSCPSFWWNPDKFVGPAALLQAYRFLADTRDTKKQERLEELGDPFSVYRCHGIMNCVSVCPKGLNPNKAIGEIKSMLLTGTKEDKIKVVGLE

SEQ ID NO: 79226 - protein, 246 aa, Unknown
  Bacterial polypetide isolated from the Sargasso Sea
MLKNKLEVSMYRYNPEVDKFPYMKTYLISKPSKDIMVLDLLNLLKEEDQSISYRRSCREGVCGSDGMNINGKNGLACITPISSVIKKNKIELRPLPGLPVIRDLVVDMSEFYAQYEKIKPFLQNETTAPEQERLQSPEDRDKLDGLYECILCACCSTSCPSFWWNPDKFVGPAALLQAYRFLADSRDLKTYERLEALSDPFSVYRCHGIMNCVNVCPKGLNPNKAIGEIKSMLQKNKKDIIVSDKL

SEQ ID NO: 79227 - protein, 110 aa, Unknown
  Bacterial polypetide isolated from the Sargasso Sea
MKKEINYDGLYECILCACCSTSCPSFWWNPDKFVGPAALLQAYRFLADSRDLKTQERLEDLSDPFSVYRCHGIMNCVNVCPKGLNPNKAIGEIKSMLHKNKKDIIVSDGV

SEQ ID NO: 79228 - protein, 246 aa, Unknown
  Bacterial polypetide isolated from the Sargasso Sea
MFGNKLHVSLYRYNPEEDQFPYMKKYTIDKPDRDIMVLDLLHLLKEEDQSISYRRSCREGVCGSDGMNINGKNGLACITPISSVLKKNKIELRPLPGLPVIRDLVVDMTEFYAQYEKIKPFLQNETTAPEQERLQSPEERDKLDGLYECILCACCSTSCPSFWWNPDKFVGPAALLQAYRFLADSRDLKTEERLNDLSDPFSVYRCHGIMNCVNVCPKGLNPNKAIGEIKSMLHKNKKDIIASDRI

SEQ ID NO: 79229 - protein, 246 aa, Unknown
  Bacterial polypetide isolated from the Sargasso Sea
MFGNKLKVSLYRYNPEEDKFPYMKNYLIDKPERDIMVLDLLHLLKEEDQSISYRRSCREGVCGSDGMNINGKNGLACITPISSVIKRNKIELRPLPGLPVIRDLVVDMTEFYAQYEKIKPFLQNETTAPEQERLQSPEERDKLDGLYECILCACCSTSCPSFWWNPDKFVGPAALLQAYRFLADSRDLKTQERLEALSDPFSVYRCHGIMNCVNVCPKGLNPNKAIGEIKSMLHKNKKDIIVSDGV

SEQ ID NO: 79230 - protein, 53 aa, Unknown
  Bacterial polypetide isolated from the Sargasso Sea
DSRDEERKERLKKVADELKLYRCHTIMNCTNSCPKGLNPAKAIGSIKKMLASS

SEQ ID NO: 79231 - protein, 45 aa, Unknown
  Bacterial polypetide isolated from the Sargasso Sea
RRLKKVADELKLYRCHTIMNCTNACPKGLNPAKAIASIKKMLATS

SEQ ID NO: 79232 - protein, 34 aa, Unknown
  Bacterial polypetide isolated from the Sargasso Sea
MYRCHTIMNCANSCPKGLNPAKAIGSIKKMLATS

SEQ ID NO: 79233 - protein, 310 aa, Unknown
  Bacterial polypetide isolated from the Sargasso Sea
WRWHMYDTVKGSDWLGDQDAIEYLCKNAPKAVLELENYGVPFSRTEDGKIYQRAFGGMTKNYGDGTAQRTCAAADRTGHAIIHTLYGQSLKHDVDYYIEYFVLDLLMVEGECRGVVAWCLEDGKLHVFNSKQTVLASGGYGRVYFSATSAHTCTGDGNAMVLRAGLPLQDMEFVQFHPTGIYGVGCLITEGARGEGGYLVNSEGERFMERYAPSAKDLASRDVVSRSITKEIIDGRGVGKDKDHMYLHLDHIDSNILEERLPGISESAKVFAGVDVTKDPIPIIPTVHYNMGGIPTNFHGEVMNLVKGDE

SEQ ID NO: 79234 - protein, 317 aa, Unknown
  Bacterial polypetide isolated from the Sargasso Sea
SLKNNVEFYIEYFVLDLISDDQGNCIGVVTWCLEDGSIHRFLSHQTILATGGYGRAYFSSTSAHICTGDGSAMALRQNLPLSDMEFIQFHPTGVYGAGVLITEGARGEGGYLTNSDGERFMERYAPNAKDLASRDVVSRAMTIEISENRGCGDNADHVLLHLEHIDADTLHKRLPGISETAKIFAGVDLTKDPIPVLPTVHYNMGGIPTNYRTEVLRPTNENPDNVCEGLMAVGEAACVSVHGANRLGTNSLIDLVVFGKAASLTCKEKVKPNSKKIEISKSKTDNIIERFDKIRNSKGNSTTGELRTSMQHIMQQK

SEQ ID NO: 79235 - protein, 59 aa, Unknown
  Bacterial polypetide isolated from the Sargasso Sea
EFVQFHPTGIYGHGTLISEGVRGEGGYLVNSKGERFMERYAPKAKDLASRDVVSRSIAG

SEQ ID NO: 79236 - protein, 321 aa, Unknown
  Bacterial polypetide isolated from the Sargasso Sea
TEGARGEGGYLTNSDGERFMERYAPNAKDLASRDVVSRAMTIEINENRGCGEDADHVVLHLEHIDADTLHKRLPGISETAKIFAGVDLTKEPIPVLPTVHYNMGGIPTNHRTEVLRPTENNPDNICEGLLAVGEAACVSVHGANRLGTNSLIDLVVFGKASSITAKEKVQPNSKPVDIDESIVDPILDRFDKIRFNKGDSSTGEVRTSMQKVMQEKCAVFRTDELISKGIEEFSHIESSMDNIDVKDKSMIFNTDLTESLELHNLMAQSKVTLHSALNRTESRGAHAREDHRERDDSNWLVHSLSWLDNKGGVRMGTRPVN

SEQ ID NO: 79237 - protein, 215 aa, Unknown
  Bacterial polypetide isolated from the Sargasso Sea
NDKVVNGLFACGEIACVSVHGANRLGGNSLLDLVVFGRATGLHLGKTLSEMAPTRDASESDLEASMTRFNRWENSEKGKGEDPVQIKKDLQKCMQLNFSVFREGEAMAEGLKELSEIRERLKHARLDDKSADFNTQRIECLELDNLMETAYSTAVAANFRTESRGAHSRFDFPDRDDDNWLCHSIYDPNTDKMLKREVNMAPKLREAFPPKVRSY

SEQ ID NO: 79238 - protein, 263 aa, Unknown
  Bacterial polypetide isolated from the Sargasso Sea
SQKQQKFCRSRFTQRSIPVLPTVHYNMGGIPTNYRTEVLRPNKHNPDNICEGLMAVGEAACVSVHGANRLGTNSLIDLVVFGKAASLTCKEKIKPNSKKIEINKSKTDHIIQRFDKIRHSKGNSTTGELRTSMQHVMQKKCAVFRTHDLISRGIEEYQKIESSMDTIDIKDKSLIFNTDLVEALELHNLMAQSKVTLYSALNRKESRGAHAREDYKERDDENWLVHSLAWLNEQGDVNMGSRAVHMNTLTNHVQPIPPKRRVY

SEQ ID NO: 79239 - protein, 245 aa, Unknown
  Bacterial polypetide isolated from the Sargasso Sea
SIKNKAEFFIEYFALDLIMEEGECTGVVALEMATGKIHAFRAQRVILATGGHGRAYFSCTAAHTCTGDGSGMALRAGLPLQDMEFVQFHPTGIYGVGCLITEGVRGEGGYLTNSDGERFMERYAPNAKDLASRDVVSRSMTMEILEGRGVGEKKDHIHLNLQHLGPEVIEERLPGIAETARVFADVDVTKDPIPVLPTVHYNMGGVPTNMHTEVITKNSAGEMEIVSGLMAVGEAASVSVHGANR

SEQ ID NO: 79240 - protein, 144 aa, Unknown
  Bacterial polypetide isolated from the Sargasso Sea
TGGYGKVYYSATSAHTCTGDGNAMVLRAGLSLQDMEFVQFHPTGIYGHGTLITEGARGEGGYLTNSKGERFMERYAPNAKDLASRDVVSRSMSIEINEGRGVGKDQDHVHLNVSHLDKEIIESRLPGIIDAARLFANVDVTNEP

SEQ ID NO: 79241 - protein, 256 aa, Unknown
  Bacterial polypetide isolated from the Sargasso Sea
YEIEYHDYDVVVVGAGGSGLRATVGAVENGYKTACISKVFPTRSHTVAAQGGISAALGNMGEDDWRWHMYDTVKGSDWLGDQDAIEYLCKNAPKAVLELENYGVPFSRTEDGKIYQRAFGGMTKNYGDGTAQRTCAAADRTGHAIIHTLYGQSLKHDVDYYIEYFVLDLLMVEGECRGVVAWCLEDGKLHVFNSKQTVLASGGYGRVYFSATSAHTCTGDGNAMVLRAGLPLQDMEFVQFHPTGIYGVGCLITEGA

SEQ ID NO: 79242 - protein, 45 aa, Unknown
  Bacterial polypetide isolated from the Sargasso Sea
MREPRGEGGYLVNSEGERFMERYAPSAKDLASRDVVSRSITKEII

SEQ ID NO: 79243 - protein, 269 aa, Unknown
  Bacterial polypetide isolated from the Sargasso Sea
DRTGHALLHTLYQQSLKNNVDFYNEYFAIDLLKDDNDAICGLLAINIEDGSLHRFIAKMTILATGGYGRIFQSSTSAHICTGDGAGIALRAGLPLSDMEFIQFHPTGIYGVGVLISEAARGEGGILKNNEGTRFMLEYAPNAKDLAARDVISRFISKEISAGRGCGPNKDYINLHLEHLDADMLAKRLPGISESVKAFCGRDISKEPIPVIPTVHYCMGGIPTNFKAEVLKPNDTNTEEVCEGLMAIGEAACASVHGANRLGTNALAEL

SEQ ID NO: 79244 - protein, 200 aa, Unknown
  Bacterial polypetide isolated from the Sargasso Sea
VLDILFKIKNEIDSSLTFRRSCAHGVCGSCAMNVDGTNTLSCIKSHSDIKGELNIYPLPHLKVIKDLIGDLSNLYKQYESIQPWLKTSKTDTENQEILQSQKDRSKLDGYYECILCACCSTSCPSYWWNGDKYLCPAVLLQAYRWISDSRDEEKKERLKKVADELKLYRCHTIMNCTNSCPKGLNPAKAIGSIKKMLATS

SEQ ID NO: 79245 - protein, 270 aa, Unknown
  Bacterial polypetide isolated from the Sargasso Sea
TVHKRLPGISDTAKIFAGVDLTKDPIPVLPTVHYNMGGIPTNYRTEVLRPKTENPDNICEGLMAVGEAACVSVHGANRLGTNSLIDLIVFGKAASLTCLEKVKPNSKNLEINKSETDGIIDRFDKIRHSKGDMTTGELRTSMQHIMQKKCAVFRTHDLISKGIDEYNEIEMSIDSINIKDKSLIFNTDLVEALELHNLMAQSKVTLHSALNRTESRGAHAREDYKERDDKNWLVHSLAWLNDKGDVNMGSRAVHMNTLTNHVQPIPPKKR

SEQ ID NO: 79246 - protein, 292 aa, Unknown
  Bacterial polypetide isolated from the Sargasso Sea
EAGLKTACISKVFPTRSHTSAAQGGISAALGNMGEDDWRWHMYDTVKGSDWLGDQDCIEYLCKEAPRAVLELERYGVPFSRTKDGKIYQRSFGGMTKNYGNETVQRTCAAADRTGHAILHTMYGQALKHNTEFFIEYFALDLLMKNGECKGLLAWNLNDGTIHRFRSHITIIATGGYGKTYYSSTSAHTCTGDGNAMALRAGLPLQDMEFVQFHPTGIYGHGTLISEGVRGEGGYLVNSKGERFMERYAPKAKDLASRDVVSRSIAVEINEGRGVGNEKDHVHLHLDHLDPK

SEQ ID NO: 79247 - protein, 282 aa, Unknown
  Bacterial polypetide isolated from the Sargasso Sea
IEHLCKEAPKAVIELEKYGVPFSRTKEGKIYQRAFGGMTKNYGNDSVQRTCAAADRTGHAILHTLYGQALKHNTEFFIEYFALDLLMKNGECKGLVAWNLNDGTIHRFRSHITILATGGYGKVYYTATSAHTCTGDGNAMVLRAGLPLQDMEFVQFHPTGIYGVGTLISEGVRGEGGFLLNSKGERFMEKYAPKAKDLASRDVVSRSIAVEINEGRGVGKNKDYVNLHLDHLDPKVIEERLPGIAESAKTFCEVDVRKDPIPVVPTVHYNMGGIPTNYKAEV

SEQ ID NO: 79248 - protein, 267 aa, Unknown
  Bacterial polypetide isolated from the Sargasso Sea
MKQYEIIDHEYDVVVLGAGGSGLRAAVGLSEAGLKTACISKVFPTRSHTSAAQGGISAALGNMGEDDWRWHMYDTVKGSDWLGDQDAIEHLCKEAPKAVIELEKYGVPFSRTKEGKIYQRAFGGMTKNYGNESVQRTCAAADRTGHAILHTLYGQALKHNTEFFIEYFALDLLMKNGECKGLIAWNLNDGTIHRFRSHITIIATGGYGKVYYTATSAHTCTGDGNAMALRAGLPLQDMEFVQFHPTGIYGVGTLISEGVRGEGGYLL

SEQ ID NO: 79249 - protein, 231 aa, Unknown
  Bacterial polypetide isolated from the Sargasso Sea
NKKSFKIYRWDPEKNENPRYDLYEIDLDKCGPMVLDALIKIKDEIDSTLTFRRSCREGICGSCAMNIDGVNTLACTMAIEDTKKEVGINPLPHQPVVKDLVPDLTNFYNQHKKIQPWLKANGKSAETEYSQSKEDREKIDGLYECIMCACCSTSCPSYWWNSDKYLGPAALLQAYRWISDSRDEEKEERLDQLDDEFKVYSCRTIMNCSKACPKGLSPAKAIAGIKKELAS

SEQ ID NO: 79250 - protein, 203 aa, Unknown
  Bacterial polypetide isolated from the Sargasso Sea
MSTYKIIDHEYDVVVLGAGGSGLRAAVGLSEAGLKTACISKVFPTRSHTSAAQGGISAALGNMGEDDWRWHMYDTVKGSDWLGDQDAIEHLCKEAPKAVIELEKYGVPFSRTKEGKIYQRAFGGMTKNYGNESVQRTCAAADRTGHAILHTLYGQALKHNTEFFIEYFALDLLMKNGECKGLIAWNLNDGTIHRFRSHITILA

SEQ ID NO: 79251 - protein, 237 aa, Unknown
  Bacterial polypetide isolated from the Sargasso Sea
CKEAIPSVTELENFGVPFSRTEDGEVYQRPFGGHTLDYGKKMARRACAAADRTGHAILHTLYQQCLKYQAEFFIEYIALDLLMDDNGKCVGVLALCMDDGKIHRFRGHQTVLATGGYGRVYFSCTSAHTCTGDGNAMVLRAGLPLQDMEFVQFHPTGVYGAGVLITEGSRGEGGYLTNSEGERFMERYAPTAKDLASRDVVSRSMTIEINEGRGVGPNKDHIFMHLEHIDPATLHMR

SEQ ID NO: 79252 - protein, 293 aa, Unknown
  Bacterial polypetide isolated from the Sargasso Sea
MALRQNLPLSDMEFIQFHPTGIYGAGVLITEGARGEGGYLTNNDGERFMERYAPNAKDLASRDVVSRAMTIEIEEKRGCGENNDHLLLHLEHIDSNTIHKRLPGISETAKIFADVDLTNEPIPVLPTVHYNMGGIPTNYRTEVLSPTIDNPDNICEGLLAIGEAACVSVHGANRLGTNSLIDLIVFGKSASLTAANKTNPNSKKFDINNQSTDEILGRLDSIRFNKGTFSTGEVRLGMQKIMQQKCGVFRTHNLITKGIDEFKGVESSLENINIKDKSLIFNTDLVESLELHN

SEQ ID NO: 79253 - protein, 181 aa, Unknown
  Bacterial polypetide isolated from the Sargasso Sea
VLPRRICGSCSMNVDGTNTLACLKSIEEVKGDVYIYPLPHMSVIKDLVPDLSNAYKQLASVKPWLQTKDKSIEGKERVQSPEDREKLDGLWECVLCFSCSTSCPSYWWNGEDYLGPATLLQAYRWIADSRDEHRKERLEELEDSFKLYRCHTIMNCTKTCPKGLNPAKAIGAIKKLQLENP

SEQ ID NO: 79254 - protein, 160 aa, Unknown
  Bacterial polypetide isolated from the Sargasso Sea
VYYSATSAHTCTGDGNAMVLRAGLPLQDMEFVQFHPTGIYGVGCLITEGVRGEGGFLVNGKGERFMERYAPNAKDLASRDVVSRSMEMEINEGRGAGKDKDHINLHLDHIDKKVIDERLPGISEAAKTFANVDVSKEPIPVVPTVHYNMEGIPTNYKAEV

SEQ ID NO: 79255 - protein, 257 aa, Unknown
  Bacterial polypetide isolated from the Sargasso Sea
FAGVDLTKEPIPVLPTVHYNMGGIPTNHRTEVLRPTENNPDKICEGLLAVGEAACVSVHGANRLGTNSLIDLVVFGKASSITAKEKVKPNSKPVDINSSTLDPILDRFDKIRFNKGDSSTGEVRTSMQKVMQEKCAVFRTEELISKGIEEFSHIESSMDNIDVKDKSMIFNTDLTESLELHNLMAQSKVTLHSALNRTESRGAHAREDHQERDDSSWLVHSLSWLDNKGGVRMGTRPVNMNTLTNHVQPIPPKKRVY

SEQ ID NO: 79256 - protein, 312 aa, Unknown
  Bacterial polypetide isolated from the Sargasso Sea
FFVEWMALDLIRNTQGDVVGVTALELETGDLYELHAKAVLLATGGAGRIFQASTNAFINTGDGLGMAARAGIPLQDMEFWQFHPTGVAGAGVLLTEGCRGEGAILLNSEGERFMERYAPTLKDLAPRDFVSRSMDQEIKEGRGCGPNKDYILMKLDHLGAETIRKRLPSVEEIGHNFANVDITKEPIPVVPTIHYQMGGIPTNINGQVVVWDGQQNNVVGGLYAVGECSCVSVHGANRLGTNSLLDLLVFGKSAGKHIVEFVNGFGAHHEVPADGAERTLARLNSCRTQGRHLRPGRRRRDPQIMQTHAGVF

SEQ ID NO: 79257 - protein, 96 aa, Unknown
  Bacterial polypetide isolated from the Sargasso Sea
LDGSDECILCACCSTSCPSYWWNSDKYLGPATLMQAYRWIADSRDNKTNERLKHLEDTFKLYKCHTIMNCTNACPKGLNPAKQIAKIKSLIVSNKI

SEQ ID NO: 79258 - protein, 295 aa, Unknown
  Bacterial polypetide isolated from the Sargasso Sea
IEHLCKEAPKAVIELEKYGVPFSRTKDGKIYQRAFGGMTKNYGNDSVQRTCAAADRTGHAILHTLYGQALKHNTEFFIEYFALDLLMKNGECKGLIAWNLNDGTIHRFRSHITILATGGYGKVYYTATSAHTCTGDGNGMALRAGLPLQDMEFVQFHPTGIYGVGTLISEGVRGEGGFLLNSKGERFMERYAPKAKDLASRDVVSRSIAVEINEGRGVGKNKDYVNLHLDHLDPKVIEERLPGIAESAKTFCEVDVRKDPIPVVPTVHYNMGGIPTNYKAEVLTLNGKETTVPGL

SEQ ID NO: 79259 - protein, 297 aa, Unknown
  Bacterial polypetide isolated from the Sargasso Sea
GGVLRDKDGHRFMPDYEPDKKELASRDVVSRRMTEHMRKGKGVNSPYGPHLWLDITLLGKKHIDTNLREVKEICQHFLGIDPVTDWIPVRPTQHYSMGGIRTKPNGESPQLAGLFSVGEAACWDMHGFNRLGGNSLAEAVVGGMIIGEYVADFCQQTTLKVDTRLIEYFGQQIEAEISQLIEGNGTEKAITLKQEMQQIMMDYVGIFRNGTQLEQAVNELSELLKRSRNIGLSCKKRHANPELVDALRVKRMLKVALTVASGAYARTESRGAHSREDILSEMTATGSIVHSVHGLMK

SEQ ID NO: 79260 - protein, 171 aa, Unknown
  Bacterial polypetide isolated from the Sargasso Sea
MKYEIEYHDYDVVVVGAGGSGLRATVGAVENGYKTACISKVFPTRSHTVAAQGGISAALGNMGDDDWRWHMYDTVKGSDWLGDQDAIEYLCKNAPKAVLELENYGVPFSRTEDGKIYQRAFGGMTKNYGEGTAQRTCAAADRTGHAIIHTLYGQSLKHGVDYYIEYFALDL

SEQ ID NO: 79261 - protein, 201 aa, Unknown
  Bacterial polypetide isolated from the Sargasso Sea
VSVHGANRLGSHSLIDLVVFGKSAAKRAAELVKPNLPHDEISKSETDKSLDRFDKLRNSNGSNGTAELRLSMQKTMQEKCAVFRTEKTLKEGVNEIQKPFEGMKSISVKDKSLIFNTDLMETLEFDNLIRQAITTMESAYHRKESRGAHAREDFPKRDDENYMKHTLSWHNGKEVKINYRKVNLSTLTNDVQTFPPKERVY

SEQ ID NO: 79262 - protein, 193 aa, Unknown
  Bacterial polypetide isolated from the Sargasso Sea
MTAYKIIDHEYDVVVLGAGGSGLRAAVGLSEAGLKTACISKVFPTRSHTSAAQGGISAALGNMGEDDWRWHMYDTVKGSDWLGDQDAIEYLCKEAPKAVIELERYGVPFSRTKDGKIYQRAFGGMTKDYGNDSVQRTCAAADRTGHAILHTLYGQALKHNTEFFIEYFALDLLMKNGECKGLVAWNLNDGTIH

SEQ ID NO: 79263 - protein, 170 aa, Unknown
  Bacterial polypetide isolated from the Sargasso Sea
HITIIASGGYGKTYYSSTSAHTCTGDGNAMVLRAGLPLQDMEFVQFHPTGIYGHGTLISEGVRGEGGYLLNSKGERFMERYAPKAKDLASRDVVSRSIAIEINEGRGVGKEKDHVHLHLDHLDPEVIEKRLPGISESSRLFADVDVTKEPIPVVPTVHYNMGGIPTNYKA

SEQ ID NO: 79264 - protein, 300 aa, Unknown
  Bacterial polypetide isolated from the Sargasso Sea
PAMRACAAADRTGHALLHTLYQQSLKHKVNYFVEYFVLDLLKDVDGKCCGAVAWCLEDGSIHVFHSHITILATGGFGKTFLSSTSAHICTGDGNAMALRSGLPLSDMEFIQFHPTGLYGVGVLITEGARGEGGYLTNNNGDKFMEKYAPGVKDLASRDVVSRAITVEVNKGRGCGPEKDHVFLHLEHLESKFLNKRLPGVLEHAKIFSNIDATSEPIPVIPTVHYNMGGIPTNYRTEVISSEKQDKDKIYEGLLAVGEAACVSVHGANRLGTNSLIDLVVFGKAASITAKEKIKDYKSYT

SEQ ID NO: 79265 - protein, 274 aa, Unknown
  Bacterial polypetide isolated from the Sargasso Sea
MSEYNVIDHEYDVVVLGAGGSGLRAAVGLSEAGLKTACISKVFPTRSHTSAAQGGISAALGNMGEDDWRWHMYDTVKGSDWLGDQDCIEYLCKEAPRAVLELERYGVPFSRTKDGKIYQRSFGGMTKNYGNETVQRTCAAADRTGHAILHTMYGQALKHNTEFFIEYFALDLLMKNGECKGLIAWNLNDGTIHRFRSHITIIATGGYGKTYYSSTSAHTCTGDGNAMALRAGLPLQDMEFVQFHPTGIYGHGTLISEGVRGEGGYLLKFKGERF

SEQ ID NO: 79266 - protein, 300 aa, Unknown
  Bacterial polypetide isolated from the Sargasso Sea
RSHTVAAQGGIGASLNNMGENDSWQFHMYDTVKGSDWLGDQDAIEYMCKEAIPSVTELENFGVPFSRTEEGEVYQRPFGGHTLDYGKKMARRACAAADRTGHAILHTLYQQCLKHQAEFFVEYIALDLLMDDNGKCVGVLALCMDDGKIHRFRGHQTVLATGGYGRVYFSCTSAHTCTGDGNAMVLRAGLPLQDMEFVQFHPTGVYGAGVLITEGSRGEGGYLTNSEGERFMERYAPTAKDLASRDVVSRSMTIEINEGRGVGPNKDHIFMHLEHIDPATLHMRLPGISETAKIFLWCRC

SEQ ID NO: 79267 - protein, 236 aa, Unknown
  Bacterial polypetide isolated from the Sargasso Sea
MNYEIEYHDYDVVVVGAGGSGLRATVGAVENGYKTACISKVFPTRSHTVAAQGGISAALGNMGDDDWRWHMYDTVKGSDWLGDQDAIEYLCKNAPKAVLELEDYGVPFSRTEDGKIYQRAFGGMTKNYGEGTAQRTCAAADRTGHAIIHTLYGQSLKHDVDYYIEYFVLDLLMVNGECRGVVAWCLEDGKLHVFNAKQTVLASGGYGRVYFSATSAHTCTGDGNAMVLRAGLPLQD

SEQ ID NO: 79268 - protein, 303 aa, Unknown
  Bacterial polypetide isolated from the Sargasso Sea
NNVEFFIEYFVLDLISDDNGNCIGAVAWCLEDGSIHRFLSHQTILATGGYGRAYFSSTSAHICTGDGSAMALRQNLPLSDMEFIQFHPTGVYGAGVLITEGARGEGGYLTNSDGERFMERYAPNAKDLASRDVVSRAMTMEISENRGCGKNADHVLLHLEHIDPDTLHKRLPGISETAKIFAGVDLTKDPIPVLPTVHYNMGGIPTNYRTEVIKPTNMNPDNICEGLMAVGEAACVSVHGANRLGTNSLIDLVVFGKAASLTCKEKTKPNSKKIEISKSKTDDIIQRFDEIRHSKGNSTTGEL

SEQ ID NO: 79269 - protein, 256 aa, Unknown
  Bacterial polypetide isolated from the Sargasso Sea
MSKYKIIDHEYDVVVLGAGGSGLRAAVGLSEAGLKTACISKVFPTRSHTSAAQGGISAALGNMGEDDWRWHMYDTVKGSDWLGDQDAIEHLCKEAPKAVIELEKYGVPFSRTKEGKIYQRAFGGMTKNYGNDSVQRTCAAADRTGHAILHTLYGQALKHNTEFFIEYFALDLLMKNGECKGLIAWNLNDGTIHRFRSHITIIATGGYGKVYYTATSAHTCTGDGNAMVLRAGLPLQDMEFGSFHPTGIYGVGTLIS

SEQ ID NO: 79270 - protein, 195 aa, Unknown
  Bacterial polypetide isolated from the Sargasso Sea
DGACKGLIAWNLNDGTMHRFRSHITIIATGGYGKVYYSATSAHTCTGDGNAMVLRAGLPLQDMEFVQFHPTGIYGHGTLISEGVRGEGGYLLNSKGERFMERYAPKAKDLASRDVVSRSIAIEINEGRGVGTEKDHVHLHLDHLDPKVIEKRLPGISESSRLFANVDVTKEPIPVVPTVHYNMGGIPTNYKAEVL

SEQ ID NO: 79271 - protein, 200 aa, Unknown
  Bacterial polypetide isolated from the Sargasso Sea
MSAYKIIDHEYDVVVLGAGGSGLRAAVGLSEAGLKTACISKVFPTRSHTSAAQGGISAALGNMGEDDWRWHMYDTVKGSDWLGDQDAIEHLCKEAPKAVIELEKYGVPFSRTKDGKIYQRAFGGMTKNYGNDSVQRTCAAADRTGHAILHTLYGQALKHNTEFFIEYFALDLLMKNGECKGLIAWNLNDGTIHRFRSHIT

SEQ ID NO: 79272 - protein, 312 aa, Unknown
  Bacterial polypetide isolated from the Sargasso Sea
NGEGAPAMRACAAADRTGHALLHTLYQQSLKNNVEFYIEYFVLDLISDDQGNCIGVVTWCLEDGSIHRFLSHQTILATGGYGRAYFSSTSAHICTGDGSAMALRQNLPLADMEFIQFHPTGVYGAGVLITEGARGEGGYLTNSDGERFMERYAPNAKDLASRDVVSRAMTIEISENRGCGDNADHVLLHLEHIDADTLHKRLPGISETAKIFAGVDLTKEPIPVLPTVHYNMGGIPTNYRTEVLRPTNENPDNVCEGLMAVGEAACVSVHGANRLGTNSLIDLVVFGKAASLTCKEKIKPNSKKIEISKSKT

SEQ ID NO: 79273 - protein, 195 aa, Unknown
  Bacterial polypetide isolated from the Sargasso Sea
MKAYKIIDHEYDVVVLGAGGSGLRAAVGLSEAGLKTACISKVFPTRSHTSAAQGGISAALGNMGEDDWRWHMYDTVKGSDWLGDQDAIEHLCKEAPKAVIELEKYGVPFSRTKEGKIYQRAFGGMTKNYGNESVQRTCAAADRTGHAILHTLYGQALKHNTEFFIEYFALDLLMKDGQCKGLIAWNLNDGTIHRL

SEQ ID NO: 79274 - protein, 241 aa, Unknown
  Bacterial polypetide isolated from the Sargasso Sea
MVELTLPKNSKIVVGKSWPKPASEEDLKTFKIYRYDPDKSGNPRLDTYFVDMGDCGPMVLDALIKIKNETDPTLTFRRSCREGICGSCSMNIDGVNTLACLKGLNEIKNEVRIYPLPHLPVIKDLIPDLSNFYNQHASIMPWLETKTDLPNQEWRQSIEDRKKLDGLYECVMCASCSTSCPSYWWNGDKYLGPAALLNAYRWILDSRDNATKERLDDLEDPFKLYRCHTIMNCTDTCPKGL

SEQ ID NO: 79275 - protein, 226 aa, Unknown
  Bacterial polypetide isolated from the Sargasso Sea
PRSQDDAFATGGAGRIYAASTNAFINTGDGLGMAARAGVPLEDMEFWQFHPTGVAGAGVLITEGVRGEGGILRNKDGERFMERYAPTLKDLAPRDFVSRSMDQEIKEGRGCGPNGDYVLLDLTHVGAETIMKRLPSIREIGLKFANVDAIKEPIPVVPTIHYQMGGIPTNYHGQVVVPKNGNPNEVINGFYAIGECSCVSVHGANRLGTNSLLDLVVFGRSAGNHI

SEQ ID NO: 79276 - protein, 260 aa, Unknown
  Bacterial polypetide isolated from the Sargasso Sea
AKIFAGVDLTKKPIPVLPTVHYNMGGIPTNYRTEVLRPTNDNPDNVCEGLMAVGEAACVSVHGANRLGTNSLIDLVVFGKASSETCKEKVKPNSKKIEISKSITEGIIDRFDKIRYSKGDSTTGELRTSMQHIMQKKCAVFRTHELISDGINEFQKVENSMDSIDIKDRSLIFNTDLVESLELHNLMAQSKVTLHSALNRTESRGAHAREDYQERDDKNWLVHSLAWLKDNGDVNMGKRAVHTNTLTNHVQPIPPKKRVY

SEQ ID NO: 79277 - protein, 301 aa, Unknown
  Bacterial polypetide isolated from the Sargasso Sea
YDAEFFVEYFALDLLMDDNGACKGVVALSLEDGKIHRFRAHKTVLATGGYGRVYFSCTSAHTCTGDGNAMVLRAGLALQDMEFVQFHPTGVYGAGVLITEGARGEGGYLTNSQGERFMERYAPTAKDLASRDVVSRAMTIEVNEGRGIGQNKDHINLHLHHIDPDTLSMRLPGISETAKIFCGVDVTKEPIPVLPTVHYNMGGIPTNFHGEVICPKNGDKDAVVPGLMAIGEAACVSVHGANRLGTNSLLDIVVFGRAAAMRTDDTLKKGLTHSDINKSATDKILDRLDKTLHAKGQSSVG

SEQ ID NO: 79278 - protein, 208 aa, Unknown
  Bacterial polypetide isolated from the Sargasso Sea
EGLYAAGEVACVSVHGGNRLGGNSLLDLVVFGRAAGIFIEDSMKQGVDLKPASSGDLDKALSRLNKLNASQDGHQATDVKKAMQENMQLNFGVFRRGDLMEKGIEELAEARNQIENIHLKDKSAAFNTARIEALETQNLFEVAEATAITANERKESRGAHARDDFPERDDDEWLKHSIYYSEDKSVSKRDVNFRPKQVQAFQPIVRTY

SEQ ID NO: 79279 - protein, 298 aa, Unknown
  Bacterial polypetide isolated from the Sargasso Sea
MYDTVKGSDWLGDQDAIEYLCKEAPKAVIELERYGVPFSRTKDGKIYQRAFGGMTKDYGNESVQRTCAAADRTGHAILHTLYGQALKHNTEFFIEYLALDLLMKNGECKGLIAWNLNDGTIHRFRSHITILATGGYGKIYYTATSAHTCTGDGNGMILRAGLPLQDMEFVQFHPTGIYGNGTLISEGVRGEGGFLLNSKGERFMEKYAPKAKDLASRDVVSRSIAIEINEGRGVGKNKDHVNLHLDHIDPKIIEKRLPGIAESAKTFCEVDVTKDPIPVVPTVHYNMGGIPTNYKAEV

SEQ ID NO: 79280 - protein, 267 aa, Unknown
  Bacterial polypetide isolated from the Sargasso Sea
MSEYNIIDHEYDVVVLGAGGSGLRAAVGLSEAGLKTACISKVFPTRSHTSAAQGGISAALGNMGEDDWRWHMYDTVKGSDWLGDQDCIEYLCKEAPRAVLELERYGVPFSRTKDGKIYQRSFGGMTKNYGNETVQRTCAAADRTGHAILHTMYGQALKHNTEFFIEYFALDLLMKNGECKGLLAWNLNDGTIHRFRSHITIIATGGYGKTYYSSTSAHTCTGDGNAMALRAGLPLQDMEFVQFHPTGIYGHGTLISEGVRGEGWLPL

SEQ ID NO: 79281 - protein, 249 aa, Unknown
  Bacterial polypetide isolated from the Sargasso Sea
DHVLLHLEHIDADTLHKRLPGISETAKIFAGVDLTKDPIPVLPTVHYNMGGIPTNYRTEVLRPTNENPDNVCEGLMAVGEAACVSVHGANRLGTNSLIDLVVFGKAASLTCKEKVKPNSKKIEIGKSKTDNIIERFDKIRNSKGNSTTGELRTSMQHIMQQKCAVFRTHDLISKGIEEYSKVESSIDDIDIKDKSLIFNTDLVEALELHNLMAQSKVTLHSALNRTESRGAHAREDYKERDDNNWLVHS

SEQ ID NO: 79282 - protein, 274 aa, Unknown
  Bacterial polypetide isolated from the Sargasso Sea
MTKNYGNESVQRTCAAADRTGHAILHTLYGQALKHNTEFFIEYFALDLLMKDGQCKGLIAWNLNDGTIHRFRSHITILATGGYGKVYYTATSAHTCTGDGNGMALRAGLPLQDMEFVQFHPTGIYGVGTLISEGVRGEGGFLLNSKGERFMEKYAPKAKDLASRDVVSRSIAVEINEGRGVGKNKDYVNLHLDHLDPKVIEERLPGIAESAKTFCEVDVRKDPIPVVPTVHYNMGGIPTNYKAEVLTLNGKESTVPGLMAIGEAACVSVHGANR

SEQ ID NO: 79283 - protein, 303 aa, Unknown
  Bacterial polypetide isolated from the Sargasso Sea
FHPTGLYGIGVLITEGARGEGGYLTNSNNEKFMEKYAPNVKDLASRDVVSRAITTEVIQGRGCGSEKDHVFLHLEHIDSKILHKRLPGVLEHAKIFVDIDATKDSIPVVPTVHYNMGGIPTNYKTEVLSPDAQNTEKICEGLLAIGEAACVSVHGANRLGTNSLIDLVVFGKAASITAKEKIKSYKILSKIDNNYLNNILQRFDSIRQKNGKIKVGNVRINMQKTMQKHCGVFRNKEILEKGIKEMSKISESFKEIFISDKSMIFNTELVEALELENLLSQSIVTLNFSINRKKAEVPMLEKT

SEQ ID NO: 79284 - protein, 257 aa, Unknown
  Bacterial polypetide isolated from the Sargasso Sea
LTNSDGDRFMERYAPNAKDLASRDVVSRAMTIEINEKRGCGENADHVLLHLEHIDADTIHKRLPGISETAKIFAGVDLTKKPIPVLPTVHYNMGGIPTNYRTEVLRPTNDNPDNVCEGLMAVGEAACVSVHGANRLGTNSLIDLVVFGKASSETCKEKVKPHSKKIEISKSRTEGIIDRFDKIRHTKGDSTTGELRTSMQHIMQKKCAVFRTHELISDGINEFQEVENSMDSIDIKDRSLIFNTDLVESLELHNLMA

SEQ ID NO: 79285 - protein, 274 aa, Unknown
  Bacterial polypetide isolated from the Sargasso Sea
GNDNDHIMLHLEHIEPEILNKQLPGITETAKIFCGVDVTRAPIPVLPTVHYNMGGIPTNYHGEVLSPTAKDQHRTAPGLMAIGEAACVSVHGANRLGTNSLLDIVVFGRAAAHRAVDTMKPGEPLPPLPESVTQKAIDHFDRIRHSKGDVSTAELRLDMQKAMQKHAAVFRNTEILDEGVKKLGDIAMDMNNVRIQDKSLIWNTELIETLELDNLMGQALVTIRSASERKESRGAHAHEDYPERDDKDWMKHTVMWLDENNNQNSDIETLHYQH

SEQ ID NO: 79286 - protein, 93 aa, Unknown
  Bacterial polypetide isolated from the Sargasso Sea
MYECILCACCSTSCPSYWWNSDQYLGPANLLQAYRWIADSRDEASTDRVEYLNDSFKLYRCHTIMNCTNSCPKGLNPGKAIGQIKSRIAKRKT

SEQ ID NO: 79287 - protein, 182 aa, Unknown
  Bacterial polypetide isolated from the Sargasso Sea
MSAYKIIDHEYDVVVLGAGGSGLRAAVGLSESGLKTACISKVFPTRSHTSAAQGGISAALGNMGEDDWRWHMYDTVKGSDWLGDQDAIEYLCKEAPKAVIELERYGVPFSRTRDGKIYQRAFGGMTKDYGNDTVQRTCAAADRTGHAILHTLYGQALKHNTEFFIEYFALDLLMKDGECKGL

SEQ ID NO: 79288 - protein, 206 aa, Unknown
  Bacterial polypetide isolated from the Sargasso Sea
MADFTLPENSKVNKGNIFKADEDAKNTRKFLVYRYDPNDDSNPRIDTYEIDLDQCGPMVLDALIKIKADFDPSLSFRRSCREGICGSCSHNINGVNTLACTQPIKDLKGEIRVYPLPHMKVVKDLVIDLTDFYEQYASIEPWLKTSSEPPEGAERYQTKDQQEKIDRPSACILCACCSTACPSYWWNGDKYLGPAALLASYRWLQD

SEQ ID NO: 79289 - protein, 208 aa, Unknown
  Bacterial polypetide isolated from the Sargasso Sea
MAEFTLPKNSKIEKGDYFSADESAENIRTFHVYRYDPSDDSNPRVDTYEIDMDKCGPMVLDGLIKIKSDFDPSLTFRRSCREGICGSCSHNINGVNTLACIKPIKDLKGDIRIFPLPHMDVVKDLVVDLTNFYEGYSSVEPWLKSDTPAPEGSERLQSKEDQKKIDQPSACILCACCSTSCPSYWWNGDKYLGPAALLASYRWLQDSR

SEQ ID NO: 79290 - protein, 204 aa, Unknown
  Bacterial polypetide isolated from the Sargasso Sea
MSAYKIIDHEYDVVVLGAGGSGLRAAVGLSEAGLKTACISKVFPTRSHTSAAQGGISAALGNMGEDDWRWHMYDTVKGSDWLGDQDAIEYLCKEAPKAVIELERYGVPFSRTKDGKIYQRAFGGMTKNYGNDTVQRTCAAADRTGHAILHTLYGQALKHNTEFFIEYFALDLLMKNGECKGLIAWNLNDGTIHRFRSHITILAT

SEQ ID NO: 79291 - protein, 260 aa, Unknown
  Bacterial polypetide isolated from the Sargasso Sea
MVRSIPFLSHQTILATGGYGRAYFSSTSAHICTGDGSAMALRQNLPLSDMEFIQFHPTGVYGAGVLITEGARGEGGYLTNSDGERFMERYAPNAKDLASRDVVSRAMTIEVNENRGCGENADHVLLHLEHIDADTLHKRLPGISETAKIFAGVDLTKQPIPVLPTVHYNMGGIPTNHRTEVLRPTEDNPDNICEGLLAVGEAACVSVHGANRLGTNSLIDLVVFGKASSITAKEKTKPNSKSIDINVSTLDPVLDRFDKI

SEQ ID NO: 79292 - protein, 195 aa, Unknown
  Bacterial polypetide isolated from the Sargasso Sea
MADFILPKNSKIKEGKTYSFEGNKDLTKKLIIYRWDPEGNENPRLDKYEIDLKNCGPMVLDALIKIKNEIDTTLTFRRSCREGVCGSCAMNIDGVNTLACLKPIEEIKKDIKIYPLPHMRVVKDLVPDLTDAYKQLESIKPWLQNDEEKKEKNVSKNIQKPEDRAKLDGSWECVLCFCCTTSCPSYWWNGDDYLG

SEQ ID NO: 79293 - protein, 281 aa, Unknown
  Bacterial polypetide isolated from the Sargasso Sea
GEAPVQRACAAADRTGHAMLHTLYQQSLKHEAEFYVEYFAIDLIMSDDGVCEGVLAWNLDDGSIHVFRGHLVVFASGGYGRSYFSCTSAHTCTGDGHGMIARAGLPLQDQEFVQFHPTGIYGSGCLITEGARGEGGYLSNSQGERFMERYAPSAKDLASRDVVSRSMTMEIRDNRGVGPNGDHINLHLEHLDPDMLHERLPGITDSARIFAGVDATKEPIPVLPTVHYNMGGIPTNYMTEVLRPTNKDPDAVAPGLMAVGECGCASVHGANRLGTTLYWIL

SEQ ID NO: 79294 - protein, 218 aa, Unknown
  Bacterial polypetide isolated from the Sargasso Sea
GLIAWNLNDGTIHRFRSHITIIATGGYGKTYYSSTSAHTCTGDGNAMVLRAGLPLQDMEFVQFHPTGIYGHGTLISEGVRGEGGFLLNSKGERFMERYAPKAKDLASRDVVSRSIAVEINEGRGVGKEKDHVHLHLNHLDPEVIEKRLPGISESSRLFADVDVTKEPIPVVPTVHYNMGGIPTNYKAEVLTVNGSEKIVPGLMAIGEAACVSVHGANR

SEQ ID NO: 79295 - protein, 302 aa, Unknown
  Bacterial polypetide isolated from the Sargasso Sea
LDLISDDQGNCIGVVTWCLEDGSIHRFLSHQTILATGGYGRAYFSSTSAHICTGDGSAMALRQNLPLSDMEFIQFHPTGVYGAGVLITEGARGEGGYLTNSDGERFMERYAPNAKDLASRDVVSRAMTIEISENRGCGDNADHVLLHLEHIDADTLHKRLPGISETAKIFAGVDLTKDPIPVLPTVHYNMGGIPTNYRTEVLRPTNENPDNVCEGLMAVGEAACVSVHGANRLGTNSLIDLVVFGKAASLTCKEKVKPNSKKIEISKSKTDNIIERFDKIRNSKGNSTTGELRTSMQHIMQQ

SEQ ID NO: 79296 - protein, 241 aa, Unknown
  Bacterial polypetide isolated from the Sargasso Sea
LPTVHYNMGGIPTNHRTEVLCPTEDNPDNVCEGLLAVGEAACVSVHGANRLGTNSLIDLIVFGKASSLTAKEKVKPNSKAIDIDSSSLDPILDRFDKIRFNKGDSSTGEVRTSMQKVMQEKCAVFRTDELISKGIEEFNHIENSMDNINVKDKSMIFNTDLTESLELHNLMAQSKVTLHSALNRTESRGAHAREDHQERDDSNWLVHSLSWLDSKGDVKMGKRPVHMNTLTNHVQPIPPKK

SEQ ID NO: 79297 - protein, 324 aa, Unknown
  Bacterial polypetide isolated from the Sargasso Sea
GYLTNSEGERFMERYAPTQKDLASRDVVSRSMTIEINEGRGVGPKKDHIMLHLEHIDPETLHKRLPGITETAKIFCGVDVTKEPIPVLPTVHYNMGGVPTNYHGEVLSPTATDPNNTVQGLMAIGEAACVSVHGANRLGTNSLLDIVVFGRAAAHRASEVLTPGATHAPVSKESTDRAIERLDRMRHAKGDRQPGELRLDMQQAMQKYAAVFRSGESLTDGVKTMDSIAGDMNNIGIQDRSLVWNTDLIEAMELQNLMSQALVTIRSAEQRKESRGAHAHEDFTKRDDENWMKHTVMWLDDDNKSSVAYRDVTMTTLTNEVESI

SEQ ID NO: 79298 - protein, 295 aa, Unknown
  Bacterial polypetide isolated from the Sargasso Sea
LITEGARGEGGYLTNGDGERFMERYAPNAKDLASRDVVSRAMTIEISENRGCGENSDHVLLHLEHIDADTLHKRLPGISETAKIFAGVDLTKDPIPVLPTVHYNMGGIPTNYRTEVLRPTKQNPDNICEGLMAVGEAACVSVHGANRLGTNSLIDLVVFGKAASLTCREKVKPNSKKIEISKSKTENIINRFDQIRNSKGNSTTGELRTSMQNVMQKKCAVFRTHDLISKGIEEYNEIERSMDQIDIKDKSLIFNTDLVEALELHNLMAQSKVTLYSALNRKESRGAHAREDYKE

SEQ ID NO: 79299 - protein, 272 aa, Unknown
  Bacterial polypetide isolated from the Sargasso Sea
LENMGVIFSRDDDGKLGTRAFGGQKKARTYFVGAITGSALLHVLYEQSVKYNLHVYEEWFVTKLIKQDGKIAGAIAFDIKTGQMEMISAKAVVLATGGAGRVFEPSTNALICTGDGLSLAMQAGVPLMDTEMIQYHPTTLAGNGILLSEAARGDGAYLINSEGERFMEKYAPEYMELASRDVVSRAEQTEIDEGRGVDGCVFLDLRHLGKKFIEDRLGYLQEVALEFRGIDLSEKPIPITPGMHYIMGGIKTDLNGATNVPGLYAAGECANV

SEQ ID NO: 79300 - protein, 227 aa, Unknown
  Bacterial polypetide isolated from the Sargasso Sea
PTNINGQVISVEHGEDKIVDGLYAAGEVACVSVHGGNRLGGNSLLDLVVFGRAAGLYIEESMKQGIEVKDASNDDIEKALERLNRLNASTEGDQVSVLKEKMQQNMQNNFGVFRRGDLMEKGIEELAKTREEVNDIFLQDKSATFNTARIEALEMQNLFEVAEATAITANERKESRGAHARDDFTERDDENWLKHSIYYADTKEVSKRDVNYRPKTVQAFQPMVRSY

SEQ ID NO: 79301 - protein, 284 aa, Unknown
  Bacterial polypetide isolated from the Sargasso Sea
HVLLHLEHIDANTLHKRLPGISETAKIFAGVDLTRDPIPVLPTVHYNMGGIPTNYRTEVLRPTSDNPDNICEGLMAVGEAACVSVHGANRLGTNSLIDLVVFGKAASLTCKEKVKPNSKKIEINQSKTDNIIQRFDKIRHTKGDSTTGELRTSMQHIMQQKCAVFRTHDLISKGIEEYTKVESSMDEIDIKDKSLIFNTDLVEALELHNLMAQSKVTLHSALNRTESRGAHAREDYKERDDNNWLVHSLAWLNENGDVKMGSRGVHMNTLTNHVQPIPPKRRVY

SEQ ID NO: 79302 - protein, 207 aa, Unknown
  Bacterial polypetide isolated from the Sargasso Sea
MAKFKLPKNSTLTKGMTHKADGAAQNVKTFEVYRWSPDDDANPRIDSFEVDLDRCGPMVLDALIKIKSEQDSSLTFRRSCREGICGSCSMNIDGTNTLACLKSIDDVKGTVKIYPLPHMPVVKDLVPDLSQPYRQLTSIEPWLKSETAPANGEERRQSPAEREKLDGLWECVLCFSCSTACPSYWWNSDEYLGRGGFVAGPIVGLPI

SEQ ID NO: 79303 - protein, 303 aa, Unknown
  Bacterial polypetide isolated from the Sargasso Sea
ALGNMGEDDWRWHMYDTVKGSDWLGDQDAIEHLCKEAPKAVIELEKYGVPFSRTKEGKIYQRAFGGMTKNYGNESVQRTCAAADRTGHAILHTLYGQALKHNTEFFIEYFALDLLMKDGQCKGLIAWNLNDGTIHRFRSHITILATGGYGKVYYTATSAHTCTGDGNGMALRAGLPLQDMEFVQFHPTGIYGVGTLISEGVRGEGGYLLNSKGERFMEKYAPKAKDLASRDVVSRSIAVEINEGRGVGKNKDYVNLHLDHLDPKVIEERLPGIAESAKTFCEVDVRKDPIPVVPTGHYNMGRD

SEQ ID NO: 79304 - protein, 238 aa, Unknown
  Bacterial polypetide isolated from the Sargasso Sea
MSEYKIIDHEYDVVVLGAGGSGLRAAVGLSEAGLKTACISKVFPTRSHTSAAQGGISAALGNMGEDDWRWHMYDTVKGSDWLGDQDCIEYLCKEAPRAVLELERYGVPFSRTKDGKIYQRSFGGMTKNYGNETVQRTCAAADRTGHAILHTMYGQALKHNTEFFIEYFALDLLMKNGECKGLLAWNLNDGTIHRFRSHITIIATGGYGKTYYSSTSAHTCTGDGNAMALRAGLPLQDM

SEQ ID NO: 79305 - protein, 136 aa, Unknown
  Bacterial polypetide isolated from the Sargasso Sea
MADFILPKNSKIKEGKTYSFEGNKDSTKKLIIYRWDPEENENPRLDKYEVDLKNCGPMVLDALIKIKNEIDTTLTFRRSCREGVCGSCAMNIDGVNTLACLKPIEEIKKDIKIYPLPHMRVVKDLVPDLTAAYKQL

SEQ ID NO: 79306 - protein, 223 aa, Unknown
  Bacterial polypetide isolated from the Sargasso Sea
GMHYIMGRIKTDLNGATNVPGLYAAGECANVSVHGANRLGANSLLDTIVFGRRSAIESVEYIKSVKDVEIDPKELSREKSRIQSILDRPKGMRSAELRDKMGSTMTKGIGVWRDTESIKYAIEGMKSIRGQLPNVYVENKGKVFNTDLTSYLELEFMVDVAESICQGANARFESRGAHFRTDVTTRNDKDWLKHTIVEYNGEELNTSSEDVTITDWEPTERVY

SEQ ID NO: 79307 - protein, 242 aa, Unknown
  Bacterial polypetide isolated from the Sargasso Sea
MTTTRVMKFSIYRFDPEHDSKPYLQDFDLDVSRIEGKMLLSALEALKELDPTLTFRRSCREGVCGSDGMNINGKNGLACITQLVDLPERVVVQPLPGFPVIRDLVVDMDGFFEQYSSVKPFLRSKSEAPEKERLQSPEDRAKLDGMYECILCACCSGSCPSYWWNPDKFLGPATLLAMNRFVSDSRDDYTLERLDEIKDPYSAFRCRTISNCSYVCPKGLNPTKAIANLKHKMLDKQAGDST

SEQ ID NO: 79308 - protein, 258 aa, Unknown
  Bacterial polypetide isolated from the Sargasso Sea
MVELSLPTNSRPTTGKTWSSGREASNNKKFQIYRYDPDLGENPRIDTFFVDLDKCGPMVLDALIKIKNEIDPTLTFRRSCREGVCGSCAFNIDGTNTLACTKPISEITGDVKIYPLPHMPVIKDLVPDLNGPYSQYRAIEPWLQADTPAPNRERLQSREERAKLDGLWECILCFCCQTSCPSYWWNGDRYMGPAILLQAYRWIADSRDEATGKRLDSLNDGFRLFRCHTIMNCTNTCPKNLNPGQAIGKIKESVFQRL

SEQ ID NO: 79309 - protein, 277 aa, Unknown
  Bacterial polypetide isolated from the Sargasso Sea
GARGEGGYLTNSDGERFMERYAPNAKDLASRDVVSRAMTIEVNENRGCGENADHVLLHLEHIDAATLHKRLPGISETAKIFAGVDLTKEPIPVLPTVHYNMGGIPTNHRTEVLRPTEDNPDNVCEGLLAVGEAACVSVHGANRLGTNSLIDLVVFGKASSITAKEKVKPNSKAIDIDSSTLDPILDRFDKIRFNKGDSSTGEVRTSMQKVMQEKCAVFRTDELISKGIEEFNQIESSMDNISVKDKSMIFNTDLTESLELHNLMAQSKVTLHSALNR

SEQ ID NO: 79310 - protein, 254 aa, Unknown
  Bacterial polypetide isolated from the Sargasso Sea
ETRLGYLQEVSVEFLGIDMAEKPVPIRPGMHYIMGGIKTDVDGETGVPGLYAAGECANVSVHGANRLGANSLLDTVVFGRRSAEKASDYVKGISNEVIPTDEYVKRDLDMIKRILDSEGKFKVAEVRNKMATAMTKGIGVFRDQESMEYAKKIVDQTKIDYRDSIRIDNKGKIYNTDLLFALELGNMIDCAESIVHGALTRKESRGAHFRTDIPGRNDEEWLKHTLIYKSSEGEISVKTPDVTITEWQPVERVY

SEQ ID NO: 79311 - protein, 300 aa, Unknown
  Bacterial polypetide isolated from the Sargasso Sea
RSGTGGYGRVYFSCTSAHTCTGDGNAMALRAGLPLQDMEFVQFHPTGVYGAGVLITEGARGEGGYLTNSEGERFMERFAPTAKDLASRDVVSRAMTIEINEGRGVGPNKDHIMLHLEHIDADTLHQRLPGITETAKIFCGVDVTREPIPVLPTVHYNMGGIPTNYHGEVISAANGDDSATVPGLMAIGEAACVSVHGANRLGTNSLLDIVVFGRAAAHRAAETCTAGGTARSAPQEATEKALDRFDRMRHAKGDVGAAEIRLEMQQAMQRHAAVFRSADSLSDGVASMDKIAAKMGHIGV

SEQ ID NO: 79312 - protein, 225 aa, Unknown
  Bacterial polypetide isolated from the Sargasso Sea
MKAYKIIDHEYDVVVLGAGGSGLRAAVGLSEAGLKTACISKVFPTRSHTSAAQGGISAALGNMGEDDWRWHMYDTVKGSDWLGDQDAIEHLCKEAPKAVIELEKYGVPFSRTKEGKIYQRAFGGMTKNYGNESVQRTCAAADRTGHAILHTLYGQALKHNTEFFIEYFALDLLMKNGECKGLIAWNLNDGTIHRFRSHITIIATGGYGKVYYTATSAHTCTGDGK

SEQ ID NO: 79313 - protein, 265 aa, Unknown
  Bacterial polypetide isolated from the Sargasso Sea
AAADRTGHAMLHTLYQQSLSYEAEFFIEYYVLDLIMNEEKECCGVLAWSLHDGKIYNFSSKMVILATGGYGRAYYSCTSAHTCTGDGGGMALRAGLPLQDMEFTQFHPTGIYGAGVLITEGARGEGGYLTNRNGERFMERYAPNAKDLASRDVVSRSMTTEIMEGRGCGPKKDHIHLNLSHLDKKILNEKLPGITESAKVFAGIDVTKKPIPVQPTVHYNMGGIPTNIHGEVLTSKKGSDNVVKGLMSIGEAACVSVHGANRLGS

SEQ ID NO: 79314 - protein, 283 aa, Unknown
  Bacterial polypetide isolated from the Sargasso Sea
RAGLPLQDMEFVQFHPTGIYGSGCLITEGSRGEGGYLTNSEGEAFMERYAPTAKDLASRDVVSRAMTVEIREGRGVGDDNDHILLHLEHLGEDVLHKRLPGITETARIFAGVDATQEPIPVLPTVHYNMGGIPTNYHGEVLRPTLNDPDAICPGLMSIGEAACVSVHGANRLGTNSLIDLVVFGRAAALRAKDILKNYDLNKPIDNNSLESGLERFDSLRYSDGKQSTADVRLNMQRIMQNNAAVFRTSEILTEGCELIDKAGAAMKDLKTKDRSLIWNSDLV

SEQ ID NO: 79315 - protein, 300 aa, Unknown
  Bacterial polypetide isolated from the Sargasso Sea
VPPTGVYGAGVLITEGARGEGGYLTNSEGERFMERFAPTAKDLASRDVVSRAMTIEINEGRGVGPNKDHIMLHLEHIDADTLHRRLPGITETAKIFCGVDVTREPIPVLPTVHYNMGGIPTNYHGEVISAANGDENATVPGLMAIGEAACVSVHGANRLGTNSLLDIVVFGRAAAHRAAETCTPGGTARSAPQEATDKALDRFDRMRHAKGDVGAAEIRLEMQQVMQRHAAVFRSTDSLTDGVSNMDNIAAKMGHIGVKDQSLIWNTDLVESLELENLMGQALVTIRSADQRQESRGAHA

SEQ ID NO: 79316 - protein, 264 aa, Unknown
  Bacterial polypetide isolated from the Sargasso Sea
ISETAKIFAGVDLTKEPIPVLPTVHYNMGGIPTNYRTEVLRPTEDNPENICEGLLAVGEAACVSVHGANRLGTNSLIDLVVFGKASSITAKEKVKPNSKNIDINTSILDPILERFDKIRFNKGDSSTGEVRTSMQKIMQDKCAVFRTDELISRGIEEFKHVESTMDNIEVKDKSMIFNTDLTESLELHNLMAQSKVTLHSALNRTESRGAHSREDYQERDDSNWLVHSLSWLDSNGDVKIGKRPVHMNTLTNHVQPIPPKKRVY

SEQ ID NO: 79317 - protein, 261 aa, Unknown
  Bacterial polypetide isolated from the Sargasso Sea
MAEFTLPLNSIVKSGKHFKCDTADKKNIRIFKIYRYDPDDEKNPRVDTYEIDTSDCGPMVLDALLKIKNEIDTSITFRRSCREGICGSCSMNIDGRNALACTKSIDEIKGDIKIYPLPHMPVIKDLVTDLTDFYKQYESVQPWLQAEEPKDLTTERLQSKEELAELDGSDECILCACCSTSCPSYWWNSDKYLGPATLMQAYRWIADSRDEHQKERLEKLEDTFKLYKCHTIMNCTNACPKGLNPAKQIAKIKSLIVSNKI

SEQ ID NO: 79318 - protein, 259 aa, Unknown
  Bacterial polypetide isolated from the Sargasso Sea
MVQLTLPKNSKVLKGNLFSLETDITGKKIFKIYRYDPEKKENPRLDTYEIDLKKCGPMVLDALIYIKNELDPSLTFRRSCREGVCGSCSMNIDGTNTLACTKNINDVKGDLKIYPLPHMKVIKDLVPDLSNAYKQYASIEPWLKSNSNTEDGLETRQSPEERKELDGAYECILCFCCSTSCPSYWWNGDEYLGPATLLQAYRWISDSRDEAREERLDYLEDSFKLYRCHTIMNCTKTCPKGLNPAKAISKIKKAISERA

SEQ ID NO: 79319 - protein, 580 aa, Unknown
  Bacterial polypetide isolated from the Sargasso Sea
MKVIKHSFDGVIVGAGGAGLRAAIEAAPHMRLAVITKLYPTRSHTGAAQGGMSAALANVEEDNWNWHAFDTVKGSDYLADQPAVDILCKEAIDAVIELEHWGLPFSRLDNGKIAQRRFGGHTVKEGTSPAFRACYAADRTGHMILQTLYQKCVSMGVTFFDEFQVLDIKIEDGICQGVVAYELATGDIHIFETRAVTFATGGFGKIFKVSSNAHSLTGDGPGILYQKGIPLEDMEFYQFHPTGIYRLGILLSEAARGEGGILRNKDGERFMERYAPSIKDLAPRDMVSRAIATEISAGNGAGPDSDYVYLDLTHLGAETIKKKLPDITDFVRTYVKIEPIEEPIPVQPTAHYAMGGIPTDVNSRVLSDEKGTVLPGVYAAGEAACVSVHGANRLGTNSLLDIVVFGKRAGQSMVDYVTQTKPNQLSDNASNDLTKKITNLIEKEHTNEFSVAKIRKDLQDSMEENAKIFRTKETLEKQTEILEELRERYENVTIYDKGKVHNSELVEAIELDYLLDMSEATVSSALARNESRGAHSRQDYPDRDDTNFMKHSFAFKNENSANLKYRDVELGKYEPMERKY

SEQ ID NO: 79320 - protein, 255 aa, Unknown
  Bacterial polypetide isolated from the Sargasso Sea
MAKFTLPINSIVRKGKTFSDVNKSENMLTVEIYRYNPDTKSNPYTDTYLLNKDNFGPMALDVLIYIKSKIDSSLTFRRSCREGICGSCSMNINGTNNLACITDISTETKLKFYPLPHMPVIKDLVPDLNNFYAQYKSIKPWLITDKKPEREHIQSQEDRSKLDGLFECVLCACCSTSCPSYWWNSDKYLGPATLMHAYKWIIDSRDTAKEERLSNLADKFKLYRCHTIMNCTKTCPKNLNPARAISEIKKMLVKA

SEQ ID NO: 79321 - protein, 375 aa, Unknown
  Bacterial polypetide isolated from the Sargasso Sea
MYWRRQCHGFRQNLPLSDMEFIQFHPTGVYGAGVLITEGARGEGGYLTNSDGERFMERYAPNAKDLASRDVVSRAMTIEISENRGCGDNADHVMLHLEHIDSDTLLKRLPGISETAKIFAGVDLTKDPIPVLPTVHYNMGGIPTNYRTEVIRPTKNNPDNVCEGLMAVGEAACVSVHGANRLGTNSLIDLVVFGKAASLTCSEKTKPNSKKIDVSKSYTDNIIDRFDKIRYSKGNSTTGELRTSMQHIMQKNCAVFRTHDLITKGIEEYHEVENSMDNIDIKDKSLVFNTDLVEALELHNLMAQSKVTLHSALNRTESRGAHAREDFKERDDKNWLVHSLAWLNHNGDVKMGSRGVHMNTLTNHVQPIPPKKRVY

SEQ ID NO: 79322 - protein, 255 aa, Unknown
  Bacterial polypetide isolated from the Sargasso Sea
MAKFTLPINSIVKKGKTFNDNPSSENKLRVDIYRYNPDQNKNPYVDTYILNKEKFGPMALDVLFYIKNNIDSTLTFRRSCREGICGSCSMNINGTNTLACILNIADESSLKFYPLPHMPVIKDLVPDLSNFYKQYESIKPWLINDTKPEREHHQSQDDREKLDGLVECVLCACCSTSCPSYWWNSDKYLGPASLLHAYRWIIDSRDQASDERLSSIADKFKLFRCHTIMNCTKTCPKLLNPAKAISHIKKMIASK

SEQ ID NO: 79323 - protein, 666 aa, Unknown
  Bacterial polypetide isolated from the Sargasso Sea
MIYSDSLVVGAGLAGLRVAIASKERGLDTLVLSLIPAKRSHSAAAQGGMQASLGNAVKGMGDDEDVHFQDTVKGSDWGCDQEVARMFAHCAPKAVRELANWGVPWSRVSAGPREVIVNAQKVTLQEAEEAHGLINARDFGGTKKWRTCYTADGTGHSLLYAMDNKAISMDIPVHERVEALAIIHDGQRCHGVIARCLITGELRAYVAKSTTIATGGYGRIYEVSTNAIICEGIGQALALETGVATLGNMEAVQFHPTAIVPVGILTTEGCRGDGGLLRDKDGYRFMPDYEPEKKELASRDVVSRRMTEHMRKGKGVDSPYGPHLWLDITLLGRKHIETNLREVQEICENFLGIDPAKDWIPVRPTQHYSMGGIRTKATGESPQLKGLFSVGEAACWDMHGFNRLGGNSLAETVVGGMIIGKYVADFCENNSLEIDTQLAEKFMRQVQTEIDTLVDGEGHESPFELKREMQRIMMDYVGIFRNGPELDKAVNELKALLERSRKLGVKCRKRHANPELVEALRVKRMLKVALTVACGAAARTESRGAHAREDYPQRNDRDWLNRTLASWPDANALAPVLSYEPLDVMKMELPPGYRGYGIDNAIAHPDTAKREQQIAEILAGLGDDADRYQRQAALMPFELPPSLQAKNERLSDTLQRPSANALGEKS

SEQ ID NO: 79324 - protein, 246 aa, Unknown
  Bacterial polypetide isolated from the Sargasso Sea
MISNKLKVSLYRYNPEEDKFPYMKEYSIEKPDRDIMVLDLLHLLKEDDQSISFRRSCREGVCGSDGMNINGKNGLACITPISSVIKRNKIELRPLPGLPVIRDLVVDMTEFYAQYEKIKPFLQNETTAPEQERLQSPEERDKLDGLYECILCACCSTSCPSFWWNPDKFVGPAALLQAYRFLADSRDLKTQERLESLSDPFSVYRCHGIMNCVNVCPKGLNPNKAIGEIKSMLHKNKKDIIVSDGV

SEQ ID NO: 79325 - protein, 414 aa, Unknown
  Bacterial polypetide isolated from the Sargasso Sea
YNLHIYEEWFVTKLIKEDGRIAGAIAFDIKTGQMEMISAKAVVLATGGAGRVFEPSTNALICTGDGLSLAMQVGVPLMDTEMIQYHPTTLAGNGILLSEAARGDGAYLINSEGERFMEKYAPEYMELASRDVVSRAEQTEIDEGRGVDGCVFLDLRHLGKKFIEDRLGYLQEVALEFRGIDLSEKPIPIKPGMHYIMGGIKTDLNGATNVPGLYAAGECANVSVHGANRLGANSLLDTIVFGRRSAIESVEYIKSVKDVEIDPKELSKEKSRIQSILDRPKGMRSAELRDKMGSTMTKGIGVWRDTNSINFAIEGMKNVRGQLSNVYVENKGKVFNTDLTSYLELEFMVDVADSICQGANARFESRGAHFRTDVTTRNDKDWLKHTIVEYNGEELNTTSEKVTITDWEPTERVY

SEQ ID NO: 79326 - protein, 135 aa, Unknown
  Bacterial polypetide isolated from the Sargasso Sea
LIPDLTHFYAQHASIMPWLETKSNRPAKEWKQSIEDRKKLDGLYECVMCASCSTSCPSYWWNSDKYLGPAALLHAYRWIIDSRDEATGERLGELEDPFKLYRCHTIMNCTNTCPKGLNPAKAIAEVKKMMVERSF

SEQ ID NO: 79327 - protein, 406 aa, Unknown
  Bacterial polypetide isolated from the Sargasso Sea
MGSIHRFLSHQTILATGGYGRAYFSSTSAHICTGDGSAMALRQNLPLSDMEFIQFHPTGVYGAGVLITEGARGEGGYLTNSDGERFMERYAPNAKDLASRDVVSRAMTIEISENRGCGDNADHVLLHLEHIDADTLHKRLPGISETAKIFAGVDLTKDPIPVLPTVHYNMGGIPTNYRTEVLRPTNENPDNVCEGLMAVGEAACVSVHGANRLGTNSLIDLVVFGKAASLTCKEKVKPNSKKIEISKSKTDNIIERFDKIRNSKGNSTTGELRTSMQHIMQQKCAVFRTHELISNGIEEYSKVESSMDDLDIKDKSLIFNTDLVEALELHNLMAQSKVTLHSALNRTESRGAHAREDYKERDDNNWLVHSLAWLNDNGDVSMGSRGVHMNTLTNHVQPIPPKRRVY

SEQ ID NO: 79328 - protein, 560 aa, Unknown
  Bacterial polypetide isolated from the Sargasso Sea
MYDHDLLIVGAGLAGLRCAVEAQRLGLDVAVITKVHPVRSHSNAAQGGINAPLTDRGDDWKGHALDTIKGSDYLADQDAVEIMSQEAGEAVLELERMGVIFSRGDDGKLGTRRFGGQKVARTFFVGAITGSALLHVLYEQSLKLGLTVYEEWFVTSLIKHEGAVKGVVALDLKTGELESITAKSVVIAAGGAGRVFEPSTNALICTGDGLSLAWNNGAGLMDMEMIQYHPTTLARTGILLSEAARGEGAYLLNSEGDRFMEKYAPDYMELASRDVVSRAEQTEINEGRGIDGNVLLDLRHLGKEFIETRLGYLQEVSVEFLGIDMSEKPVPIRPGMHYIMGGIKTDVDGETGVPGLYAAGECANVSVHGANRLGANSLLDTVVFGRRSAEKASDYVKTVSNEEIPTKSYVEKDLKRIKNIMNSDGNLRVSEVRNEMAEAMTKGIGVFRDQKSMEYAKSVVDQTKIKYRDSIKIDNKGKVYNTDLLFALELGNMIDCAESIVHGALTRKESRGAHFRTDLTDRNDKDWLKHTLVYKDLEGEISIKTPDVTITQWQPVERVY

SEQ ID NO: 79329 - protein, 261 aa, Unknown
  Bacterial polypetide isolated from the Sargasso Sea
MAKFILPVNSRVKKGKHFEAPKEAENVRRYIVYRYNPDLNENPRMDIFDIDMDNCGPMVLDVLIKIKNEIDPSLTFRRSCREGICGSCAMNINGGNSLACTISASSISGDTKIYPLPHMPVVKDLVADLTHFYQQYASIKPWLQSKKEPPEHKERIQSKEEQEKIDEPAACILCACCSTSCPSYWWNSDRYLGPAALLASYRWLVDSRDDSKDERLDEIEDSFRLYRCHTIMNCTNTCPKGLNPAEAIANTKKMLIERHSQ

SEQ ID NO: 79330 - protein, 155 aa, Unknown
  Bacterial polypetide isolated from the Sargasso Sea
MKDGECKGLIAWNLNDGTIHRFRAHTVIIATGGYGKVYYSATSAHTCTGDGNAMVLRAGLPLQDMEFVQFHPTGIYGHGTLISEGVRGEGGYLVNSKGERFMERYAPNAQDLTSRDVVSRSMSIEINEGRGVGKDQDHVHLHLSHLDKSVIENRL

SEQ ID NO: 79331 - protein, 484 aa, Unknown
  Bacterial polypetide isolated from the Sargasso Sea
MKVLEFDGIVVGGGGSGLMASLQLAQSGFKTAVVSKVFPTRSHTVSAQGGITCAIQSADPDDDWRWHMYDTVKGSDFIGDQDSIEYMCQEGPKAVFELEHMGLPFSRTEEGKIYQRAFGGQSKDYGKGGQAERTCAAADRTGHALLHTLYQANLKAGTNFLSEWFAVDLVKNGDNQVVGVIAFEIETGEPYFLKSKATVLATGGAGRIYQTTSNAMINTGDGTGMVLRAGFPVQDMEMWQFHPTGIYGHGTLVTEGCRGEGGYLVNKDGERFMERYAPNYKDLASRDVVARSMMLEILEGRGCGPDADHVYLKLDHLGPEIVHKRLPGITELSKTFAHVDPVEHPIPVVPTCHYAMGGIPTNVHGQVLTQATDGTDNVVHGLYAAGEAACVSVHGGNRLGGNSLLDLIVFGRSAGLHIENALKDGITLSKATNDDIDQALVNLNRVNISSTGEDVATVKAELQKNMQLNLSVFRTRGLNGEGVS

SEQ ID NO: 79332 - protein, 180 aa, Unknown
  Bacterial polypetide isolated from the Sargasso Sea
MVELSLPQNSKLTKGKTFGKKGKTMTCLKVYRWNRESGSNPSIDEYFINKKKFGPMILDALMYIKSYVDPSLTFRRSCREGICGSCSMNINGTNTLACIKPLPDSKEINIYPLPHMKVLKDLVPDLTEFFEQYKSIKPWIKNGKKNKKENTQSPEDRKKLDGLYECVLCACCSTSCPSYW

SEQ ID NO: 79333 - protein, 428 aa, Unknown
  Bacterial polypetide isolated from the Sargasso Sea
RGDDWRDHALATIKGSDYLADQDAVEVMCREAGEAIIELENMGVIFSRDDDGKLGTRAFGGQKKARTYFVGAITGSALLHVLYEQSVKYNLHIYEEWFVTKLIKQDGKIAGAIAFDIKTGQMELITAKAVVLATGGAGRVFEPSTNALICTGDGLSLAMQVGAPVMDTEMIQYHPTTLAGNGILLSEAARGDGAYLINSEGDRFMEKYAPDYMELASRDVVSRAEQTEIDEGRGVDGCVYLDLRHLGKKFIEERLGYLQEVALEFRGIDLSESPIPIKPGMHYIMGGIKTDLDGATNIPGLYAAGECANVSVHGANRLGANSLLDTIVFGRRAAVNSVDYIKSSNSVDIDERELSKEKSRIQNILDRPKGMRSAELRNKMGSTMTKGIGVWRDKNSISEAITKMKDLRGQLPNVSIENKGKVFNTDLV

SEQ ID NO: 79334 - protein, 120 aa, Unknown
  Bacterial polypetide isolated from the Sargasso Sea
WLHTKKEDPNEEWLQSKEDREQLDGLYECIMCACCSTSCPSYWWNSDKYLGPAALLQAYRWIIDSRDDERDERLDKLEDPFKLYRCHTIMNCAKACPKGLNPAKAIASIKKMLVERRVSK

SEQ ID NO: 79335 - protein, 394 aa, Unknown
  Bacterial polypetide isolated from the Sargasso Sea
MNGKGYLEASSLPVKEFDGIIVGGGGSGLMAGLQLAQSGMNTAVVSKVFPTRSHTVSAQGGITCAIASADPNDDWRWHMYDTVKGSDFIGDQDSIEYMCQEGPATVFELENMGLPFSRTEDGKIYQRAFGGQSKDYGKGGQAERTCAAADRTGHALLHTLYQANIKAGTNFLSEWFAVDLVLNDSKQVTGVIAFEIESGEAYFLKAKATVLATGGAGRIYKSTTNALINTGDGTGMALRAGLAVQDMEMWQFHPTGIHGAGTLVTEGCRGEGGYLINKDGERFMERYAPNAKDLASRDVVARSMMLEIIEGRGCGPEKDHCFLKLDHLGAELLHKRLPGITELSKTFAHVDPADHPIPVVPTCHYAMGGIPTNVHGQVLTQQADGSDKVVDGLY

SEQ ID NO: 79336 - protein, 184 aa, Unknown
  Bacterial polypetide isolated from the Sargasso Sea
MAQFSLPKNSKIGTGKTYEGDQKSAKKRSFRIYRWDPDTEENPRIDTYTIGLEDCGPMVLDAIIHIKDEIDPSLTFRRSCREGICGSCAMNIDGTNTLACTKSIESIKGDVKVYPLPHMSVLKDLVPDLKHFYAQYASIKPWLQSDTPAPPDKERLQSKEDREKLDGLYECILCACCSTSCPSY

SEQ ID NO: 79337 - protein, 255 aa, Unknown
  Bacterial polypetide isolated from the Sargasso Sea
MAKFTLPVNSIVKKGNTYSDLNKSENMLTVEIYRYNPDNQSNPYTDTYLLNKDNFGPMALDVLIYIKSKIDPTLTFRRSCREGICGSCSMNINGTNNLACITDISNESKLKFNPLPHMPVIKDLVPDLNNFYAQYKSIKPWLINDNKPEREHIQSQEDRSKLDGLVECVLCACCSTSCPSYWWNSDKYLGPATLMHAYKWIIDSRDTAKEERLSGLADKFKLYRCHTIMNCTKTCPKNLNPARAISEIKKMLVKA

SEQ ID NO: 79338 - protein, 259 aa, Unknown
  Bacterial polypetide isolated from the Sargasso Sea
MVQLRLPKNSRVLTGKTWPKPEGASNIRKFKIYRWSPDDDENPRVDTYFVDIDSCGPMILDALIKIKSEIDPTLTFRRSCREGICGSCAMNIDGINTLACIYGLDEIKGDINIYPLPHMPVIKDLIPDLTDFYAQHASIMPWLETKTNRPNEEWKQSIEDRKKLDGLYECVMCASCSTSCPSYWWNSDRYLGPAALLHAYRWIIDSRDQATDERLEDLDDPFKLYRCHTIMNCAKTCPKGLNPALAIAEVKKLMVEKTN

SEQ ID NO: 79339 - protein, 225 aa, Unknown
  Bacterial polypetide isolated from the Sargasso Sea
NISGQAYKRINNEDHLIPGLFSVGEAACVSVHGANRLGGNSLLDLVVFGRATGKHIQEELKSGGGVTSATKGDIDSSLERLNKLNESDSGFDTADIKKELQECMQNYFGVFRRGEFMKQGLDQLKDLKEKVDNLHLIDKSDAFNTSRVEAIELQNLFDVAEATAISAYERNESRGAHARDDYPDRDDENWLCHTMFDPKSKLVSKREVNFNPSKVEAFPPKVRTY

SEQ ID NO: 79340 - protein, 316 aa, Unknown
  Bacterial polypetide isolated from the Sargasso Sea
ESRGDNWDDHAYNTVKGSDYLGDQDAIEIMCQEAGPAVVELEHMGVVFNRDENGRLGTRHFGGQEVARTFFVADITGQALLHALYEQIMKYNPRVYEEWFVTSLVIEDGKCCGVVALELMTGQIHLIKAKAVILATGGTGRCFEPSTNGLVVTADGQGLAYQVGVPLMDMEMVQYHPTTLKGNGVLMTEGARGEGGYLLNSEGERFMKTYAPNMMELASRDVVSRSEQTEINEGRGIDGCVLLDLRHLGRELIETKLAYINEVAMDFANVNLAEEPCPIRPGNHYEMGGIKTDVHGVTSMPGLYAAGECANVSVHG

SEQ ID NO: 79341 - protein, 255 aa, Unknown
  Bacterial polypetide isolated from the Sargasso Sea
MAKFTLPINSIVKKGKTYKLDSDPKNILTVDIYRYNPDDGSNPSIDTYILDKNNFGPMALDVLLYIKNKVDSTLSFRRSCREGICGSCSMNINGTNTLACILNIAEESHLKIYPLPHMPVVKDLFPDMKKFYKQYESIKPWLINDNKPQREHLQSQSDREKLDGLIECVLCACCSTSCPSYWWNSDKYLGPASLLHAYRWIIDSRDTAKKERLSNLADKFKLFRCHTIMNCTKTCPKNLNPAKAISHIKTMLASD

SEQ ID NO: 79342 - protein, 336 aa, Unknown
  Bacterial polypetide isolated from the Sargasso Sea
MSKDYEIIQHQYDVVVVGAGGSGLRSTLGLVESGFKTACITKVFPTRSHTVAAQGGISAALGNNGEDDWRWHMYDTVKGSDWLGDQDAIAYMCKEAPNAVLELERYGIPFSRTDDGKIYQRAFGGMTTHFGDGIAQRTCAAADRTGHAMLHTLYQQSIKNKAEFFIEYFALDLIMEDGECTGVVALEMATGKIHAFRAQRVILATGGHGRAYFSCTAAHTCTGDGSGMALRAGLPLQDMEFVQFHPTGIYGVGCLITEGVRGEGGYLTNSDGERFMERYAPNAKDLASRDVVSRSMTMEILEGRGVGEKKDHIHLNLQHLGPEVIEERLPGIAETA

SEQ ID NO: 79343 - protein, 260 aa, Unknown
  Bacterial polypetide isolated from the Sargasso Sea
MAKFTLPVNSIVKEGKVFKDNFSETPLLKTILVYRYNPDKSENPRVDKYILDTTNFGPMLLDALIYIKNNIDSTITFRRSCREGICGSCSMNIDGKNALACTKGIADYGDEIKIYPLPHMKVVKDLVTDLTNFYKQYKSVQPWLQADEPLDKSQERLQSKKEREQLDGSDECILCACCSTSCPSYWWNGDKYLGPAALLQAYRWIFDSRDKKQKERVKSISDSFKLYRCHTIMNCTDACPKGLNPAKKIAKIKKLIVNTA

SEQ ID NO: 79344 - protein, 258 aa, Unknown
  Bacterial polypetide isolated from the Sargasso Sea
MAELVLPKNSKVKDGKKYPLDSGSKNKKSFKVYRWDPEKNDNPRYDLYEIDLDKCGPMVLDALIKIKDEIDSTLTFRRSCREGICGSCAMNIDGVNTLACTMAIEDTKKEVGINPLPHQPVVKDLVPDLTNFYNQHKKIQPWLKTNGKSTEAEFSQSKEEREKIDGLYECIMCACCSTSCPSYWWNSDKYLGPAALLQAYRWISDSRDEEKQKRLDQLDDEFKVYSCRTIMNCSKACPKGLSPAKAIAGIKKELASRK

SEQ ID NO: 79345 - protein, 234 aa, Unknown
  Bacterial polypetide isolated from the Sargasso Sea
MAELVLPKNSKVKDGKKYPLDSESRNKKSFKIYRWDPEKNENPRYDLYEIDLDKCGPMVLDALIKIKDEIDSTLTFRRSCREGICGSCAMNIDGVNTLACTMAIEDTKKEVGINPLPHQPVVKDLVPDLTNFYNQHKKIQPWLKANGKSAETEYSQSKEDREKIDGLYECIMCACCSTSCPSYWWNSDKYLGPAALLQAYRWISDSRDEEKEERLDQLDDEFKVYSCRTIMKCS

SEQ ID NO: 79346 - protein, 666 aa, Unknown
  Bacterial polypetide isolated from the Sargasso Sea
MIYTDSLVVGAGLAGLRVAIASKERGLDTLVLSLIPAKRSHSAAAQGGMQASLGNAVKGMGDDEDVHFQDTVKGSDWGCDQEVARMFAHCAPKAVRELANWGVPWSRVSAGPREVIVNAQKVTLQEAEEAHGLINARDFGGTKKWRTCYTADGTGHSLLYAMDNKAISMDIPVHERVEALAIIHDGQRCHGVIARCLITGELRAYVAKSTTIATGGYGRIYEVSTNAIICEGIGQALALETGVATLGNMEAVQFHPTAIVPVGILTTEGCRGDGGLLRDKDGYRFMPDYEPEKKELASRDVVSRRMTEHMRKGKGVDSPYGPHLWLDITLLGRKHIETNLREVQEICENFLGIDPAKDWIPVRPTQHYSMGGIRTKATGESPQLKGLFSVGEAACWDMHGFNRLGGNSLAETVVGGMIIGKYVADFCENNSLEIDTQLAEKFMQQVQTEIDTLVDGEGHESPFELKREMQRIMMDYVGIFRNGPELDKAVTELKALLERSRKLGVKCKKRHANPELVEALRVKRMLKVALTVACGAAARTESRGAHAREDYPQRNDRDWLNRTLASWPDAEALAPVLSYEPLDVMKMELPPGYRGYGIDNAIAHPDTAKREQQIAEILAELDDDADRYQRQAALMPFELPPSLQAKNERLSDTLQRPSANALGEKS

SEQ ID NO: 79347 - protein, 666 aa, Unknown
  Bacterial polypetide isolated from the Sargasso Sea
MIYTDSLVVGAGLAGLRVAIASKERGLDTLVLSLIPAKRSHSAAAQGGMQASLGNAVKGMGDDEDVHFQDTVKGSDWGCDQEVARMFAHCAPKAVRELANWGVPWSRVSAGPREVIVNAQKVTLQEAEEAHGLINARDFGGTKKWRTCYTADGTGHSLLYAMDNKAISMDIPVHERVEALAIIHDGERCHGVIARCLITGELRAYVAKSTTIATGGYGRIYEVSTNAIICEGIGQALALETGVATLGNMEAVQFHPTAIVPVGILTTEGCRGDGGLLRDKDGYRFMPDYEPEKKELASRDVVSRRMTEHMRKGKGVDSPYGPHLWLDITLLGRKHIETNLREVQEICENFLGIDPAKDWIPVRPTQHYSMGGIRTKATGESPQLKGLFSVGEAACWDMHGFNRLGGNSLAETVVGGMIIGKYVADFCENNSLEINTQLAEKFMRQVQTEIDTIVDGDGQENPFELKHAMQRIMMDYVGIFRNGPELDKAVTELKALLERSRKLGIKCKKRHANPELVEALRVKRMLKVALTVACGAAARTESRGAHAREDYPQRNDRDWLNRTLASWPDANALEPVLSYEPLDVMKMELPPGYRGYGIDNAIAHPDTAKREQQIAEILAVLGEDADRYQRQAALMPFELPPSLQAKNERLSDTLQKPSANALGEKS

SEQ ID NO: 79348 - protein, 238 aa, Unknown
  Bacterial polypetide isolated from the Sargasso Sea
MAQVQFSVYRYNPDVDNAPRMQDYTLQIDDGHDMMVLDALLLLKEQDPSLSFRRSCREGVCGSDGVNMNGKNGLACITPLSTLQNNGKGTIVVRPLPGLPVVRDLVIDMSQFYTQYEKVKPYLINDTPAAGERLQSIEERDKLDGLYECILCACCSTSCPSFWWNPDKFIGPAGLLHAYRFLADSRDTATEERLADLDDAFSVFRCHSIMNCVSVCPKGLNPTKAIGQIKSMLLNRSV

SEQ ID NO: 79349 - protein, 221 aa, Unknown
  Bacterial polypetide isolated from the Sargasso Sea
QINAQGDEKVVEGLFAVGEIACVSVHGANRLGGNSLLDLVVFGRAAGNFLGTYLRDVEVSKAASESDLEASLARFNRWENSTAGQGEDPVQIKKDLQQCMQLNFSVFREGDSMATGLQELKEIRERLQHARLDDKSSDFNTQRIECLELDNLMETAYSTAVAANFRTESRGAHSRFDFPDRDDTNWLCHSVYNPVTDEMSKRDVNYAPKTREAFPPKARTY

SEQ ID NO: 79350 - protein, 225 aa, Unknown
  Bacterial polypetide isolated from the Sargasso Sea
MAELVLPKNSKVKDGKKYPLESDSRNKKSFKIYRWDPEKNENPRYDLYEIDLDKCGPMVLDALIKIKDEIDSTLTFRRSCREGICGSCAMNIDGVNTLACTMAIEDTKKEVGINPLPHQPVVKDLVPDLTNFYNQHKKIQPWLKANGKSAETEYSQSKEDREKIDGLYECIMCACCSTSCPSYWWNSDKYLGPAALLQAYRWISDSRDEEKEERLDQLDDEFKVY

SEQ ID NO: 79351 - protein, 463 aa, Unknown
  Bacterial polypetide isolated from the Sargasso Sea
EPASRACAAADRTGHALLHTLYQQSLKNNVDFYNEYFAIDLLKDDNDTICGLLAISIEDGSLHRFIAKMTILATGGYGRIFQSSTSAHICTGDGAGIALRAGLPLSDMEFIQFHPTGIYGVGVLISEAARGEGGILKNNEGTRFMLEYAPNAKDLAARDVISRFISKEISAGRGCGPNKDYINLHLEHLDADMLAKRLPGISESVKAFCGRDISKEPIPVIPTVHYCMGGIPTNFKAEVLKPSDSNTEEVCEGLMAIGEAACASVHGANRLGTNALAELVVFGRGAAIQAGQVIDTKESLRTPSVSQTNSIIERLESIKSNKGDVSVGELRERMQKTVQKRFGVYRESETLKLGNDELASMSQDLKHIKVKDQSDVFNTDLVEALELHNLMQVAGSVGVSAEQRTESRGAHAREDFPDRDDENWLKHTLFWGDVTDYKVTHRPVRMTTLSNQISVIQPQVRVY

SEQ ID NO: 79352 - protein, 461 aa, Unknown
  Bacterial polypetide isolated from the Sargasso Sea
GHTVKEGESPAFRACYAADRTGHMILQTLYQKCVSMGVEFFDEFQVLDIKIEDGVCKGVVAFELSTGDIHIFESRAVTFATGGFGRIFKVSSNAHSLTGDGPGILYQKGIPLEDMEFYQFHPTGIYRLGILLSEAARGEGGILRNKDGERFMERYAPSIKDLAPRDMVSRAIATEISQGNGAGPDSDYVYLDLTHLGAETIKKKLPDITDFVRTYVKIEPINEPIPVQPTAHYAMGGIPTDVNGRVLSDEKNTVLPGVYAAGEAACVSVHGANRLGTNSLLDIVVFGKRAGESMLEYVSKTKSTSISDSAADDLVNKVNNLIEKEHTDEFSVGRIRNDLQESMEENAKIFRSEETLSKQTEILENLRERYENVTIFDKGKVFNTELMEAIELDYLLDMSESTVASALARKESRGAHSRQDFPDRDDSNFMKHSFAFKNGNSANLRYKDVELGKYEPMERKY

SEQ ID NO: 79353 - protein, 351 aa, Unknown
  Bacterial polypetide isolated from the Sargasso Sea
HPTGVYGAGVLITEGARGEGGYLTNSDGERFMERYAPNAKDLASRDVVSRAMTIEISENRGCGDNADHVLLHLEHIDADTLHKRLPGISETAKIFAGVDLTKDPIPVLPTVHYNMGGIPTNYRTEVLRPTNENPDNVCEGLMAVGEAACVSVHGANRLGTNSLIDLVVFGKAASLTCKEKVKPNSKKIEISKSKTDNIIERFDKIRNSKGNSTTGELRTSMQHIMQQKCAVFRTHDLISKGIEEYSKVESSMDDIDIKDKSLIFNTDLVEALELHNLMAQSKVTLHSALNRTESRGAHAREDYKERDDNNWLVHSLAWLNDKGDVNMGSRGVHMNTLTNHVQPIPPKRRVY

SEQ ID NO: 79354 - protein, 295 aa, Unknown
  Bacterial polypetide isolated from the Sargasso Sea
RGEGAILVDKNGESPVKNLKNRDLATRDQVSRAILKNMHDNKVDHVGLDLRYIDPEKIVERFPTILSRCQDYGVNPLNEVIPVAPAAHYWMGGVKTDLSASTTKKGLYAVGEVASTGVHGANRLASNSLMECLVFARKMSSIVLNDPPKLVKFDRSSKEFDTQDPKEDQIPKIAEKIDELRKLCWLNLGVSRNKLNMNKFLNFMQDDIDKLHKNALLYSLEKIKFDQKIKLSEPNRRVLNLLLDLKNRQITTITLLKACLFREESRGGHYRDDFPDKDKNWECHTRQQLGQKIHK

SEQ ID NO: 79355 - protein, 242 aa, Unknown
  Bacterial polypetide isolated from the Sargasso Sea
VERFPTILSRCQDYGVNPLNEVIPVAPAAHYWMGGVKTDLNASSTRKGLYAVGEVASTGVHGANRLASNSLMECLVFARKMSSIVLNDPSKFEKFDRSFQEFDIQDPKEDQISQISEKIDELRNLCWSNLGVSRNKVNMSKFLHNIQADISQLQKNALLSSLEKIKFHQKIKLSERNRRALNLLLDLKNRQITTITLLKACLFREESRGGHYRNDFPYKDKNWECHTRQQLDQKIQKRFIKN

SEQ ID NO: 79356 - protein, 271 aa, Unknown
  Bacterial polypetide isolated from the Sargasso Sea
GLEAAHSFNRIVKSKGDSSGIEIMRGLTDKVRSCNHITILENVSIDSIMMENNTIYGVIGHLNNQNLPENNVVIQSPNVILATGGLGGIFANTTNPRTSYGEGIALAAEAGATITDMEFVQFHPTGLDFGLDPTPLATEAIRGEGATLVNQHNERFMVDVHPQAELASRDIIAQSIFDQIEKGNSVFLDCRENIGNDFGKQFPQVQSYCDNADIDPSSELIPIIPVAHYHIGGVKTDLKGRSSVDGLWCCGEVAATGIHGANRLASNSILE

SEQ ID NO: 79357 - protein, 299 aa, Unknown
  Bacterial polypetide isolated from the Sargasso Sea
KLFLESINIIKDLENIGVEFDKNPDGTFNLGLEAAHSFNRIVKSKGDSSGIEIMRGLTEKVRSCNHITILENVSIDSIMMENNTIYGVIGHLNNQNLPENNVVIQSPNVILATGGLGGIFANTTNPRTSYGEGIALAAEAGAAITDMEFVQFHPTGLDFGLDPTPLATEAIRGEGATLVNQHNERFMLDVHPQAELASRDIIAQSIFDQIEKGNSVFLDCRENIGNDFGKQFPQVQSYCDNADIDPSSELIPIIPVAHYHIGGVKTDLKGRSSVDGLWCCGEVAATGIHGANRLASNSY

SEQ ID NO: 79358 - protein, 250 aa, Unknown
  Bacterial polypetide isolated from the Sargasso Sea
RYIDPEKIVERFPTILSRCQDYGVNPLNEVIPVAPAAHYWMGGVKTDLNASSTRKGLYAVGEVASTGVHGANRLASNSLMECLVFARKMSAIVLNDLPEFEKFDRSLQEFDIEDPKEDQISQIAEKIDELRKLCWLNLGVSRNKVNMSKFLNFIQDDMDKLNKNDLLNSLEKIKFDQKIKLSERNRRVLNLLLDLKNRQITTITLLKACLFREESRGGHYRDDFPDKDKNWECHTRQQLDQKIQKRFIKN

SEQ ID NO: 79359 - protein, 189 aa, Unknown
  Bacterial polypetide isolated from the Sargasso Sea
EVASTGVHGANRLASNSLMECLVFARKMSSIVLNDLSKFEQLDRSFQEFDIEDPKEDQISIIAEKIDELRKLCWLNLGVSRNKVNMSKFLNCIQNDIDKLNTNDLLNCLEKIKFDQKVKLSERNRRALNLLLDLKNRQITTITLLKACLFREESRGGHYRDDFPDKDKNWECHTRQQLDQKIQKRFIKN

SEQ ID NO: 79360 - protein, 354 aa, Unknown
  Bacterial polypetide isolated from the Sargasso Sea
RSDTLAAGAGLCEPMAVDCLVEKLPGCIRNLLSLGLNLDRQGKDLSTTLEAAHSRRRVLHARDQTGLALVELLEHCIENRPNVTWWRGAIALQLLQTSGRCSGVQVLHNGVLGWLSSAAVVLATGGSGHLFANTTNPRGAHGDGIAMAWQAGAILRDMEFVQFHPTALMQPGAPHFLLSEALRGEGARLVQADGQPLFSSGSELLPRDQLSRAMVRVMQQQQAAQLWLDLRPVGEAKLRRQFPTILGRCRELGLDPMQIPLPVAPAAHYWMGGIATDLNAATSLPGLYAVGEVASSGVHGANRLASNSLSECLVMASQLSQLQPETRGSESAQPSQRRPLEWAPPAALEGPCGE

SEQ ID NO: 79361 - protein, 309 aa, Unknown
  Bacterial polypetide isolated from the Sargasso Sea
PAQSSGEGIALAWKAGAAIEDLEFVQFHPTALKFYGAPCFLISEALRGEGAILVDKNGESPVKNLENRDLATRDQVSRAIMKNMYDNNVDHVGLDLRYIDPEKIVERFPTILSRCQDYGVNPLNEVIPVAPAAHYWMGGVKTDLNASSTRKGLYAVGEVASTGVHGANRLASNSLMECLVFARKMSSIVLNDISKVKKFNRSFQDFDIEDSKEDQISIIAEKIDELRKLCWLNLGVSRNKVNMSKFFNYIQNDIDKLNKNDLLNSLEKIKFDQKIKLSERNRRALNLLLDLKNRQITTITLLKACLLER

SEQ ID NO: 79362 - protein, 258 aa, Unknown
  Bacterial polypetide isolated from the Sargasso Sea
FIENEECKGVQVLDGANLYWIKSRAVVLATGGGGHLFTNTTNPAQSSGEGIALAWTAGAAIEDLEFVQFHPTALKFYGAPCFLISEALRGEGAILVDKNGESPVKNLKNRDLATRDQVSRAIMKNMYENNVDHVGLDLRYIDPEKIVVRFPTILSRCQDYGVNPLNEVIPVAPAAHYWMGGVRTDLSAASTRKGLYAVGEVASTGVHGANRLASNSLMECLVFARKMSSIVLNHYPKFEKLDRSIQELDIEDPKEDQI

SEQ ID NO: 79363 - protein, 288 aa, Unknown
  Bacterial polypetide isolated from the Sargasso Sea
CSSSGEGIALAWKAGAAIEDLEFVQFHPTALKFYGAPCFLISEALRGEGAILVDKNGESPVKNLKNRDLATRDQVSRAIMRNMHDNNVDHVGLDLRYIDPEKIVERFPTILSRCQEYGVNPLNEVIPVAPAAHYWMGGVKTDLNASSTRKGLYAVGEVASTGVHGANRLASNSLMECLVFARKMSSIVLNDPPKFVKFDRSFQEFDIQDPKEDQISRIAEKIDELRKLCWSNLGVSRNKFNMSKFLNYIQDDMDQLHKNALLNSLEKIKFDQKIKLSESNRRALNLLL

SEQ ID NO: 79364 - protein, 254 aa, Unknown
  Bacterial polypetide isolated from the Sargasso Sea
GEGARLVQADGEPLFCSGSELLPRDQLSRRMVREMHRQQLAQLWLDLRPIGEKRLQRQFPTILGRCRELGLDPLQVALPVAPAAHYWMGGVATDLEAATSLPGLYAVGEVASSGVHGANRLASNSLSECLVMARQLASASLPAAPVFQGTISTRALEWEPPEPLRQPCTRTIHDLRHLSWSTAGVERHSSLLHQGLQQWQRLQEQLNLDRVLGAVSRLQPGEQRELQPAQVQQLGWLWECRQRLITTHLLLEAA

SEQ ID NO: 79365 - protein, 290 aa, Unknown
  Bacterial polypetide isolated from the Sargasso Sea
GGGGHLFTNTTNPAQSSGEGIALAWKAGAAIEDLEFVQFHPTALKFYGAPCFLISEALRGEGAILVDKNGESPVKNLKNRDLATRDQVSRAIMKNMHDNNVDYVGLDLRYIDPEKIVERFPTIISRCQDFGVNPLNEVIPVAPAAHYWMGGVRTDLNASTTLKGLYAVGEVASTGVHGANRLASNSLMECLVFARKMSSIVLNDPSKSKKFDRSFKDFDIQDPKEDQISKISEKIDELRKLCWLNLGVSRNKANMSKFLHNIQDDISQLQKNSLLSSLEKIKFDQKIKLT

SEQ ID NO: 79366 - protein, 555 aa, Unknown
  Bacterial polypetide isolated from the Sargasso Sea
MLRPPFSQEPIPINNWDVIVIGAGAAGLMTCLELPSNLKVLLLNRNTSKVSSSRWAQGGIASVVRQDDSFDLHAEDTLKAGDGLCDFQAVEMLVKEAPGCVERLQNLGMIFDQSSDQLATTLEAAHSRRRVLHVKDRTGRALVEVLEDHIENQKNILHCRGVRVTELLIENKECRGVQVLDGANLYWIKSRAVVLATGGGGHLFTNTTNPAQSSGEGIALAWKAGAAIEDLEFVQFHPTALKFYGAPCFLISEALRGEGAILVDKNGESPVKNLENRDLATRDQVSRAIMKNMHDNNVDHVGLDLRYIDPEKIVERFPTILSRCQDYGVNPLNEVIPVAPAAHYWMGGVKTDLNASSTRKGLYAVGEVASTGVHGANRLASNSLMECLVFARKMSSIVLNDLSKFEKFDRSFQEFDIEDPKEDQISIIAEKIDELRKLCWLNLGVSRNKVNMSKFLNYIQNDIDKLNKNDLLNSLEKIKFDQKIKLSERNRRALNLLLDLKNRQITTITLLKACLFREESRGGHYRDDFPDKDKNWECHTRQQLDQKIQKRFIKN

SEQ ID NO: 79367 - protein, 479 aa, Unknown
  Bacterial polypetide isolated from the Sargasso Sea
MLRPPFSQEPIPINNWDVIVIGAGAAGLMTCLELPSNLKVLLLNRNTSKVSSSRWAQGGIASVVRQDDSFDLHAEDTLKAGDGLCDFQAVEMLVKEAPGCVKRLQNLGMIFDQSSDQLATTLEAAHSRRRVLHVKDRTGRALVEVLEDHIENQKNILHCRGVRVTELLIENKECRGVQVLDGANLYWIKSRAVVLATGGGGHLFTNTTNPAQSSGEGIALAWKAGAAIEDLEFVQFHPTALKFYGAPCFLISEALRGEGAILVDKNGESPVKNLENRDLATRDQVSRAIMKNMNDNNVDHVGLDLRYIDPEKIVERFPTILSRCQDYGVNPLNEVIPVAPAAHYWMGGVKTDLNASSTRKGLYAVGEVASTGVHGANRLASNSLMECLVFARKMSSIVLNDLSKVEKFDRSFQEFDIEDPKEDQISIIAEKIDELRKLCWLNLGVSRNKLNMSKFLNYIQNDIDKLNKNDLLNILEKIK

SEQ ID NO: 79368 - protein, 485 aa, Unknown
  Bacterial polypetide isolated from the Sargasso Sea
RSSADDTLKAGDGLCDFQAVEMLVREAPGCVDRLQNLGMIFDQSYDQLATTLEAAHSRRRVLHVKDRTGRALVEVLEDHVENKKNILHCRGVRVTELLIENEVCKGVQVLDGANLYWIQSRAVVLATGGGGHLFTNTTNPAQSSGEGIALAWNAGAAIEDLEFVQFHPTALKFYGAPCFLISEALRGEGAILVDKNGESPVKNLKNRDLATRDQVSRAIMKNMNDNNVDHVGLDLRYIDPEKIVERFPTILSRCQDYGVNPLNEVIPVAPAAHYWMGGVKTDLNASTTRKGLYAVGEVASTGVHGANRLASNSLMECLVFARKMSSIVLNDPPKLVKFQRSSQEFDTQDPKEDQISKIAEKIDELRKLCWLNLGVSRKKENMSKFLNFIQDDIDKLHKNALLNSLEKIKFDQKIKLSERNRRVLNLLLDLKNRQITTITLLKACLFREESRGGHYRDDFPDKDKSWECHTRQQLGQKTYRRFIKN

SEQ ID NO: 79369 - protein, 320 aa, Unknown
  Bacterial polypetide isolated from the Sargasso Sea
MYNIGIIDTMNSKGIELLKSHKNFNVEVITDLSKENLLKVLPKYDGVTLRRGKLDSEILKNCKKLKVIARHGVGYDNVDTNYLKENNITLLVTHNSTSTSPAEHIMFMILNIYKGREMFDKMVRDGNFHKAIHLQIDDNFELFNKKILIVGFGRIGKKLIKKCLGFDMKVLVYDPYVDEKSIKLLGGEKIIDLESALKEIDILSMSVPLTESTRDMISYKQISLMKKNAIIVNISRGGIINENDLNDALNKNVISFAGLDVFEKEPPEMSNPLLKNKRVLLSPHAATFTKECLEDMSLETAQNIIDFFDKKLEKFKIVKL

SEQ ID NO: 79370 - protein, 339 aa, Unknown
  Bacterial polypetide isolated from the Sargasso Sea
MVKKTKSLNLNFGPQHPAAHGVLRLILELDGEVVEKADPHIGLLHRGTEKLIEQKTYTQALPYFDRLDYVAPMNQEHAFALAAEKLLKIEVPIRAKYIRVIFCEIGRILSHILNVTTQALDVGALTPSLWGFEERETLMTFYERASGSRLHANYFRTGGVHQDIPLKLVDDIEKFCKSFPKIIDDLEGLLTENRIFKQRNVEIGLVTKQDALDYSFSGVMLRGSGVPWDLRRSQPYEIYKDLDFKIPVGKNGDCYDRYLCRIEEMRESVKIILQCIERLPKGPVKSIDGKISPPNRDDLKQSMEALIHHFKLFTEGYRVPKGDVYTAVEAPKGEFGVYL

SEQ ID NO: 79371 - protein, 104 aa, Unknown
  Bacterial polypetide isolated from the Sargasso Sea
HIIHIISVSQLGYMMLALGVGAYGPAIFHLVTHAFFKSLLFLGAGSVNHATDTYDMNDMGGLRKKMPKTHITFAVGAFSLIGIFPLSGFWSKDEILGYALDAGT

SEQ ID NO: 79372 - protein, 172 aa, Unknown
  Bacterial polypetide isolated from the Sargasso Sea
MNFPILSSLILLPFIGALFLFFTRSSNDNKITVKYVALFTSLVTFFLSLYLWILFDQTISEFQFVEDRVWIKDLINYKVGVDGISILFIILTTFITPLCIISVNNSIKSRLNEFLIAILIMETFMIGVFCSLDLVVFYLFFEAGLIPMFLIIGIWGGSRRVYSAFKFFLFTL

SEQ ID NO: 79373 - protein, 334 aa, Unknown
  Bacterial polypetide isolated from the Sargasso Sea
NFGPQHPAAHGVLRLILELDGEVVEKADPHIGLLHRGTEKLIENKTYMQAVPYFDRLDYVAPMNQEHAFALAIEKILKIEVPIRAQFIRVMFCEIGRILSHILNVTTQALDVGALTPSLWGFEERETLMTFYERASGSRLHANYFRAGGVHQDLPAGLEDDIAKFCDNFPKIIDDLENLLTDNRIFKQRNVDIGIVTKDDALDYSFSGVMIRGSGVPWDIRKSQPYDCYEQLEFKVPVGKNGDCYDRYLCRIEEMRESVSIIKQCLSKMEKGPVKSFDGKITPPSKKEIKQSMEALIHHFKLFTEGYRVPKDEIYTAVEAPKGEFGVYLISDGS

SEQ ID NO: 79374 - protein, 92 aa, Unknown
  Bacterial polypetide isolated from the Sargasso Sea
VMIVAGTLVNKMAPALRKVYDQMAEPKWVISMGSCANGGGYYHHSYSVVRGCDQIIPVDIYVPGCPPTSEALINGIIELQEKIKNEESIANG

SEQ ID NO: 79375 - protein, 71 aa, Unknown
  Bacterial polypetide isolated from the Sargasso Sea
ILPFNAIPGPFWLIFKILFLFILFALVKATVPRYRYDQLMKLGWKIFLPFSLFYVVLTSSFLLYFDLLPGK

SEQ ID NO: 79376 - protein, 161 aa, Unknown
  Bacterial polypetide isolated from the Sargasso Sea
MKISRLLKTIFMIDFVTGLLIAIKETFKAKKTINYPFEKGSLGTRSRGEHALRRYPNGEERCIACKLCEAVCPAQAITIESKERDDGSRKTVRYDIDMLKCIYCGLCEESCPVDAIVQGPNFEFATESREELYYTKEKLLENGDRWENILAANIKADSSHR

SEQ ID NO: 79377 - protein, 317 aa, Unknown
  Bacterial polypetide isolated from the Sargasso Sea
LKTFKIYNIEYPVLILSSILGMMVMISSNDLIVFYMGLELQSLALYVLATYNRDQLKSSEAGLKYFVLSALSSGLLLYGCSLIYGFSGSTNFDIISNQLNSNEYVLTFGIVFILVGLAFKISAVPFHMWAPDVYEGSPTTVTLFFTMVPKIAALTVFIRFLYVPFLNLIDQWQMIIIFLSIASMVFGAVAAIGQTNIKRLIAYSSIGHIGYTLAGLATASNEGIQSSIIYISIYVVMNLALFSCLLMLRRKDQYYEDIEDLSGLSKNHPLLSLCLLVILFSLAGIPPLAGFFAKFYVFKAVLEQSMFFLAIVGFYLP

SEQ ID NO: 79378 - protein, 161 aa, Unknown
  Bacterial polypetide isolated from the Sargasso Sea
MSLIRFFKTIFMIDFLTGLIMAIKEIFKPKKTINYPFEKGSISPRARGEHALRRYPNGEERCIACKLCEAVCPAQAITIESSEREDGSRKTTRYDIDMLKCIYCGLCEQSCPVDAIVQGPNFEFATETREELYYNKEKLLENGDRWENILAANINADSSHR

SEQ ID NO: 79379 - protein, 94 aa, Unknown
  Bacterial polypetide isolated from the Sargasso Sea
ANILLMCAMGSILFLGGWLSPIDLFPFNVIPAPIWLILKILFLFILFALIKAIVPRYRYDQLMKLGWKIFLPFSLIYVVLTASFLMYFDLLPGN

SEQ ID NO: 79380 - protein, 217 aa, Unknown
  Bacterial polypetide isolated from the Sargasso Sea
MNFPILSSLILLPIVGALFLFFTKDKEGNNLTARYVALFTTVVNFLISIYMWISFDQSTSSFQFIEDRTWIEGFINYKVGVDGISILFIILTTFITPLCIISVNNSVKNRLRDFLIAILIMESFMIGVFCALDLVVFYLFFEAGLIPMFLIIGIWGGPKRVYSAFKFFLYTLLGSVLMLVAIISIYWIVGTTDVIQLYELGIECKYQNLLWLAFFSS

SEQ ID NO: 79381 - protein, 68 aa, Unknown
  Bacterial polypetide isolated from the Sargasso Sea
MTESNLTLNFGPQHPAAHGVLRLIMEMDGEVITNLDPHIGLLHRGTEKLAEIKPFNHSIGYMDRMDYV

SEQ ID NO: 79382 - protein, 313 aa, Unknown
  Bacterial polypetide isolated from the Sargasso Sea
MKELELNTTTINFGPQHPAAHGVLRLVVELEGEVVQRAEPHIGLLHRGTEKLIEYKTYLQAIPYFDRLDYVSPMCQEHAFALATEKLLGIEIPERAKFIRVIFAEVTRILNHLLNIPAYAADIGAVTPFLWCFEEREKLLEFHEAVSGARFHAAYFRPGGVHQDMPEGMEEKLFNHLKTLPKFIDDLESLLTNNRILRQRSVDIGIISKSEAIEWGCSGPVLRSAGVAWDLRRSQPYDAYDQVNFDVPVGKKGDCFDRYLVRIEEMRQSISIINQCLNKIKAGPISIEDNKITPPKRNQMKKSMEALIHHFKL

SEQ ID NO: 79383 - protein, 120 aa, Unknown
  Bacterial polypetide isolated from the Sargasso Sea
MKKKIKNLNLNFGPQHPAAHGVLRLILELDGEVVEKADPHIGLLHRGTEKLIENKTYMQAVPYFDRLDYVAPMNQEHAFALAIEKILEIDVPIRAQYIRVIFCEIGRILSHILNVTTPST

SEQ ID NO: 79384 - protein, 66 aa, Unknown
  Bacterial polypetide isolated from the Sargasso Sea
MRILDSDERLKKVPDEFKQIAKDFAEKGFITTSTNNLINWARTGSLHWMTFGLACCAVEMMHTSMP

SEQ ID NO: 79385 - protein, 81 aa, Unknown
  Bacterial polypetide isolated from the Sargasso Sea
MNYAEKQKQVPDEFKQLAKDFSEKGFITTSFDNLVNWARTGSLHWMTFGLACCAVEMMQTSMPRYNLERFGAAPRASPRQS

SEQ ID NO: 79386 - protein, 285 aa, Unknown
  Bacterial polypetide isolated from the Sargasso Sea
MKNFSIAKSRRLRGTPYTSRIEKQGVTAYTIYNHMLLPAAFGSLEDSYHHLKEHVQVWDVAAERQVEITGKDAAKLVQLMTCRDLSKSKDGRCYYCPIIDDNAGLINDPVVLRFNQNKWWVSIADTDVILFAKGLAIGNKFDVNIIEPEVDIMAVQGPKSFKLMEKVFGEKITKLKFFGFDYFDFAGAKHLIAQSGWSKQGGYEIYVENNASGLKLYDHLFKIGDEFNIRAGCPNLIERIESGLLSQGNDMDNGDNPYECGFDKYINIDSDVEFLGKEKIKKNKV

SEQ ID NO: 79387 - protein, 293 aa, Unknown
  Bacterial polypetide isolated from the Sargasso Sea
KLVQLMTCRDLSKSKDGRCYYCPIIDDNAGLINDPVVLRFNENKWWVSIADTDVILFAKGLAIGNKFDVNIIEPEVDIMAVQGPKSFKLMEKVFGEKITNLKFFGFDYFDFAGAKHLIAQSGWSKQGGYEIYVENNEAGLKLYDHLFEIGDEFNIRAGCPNLIERIESGLLSQGNDMDNGDNPYECGFDKYINIDSDVEFLGKEKLKKIKSEGIKRKLMGVKIDTDKISVTGSMNLTDEKNNIIGELRSGCYNPTFKQVIGIAMIKKPYFEAKQTFKIDINGNSFNGTSLRFT

SEQ ID NO: 79388 - protein, 161 aa, Unknown
  Bacterial polypetide isolated from the Sargasso Sea
MKISRLLKTVFMIDFVTGLLIAVKETFKEKKTINYPFEKGSLGTRSRGEHALRRYPNGEERCIACKLCEAVCPAQAITIESKEREDGSRKTVRYDIDMLKCIYCGLCEESCPVDAIVQGPNFEFATESREELYYTKEKLLENGDRWENILAANIKADSSHR

SEQ ID NO: 79389 - protein, 384 aa, Unknown
  Bacterial polypetide isolated from the Sargasso Sea
KNNLLKTKTNFLFIKNVKSFFALFFLVFFFSFSSHSQDVDIAKGKSLFNANCAACHKLNKNLVGPKLAGVTEKYEKEWLYTWIKNSSAMIKSGDERAVAVWEEWNKLAMNAFPQLSNEDIDNILAYTDYKPEPVVSTAVADSGVAQSQSSGSISQDLILVVLIVVLMVLITMLYLVNKTLREIAFRNGVVTEKKDKKPSKPIWILFIRNQFLVFCSVIFFLLSSAYFAYGWLMQVGIDQGYMPIQPIHYSHKIHSGDNQIDCQYCHSSARVSKHSGIPSLNVCMNCHENIAEYDGEEDLEKGYTKDFYTNEIKKLYKAVGWDENKRIYTGDVEPVKWVRIHNLPDFVYFNHSQHVNVAGVECQTCHGPVEEMEIAYQHSSLTMG

SEQ ID NO: 79390 - protein, 219 aa, Unknown
  Bacterial polypetide isolated from the Sargasso Sea
MPKQNKTLNLNFGPQHPAAHGVLRLILELDGEVVEKADPHIGLLHRGTEKLIENKTYMQAVPYFDRLDYVAPMNQEHAFALAIEKILKIEVPARAQFIRVMFCEIGRILSHILNITTHALDVGALTPSLWGFEERETLMTFYERVSGSRLHANYFRAGGVHQDLPRGLDNDIAKFCETFPKIINDLETLLTDNRIFKQRNVDIGIVSKEDALDYSFSGV

SEQ ID NO: 79391 - protein, 57 aa, Unknown
  Bacterial polypetide isolated from the Sargasso Sea
MTKKIKNLNLNFGPQHPAAHGVLRLILELDGEVVERADPHIGLLHRGTEKLIENKTY

SEQ ID NO: 79392 - protein, 284 aa, Unknown
  Bacterial polypetide isolated from the Sargasso Sea
MFEYLNIIFSEIYKIMYLLIPILVSVAMIVWLDRRVWALVQKRRGPNVVGPFGLLQSLADALKYIFKEVIIPASANKTIFVLAPIITMTLALISWAVIPFSEDFVLSNINVGILYLFAISSLGVYGIIMGGWASNSKYPFLGAIRSAAQMVSYEVSIGIIIINVLLCVGSLNLSEIVLAQKKIWFVIPLFPMFVIFFISALAETNRPPFDLPEAEAELVAGYQTEYSGMMYAMFWLGEYANILLMCAMGSILFLGGWLPPSEMYLFEIIPSPLWMIIKILFLFI

SEQ ID NO: 79393 - protein, 98 aa, Unknown
  Bacterial polypetide isolated from the Sargasso Sea
MNISRFFKTILMTDFIGGLFIAIKELFKSKKTINYPFEKGKISPRFRGEHALRRYPNGEERCIACKLCEAVCPAQAITIESAEREDGSRKTTRYDIDM

SEQ ID NO: 79394 - protein, 277 aa, Unknown
  Bacterial polypetide isolated from the Sargasso Sea
QYGLTLGIVFILVGLAFKISAVPFHMWAPDVYQGSPTSVTIFFAILLKIAALSVFIRFLYVPFINLIDQWQTIIIFVSIASMVFGAVAAIGQRNLKRLMAYSSISHMGFALAGLAVGTNEGIQSSIIYISIYLLMNLAFFSCLFMLKRNDIYYEDLSDLSGLSKNHPILALCLLISLFSLAGIPPLAGFFAKFYIFLAVIKEEMYFLAIVGLLSTVVAAFYYLRVIKTIYFDSQTEKFDINHDIGLKISLLVSTVIILIYFIYPSPLQALISKIVIL

SEQ ID NO: 79395 - protein, 150 aa, Unknown
  Bacterial polypetide isolated from the Sargasso Sea
MKDDLSSNPVNKPGSVRNFNINFGPQHPAAHGVLRMVLELDGEVVERCDPHIGLLHRGTEKLIESRTYLQNLPYFDRLDYVAPMNQEHAWCLAIEKLVGVTIPQRASLLRVLFCEIGRILSHLLNITTQAMDVGALTPPLWGFEEREKLM

SEQ ID NO: 79396 - protein, 227 aa, Unknown
  Bacterial polypetide isolated from the Sargasso Sea
MKEIEVNTTTINFGPQHPAAHGVLRLVVELDGEVVERAEPHIGLLHRGTEKLIEYKTYLQAVPYFDRLDYVSPMCQEHAFAIATETLLKIEVPQRAQYIRVIFAEITRLLNHLLNIPAYAADIGAVTPFLWCFEEREKLLQFHEAVSGARFHAAYFRPGGVHQDMPEGMEEKLNDHFKTLPRFIDDLEDLLTNNRILRQRSVDIGVISKQEAIEWGCTGPVLRSAGV

SEQ ID NO: 79397 - protein, 159 aa, Unknown
  Bacterial polypetide isolated from the Sargasso Sea
MIKYIKSFTLFELLQGMFLTLKYMFKAKVTINYPHEKGPLSPRFRGEHALRRYPSGEERCIACKLCEAVCPAQAITIEAEPREDGSRRTTRYDIDMSKCIYCGLCQDSCPVDAIVEGPNFEFATETREELMYTKEKLLENGDRWEQEIAQNIYLDRKYR

SEQ ID NO: 79398 - protein, 67 aa, Unknown
  Bacterial polypetide isolated from the Sargasso Sea
IMTKKIKNLNLNFGPQHPAAHGVLRLILELDGEVVEKADPHIGLLHRGTEKLIENKTYMQAVSLILN

SEQ ID NO: 79399 - protein, 108 aa, Unknown
  Bacterial polypetide isolated from the Sargasso Sea
MTKKIKNLNLNFGPQHPAAHGVLRLILELDGEVVEKADPHIGLLHRGTEKLIENKTYMQAVPYFDRLDYVAPMNQEHAFALAIEKILKIEVPIRAQFIRVMFCEIGRI

SEQ ID NO: 79400 - protein, 251 aa, Unknown
  Bacterial polypetide isolated from the Sargasso Sea
MDSYFSILFTEVYKILFLLVPVLVSVAMIVWLDRRVWAFVQKRRGPNVVGPFGLFQSLADALKYIFKEIIIPASSNKLVFVLAPVVTMTLALISWAVIPFDEDFVLADINVGILYLFAVSSLGVYGIIMGGWASNSKYPFLGAIRSAAQMVSYEVSIGVIIINVLLCVGSLNLSDIVMAQQNLWFVIPLFPMFVIFFISALAETNRPPFDLPEAEAELVAGYQTEYSGMMYAMFWLGEYANILLMCAMGAV

SEQ ID NO: 79401 - protein, 245 aa, Unknown
  Bacterial polypetide isolated from the Sargasso Sea
MTNIALVLPEIFLSLSIMFLLILGVFKKNSSKLIQNISLIILLLTSVIILNETLGIQETLLFNSSIIIDYLSSFMKIITLLAAFLVLVISSNYLKILKIFKIEYPILILSSVLGMMIMISSNDLIVFYMGLELQSLALYVLATFNRDQLKSSEAGLKYFVLSALSSGLLLYGCSLIYGFTGSTNFNIIANQLNSNEYAITFGIVFILVGLAFKISAVPFHMWAPDVYEGSPTSVTLFFIMVPKIA

SEQ ID NO: 79402 - protein, 247 aa, Unknown
  Bacterial polypetide isolated from the Sargasso Sea
LADSDVGLYAKGLASGLKLQAEVSEPDVNILAVQGPKSFKLMEKVLGKKITELKFFGFDYFTFKGNEFFIARSGWSKQGGYEIYVENRMAGLNLYDELFSAGKEFNVKPGCPNLIERIESGLLSCGNDFDNGDNPYECGFDKYIDIKSDINYLGKKALIKISRDGIKRKLMGVKIELDKLEMMNEVPLQNGESLVGHLRSAVYSPYFKKVVGIAMIYKEYWDKKTFFEIDIEGEKSKGSICDLPLLS

SEQ ID NO: 79403 - protein, 245 aa, Unknown
  Bacterial polypetide isolated from the Sargasso Sea
FSFLSGFYSKDAIIEFAYLSGNGVGMLAAFVGIVTALLTSIYSWRLIFKTFHGNFNNKKLSIDKVHESPFVMIAPLIILAIGAIFAGMAFKGLFIGHEIAYEFWGKSIKFLEPLSTDHPPMWFLFSTPILVTSAIPFSYYLYLKNTNIVNGLKEMNEPIYQFLVKKWYFDEMYDYLFVNPSKKIGQFLWKKVDGSIIDKFGPDGISSVIKNLSIKAVKFQSGFIYQYAFVMLIGFSVLLTILILN

SEQ ID NO: 79404 - protein, 309 aa, Unknown
  Bacterial polypetide isolated from the Sargasso Sea
YLKIFRIFKIEYPILILSSVLGMMVMISSNDLIVFYMGLELQSLALYVLASFNRDQLKSSEAGLKYFVLSALSSGLLLYGCSLIYGFTGSTNFNIIANQLSSDEYTLTFGIVFILVGLAFKISAVPFHMWAPDVYEGSPTSVTLFFTMVPKIAALTVFIRFLYVPFLNLIDQWQMILIFLSIASMLFGAIAAIGQTNLKRLIAYSSIGHVGYTLAGLATGTNDGIQNSVIYITIYILMNLGLFSCLLMFKRDNKYYENIEDLSGLSKNHPLLSFSLLVILFSLAGIPPLAGFFAKFYIFKSVIEQSMYF

SEQ ID NO: 79405 - protein, 53 aa, Unknown
  Bacterial polypetide isolated from the Sargasso Sea
MQNKIDQVPEEFKQLADDFSKNGFITTSLDNLINWSRAGSLHWMTFGLACCAV

SEQ ID NO: 79406 - protein, 262 aa, Unknown
  Bacterial polypetide isolated from the Sargasso Sea
MLENLNILLTEIYKIVLLLIPILTAVAMIVWLDRRVWAFVQKRRGPNVVGPFGLFQSLADALKYIFKEIIIPASANKVIFILAPIVTMTLALIAWAVIPFSEEIVLADINVGILYIFAVSSLGVYGIIMGGWASNSKYPFLGAIRSAAQMVSYEVSIGVIIINVLLCVGSLNLTDIVLAQENLWFIVPLFPMFVIFFISALAETNRPPFDLPEAEAELVAGYQTEYSGMMYAMFWLGEYANILLMCSLGSILFLGGWLSPID

SEQ ID NO: 79407 - protein, 282 aa, Unknown
  Bacterial polypetide isolated from the Sargasso Sea
VFILVGFGYKISAVPFHFWTPDVYEGSPTTITAYLSVAPKAAGLALLIRFFNQVFGDGSAISSEFWLAVNDIPWPQLMAVLSAATMTVGNLVAIQQNSVKRMLAYSSIAHAGYMMMALPLMSQSGIYGIMMYVFVYLFMNLGAFFVLIYVQSEFGGETFDDFNNLGWKMPFIGAVMTLFMVALTGLPPTAGFIGKFYIFAAVIEAGSEYYWLAFVGVINSVVSLYYYIRVVKHMYLVGDRSESIGMPSSKLVTLLLVVLAIPTFIFGWYFGPVTDWISQSFV

SEQ ID NO: 79408 - protein, 71 aa, Unknown
  Bacterial polypetide isolated from the Sargasso Sea
DQMPEPRYVISMGSCANGGGYYHYSYSVVRGCDKIVPVDIYVPGCPPSAEALLYGILQLQKKIRRDGDINR

SEQ ID NO: 79409 - protein, 90 aa, Unknown
  Bacterial polypetide isolated from the Sargasso Sea
MTESNLTLNFGPQHPAAHGVLRLIMELDGEVVTNLDPHIGLLHRGTEKLAEIKPFNHSIGYMDRMDYVSMMCCEHPYVLAIESLLEIEPP

SEQ ID NO: 79410 - protein, 290 aa, Unknown
  Bacterial polypetide isolated from the Sargasso Sea
MLENLNILLTEIYKIVLLLIPILTAVAMIVWLDRRVWAFVQKRRGPNVVGPFGLFQSLADALKYIFKEIIIPASANKIIFILAPIVTMTLALIAWAVIPFSEEIVLADINVGILYLFAVSSLGVYGIIMGGWASNSKYPFLGAIRSAAQMVSYEVSIGVIIINVLLCVGSLNLTDIVLAQENLWFIVPLFPMFVVFFISALAETNRPPFDLPEAEAELVAGYQTEYSGMMYAMFWLGEYANILLMCSLGSILFLGGWLSPIDIYPFTVIPAPLWLIFKILLLFILFSLVK

SEQ ID NO: 79411 - protein, 114 aa, Unknown
  Bacterial polypetide isolated from the Sargasso Sea
MTKKIKNLNLNFGPQHPAAHGVLRLILELDGEVVEKADPHIGLLHRGTEKLIENKTYMQAVPYFDRLDYVAPMNQEHAFALAIEKILKIDVPIRAQFIRVMFCEIGRILSHILN

SEQ ID NO: 79412 - protein, 161 aa, Unknown
  Bacterial polypetide isolated from the Sargasso Sea
MKITRFFKTIFMVDFVTGLFIGLKEIFKSKKTINYPFEKGKISPRYRGEHALRRYPNGEERCIACKLCEAVCPAQAITIESAERSDGSRKTTRYDIDMMKCIYCGLCEESCPVDAIVQGPNFEFSTETREELYYTKDKLLDNGDRWENILAANIKSDNPYR

SEQ ID NO: 79413 - protein, 58 aa, Unknown
  Bacterial polypetide isolated from the Sargasso Sea
MSSEFLKDYLPIMLFLFIALGLSFGFIILNYIFSPKKPDPEKLSAYECGFEPFNDSRM

SEQ ID NO: 79414 - protein, 270 aa, Unknown
  Bacterial polypetide isolated from the Sargasso Sea
MTKKIKNLNLNFGPQHPAAHGVLRLILELDGEVVEKADPHIGLLHRGTEKLIENKTYMQAVPYFDRLDYVAPMNQEHAFALAVEKILKIDVPIRAQYIRVIFCEIGRILSHILNVTTQALDVGALTPSLWGFEERETLMTFYERASGSRLHANYFRAGGVHQDLPAGLEDDIAKFCKTFPKIIDDLENLLTDNRIFKQRNVDIGVVTKEDALDYSFTGVMIRGSGVPWDLRKSQPYDCYDQLDFKIPIGKNGDCYDRYLCRIEENEESVL

SEQ ID NO: 79415 - protein, 83 aa, Unknown
  Bacterial polypetide isolated from the Sargasso Sea
MKISRFFKTIFMVDFASGLSMAIKEVFKSKKTINYPFEKGKISPRFRGEHALRRYPNGEERCIACKLCEAVCPAQAITIESTQ

SEQ ID NO: 79416 - protein, 153 aa, Unknown
  Bacterial polypetide isolated from the Sargasso Sea
MDSFFWTYLWPALIMIGQSLLLLVLLLVGIAFILLADRKIWAAVQMRRGPNVVGPFGLMQSFADLLKFVFKEPVIPASSDKVVFLLAPLISVTLALATWAVMPVAEGWVIANINIGILYIFAISSLEVYGVIMGGWTSNSKYAFLGSLRSAAQ

SEQ ID NO: 79417 - protein, 308 aa, Unknown
  Bacterial polypetide isolated from the Sargasso Sea
IKRLMENFQYILPEIFISVSIMLFLLFGVFKKNSANLIYNLSNISLVILLALIINLSSLDTIYLFNNSYLIDNLSNYMKIMLVGSGIFVMLTGSKYIQVINLNKIEYPILILSSILGMMIMISSNDLIVFYMGLELQSLALYVLASFNRDNLLSTESGLKYFVLSALSSGLLLYGCSLTYGFSESTNFDQILINSTEFNYGTTFGIVFILVGLAFKISAVPFHMWAPDVYQGSPTSVTLFFAILPKIAALSVFIKFLYTPFANMNDQWQTIIVFISIASMIFGAVAAIGQKNLKRLIAYSSISHMGYA

SEQ ID NO: 79418 - protein, 161 aa, Unknown
  Bacterial polypetide isolated from the Sargasso Sea
MKLNRIFKIIFLSEFVKAIIIAIKEILQKKKTINYPYEKGKISPRFRGEHALRRYPNGEERCIACKLCEAVCPAQAITIENEERADGSRKTTRYDIDMLKCIYCGLCEESCPVDAIVQGPNFEFATETREELYYNKEKLLENGDRWESVLAENIKLDKPYR

SEQ ID NO: 79419 - protein, 161 aa, Unknown
  Bacterial polypetide isolated from the Sargasso Sea
MNIIRIFKTVFLVDFLTGLLIAIKESFKPKKTLNYPFEKGKISPRYRGEHALRRYPNGEERCIACKLCEAVCPAQAITIESTAREDGSRKTTRYDIDMLKCIYCGLCEESCPVDAIVQGPNFEFATHTREELYYNKEKLLENGDRWENVLAANIKADNPYR

SEQ ID NO: 79420 - protein, 237 aa, Unknown
  Bacterial polypetide isolated from the Sargasso Sea
MAKEKKTLNLNFGPQHPAAHGVLRLILELDGEIVEHADPHIGLLHRGTEKLIENKTYLQALPYFDRLDYVAPMNQEHAFALAIEKILNIEVPIRAQFIRVMFCEIGRILSHILNITTQALDVGALTPSLWGFEERETLMTFYERVSGSRLHANYFRTGGVHQDLPRGLSDDIAKFCQNFPKVINDLETLLTDNRIFKQRNVDIGVVSKQDALDYSFSGVMLRGSGIPWDLRKSQPYE

SEQ ID NO: 79421 - protein, 235 aa, Unknown
  Bacterial polypetide isolated from the Sargasso Sea
MFEYLNLLFVEIYKIIFLLIPILVSVALIVWLDRRVWAFVQKRKGPNVVGPFGLLQSIADALKYIFKEIIVPASSNKIIFILAPVVTMTLALISWAVIPFGENFVLANINVGILYLFAVSSLGVYGIIMGGWASNSKYPFLGSIRSAAQMISYEVSIGVIIINVLLCVGSLNLTDIVLAQKKIWFVVPLFPMFVIFFISALAETNRPPFDLPEAEAELVAGYQTEYSGMMYAMFG

SEQ ID NO: 79422 - protein, 246 aa, Unknown
  Bacterial polypetide isolated from the Sargasso Sea
GFPFLSGFYSKDAIIEFAFLRGNNLGFYASGIGVFTALLTSIYSWRLIIKAFFGKYNNSNVKHESLNESPMIMLIPLIILAIGAIFAGILFKDLFIGHETSYEFWSNSIKFLEPLSKGHPPSWFLFLTPILVTISIPLSYYLFLKNTKIVDSIVNSNKSLYLFLKNKWYFDEIYEYIFVKPAKKIGYFFWKKIDVSFIDKFGPDGLSQLIKYFSLKAVKFQSGYIYQYAFVMLIGFSILLTLLLVN

SEQ ID NO: 79423 - protein, 140 aa, Unknown
  Bacterial polypetide isolated from the Sargasso Sea
MNISRFFKTILMTDFIGGLFIAIKELFKPKKTINYPFEKGKISPRFRGEHALRRYPNGEERCIACKLCEAVCPAQAITIESAEREDGSRKTTRYDIDMMKCIYCGLCEEACPVDAIVQGPNFEFFTETRERTLLHKRKII

SEQ ID NO: 79424 - protein, 161 aa, Unknown
  Bacterial polypetide isolated from the Sargasso Sea
MKILRFIKTVLLVDFVSGLFIAIKETFKAKKTLNYPFEKGKISPRFRGEHALRRYPNGEERCIACKLCEAVCPAQAITIESAEREDGSRKTTRYDIDMLKCIYCGLCEESCPVDAIVQGPNFEFSTETREELYYNKQKLLDNGDRWESLLAANIKADNPYR

SEQ ID NO: 79425 - protein, 48 aa, Unknown
  Bacterial polypetide isolated from the Sargasso Sea
FSLVKAIVPRYRYDQLMKLGWKIFLPFSLIWVVLTSSYLFYFNLLPTN

SEQ ID NO: 79426 - protein, 261 aa, Unknown
  Bacterial polypetide isolated from the Sargasso Sea
MPFTWLAMIVGTLALTGFPLLSGFYSKDAIIEYAYLSQSNIGYIATAVGIITALLTAIYSWRLIFKTFHGKFNNKNISKSKIKESGLSITIPLGILILGSIFTGFLFKDLLIGKTNQEFWASSILILKNFDHSLIPLWILYITPVLVVSAIPLSYYLFLSKPKYLDEIILKNKKIYKFLLNKWYFDELYDAIFVKPIQKLGSFFWKSGDQKTIDRYGPDGISHLIKIISYRVSKFQTGYLFDYAFVMLIGFSLLLTFLIIK

SEQ ID NO: 79427 - protein, 57 aa, Unknown
  Bacterial polypetide isolated from the Sargasso Sea
MTKKIKNLNLNFGPQHPAAHGVLRLILELDGEVVEKADPHIGLLHRGTEKLIENKTY

SEQ ID NO: 79428 - protein, 57 aa, Unknown
  Bacterial polypetide isolated from the Sargasso Sea
MNLNFGPQHPAAHGVLRLILELDGELVEKVDPHIGLLHRGTEKLIEHKTYAQALPYF

SEQ ID NO: 79429 - protein, 305 aa, Unknown
  Bacterial polypetide isolated from the Sargasso Sea
RHLFKTFKIYNIEYPVLILSSILGMMVMISSNDLIVFYMGLELQSLALYVLATYNRDQLKSSEAGLKYFVLSALSSGLLLYGCSLVYGFSGSTNFDIISNQLNSEEYVLTFGIVFILVGLAFKISAVPFHMWAPDVYEGSPTTVTLFFTIVPKVAALTVFIRFLYVPFLNLIDQWQMIIVFLSIASMVFGAVAAIGQTNIKRLIAYSSIGHIGYTLAGLATASNEGIQSSIIYISIYVVMNLALFSCLLMLRRKDQYYEDIDDLSGLSKNHPLLSLCLLLILFSLAGIPPLAGFFAKFYVFKAVL

SEQ ID NO: 79430 - protein, 24 aa, Unknown
  Bacterial polypetide isolated from the Sargasso Sea
MMIFLGILTVGFIYEWKKGALEWE

SEQ ID NO: 79431 - protein, 161 aa, Unknown
  Bacterial polypetide isolated from the Sargasso Sea
MKIKRILKTVFLVEFIVGLAIAIKETFKKKKTINYPFEKGTISPRARGEHALRRYPNGEERCIACKLCEAVCPAQAITIESTEREDGSRKTTRYDIDMLKCIYCGLCEESCPVDAIVQGPNFEFATETREELFYNKEKLLENGDRWENILSANIKADNAHR

SEQ ID NO: 79432 - protein, 56 aa, Unknown
  Bacterial polypetide isolated from the Sargasso Sea
KIILLFVLFALVKAIVPRYRYDQLMKLGWKIFLPFSLFYVVLTSGFLLYFDLLPNK

SEQ ID NO: 79433 - protein, 162 aa, Unknown
  Bacterial polypetide isolated from the Sargasso Sea
MDIFFYIINTVISILVVVVPLFLIVAYVTYSERKIIGFMQSRMGPTRVGPSGLLQPIADVLKLVSKEIIIPTNANKGIFLTAPMLMLVPSLLVWSVIPLSEYFIIADINAGLLFILALTSLSVYGVILAGWASNSKYAFLGSMRSAAQIIAYEIAMGFALVG

SEQ ID NO: 79434 - protein, 161 aa, Unknown
  Bacterial polypetide isolated from the Sargasso Sea
MKITRFIKTVLLFDFINALLIALKEIFKKKKTINYPFEKGKISPRFRGEHALRRYPNGEERCIACKLCEAVCPAQAITIESAERSDGSRKTTRYDIDMMKCIYCGLCEESCPVDAIVQGPNFEFSTETREELYYNKEKLLDNGDRWESVLEANIKADNPYR

SEQ ID NO: 79435 - protein, 306 aa, Unknown
  Bacterial polypetide isolated from the Sargasso Sea
ALCYAGLLIAFGVKLPIVPLHTWLPDAHGEATAPVHMLLAGILLKMGGYALFRFNASMFPDAHVQFAPLLVVLGVVNIIYAALTSFAQRNLKRKIAYSSISHMGFVLIGIGSFSPLAASGAMLQMISHGLIGASLFFLVGATYDRTHTLQLDEMGGVGQRMRKMFAMWTACSLASLALPGMSGFVSELMVFVGFATDDAYSLAFRIVIDGAAAIGVILTPIYLLSMLREIFFGQEKPELSDANLVDAEPREIYIISCLLVPIIGIGLYPKLVTDSYRATIEQVVARDESSMKALTAPYFALRSAPK

SEQ ID NO: 79436 - protein, 315 aa, Unknown
  Bacterial polypetide isolated from the Sargasso Sea
LSSVLGMMIMISSNDLIVFYMGLELQSLALYVLATFNRDNIKSSEAGLKYFVLSALSSGLLLYGCSLIYGFTGSTNFDLIATQLNSNEYALTFGIVFILVGLAFKISAVPFHMWAPDVYEGSPTSVTLFFTMVPKIAALSVFIRFLYVPFLNLIDQWQMILIFLSIASMLFGAVAAIGQTNLKRLVAYSSIGHVGFALAGLATGTNEGIQSSVIYITIYILMNLGLFSCLLMMKRNNEYYESIEDLSGLSKNHPLLSLSLLIILFSLAGIPPLAGFFAKFYIFKSVIEQSMYFLAVVGLLSTVVAAFYYLRLIKI

SEQ ID NO: 79437 - protein, 220 aa, Unknown
  Bacterial polypetide isolated from the Sargasso Sea
MNSFSYLNDLIIPGGIIIAQIMAVLMPVLISVAFLVYAERKVLALIQLRRGPNVVGPFGILQSFADALKLLTKENIVPANSNKIVFLLAPIITMVLSLAGWAVIPFAPNWVIADINVGIMYLFAVSSLGVYGIIMAGWASNSQYPFLGALRSAAQMVSYEVSIGFVIITVLLCVGSLNLSKIVEAQETVWFAIPLLPMFVVFFISALAETNRLPFDLPED

SEQ ID NO: 79438 - protein, 101 aa, Unknown
  Bacterial polypetide isolated from the Sargasso Sea
MAALVNAVRSFLLLELGKALFLTLKYFFKPKVTINYPYEKGNLSPRFRGEHALRRYPNGEERCIACKLCEAVCPAQAITIEAEPRDDGSRRTTRYDIDMTK

SEQ ID NO: 79439 - protein, 281 aa, Unknown
  Bacterial polypetide isolated from the Sargasso Sea
DIKSAEASLKYFLLGALSSGFILFGISLIYGFVGSISFEQLSNISIKNDMGINFGLILILAGVAFKISSAPFHMWAPDVYEGTPSPITFFIATAPKISIIGIFVYLIYIVFKGIHDNLSDLIIVLSLSSMLVGSVGAIVQKNLKRLIAYSSIAHMGFILVGMVAFSENGLHAIIYYLIIYLFLLTGVFAIILSLQKDDKPIELISDLRGLYNDHPFISICLLIFMFSLAGIPPLSGFFGKWLVFFSAIDSGFYILAVLGVLFSVISAFYYLKIIRVMFFEN

SEQ ID NO: 79440 - protein, 235 aa, Unknown
  Bacterial polypetide isolated from the Sargasso Sea
TIVSSIFVMISSVTYLKSLNILKIEYPILILSSILGMMVMISSNDLIVFYLGLELQSLALYVLASFNRDNLLSSESGLKYFVLSALSSGLLLYGCSLVYGFSGSTNFHYIANSSLDIKQGVTFGLVFIIVGLAFKISAVPFHMWAPDVYQGSPTSVTLFFAALPKIAALTVFIRFLYTPFVNLIDQWQTILVFISIASMIFGAVAAIGQSNLKRLIAYSSISHMGYALAGVASGT

SEQ ID NO: 79441 - protein, 260 aa, Unknown
  Bacterial polypetide isolated from the Sargasso Sea
MTKQTKTLNLNFGPQHPAAHGVLRLILELDGEVVEKADPHIGLLHRGTEKLIENKTYAQAVPYFDRLDYVAPMNQEHAFALAIEKILKIEVPIRAQFIRVMFCEIGRILSHILNITTQALDVGALTPSLWGFEERETLMTFYERVSGSRLHANYFRAGGVHQDMPRGLDADIFDFTKKFPKIIDDLESLLTENRIFKQRNVDIGVVSKQDALDYSFSGVMLRGSNVPWDLRKSQPYDCYDQMDFKIPVGKNGDCYDRYLC

SEQ ID NO: 79442 - protein, 178 aa, Unknown
  Bacterial polypetide isolated from the Sargasso Sea
QLMEKVFGEKIVNLKFFGFDYFEFGGDKHLIAKSGWSKQGGYEIYMEHNKSGLKLYDHLFEIGKEFNIRPGGPNLIERIESGLLSHGNDMDNGDNPYECGFDKYVNIDSDADFLGKEKLKKIKAEGIKKKLMGVKIDAKEISVNGSMDLVDEDNTVIGELRSGCYNPTFKQVIGIAMI

SEQ ID NO: 79443 - protein, 70 aa, Unknown
  Bacterial polypetide isolated from the Sargasso Sea
MRNIDKDQKIPEEFKDIAKNFSDNGFITTSMDNLVNWARTGSLHWMTFGLACCAVEMMQTSMPRYDLERF

SEQ ID NO: 79444 - protein, 62 aa, Unknown
  Bacterial polypetide isolated from the Sargasso Sea
VSMGSCANGGGYYHYSYSVVRGCDKIVPVDIYIPGCPPSAEALLYGILQLQKKIRREGNIQR

SEQ ID NO: 79445 - protein, 184 aa, Unknown
  Bacterial polypetide isolated from the Sargasso Sea
MEYILVFLPLLGAIISGFFGRYIGDRISEIITSLFVLISAAISLIIFNEVIINSYENNLIIATWINSGSLDVHWSIKIDTISSVMLVVVCFISFLIHVYSIGYMSRDPGKTRFMAYLSLFTFAMLMLVTSDNFLQLFFGWEGVGLCSYFLIGFWFKKDSANAAAIKAFVVNRVGDFAFALGIFL

SEQ ID NO: 79446 - protein, 89 aa, Unknown
  Bacterial polypetide isolated from the Sargasso Sea
MPKNTKTMNLNFGPQHPAAHGVLRLILELDGEIVEKIDPHIGLLHRGTEKLIEHKTYTQAVPYFDRLDYVAPMNQEHAFALAIEKLLDI

SEQ ID NO: 79447 - protein, 242 aa, Unknown
  Bacterial polypetide isolated from the Sargasso Sea
MENLILVTPEVFISLSIMFLLILGVFKNNSSKLIQNIALIVLLISAVIIFNETFAIKEITLFNDSVIIDYLSSFMKIVTLLSAFLVLVISSSYLRSLKIFKIEYSILILSSVLGMMIMISSNDLIVFYMGLELQSLALYVLATFNRDEIKSSEAGLKYFVLSALSSGLLLYGCSLIYGFTGSTNFNVIANQLNSNEYALTFGIVFILVGLAFQISAVPFHMWAPDVYEGSPTSVTLFITMVP

SEQ ID NO: 79448 - protein, 92 aa, Unknown
  Bacterial polypetide isolated from the Sargasso Sea
MKNLKKVAFVFKEFFLIEIISGLFLTLKYFFKPKVTINYPFEKGVLSSRFRGEHALRRYDSGEERCIACKLCEAVCPAQAITIESQPRNDGS

SEQ ID NO: 79449 - protein, 155 aa, Unknown
  Bacterial polypetide isolated from the Sargasso Sea
LKTIFLVDFITGLFLAIKESFKAKKTLNYPFEKGKISPRFRGEHALRRYPNGEERCIACKLCEAVCPAQAITIESTEREDGSRKTTRYDIDMLKCIYCGLCEESCPVDAIVQGPNFEFSTETREELYYNKEKLLDNGDRWESVLAANIKADNPYR

SEQ ID NO: 79450 - protein, 229 aa, Unknown
  Bacterial polypetide isolated from the Sargasso Sea
MIEAISYILPELFIVVFTLSFLMIAVFSNGKSIIEYSNNISSLSLIVAALILFYGQTTASEPVMGGYYSSNDFTSFFKGLVLILSALILHLSDDYLKKNNLQIFEFPILINFSIVGMMITISANDLLSLYIGIEMQALSLYILASFSRDNAKSTEAGLKYFILGALSSGLLLYGISLVYGTTGSTQFDLIYETIMYTDTLLGLQVGMVFIISSIAFKFSAFPFHMWTPD

SEQ ID NO: 79451 - protein, 280 aa, Unknown
  Bacterial polypetide isolated from the Sargasso Sea
DGRCYYCPIIDDNAGLINDPVVLRLNENKWWVSLADSDVILFAKGLAIGNKFDVKIFEPDVDIMAIQGPKSFELMEKVFGDKIVNLKFFGFDYFEFGGDKHLIARSGWSKQGGYEIYVEHNVSGLKLYDHLFEIGKEFNIKPGCPNLIERIESGLLSYGNDIDNGDNPYECGFDKYINIDSEVNFLGKEKLKKIKSEGIKKKLMGVMLDIDKISITGSLELSDQNNNIIGELRSACYSPHFKKVIGIAMMKKPHWNVDQDIKAKINGEICVGKVCDLPFI

SEQ ID NO: 79452 - protein, 124 aa, Unknown
  Bacterial polypetide isolated from the Sargasso Sea
MAKKTKSLSLNFGPQHPAAHGVLRLILELDGEIVEKADPHIGLLHRGTEKLIEQKTYTQALPYFDRLDYVAPMNQEHAFALAAEKLLNVEVPIRAKYIRVIFCEIGRILSHIFNVTTPALDVGA

SEQ ID NO: 79453 - protein, 234 aa, Unknown
  Bacterial polypetide isolated from the Sargasso Sea
MKEVEVNTTTINFGPQHPAAHGVLRLVVELDGEVVERAEPHIGLLHRGTEKLIEYKTYLQAIPYFDRLDYVSPMCQEHAFALATENLLQIEVPQRAKYIRVIFAEITRILNHLLNIPAYAADIGAVTPFLWCFEQREKLLEFHEAVSGARFHAAYFRPGGVHQDMPAKMEERLYKHINTLPEFINDLEELLTNNRILRQRSVDIGVITKEEAIEWGCTGPVLRSTGIAWDLRRS

SEQ ID NO: 79454 - protein, 313 aa, Unknown
  Bacterial polypetide isolated from the Sargasso Sea
GCGAPVAGMFHLVTHACFKAMLFLGSGSVIHAMEEVVGHEPILAQDMRLMGGLRKKMPITAITFFIGCIAISGIPPLAGFWSKDEILGQAFNSFPILWFIGFLTAGMTAFYMFRLYFLTFEGEFRGENQEIQLSLIALAGKEKDEEHEEHEVGKIHESAWPMTLPLAVLAIPSVLIGFIGVPWNSIFANLLDPREALEAAESFSWGEFLPLATASVAISSTGIVLAVLTYYLKRLDLGVSISKKYPQINSFLQNKWYLDDINEKIFVKGSRKLAREVLEVDAKVVDGVVNLTGLLTLGSGEGLKYLRQVELSS

SEQ ID NO: 79455 - protein, 286 aa, Unknown
  Bacterial polypetide isolated from the Sargasso Sea
EAGLKYFVLSALSSGLLLYGCSLVYGFSGSTNFDIISNQLNSNEYVLTFGIVFILVGLAFKISAVPFHMWAPDVYEGSPTSVTLFFTMVPKIAALTVFIRFLYVPFLNLIDQWQMIIIFLSLASMIFGAIAAIGQTNIKRLIAYSSIGHVGYTLAGLATGTNEGIQSSIIYITIYIVMNLALFSGLLMLRRNNQYHEDIEDLSGLSKNHPLLSISLLIVLFSLAGIPPLAGFFAKFYIFKAVLEESMYFLAIVGLLSTVISAFYYLRIIKIIYFDNQKDQYDNDHS

SEQ ID NO: 79456 - protein, 65 aa, Unknown
  Bacterial polypetide isolated from the Sargasso Sea
MAIDFLKDYLPIIIFLIIALGLSVAFVFLNFIFSPKKPDPEKLSAYECGFEPFNDSRMEFDVRFY

SEQ ID NO: 79457 - protein, 302 aa, Unknown
  Bacterial polypetide isolated from the Sargasso Sea
MENFQYILPEIFISVSIMIFLLIGVFKKNSASLIYNLSNISLVILLALIINLNSIDTAYIFNNSYLIDNLSNYMKIILVGSGIFVMLTGSKYIQVINLNKIEYPILILSSILGMMIMISSNDLIVFYMGLELQSLALYVLASFNRDNLLSTESGLKYFVLSALSSGLLLYGCSLTYGFSESTNFDQILINSTEFNYGTTFGIVFILVGLAFKISAVPFHMWAPDVYQGSPTSVTLFFAILPKIAALSVFIKFLYTPFANMNDQWQTIIVFISIASMIFGAVAAIGQKNLKRLIAYSSISHMG

SEQ ID NO: 79458 - protein, 263 aa, Unknown
  Bacterial polypetide isolated from the Sargasso Sea
KLPYTYSLMVIGTLSLTGFPFLSGFYSKDAIIEFAYLRGNTTGYYAAGVGILTAFLTSIYSWRLMFKTFHGEYNNKEIKIEETHESPLVMLIPLIFLSVGAIFAGITFKELFIGDEGLKYFWRDSIFFLKPLSTEHPPLWFLILTPILVIISIPTAYYLFVKNKNLTKQIVKVNQPLYQFLLNKWYFDELYDNVFVKPSKRIGLFLWKFFDLKIIDGFGPDGISTLIKKFSIKANKFQSGFIYQYAFIMLLGFSALLTFLILK

SEQ ID NO: 79459 - protein, 120 aa, Unknown
  Bacterial polypetide isolated from the Sargasso Sea
MGTRSRGEHALRRYPNGEERCIACKLCEAVCPAQAITIESKERDDGSRKTVRYDIDMLKCIYCGLCEESCPVDAIVQGPNFEFATESREELYYTKEKLLENGDRWENILAANIKADSSHR

SEQ ID NO: 79460 - protein, 173 aa, Unknown
  Bacterial polypetide isolated from the Sargasso Sea
MNKQKKTLNLNFGPQHPAAHGVLRLILELDGELVEKADPHIGLLHRGTEKLIEHKTYTQALPYFDRLDYVAPMNQEHAFALATEKLLKIDVPIRAQFLRVIFCEVGRILSHLLNVTTQALDVGALTPSLWGFEERETLMTFYERASGSRLHANYFRTGGVHQDVPNNLLDDIG

SEQ ID NO: 79461 - protein, 161 aa, Unknown
  Bacterial polypetide isolated from the Sargasso Sea
MNISRFFKTIFMTDFIGGLFIAIKELFKSKKTINYPFEKGKISPRFRGEHALRRYPNGEERCIACKLCEAVCPAQAITIESAEREDGSRKTTRYDIDMMKCIYCGLCEESCPVDAIVQGPNFEFSTETREELYYTKEKLLDNGDRWENVLEANIKADNIHR

SEQ ID NO: 79462 - protein, 52 aa, Unknown
  Bacterial polypetide isolated from the Sargasso Sea
MKEVELNTTTINFGPQHPAAHGVLRLVVELEGEVVQRAEPHIGLLHRGTEKL

SEQ ID NO: 79463 - protein, 108 aa, Unknown
  Bacterial polypetide isolated from the Sargasso Sea
MKFNRLIKTIFLSEFVKGLYLALKFIFKPKATLNYPFEKGPISPRFRGEHALRRYPNGEERCIACKLCEAACPAQAITIESEPQEDGSRKTTRYDIDMVKCIYCGLCQ

SEQ ID NO: 79464 - protein, 274 aa, Unknown
  Bacterial polypetide isolated from the Sargasso Sea
MTLGIVFILVGLAFKISAVPFHMWAPDVYEGSPTSVTLFFSIVPKIAALTVFIRFLYVPFLNLIDQWQMILIFLSIASMLFGAIAAIGQTNLKRLIAYSSIGHVGYALAGLTTGSNEGIQSSIIYITIYILMNLGFFSCLLMLKRNNVYYEKIDDLAGLSKNHPLLSLSFLIIMFSLAGIPPLAGFFAKFYIFKAVIEESMYFLAIVGLLSTVVAAFYYLRIIKIIYFDKEKEKYDIDHGLWLKFSLTSSTLFILMYFVFPSKLIEIISKINII

SEQ ID NO: 79465 - protein, 245 aa, Unknown
  Bacterial polypetide isolated from the Sargasso Sea
MAETEIKNLTMNFGPQHPAAHGVLRLVVEMDGEIVERCDPHIGLLHRGTEKLIEYKTYLQAVPYFDRLDYVSPMCQEHTFALAVEKLADITVPLRGQYIRVLFSEITRILNHILNISAFALDVGAMTPLLWGFEEREKLMEFYERVSGARLHSAYFRPGGVHRDLPAGLLEEVTEFCESFPAIIDDIESLLTENRIFRQRTVDVGIVSKDEAMDWGFSGPMLRGSGVPWDLRKSQPYDVYDPGRF

SEQ ID NO: 79466 - protein, 268 aa, Unknown
  Bacterial polypetide isolated from the Sargasso Sea
MSEQQIKNFTLNFGPQHPAAHGVLRLVLEMDGEVIDRADPHIGLLHRGTEKLIEHKTYLQAVPYFDRLDYVAPQNQEHAFALAVEKLAGIEVPPRGQYIRVLYAEIGRILNHILNLTAYAMDVGAMTPMLWAFEHRELLMEFCERASGARLHMAYFRPGGVAQDVPQKLLDDIGKWADEYPEMIDDLESLLTENRIFKQRTVDIGVVSAEQANNWAFTGPNLRASGVPWDLRKSQPYDAYAKMDFDVPIGKHGDCYDRYLVRMFEMRE

SEQ ID NO: 79467 - protein, 161 aa, Unknown
  Bacterial polypetide isolated from the Sargasso Sea
MKITRLFKTILMVDFVSGLLIAIKEMFKSKKTINYPFEKGKISPRFRGEHALRRYPNGEERCIACKLCEAVCPAQAITIESTQREDGSRKTTRYDIDMMKCIYCGLCEESCPVDAIVQGPNFEFSTETREELYYTKEKLLDNGDRWENILAANIKSDNPYR

SEQ ID NO: 79468 - protein, 106 aa, Unknown
  Bacterial polypetide isolated from the Sargasso Sea
FIPRSSPRQADVMIVAGTVTMKMAIRVKKLYEQMADPKYVVAMGSCATSGGPYWQHGYHVLKGVDIVIPVDVYVPGCPPRPESLIEGLLKLEEQILEDKPLTRKMV

SEQ ID NO: 79469 - protein, 72 aa, Unknown
  Bacterial polypetide isolated from the Sargasso Sea
MSSNSELVTVNFGPQHPSMHGVFRMRVTLDGESIVDIEPVFGYLHRGTEKLAEERTYVQIVTLTDRLDYVAS

SEQ ID NO: 79470 - protein, 161 aa, Unknown
  Bacterial polypetide isolated from the Sargasso Sea
MKFTRFFKTVFMVDFVTGLFIGLKEIFKSKKTINYPFEKGKISPRYRGEHALRRYPNGEERCIACKLCEAVCPAQAITIESTERSDGSRKTTRYDIDMMKCIYCGLCEESCPVDAIVQGPNFEFSTETREELYYTKEKLLDNGDRWENILAANIKSDNPYR

SEQ ID NO: 79471 - protein, 38 aa, Unknown
  Bacterial polypetide isolated from the Sargasso Sea
YRYDQLMRLGWKIFLPLSLTYVILTASYLFYFNLLPTI

SEQ ID NO: 79472 - protein, 161 aa, Unknown
  Bacterial polypetide isolated from the Sargasso Sea
MTKKIKNLNLNFGPQHPAAHGVLRLILELDGEVVEKADPHIGLLHRGTEKLIENKTYMQAVPYFDRLDYVAPMNQEHAFALATEKILEIDVPIRAQYIRVIFCEIGRILSHILNVTTQAMDVGALTPTLWGFEEREKLMGFYKRVSGSRLHANYFRAGESS

SEQ ID NO: 79473 - protein, 60 aa, Unknown
  Bacterial polypetide isolated from the Sargasso Sea
LFTFSMLTLVSSDNFLQLFFGWEGVGLCSYFLIGFWYKKDSANSAAIKAFLVNRVGDFGF

SEQ ID NO: 79474 - protein, 161 aa, Unknown
  Bacterial polypetide isolated from the Sargasso Sea
MKISRFLKTIFMIDFISGFIIAIKQTYKPKKTINYPFEKGKISPRARGEHALRRYPNGEERCIACKLCEAVCPAQAITIESTEREDGSRKTTRYDIDMLKCIYCGLCEESCPVDAIVQGPNFEFSTETREELYYNKEKLLENGDRWESVLAANIRSDKAYR

SEQ ID NO: 79475 - protein, 123 aa, Unknown
  Bacterial polypetide isolated from the Sargasso Sea
LPEAEAELVAGYQTEYSGMMYAMFWLGEYANILLMCAMGSILFLGGWLSPLSIYPFDLIPSPLWLIFKIIFLFILFSLVKAIVPRYRYDQLMKLGWKIFLPLSLIWVVLTSGYLLYFNLLPVK

SEQ ID NO: 79476 - protein, 237 aa, Unknown
  Bacterial polypetide isolated from the Sargasso Sea
MSKEFKTVNLNFGPQHPAAHGVLRLILELDGEVVERADPHIGLLHRGTEKLIEHKTYMQAIPYFDRLDYVAPMNQEHAFALAVEKLLKIDVPIRAKNIRIAFCEIGRILSHILNITTQALDVGALTPSLWGFEEREKLMVFYERVSGSRLHANYFRPGGVHIDLPTGLDKDILDFCKTFPKVIDDLESLLTDNRIFKQRNVDIGIVSAQEALDHGFSGVMIRGSGVPWDLRKSQPYD

SEQ ID NO: 79477 - protein, 145 aa, Unknown
  Bacterial polypetide isolated from the Sargasso Sea
MKKEKKTLNLNFGPQHPAAHGVLRLILELDGEVVEKADPHIGLLHRGTEKLIENKTYIQAVPYFDRLDYVAPMNQEHAFALAIEKILKINVPIRAQYIRVMFCEIGRILSHLLNITTQAMDVGALTPTLWGFEERETLMGFYEKV

SEQ ID NO: 79478 - protein, 123 aa, Unknown
  Bacterial polypetide isolated from the Sargasso Sea
MAKETKTLNLNFGPQHPAAHGVLRLILHLDGEIVEKADPHIGLLHRGTEKLIENKTYTQAVPYFDRLDYVAPMNQEHAFALAIEKILKIEVPIRAQYIRVMFCEIGRILSHILNVTTQAMDVG

SEQ ID NO: 79479 - protein, 248 aa, Unknown
  Bacterial polypetide isolated from the Sargasso Sea
SSFMKIITLLAAFFTLVISSNYLIIFKIFKIEYPILILSSVLGMMVMISSNDLIVFYMGLELQSLALYVLATFKRDNIKSSEAGLKYFVLSALSSGLLLYGCSLIYGFTGTTNFNVIANQFNSNEYVLTFGIVFILVGLAFKISAVPFHMWAPDVYEGSPTSVTLFFTMVPKIAALTVFIRFLYIPFLDLIDQWQTILIFLSIASMLFGAIAAIGQTNLKRLIAYSSIGHVGYILAGLATGSNDGIQS

SEQ ID NO: 79480 - protein, 64 aa, Unknown
  Bacterial polypetide isolated from the Sargasso Sea
MNLQDRKKDIPDEFKQLAQDFSDNGFITTSLDNLVNWARTGSLHWMTFGLACCAVEMMQTSMPR

SEQ ID NO: 79481 - protein, 278 aa, Unknown
  Bacterial polypetide isolated from the Sargasso Sea
MDYLNIIFEEVYKILFLLIPVLVSVAMIVWLDRRVWAFVQKRQGPNVVGPFGLLQSLADALKYIFKEIIIPASSNKVIFILAPIITMTLALVAWAVIPFSEDQVLANINVGILYIFAVSSLGVYGIIMGGWASNSKYPFLGSIRSAAQMVSYEVSIGIIIINVLLCVGSLNLNDIIIAQKNIWFIVPLFPMFVIFFISALAETNRPPFDLPEAEAELVAGYQTEYSGMMYAMFWLGEYANILLMCALGSILFLGGWLSPLDFYPFTMIPGAIWLIFKI

SEQ ID NO: 79482 - protein, 258 aa, Unknown
  Bacterial polypetide isolated from the Sargasso Sea
MNSFSYLNDLIIPGGIIVAQIMAVLMPVLISVAFLVYAERKVLALIQLRRGPNVVGPFGILQSFADALKLLTKENIVPANSNKIVFLLAPIITMVLSLAGWAVIPFAPNWVIADINVGIMYLFAVSSLGVYGIIMAGWASNSQYPFLGALRSAAQMVSYEVSIGFVIITVLLCVGSLNLSKIVEAQETVWFAIPLLPMFVVFFISALAETNRLPFDLPEDESTLVAGFFTEYSSASFVLFFLGEYASMILMSSMTVIL

SEQ ID NO: 79483 - protein, 112 aa, Unknown
  Bacterial polypetide isolated from the Sargasso Sea
MKISRFFKTILLIDFISGLIIAIKESFKPKKTLNYPFEKGKISPRFRGEHALRRYPNGEERCIACKLCEAVCPAQAITIESTEREDGSRKTTRYDIDMLKCIYCGLCEESCP

SEQ ID NO: 79484 - protein, 86 aa, Unknown
  Bacterial polypetide isolated from the Sargasso Sea
LGSILFLGGWLSPIDLYPFNIIPAPLWLILKILLLFILFSLVKAIVPRYRYDQLMKLGWKIFLPLSLIWVVLTASYLFYFNLLPVN

SEQ ID NO: 79485 - protein, 161 aa, Unknown
  Bacterial polypetide isolated from the Sargasso Sea
MKISRLLKTIFMIDFVTGLLIAIKETFKEKKTINYPFEKGSLGTRSRGEHALRRYPNGEERCIACKLCEAVCPAQAITIESKEREDGSRKTVRYDIDMLKCIYCGLCEESCPVDAIVQGPNFEFATESREELYYTKEKLLENGDRWENILAANIKADSLTG

SEQ ID NO: 79486 - protein, 232 aa, Unknown
  Bacterial polypetide isolated from the Sargasso Sea
VQKRRGPNVVGPFGLFQTLADALKYIFKEIIIPASANKTIFILAPIITMTLALIAWAVIPLSETLVLSNINVGILYLFAVSSLGVYGIIMGGWASNSKYPFLGAIGSAAQMVSYEVSIGIIIINVLLCVGSLNLNDIVLAQKNLWYVVPLFPMFVIFFISALAETNRPPFDLPEAEAELVAGYQTEYSGMMYAMFWLGEYANILLMCAMGSILFLGGWLPPLDIYPLNIVPA

SEQ ID NO: 79487 - protein, 147 aa, Unknown
  Bacterial polypetide isolated from the Sargasso Sea
MFLVYFFAIAKIFKSKKTINYPFEKGKISPRFRGEHALRRYPNGEERCIACKLCEAVCPAQAITIESEIRNDGSRKTTRYDIDMLKCIYCGLCEESCPVDAIVQGPNYEFGTETREELYYNKQKLLENGDKWESVLAENIKADLPFR

SEQ ID NO: 79488 - protein, 200 aa, Unknown
  Bacterial polypetide isolated from the Sargasso Sea
PVLISVAFLVYAERKVLALIQLRRGPNMVGPFGILQSFADALKLITKENIIPSGSNKIVFILAPIITMVLSLAGWAVIPFAPGWVVSDINVGIMYLFAVSSLGVYGIIMAGWASNSQYPFLGALRSAAQMVSYEVSIGFVIITVLLCVGSLNLSKIVLAQQTVWFAIPLLPMFIIFFISALAETNRLPFDLPEDESTLVA

SEQ ID NO: 79489 - protein, 98 aa, Unknown
  Bacterial polypetide isolated from the Sargasso Sea
MSKEKKTLNLNFGPQHPAAHGVLRLILELDGEVVEHADPHIGLLHRGTEKLIENKTYLQALPYFDRLDYVAPMNQEHAFALAVEKILNIEVPIRAQFI

SEQ ID NO: 79490 - protein, 131 aa, Unknown
  Bacterial polypetide isolated from the Sargasso Sea
KTINYPFEKGKISPRYRGEHALRRYPNGEERCIACKLCEAVCPAQAITIESTQRDDGSRKTTRYDIDMMKCIYCGLCEESCPVDAIVQGPNFEFSTETREELYYTKEKLLDNGDRWENILAANIKSDNPYR

SEQ ID NO: 79491 - protein, 161 aa, Unknown
  Bacterial polypetide isolated from the Sargasso Sea
MKITRFIKTILMVDFVSGLLIAIKELFKSKKTINYPFEKGKISPRFRGEHALRRYPNGEERCIACKLCEAVCPAQAITIESTQRDDGSRKTTRYDIDMMKCIYCGLCEESCPVDAIVQGPNFEFSTETREELYYTKEKLLDNGDRWENILAANIKSDNPYR

SEQ ID NO: 79492 - protein, 289 aa, Unknown
  Bacterial polypetide isolated from the Sargasso Sea
LNFGPQHPAAHGVLRLILELDGEIVEKADPHIGLLHRGTEKLIEQKTYTQALPYFDRLDYVAPMNQEHAFALAAEKLLKVEVPIRAKYIRVIFCEIGRILSHILNVTTQALDVGALTPSLWGFEERETLMTFYERASGSRLHANYFRTGGVHKDIPMKLVEDIEKFCKSFPKIIDDLEGLLTDNRIFKQRNVEIGIVSKQEALDHSFSGVMLRGSGVPWDLRRSQPYEIYKDLDFKIPIGKNGDCYDRYLCRIEEMRESVKIILQCIERLPKGPVISIDNKISPPNRDD

SEQ ID NO: 79493 - protein, 185 aa, Unknown
  Bacterial polypetide isolated from the Sargasso Sea
MKEIEVNTTTINFGPQHPAAHGVLRLVVELNGEVVERAEPHIGLLHRGTEKLIEYKTYLQAVPYFDRLDYVSPMCQEHAFALATENLLKIEVPQRAQYIRVIFSEITRLLNHLLNIPAYAADIGAVTPFLWCFEEREKLLEFHEAVSGARFHAAYFRPGGVHQDMPEGMEEKLNNHFKILPKFID

SEQ ID NO: 79494 - protein, 79 aa, Unknown
  Bacterial polypetide isolated from the Sargasso Sea
MFNYLYSNIKKFFLLEIFYGLFLTLKYFFKPKVTLNYPYEKGPISPRFRGEHALRRYPNGEERCIACKLCEDNLSCTSN

SEQ ID NO: 79495 - protein, 161 aa, Unknown
  Bacterial polypetide isolated from the Sargasso Sea
MKISRFFKTIFLLDILSGLIIALKEIFKDKKTINYPFEKGKISPRFRGEHALRRYPNGEERCIACKLCEAVCPAQAITIESAERSDGSRKTTRYDIDMMKCIYCGLCEESCPVDAIVQGPNFEFSTETREELYYNKEKLLDNGDRWETILAANIRADKPYR

SEQ ID NO: 79496 - protein, 105 aa, Unknown
  Bacterial polypetide isolated from the Sargasso Sea
MMYAMFWLGEYANILLMCSLGSILFLGGWLPAIEAFPFNFIPDFMWLILKILFLFILFSLVKAIVPRYRYDQLMKLGWKIFLPMSLLWVVITASYLFYFDLLPSN

SEQ ID NO: 79497 - protein, 95 aa, Unknown
  Bacterial polypetide isolated from the Sargasso Sea
MSKEKKTLNLNFGPQHPAAHGVLRLILELDGEVVEHADPHIGLLHRGTEKLIENKTYIQALPYFDRLDYVAPMNQEHAFALAIEKILNIEVPIRG

SEQ ID NO: 79498 - protein, 61 aa, Unknown
  Bacterial polypetide isolated from the Sargasso Sea
MAEAIPPGADQDAILNAVGEEITNRGFVIAKADKLFNWARSGSLWPMTFGLACCAVEMMHS

SEQ ID NO: 79499 - protein, 50 aa, Unknown
  Bacterial polypetide isolated from the Sargasso Sea
MLAEFLKDYLSIILFLIIAFGLSIGFILINYLFSPKKPDPEKLSAYECGF

SEQ ID NO: 79500 - protein, 310 aa, Unknown
  Bacterial polypetide isolated from the Sargasso Sea
AFSSGVMLFGLSIVYGLVGSTNYFAIQETLSILDSSANPALIMALLMIFAGFGYKISSVPFHFWTPDVYEGSPSTITAYLSVAPKAAGFAMIIRFFHQVFSDSIGLTSNAIGSTDLPWPEIIGVLAVVTMTMGNLVAIQQKSIKRMLAYSSIAHAGYMMLALPVLSVDAVESVMIYLFIYVFMNLGAFFIVIFVKNKTGGESFEDFEGLGWKMPIVGAFMTLFMLSLTGLPPTAGFIGKLYIFKTLVGAGSEFLWLVVAGGVNSVISLYYYFHVVKVMFLGGKRSDVITYPPSTMFGLMIFTAIPSLLLG

SEQ ID NO: 79501 - protein, 135 aa, Unknown
  Bacterial polypetide isolated from the Sargasso Sea
MTKKIKNLNLNFGPQHPAAHGVLRLILELDGEVVEKADPHIGLLHRGTEKLIENKTYMQAVPYFDRLDYVAPMNQEHAFALAIEKILKIDVPIRAQYIRVMFCEIGRILSHILNVTTQALDVGALTPSLWGLKKE

SEQ ID NO: 79502 - protein, 159 aa, Unknown
  Bacterial polypetide isolated from the Sargasso Sea
MSKKQKTLNLNFGPQHPAAHGVLRLILELDGEVVEKADPHIGLLHRGTEKLIENKTYVQAIPYFDRLDYVAPMNQEHAFALAIEKILKIEVPIRAQYIRVLFCEIGRILSHILNITTQALDVGALTPSLWGFEERETLMTFYERASGSRLHANFFRAGG

SEQ ID NO: 79503 - protein, 217 aa, Unknown
  Bacterial polypetide isolated from the Sargasso Sea
MLIPVLVTVALIVWLDRRVWAFVQKRRGPNVVGPFGLLQSLADALKYIFKEIIIPASSNKVIFILAPIITMTLALIAWAVIPFSESLVLADINVGILYLFAVSSLGVYGIIMGGWASNSKYPFLGAIRSAAQMVSYEVSIGVIIINVLLCVGSLNLNDIVLAQQNMWFILPLFPMFVIFFISALAETNRPPFDLPEAEAELVAGYQTEYSGMMYAMF

SEQ ID NO: 79504 - protein, 161 aa, Unknown
  Bacterial polypetide isolated from the Sargasso Sea
MKISRFFKTILMTDFIGGLFIAIKELFKSKKTINYPFEKGKISPRFRGEHALRRYPNGEERCIACKLCEAVCPAQAITIESAEREDGSRKTTRYDIDMMKCIYCGLCEEACPVDAIVQGPNFEFSTETREELYYTKEKLLDNGDRWENVLEANIKADNIHR

SEQ ID NO: 79505 - protein, 94 aa, Unknown
  Bacterial polypetide isolated from the Sargasso Sea
MAEIKNYSLNFGPQHPAAHGVLRLILELDGEVVQNADPHIGLLHRGTEKLAETRTFLQTLPYMDRLDYVSMMCNEHAYVLAIEKLIGIEPPIRA

SEQ ID NO: 79506 - protein, 283 aa, Unknown
  Bacterial polypetide isolated from the Sargasso Sea
MLPAAFGSIEDSYHHLKEHVQIWDVAAERQVEISGKDSAKLVQLMTCRDLSKSKDGRCYYCPIIDDNAGLINDPVVLRINENKWWISIADTDVILFAKGLAIGNKFDVKIIEPKVDIMAVQGPKSFQLMEKVFGEQITKLKFFGFDYFEFGGAKHLIAQSGWSKQGGYEVYVQNTEAGLKLYDHLFEIGKEFNIKPGCPNLIERIESGLLSHGNDMDNGDNPYECGFDKYINIDSDVIFLGKEKLKTIKSEGINKKLMGVKFDIEKISLTGSLDLMDDQNNIV

SEQ ID NO: 79507 - protein, 161 aa, Unknown; identical to SEQ ID NO: 79378
  Bacterial polypetide isolated from the Sargasso Sea

SEQ ID NO: 79508 - protein, 89 aa, Unknown
  Bacterial polypetide isolated from the Sargasso Sea
MCAMGSILFLGGWLSPIDLFPFNIIPAPIWLILKILFLFILFALIKAIVPRYRYDQLMKLGWKIFLPFSLIYVVLTASFLMYFDLLPGN

SEQ ID NO: 79509 - protein, 136 aa, Unknown
  Bacterial polypetide isolated from the Sargasso Sea
MSKQKKKLNLNFGPQHPAAHGVLRLILELDGEVVEKADPHIGLLHRGTEKLIENKTYTQAIPYFDRLDYVAPMNQEHAFALAIEKILKIDVPIRAQYIRVIFCEIGRILSHILNVTTQALDVGALTPSLWGFEERE

SEQ ID NO: 79510 - protein, 228 aa, Unknown
  Bacterial polypetide isolated from the Sargasso Sea
MNFPILSSLILLPTIGGLFILFGRSSSKYNSAKYISLFISLANFVLSIYLWYLYDANNSNFQFVEEKIWIKGFINYKVGIDGISILFIILTTFITTLCIISVNSTIKNKLKDFLVAILFMETMMIGVFCSLDLVIFYLFFEAGLIPMFLIIGIWGGERRVYSAFKFFLYTLLGSVLMLIAIISIYWITGTTDVIKLYQLGIDPKYQNLLWLAFFSSFAVKTPMWPVHT

SEQ ID NO: 79511 - protein, 108 aa, Unknown
  Bacterial polypetide isolated from the Sargasso Sea
MKISRLFKTIFMIDFLTGLVIAIKEIFKPKKTINYPHEKGAISPRTRGEHALRRYPNGEERCIACKLCEAVCPAQAITIESKEREDGSRKTTRYDIDMIKCIYCGLCE

SEQ ID NO: 79512 - protein, 324 aa, Unknown
  Bacterial polypetide isolated from the Sargasso Sea
IDYFTTLIKSVIWISAFLVMLCSLNYVKQNDILKIEYPILILSSILGMLVMVSSNDLIVFYVGLELQSLALYVLAAFKRDNILSSESGLKYFILSALSSGLLLYGCSLIYGFSSSTNFDLIYQNSESIEYGIIFGIVFILVGLAFKITAVPFHMWAPDVYDGSPTSVTVIFAILPKIAALTVFINFLYGPFLEMFEQWQAVIIFLSIGSMVFGAVAAIGQKKLKRLIAYSSISHMGFALAGLSVGTNEGIQNSIIYLIIYLIMNIAFFCCLFMLKRENQYFDKVEDLSGLSKNHPLLSLSLMIILFSLAGIPPLAGFFAKVLYF

SEQ ID NO: 79513 - protein, 244 aa, Unknown
  Bacterial polypetide isolated from the Sargasso Sea
MQTLNLLFNEIYKILFLLIPVLVTVAMIVWLDRRVWALVQKRRGPNVVGPFGLLQSLADALKYIFKEIIIPASSNKVIFILAPIITMTLALVAWAVIPFSENLVLSDINVGVLYLFAVSSLGVYGIIMGGWASNSKYPFLGAIRSAAQMVSYEVSIGVIIINVLLCVGSLNLSDIVLAQQNTWFVLPLFPMFVIFFISALAETNRPPFDLPEAEAELVAGYQTEYSGMMYAMFWLGEYANILLM

SEQ ID NO: 79514 - protein, 243 aa, Unknown
  Bacterial polypetide isolated from the Sargasso Sea
PSLGLLFGLALVIAGLAFKVSAVPFHMWTPDVYEGAPTPVTAFLATVPKMAAICLFMRVMFDAFGNILGDWQQIIVLISILSMFLGAFAAIGQNDFKRLLAYSSIAHMGYALIGLAAGTEFGVQSVLEYMTIYITMNIGVFAILMSMQRDGQSVTEIASLRMISETDPGKAIALLILLFSLAGVPPMLGFFAKFEVLRAAINADLIYLAIMGVLASVIGAFYYLKIVYLIYFGGMPETPLDNS

SEQ ID NO: 79515 - protein, 273 aa, Unknown
  Bacterial polypetide isolated from the Sargasso Sea
VQIWDVAAERQLEISGKDSAKLVQLMTCRDLSKSKDGRCYYCPIIDDNAGLINDPVVLRLNENKWWVSLADSDVILFAKGLAIGNKFDVKIFEPDVDIMAVQGPKSFELMEKVFGDKIVNLKFFGFDYFEFGGDKHLIARSGWSKQGGYEIYVEHNVSGLKLYDHLFEIGKEFNIKPGCPNLIERIESGLLSYGNDIDNGDNPYECGFDKYINIDSEVNFLGKERLKKIKSEGIKKKLMGVMLDIDKISITGSLELSDQNNNIIGELRSACYS

SEQ ID NO: 79516 - protein, 219 aa, Unknown
  Bacterial polypetide isolated from the Sargasso Sea
FFKKSYNLVTNLSLVALVILIVIILNTESTSVKIFTDSFIRDGYAKFIKILIIISTIFILLSSQVFIKDNNIAKFEYPIIILLSILGMFFMVSSNDLILFYLGLELQSLSLYVLASIDRDNTRSTESGVKYFVLSALSSGLLLYGCSLLYGFTGSTNFDIINNSLNIGSVGSIFAMVFILVGLAFKVSAVPFHMWTPDVYEGSPTSVTNFFSAVPKVAG

SEQ ID NO: 79517 - protein, 289 aa, Unknown
  Bacterial polypetide isolated from the Sargasso Sea
YWSLGGMFLTYIAIRLQNIEPTSLFMDTVAHDPFSQFFKILILISTAIVMLMSLVSGELKKYRMGEYFSIMTIMTFGLFLMTSSIDILMVYLAIEIVSIMSFFLAGYLKRNSLSNEASLKYVIYGAFSSGIMLYGLSILFGLTGSTNFFEMQKAISLLGTDSNLALVLSTVFILVGFGYKISAVPFHFWTPDVYEGSPSTITAYLSIAPKAAGFALMLRFFNQVFGDMSIDISTSWSAINDVPWPELIAVLSAATMTVGNLVAIQQNNVKRMLAYSSIAHAGYMMMALP

SEQ ID NO: 79518 - protein, 243 aa, Unknown
  Bacterial polypetide isolated from the Sargasso Sea
MIEYLQILGEEVYKIFFLLVPILVSVAMIVWLDRRVWGLVQKRKGPNVVGPFGLLQTLADALKYIFKEIIIPASANKVVFILAPIVTMTLALIAWAVIPMSENLVLADINVGILYLFAVSSLGVYGIIMGGWASNSKYPFLGAIRSAAQMVSYEVSIGIIIINVLLCVGSLNLKDIVIAQKELWYVIPLFPMFVIFFISSLAETNRPPFDLPEAEAELVAGYQTEYSGMMYAMFWLGEYANIL

SEQ ID NO: 79519 - protein, 275 aa, Unknown
  Bacterial polypetide isolated from the Sargasso Sea
SLYVGLELQSLALYVIAAFRRDSTKSSEAGLKYFVLGALSSGMLLYGASMIYGFAGTTRFDTLATLFTGPNADPGVGVVVGLVFLLAGLAFKVSAVPFHMWTPDVYEGAPTPVTAFFAVAPKIAAIALLVRTMVGPFGELFEQWQQIVILISILSMLLGALAAIWQQNLKRLLAYSSIGHVGYALVGLAAGSKEGITGIGVYMAIYLAMNVGTFCCVLSMRRQGLMAEGIDDLAGLARNHPMMAAAMAVFMFSMAGIPPLAGFFGKLYVFLAAVN

SEQ ID NO: 79520 - protein, 297 aa, Unknown
  Bacterial polypetide isolated from the Sargasso Sea
TLACLAAWPVTFKPRLFYFLLLAMDGGQIAVFAVQDMLLFFLAWELELIPVYLLLAIWGGKKRQYAATKFILYTAGSSLFILLVALAMAFSGGPVSFEYTDLAAKHLGAGFQALCYAGLLIAFGVKLPIVPLHTWLPDAHGEATAPVHMLLAGILLKMGGYALFRFNASMFPDAHVQFAPLLVVLGVVNIIYAALTSFAQRNLKRKIAYSSISHMGFVLIGIGSFSPLAASGAMLQMISHGLIGASLFFLVGATYDRTHTLQLDEMGGVGQRMRKMFAMWTACCLASLALPGMSGFV

SEQ ID NO: 79521 - protein, 105 aa, Unknown
  Bacterial polypetide isolated from the Sargasso Sea
MSLIRFFKTIFMIDFLTGLIMAIKEIFKPKKTINYPFEKGSISPRARGEHALRRYPNGEERCIACKLCEAVCPAQAITIESSEREDGSRKTTRYDIDMLKCIYCG

SEQ ID NO: 79522 - protein, 78 aa, Unknown
  Bacterial polypetide isolated from the Sargasso Sea
MNLNFGPQHPAAHGVLRLILELDGEVVEKIDPHIGLLHRGTEKLIEHKTYMQALPYFDRLDYVAPNESRARLCFRNRK

SEQ ID NO: 79523 - protein, 55 aa, Unknown
  Bacterial polypetide isolated from the Sargasso Sea
MNLEEKKKQIPDEFKQLAQDFSDNGFITTSLDNLVTWARTGSLHWMTFGLACCAV

SEQ ID NO: 79524 - protein, 244 aa, Unknown
  Bacterial polypetide isolated from the Sargasso Sea
MIPVLVTVAMIVWLDRRVWAFVQKRRGPNVVGPFGLLQSLADALKYIFKEIIIPASSNKLIFILAPIITMTLALAAWAVIPFSESLVLSDINVGILYLFAISSLGVYGIIMGGWASNSKYPFLGAIRSAAQMVSYEVSIGVIIINVLLCVGSLNLNEIVLAQKDMWFVLPLFPMFVIFFISALAETNRPPFDLPEAEAELVAGYQTEYSGMMYAMFLVRRVCKYFINVCYGFHFIFRWMAFLSG

SEQ ID NO: 79525 - protein, 117 aa, Unknown
  Bacterial polypetide isolated from the Sargasso Sea
MSKQRKKLNLNFGPQHPAAHGVLRLILELDGEIVEKADPHIGLLHRGTEKLIENKTYVQAIPYFDRLDYVAPMNQEHAFALAIEKILKIDVPIRAQYIRVIFCEIGRILSHILNITT

SEQ ID NO: 79526 - protein, 274 aa, Unknown
  Bacterial polypetide isolated from the Sargasso Sea
LIISSNYLRTFKIFKIEYPILILSSVLGMMIMINSNDLIVFYMGLELQSLALYVLATFNRDQIKSSEAGLKYFVLSALSSGLLLYGCSLIYGFTGSTNFNVIANQLGSSEYAITFGIVFILVGLAFKISAVPFHMWAPDVYEGSPTSVTLFFTMVPKIAALTVFIRFLYVPFLNLIDQWQMILIFLSIASMLFGAIAAIGQTNLKRLVAYSSIGHVGYALAGVATGTNEGMQSSVIYIIIYIIMNLGLFSCLLMMKRENQYYEKIEDLSGLSKN

SEQ ID NO: 79527 - protein, 274 aa, Unknown
  Bacterial polypetide isolated from the Sargasso Sea
QDINKMGGVIKKLPYTYVLMLIGTLALTGFPLLSGFYSKDAIIEFAYLRGNGVGILAAFVGIVTALLTSIYSWRLIFKTFHGNFNNKELSVDKIHESPFVMIAPLIILAIGAIFAGMAFKGLFIGHEIAYEFWGKSIKFLEPLSTDHPPTWFLFLTPVLVTAAIPFSYYLYLKNKNIVIGLKEMNEPIYQFLVKKWYFDEIYDYLFVNPSKRIGKFLWKKVDGSIIDKFGPDGISSVIKNLSTKAVKFQSGFIYQYAFVMLIGFSVLLTILILN

SEQ ID NO: 79528 - protein, 240 aa, Unknown
  Bacterial polypetide isolated from the Sargasso Sea
MEYIVVFLPLFGAILSGFFGKFIGDRSSEILTSLFVSISAILSIIVFYNVITFDYSNNIEIFTWINSGQLNIKWSIKIDALSALMLVVVNLISSIVHVYSIGYMSNDPHKTRFMAFLSLFTFAMLTLVTSDNFLQLFFGWEGVGLCSYFLIGFWYKKESANAAAIKAFLVNRVGDVGFALGIFLIFYMYGTLNYQEVFQLIPNTLDREINFLGMNINSINLICILLFNGAMGKSAQFILH

SEQ ID NO: 79529 - protein, 270 aa, Unknown
  Bacterial polypetide isolated from the Sargasso Sea
TKEKKTLNLNFGPQHPAAHGVLRLILELDGEIVEKADPHIGLLHRGTEKLIENKTYSQAIPYFDRLDYVAPMNQEHAFALAIEKIMDVEVPIRGQFIRVIFCEIGRILSHILNITTQALDVGALTPSLWGFEEREKLMGFYERVSGSRLHANYFRPGGVHKDLPRGLDKDILEFCKTFPKIIDDLETLLTDNRIFKQRNVDIGIVSKEDALNYSFSGVMLRGSGIPWDLRKSQPYDCYEQIDFKIPIGKNGDCYDRYLCRIEEMRESVKI

SEQ ID NO: 79530 - protein, 113 aa, Unknown
  Bacterial polypetide isolated from the Sargasso Sea
MTKKIKNLNLNFGPQHPAAHGVLRLILELDGEVVEKADPHIGLLHRGTEKLIENKTYMQAVPYFDRLDYVAPMNQEHAFALAVEKILKIDVPIRAQYIRVMFCEIGRILSHIL

SEQ ID NO: 79531 - protein, 67 aa, Unknown
  Bacterial polypetide isolated from the Sargasso Sea
MTKKIKNLNLNFGPQHPAAHGVLRLILELDGEVVEKADPHIGLLHRGTEKLIEHKTYMQAVPYFDRL

SEQ ID NO: 79532 - protein, 201 aa, Unknown
  Bacterial polypetide isolated from the Sargasso Sea
MAKQSKTLNLNFGPQHPAAHGVLRLILELDGEVVEKADPHIGLLHRGTEKLIENKTYMQAVPYFDRLDYVAPMNQEHAFALAIEKILKIEVPIRAQFIRVIFCEIGRILSHILNITTQALDVGALTPSLWGFEERETLMTFYERASGSRLHANYFRAGGVHQDLPRGLEDDISKFCESFPKIINDLESLLTDNRIFKQRNV

SEQ ID NO: 79533 - protein, 255 aa, Unknown
  Bacterial polypetide isolated from the Sargasso Sea
RCSVQAPTSGSVLLAAILLKMGGYGFIRFSIPMFYDASLYFQSFIFILSVIAIIYTSLVALVQTDMKKLIAYSSVAHMGFVTIGLFSLNQQGIDGAIFQMVSHGFISAALFLVVGVVYERTHTREIIAFGGLIRRMPNYAMVFMVLTLANVGLPGTSGFIGEFLSLVGVFQVKPLYAIFGALGVILSACYGLMLYKKVILGELIKENLKRINDISLREKFCLYPLVLLIIFFGIYPKPIIETYSATVSDYLQMLN

SEQ ID NO: 79534 - protein, 67 aa, Unknown
  Bacterial polypetide isolated from the Sargasso Sea
MLAEFLKDYLPIIIFLIIALGLSLAFVAINYIAAPSKPDPEKLSAYECGFEPFNDSRMEFDVRFYLV

SEQ ID NO: 79535 - protein, 145 aa, Unknown
  Bacterial polypetide isolated from the Sargasso Sea
TGLLIALREMFKTKKTINYPFEKGKISPRFRGEHALRRYPNGEERCIACKLCEAVCPAQAITIESAERSDGSRKTTRYDIDMMKCIYCGLCEESCPVDAIVQGPNFEFSTETREELYYTKEKLLDNGDRWENILAANIKSDNPYR

SEQ ID NO: 79536 - protein, 279 aa, Unknown
  Bacterial polypetide isolated from the Sargasso Sea
LSTESGLKYFVLSAFSSGLLLYGCSLTYGFSESTNFDQILINSTEFNYGTTFGIVFILVGLAFKISAVPFHMWAPDVYQGSPTSVTLFFAILPKIAALSVFIKFLYTPFANMNDQWQTIIVFISIASMIFGAVAAIGQKNLKRLIAYSSISHMGYALAGLATISNQGIQSSITYISIYLVMNLAFFSCLFMLKRNDQYYENIEDLSGLSKKHPILSFSLLIVLFSLAGIPPLAGFFAKFYVFLAVIEQSMYFLAIVGLLATVVAAFYYLRIIKIIYFDP

SEQ ID NO: 79537 - protein, 76 aa, Unknown
  Bacterial polypetide isolated from the Sargasso Sea
MKLNRLLKTVFLAEFVSALFIAIKEIFKGKKTINYPHEKGKISPRFRGEHALRRYPNGEERCIACKLCEAVCPAQA

SEQ ID NO: 79538 - protein, 76 aa, Unknown
  Bacterial polypetide isolated from the Sargasso Sea
MKISRLLKTIFMIDFVTGLLIATKETFKAKKTINYPFEKGSLGTRSRGEHALRRYPNGEERCIACKLCEAVCPAQA

SEQ ID NO: 79539 - protein, 85 aa, Unknown
  Bacterial polypetide isolated from the Sargasso Sea
MTKKIKNLNLNFGPQHPAAHGVLRLILELDGEIVEKADPHIGLLHRGTEKLIENKTYMQAVPYFDRLDYVAPMNQEHAFALAIEK

SEQ ID NO: 79540 - protein, 75 aa, Unknown
  Bacterial polypetide isolated from the Sargasso Sea
MKKIIFIIKQLLLIEILSGMALTLKYFFKKKVTINYPFEKGYLSPRFRGEHALRRYESGEERCIACKLCEAVCPA

SEQ ID NO: 79541 - protein, 172 aa, Unknown
  Bacterial polypetide isolated from the Sargasso Sea
MKKDNKTINLNFGPQHPAAHGVLRLILELDGEVVEKADPHIGLLHRGTEKLIEHKTYMQAVPYFDRLDYVAPMNQEHAFALAIEKILKIQVPLRAQYIRVIFCEIGRILSHILNVTTQAMDVGALTPTLWGFEERETLMGFYERVSGSRLHANYFRAGGVHQDLPTGLDKDI

SEQ ID NO: 79542 - protein, 162 aa, Unknown
  Bacterial polypetide isolated from the Sargasso Sea
MNFIIKNIKSFALYELFLGMFLTLKYMFKSKVTINYPHEKGPLSPRFRGEHALRRYPNGEERCIACKLCEAVCPAQAITIDAEPREDGSRRTTRYDIDMSKCIYCGLCQESCPVDAIVEGPNFEFATETREELMYNKEKLLSNGDKWEYEISKNLELDSPYR

SEQ ID NO: 79543 - protein, 200 aa, Unknown
  Bacterial polypetide isolated from the Sargasso Sea
TLLAAFWVLVISSNYLETFKIFKIEYPILILSSVLGMMIMISSNDLIVFYMGLELQSLALYVLATFNRDQLKSSEAGLKYFVLSALSSGLLLYGCSLIYGFTGSTNFNIISTQLNTDQYALTFGIVFILVGLAFKISAVPFHMWAPDVYEGSPTSVTLFFTMVPKVAALTVFIRFLYVPFLNLIDQWQMILIFLSLASML

SEQ ID NO: 79544 - protein, 280 aa, Unknown
  Bacterial polypetide isolated from the Sargasso Sea
MYNLNLVLPEIFVSLSIMFLLILGVFKKNSSQLTFNLSLLTFLITTIFTINETFSVERITLFNGSVVIDRMASLMKIITLIGGFLVLVISSSYLKTFKIFKIEYPILILSSVLGMMIMISSNDLMVFYMGLELQSLALYVLATFNRDQLKSSEAGLKYFVLSALSSGLLLYGCSLIYGFSGSTNFDVIANQLDSNEYALTFGIVFILVGLAFKISAVPFHMWAPDVYEGSPTTVTLFFTMVPKIAALTVFIRFLYIPFLNLLDQWQMIIVFLSIASMIFG

SEQ ID NO: 79545 - protein, 86 aa, Unknown
  Bacterial polypetide isolated from the Sargasso Sea
MIKYIKSFTLFELLQGMFLTLKYMLKAKVTINYPHEKGPLSPRFRGEHALRRYPSGEERCIACKLCEAVCPAQAITIEAEPREDGS

SEQ ID NO: 79546 - protein, 86 aa, Unknown
  Bacterial polypetide isolated from the Sargasso Sea
MKISRFFKTIFMVDFASGLFMAIKEVFKSKKTINYPFEKGKISPRFRGEHALRRYPNGEERCIACKLCEAVCPAQAITIESSERED

SEQ ID NO: 79547 - protein, 286 aa, Unknown
  Bacterial polypetide isolated from the Sargasso Sea
MFDQVYKILFLLVPVLVSVAMVVWLDRRVWAFVQKRQGPNVVGPFGLLQTIADALKYIFKEIIIPSSSNKVIFILAPIVTMTLALIAWAVIPFSATQVLADINVGILYLFAVSSLGVYGIIMGGWASNSKYPFLGAIRSAAQMVSYEVSIGVIIINVLLCVGSLNLNDIVLAQQNLWFVIPLFPMFVIFFISALAETNRPPFDLPEAEAELVAGYQTEYSGMMYAMFWLGEYANILLMCAMGAILFLGGWLSPLEIYPFTLVPGLVWLVLKILLLFLLFALVKAIV

SEQ ID NO: 79548 - protein, 161 aa, Unknown
  Bacterial polypetide isolated from the Sargasso Sea
MKISRLLKTMFMIDFVTGLLIAIKETFKTKKTINYPFEKGSLGTRSRGEHALRRYPNGEERCIACKLCEAVCPAQAITIESKERDDGSRKTVRYDIDMLKCIYCGLCEESCPVDAIVQGPNFEFATESREELYYTKEKLLENGDRWENILAANIKADSSHR

SEQ ID NO: 79549 - protein, 94 aa, Unknown
  Bacterial polypetide isolated from the Sargasso Sea
MGVDEAKKIVDDTLNTELSSKGFLVASYDKILTWARTGSLWPMTFGLACCGVEMIHSYMARYDLDRYGVIPRGSPRQSDVMIVAGTLTNKMAPA

SEQ ID NO: 79550 - protein, 107 aa, Unknown
  Bacterial polypetide isolated from the Sargasso Sea
MKISRLLKTILMIDFVSGLLIAIKETFKAKKTINYPFEKGSLGTRSRGEHALRRYPNGEERCIACKLCEAVCPAQAITIESKERDDGSRKTVRYDIDMLKCIYWWSL

SEQ ID NO: 79551 - protein, 90 aa, Unknown
  Bacterial polypetide isolated from the Sargasso Sea
MTKEKKTLNLNFGPQHPAAHGVLRLILELDGEVVEKADPHIGLLHRGTEKLIEHKTYSQAVPYFDRLDYVAPMNQEHAFALAVEKILNLE

SEQ ID NO: 79552 - protein, 91 aa, Unknown
  Bacterial polypetide isolated from the Sargasso Sea
MKFSRLLKTIFMIDFVTGLLIAIKETFKAKKTINYPFEKGSLGTRSRGEHALRRYPNGEERCIACKLCEAVCPAQAITIESKERDDGSRKQ

SEQ ID NO: 79553 - protein, 275 aa, Unknown
  Bacterial polypetide isolated from the Sargasso Sea
FKFEYPILILSSILGMLVMISSNDLIVFYLGLELQSLSLYVLASFRRDNLLSTESGLKYFVLSALSSGLLLYGCSLIYGFSGSTNFNEISESISNVQYGLTFGIVFILVGLAFKISAVPFHMWAPDVYQGSPSSVTIFFAILPKIAALTVFIRFLYIPFINLIDQWQMIIIFLSIASMLLGAVAAIGQKNLKRIIAYSSISHMGYALAGLTTVTNEGIQSSIIYISIYLVMNLALFSCMFMIRRNENYFENIDDLSGLSKNHPVLSLSLLIILFS

SEQ ID NO: 79554 - protein, 242 aa, Unknown
  Bacterial polypetide isolated from the Sargasso Sea
MTKKSKTLNLNFGPQHPAAHGVLRLILELDGEIVEKADPHIGLLHRGTEKLIENKTYMQAVPYFDRLDYVAPMNQEHAFALAIEKILKIEVPIRAQFIRVIFCEIGRILSHILNVTTQALDVGALTPSLWGFEERETLMTFYERASGSRLHANYFRTGGVHQDLPGDLEKDIAKFCNHFPKVIDDLETLLTDNRIFKQRNVDIGIVSKEDALDYSFSGVMLRGSGIPWDLRKSQPYECYDEL

SEQ ID NO: 79555 - protein, 256 aa, Unknown
  Bacterial polypetide isolated from the Sargasso Sea
VPFHMWAPDVYEGSPTTVTLFFTIVPKIAALTVFIRFLYVPFLNLIDQWQMIIIFLSIASMVFGAVAAIGQTNIKRLIAYSSIGHIGYTLAGLATASNDGIQSSIIYISIYVVMNLALFSCLLMLRRKDQYYEDIEDLSGLSKNHPLLSLCLLVILFSLAGIPPLAGFFAKFYIFKAVVEQSMFFLAIVGLLSTVVAAFYYLRIIKIIYFDKEKDKYDTDHSLWLKFSLTVSTILILLYFIFPSQLIEVVSRINII

SEQ ID NO: 79556 - protein, 287 aa, Unknown
  Bacterial polypetide isolated from the Sargasso Sea
MAKEKKTLNLNFGPQHPAAHGVLRLILELDGEVVEHADPHIGLLHRGTEKLIENKTYLQALPYFDRLDYVAPMNQEHAFALAVEKILNIEVPIRAQFIRVMFCEIGRILSHILNITTQALDVGALTPSLWGFEERETLMTFYERVSGSRLHANYFRTGGVHQDLPRGLSDDIALFCQNFPKVINDLETLLTDNRIFKQRNVDIGIVSKQDALEYSFSGVMLRGSGIPWDLRKSQPYECYDQLDFKIPIGKNGDCYDRYLCRIEEMKESVDIINPMLSKNAKWPYKIT

SEQ ID NO: 79557 - protein, 161 aa, Unknown
  Bacterial polypetide isolated from the Sargasso Sea
MTLSRIFKTIFLVEFIKGLLMAIKEMFKKSKTVNYPFEKGPISPRMRGEHALRRYPNGEERCIACKLCEAVCPAQAITIESAERADGSRKTTRYDIDMLKCIYCGLCQESCPVEAIVQGPNFEFATETREELYYNKEKLLDNGDRWESVLAKNIKLDKPYR

SEQ ID NO: 79558 - protein, 250 aa, Unknown
  Bacterial polypetide isolated from the Sargasso Sea
MTKKIKNLNLNFGPQHPAAHGVLRLILELDGEVVEKADPHIGLLHRGTEKLIENKTYMQAVPYFDRLDYVAPMNQEHAFALAIEKILGIDVPIRAQYIRVMFCEIGRILSHILNVTTQALDVGALTPSLWGFEERETLMTFYERASGSRLHANYFRAGGVHQDLPVGLEKDIAKFCETFPKVINDLENLLTDNRIFKQRNVDIGIVTKEDALDYSFSGVMIRGSGVPWDLRKSQPYDCYDQLEFKIPMAR

SEQ ID NO: 79559 - protein, 120 aa, Unknown
  Bacterial polypetide isolated from the Sargasso Sea
MFSIIKFFKSFVLFELFLGMYLTLKYMFKRKVTINYPHEKGPLSPRFRGEHALRRYPNGEERCIACKLCEAVCPAQAITIEAEPRIDGSRRTTKYDIDMTKCIYCGLCEESCPVDAIVEG

SEQ ID NO: 79560 - protein, 231 aa, Unknown
  Bacterial polypetide isolated from the Sargasso Sea
MFLLVPLLVFVAMVVWLDRRVWAFVQKRRGPNVVGPFGLFQSLADALKYIFKEIIIPASSNKVIFVLAPIVTMTLALTAWAVIPFGENQVLANINVGILYLFAVSSLGVYGIIMGGWASNSKYPFLGSIRSAAQMISYEVSIGVIIINVLLCVGSLNLKDIVLAQQNIWFIIPLFPMFVIFFISALAETNRPPFDLPEAEAELVAGYQTEYSGMMYAMFRLGEYANILLMC

SEQ ID NO: 79561 - protein, 220 aa, Unknown
  Bacterial polypetide isolated from the Sargasso Sea
MKEVELNTTTINFGPQHPAAHGVLRLVVELEGEVVQRAEPHIGLLHRGTEKLIEYKTYLQAVPYFDRLDYVSPMCQEHAFALATENLLGIDVPERAKYVRVIFAEITRILNHLLNIPAYAADIGAVTPFLWCFEEREKLLEFHEAVSGARFHAAYFRPGGVHQDMPEGMEEKLFEHFKTLPKFIDDLESLLTNNRILRQRSVDIGIISKSEAIEWGCSGP

SEQ ID NO: 79562 - protein, 325 aa, Unknown
  Bacterial polypetide isolated from the Sargasso Sea
YNRDQLKSSEAGLKYFVLSALSSGLLLYGCSLVYGFSGSTNFDVISNQLNSNEYVLTFGIVFILVGLAFKISAVPFHMWAPDVYEGSPTTVTLFFTIVPKIAALTVFIRFLYVPFLNLIDQWQMIIVFLSIASMVFGAVAAIGQTNIKRLIAYSSIGHVGYTLAGLATASNEGIQSSIIYISIYVIMNLAIFSCLLMLKRKDQYYEDIEDLSGLSKNHPLLSICLLIILFSLAGIPPLAGFFAKFYVFKAVLEQSMYFLAIVGLLSTVVAAFYYLRIIKIIYFDKEKEKYDSDHSLWLKFSLTVSTILILLYFIFPSQLIESCIK

SEQ ID NO: 79563 - protein, 90 aa, Unknown
  Bacterial polypetide isolated from the Sargasso Sea
MKFSRIIKTIFLVEFIRALIIAIKEIFKPKKTINYPFEKGKISPRFRGEHALRRYPNGEERCIACKLCEAVCPAQAITIESTERNDGSRK

SEQ ID NO: 79564 - protein, 285 aa, Unknown
  Bacterial polypetide isolated from the Sargasso Sea
MIEYLIILLSEIYKISILLIPVLTAVAMIVWLDRRVWAFVQKRRGPNVVGPFGLFQSLADALKYLFKEIIIPASSNKIIFILAPIVTMTLALVAWAVIPFSETFVIADINVGILYLFAVSSLGVYGIIMGGWASNSKYPFLGSIRSAAQMVSYEVSIGIIIINVLLCVGSLNLSDIVKAQQNLWFIIPLFPMFVIFFISALAETNRPPFDLPEAEAELVAGYQTEYSGMMYAMFWLGEYANILLMCAMGSILFLGGWLSPIDLFPFNIIPGSLWMIFKILFLFIL

SEQ ID NO: 79565 - protein, 70 aa, Unknown
  Bacterial polypetide isolated from the Sargasso Sea
MILKSHAARTVLLSELWFGMYVTFKAMFKRRVTLNYPYEKGYLSPRFRGEHALRRYANGEERCIACKLCE

SEQ ID NO: 79566 - protein, 72 aa, Unknown
  Bacterial polypetide isolated from the Sargasso Sea
FTINAGPRYVISMGSCANGGGYYHYSYSVVRGCDRIIPVDVYVPGCPPSAEALLYGILQLQKKIRREGNLER

SEQ ID NO: 79567 - protein, 135 aa, Unknown
  Bacterial polypetide isolated from the Sargasso Sea
MFLVSVFLPLLSFLVCIFFQDSLSKKHLNFFSCLMMIIATIFSFFSLILVKINGESAIILSRWIDSGNLSLDWSLQLNLLTTSMVLMVNLVSTLIHIYSVGYMEKDPKKILFMAYLSLFTFFMLFLVTSSNLLQL

SEQ ID NO: 79568 - protein, 185 aa, Unknown
  Bacterial polypetide isolated from the Sargasso Sea
MSETEIKPITMNFGPQHPAAHGVLRLVFEMDGEIIKRADPHIGLLHRGTEKLIENKTYLQALPYFDRLDYVSPMNQEHAWSLAVEKVLGIKVPERGQYIRVLFCEIGRILNHILNLTAFAIDVGAMTPLLWGFEEREIMLGFYERASGARFHAAYFRPGGVHQDIPEDLLDDIHKWLKNFPNFIN

SEQ ID NO: 79569 - protein, 56 aa, Unknown
  Bacterial polypetide isolated from the Sargasso Sea
MNIDNRYDKIPNEFKQLAKDFSKNGFITTSLDNLINWSRAGSLHWMTFGLACCAVK

SEQ ID NO: 79570 - protein, 275 aa, Unknown
  Bacterial polypetide isolated from the Sargasso Sea
MENLNLVLPEIFISLSIMFLLVLGVFKKDSSKITFNLSLFAILITATITINETFSVSRETLFNESVVIDSMSSLMKIITLIGGFLVLVISSSYLKTFKIYNIEYPVLILSSILGMMVMISSNDLIVFYMGLELQSLALYVLATYNRDQLKSSEAGLKYFVLSALSSGLLLYGCSLVYGFSGSTNFDIISNQLNSNEYVLTFGIVFILVGLAFKISAVPFHMWAPDVYEGSPTTVTLFFTIVPKIAALTVFIRFLYVPFLNLIDQWQMIIIFLSIA

SEQ ID NO: 79571 - protein, 143 aa, Unknown
  Bacterial polypetide isolated from the Sargasso Sea
MIIALKELFKSKKTINYPFEKGKISPRFRGEHALRRYPNGEERCIACKLCEAVCPAQAITIESSQREDGSRKTTRYDIDMMKCIYCGLCEESCPVDAIVQGPNFEFSTETREELYYTKEKLLDNGDRWENVLAANIKADNPYR

SEQ ID NO: 79572 - protein, 61 aa, Unknown
  Bacterial polypetide isolated from the Sargasso Sea
MLAEFLKDYLPIILFLIIALGLSLAFVAINYIAAPSKPDPEKLSAYECGFEPFNDSRMEFD

SEQ ID NO: 79573 - protein, 154 aa, Unknown
  Bacterial polypetide isolated from the Sargasso Sea
MNFPILSSLILLPIVGALFLFFTKDKEGNNLTAKYVALFTTVVNFLISIYLWISFDQSTSSFQFVEDRTWIEGFINYKVGVDGISILFIILTTFITPLCIISVNNSVKNRLRDFLIAILIMESFMIGVFCALDLVVFYLFFEAGLIPMFLIIGI

SEQ ID NO: 79574 - protein, 308 aa, Unknown
  Bacterial polypetide isolated from the Sargasso Sea
VLSALSSGLLLYGCSLTYGFSESTNFDQILINSREFNYGTTFGIVFILVGLAFKISAVPFHMWAPDVYQGSPTSVTLFFAILPKIAALSVFIKFLYTPFANMNDQWQTIIVFISIASMIFGAVAAIGQKNLKRLIAYSSISHMGYALAGLATVSNQGIQSSITYISIYLVMNLAFFSCLFMLKRNEKYYENIDDLSGLSKKHPILSFSLLIVLFSLAGIPPLAGFFAKFYVFLAVIEQSMYFLAIVGLLATVVAAFYYLRIIKIIYFDPEKEEYETSHNLGLKITLAISTIFILAYFIYPSGITEIVS

SEQ ID NO: 79575 - protein, 151 aa, Unknown
  Bacterial polypetide isolated from the Sargasso Sea
MSENFKPVTLNFGPQHPAAHGVLRLLVQLEGEVVNKAEPHIGLLHRGTEKLIEQKTYTQAIPYFDRLDYVSPMCQEHAFALAVENLLNIEAPKRAQYIRVMFAEVTRILNHLLNIPAFAMDIGAATPMLWAFEEREKNVGVPRSCIWCKIS

SEQ ID NO: 79576 - protein, 190 aa, Unknown
  Bacterial polypetide isolated from the Sargasso Sea
HTWLPDAHGEATAPVHMLLAGILLKMGGYALLRFNAQLLPVAHAQFAPLLIVLGVVNIIYAALTSFAQRNLKRKIAYSSISHMGFVLIGIGSFSSLGTSGAMLQMVSHGLIGASLFFLVGATYDRTKTLKLDEMSGVGQKMRIMFALWTACSLASLALPGMSGFVSELMVFTGFVTDEVYTLPFRIIMAS

SEQ ID NO: 79577 - protein, 254 aa, Unknown
  Bacterial polypetide isolated from the Sargasso Sea
YALLCIMVFGMFLMASAIDLITVYLSIEVVSLMSFILAGYLKNDPRSNEASLKYVIYGAFSSGIMLYGLSIIFGLTGTTKFFAIRDAIATLDSSSNLALTLSTIFVLAGFGYKISAVPFHFWTPDVYEGSPTPITAYLSVAPKAAGFALMIRFFNQVLIESDSLSTIGWYADVSFAWPGLLGVISVVTMTMGNLVAIQQNSVKRMLAYSSIAHAGYMLMVFPTISSEGVFAVMIYLVMYLFMNLGAFFCPDICS

SEQ ID NO: 79578 - protein, 161 aa, Unknown
  Bacterial polypetide isolated from the Sargasso Sea
MNFSRLLKTIFLVEFISGLYVAVRELFRKSKTINYPFEKGRISPRMRGEHALRRYPNGEERCIACKLCEAVCPAQAITIESSERSDGSRKTTRYDIDMLKCIYCGLCQESCPVDAIVQGPNFEFATETREELYYNKEKLLDNGDRWESVIAKNIKLDKPYR

SEQ ID NO: 79579 - protein, 295 aa, Unknown
  Bacterial polypetide isolated from the Sargasso Sea
ETISVSEEKLFNNSVIIDYLSSFMKIITLLAAFLVLIISSAYLRTLKIFKIEYPILILSSVLGMMIMISSNDLIVFYMALELQSLALYVLATFNRDNIKSSEAGLKYFVLSALSSGLLLYGCSLIYGFTGSTNFNVIAAQLNSNEYALTFGIVFILVGLAFKISAVPFHMWAPDVYEGSPTSVTLFFTMVPKIAALSVFIRFLYVPFLNLIEQWQMILIFLSIASMLFGAVAAIGQTNLKRLVAYSSIGHVGYALAGLATGTSDGIQSSVIYITIYILMNLGLFSCLLMMKRNNE

SEQ ID NO: 79580 - protein, 276 aa, Unknown
  Bacterial polypetide isolated from the Sargasso Sea
MDSYFSILFTEVYKILFLLVPVLVSVAMIVWLDRRVWAFVQKRRGPNVVGPFGLFQSLADALKYIFKEIIIPASSNKLVFVLAPVVTMTLALISWAVIPFGEDFVLADINVGILYLFAVSSLGVYGIIMGGWASNSKYPFLGAIRSAAQMVSYEVSIGVIIINVLLCVGSLNLSDIVMAQQNLWFVIPLFPMFVIFFISALAETNRPPFDLPEAEAELVAGYQTEYSGMMYAMFWLGEYANILLMCAMGAVLFLGGWLSPNRYLPHLMLFPGPILV

SEQ ID NO: 79581 - protein, 300 aa, Unknown
  Bacterial polypetide isolated from the Sargasso Sea
QLGYMMLAMGCGAPVAGIFHLVTHACFKAMLFLGSGSVIHAMEEVVGHQPVLAQDMRLMGGLRKKMPYTATTFLIGCVAISGIPPLAGFWSKDEILGNAFISFPAFWFVGLLTAGMTAFYMFRLYFLTFEGDFRGENKELQKELLVASKTNLDDENEEEHEEHGFIHESPWSMTFPLVFLAVPSVIIGFMGLPWDSKIANLLDPEEAETAAKAFELKEFLPLALASVLIASAGIIIAYQAYFVKKINLSVLFAEKFPSINRFLSNKWYLDDINEKLFVKGSRKLAKEVLEVDSKVVDGVV

SEQ ID NO: 79582 - protein, 249 aa, Unknown
  Bacterial polypetide isolated from the Sargasso Sea
CFTGFHYSLGFYSKDAIIEFAYLKGNTLGYYAASIGIFTALLTSIYSWRLFFKTFHGDFNNQTISIDKIHESPMVITIPLVILAVGSLLTGYFFKDLFISHEESYKFWNSSIFFLEQLSKDHPPKWFLFLTPSLVVLSIPLAYFLFVKRKDLLINIVEGNQPLYNFLKNKWYFDEVYEYIFVRSLKKIGIYFWKKIDGLIIDRFGPDGISNVIKTLSNKAVKFQSGYIYQYAFIMLVGFSALLTYLIIK

SEQ ID NO: 79583 - protein, 144 aa, Unknown
  Bacterial polypetide isolated from the Sargasso Sea
MTKKIKNLNLNFGPQHPAAHGVLRLILELDGEVVEKADPHIGLLHRGTEKLIENKTYMQAVPYFDRLDYVAPMNQEHAFALAVEKILKIDVPIRAQYIRVMFCEIGRILSHILNVTTQALDVGALTPSLWGFEERETLMTFYER

SEQ ID NO: 79584 - protein, 87 aa, Unknown
  Bacterial polypetide isolated from the Sargasso Sea
MTKTENYTLNFGPQHPAAHGVLRLVLELDGEIVERADPHIGLLHRGTEKLIENKTYIQALPYFDRLDYVFAMCQEHAYALAIENYTK

SEQ ID NO: 79585 - protein, 59 aa, Unknown
  Bacterial polypetide isolated from the Sargasso Sea
MAKQRKKLNLNFGPQHPAAHGVLRLILELDGEVVEKADPHIGLLHRGTEKLIEYKTYSQ

SEQ ID NO: 79586 - protein, 83 aa, Unknown
  Bacterial polypetide isolated from the Sargasso Sea
LFLGGWLPPVDSEIFAFIPSPFWLIFKILFLFILFALIKAIVPRYRYDQLMKLGWKIFLPFSLIWVILTAGYLLYFNMLPGQI

SEQ ID NO: 79587 - protein, 143 aa, Unknown
  Bacterial polypetide isolated from the Sargasso Sea
MVKEKKTINLNFGPQHPAAHGVLRLILELDGEVVEHADPHIGLLHRGTEKLIENKTYLQALPYFDRLDYVAPMNQEHAFALAVEKILNIEVPIRAQFIRVIFCEIGRILSHILNITTQALDVGALTPSLWGFEERETLMTFYE

SEQ ID NO: 79588 - protein, 119 aa, Unknown
  Bacterial polypetide isolated from the Sargasso Sea
MVKKTKSLSLNFGPQHPAAHGVLRLILELDGEVVEKADPHIGLLHRGTEKLIEQKTYTQALPYFDRLDYVAPMNQEHAFALAAEKLLNVEVPIRAKYIRVIFCEIGRILSHILNVTTQA

SEQ ID NO: 79589 - protein, 208 aa, Unknown
  Bacterial polypetide isolated from the Sargasso Sea
MTKQSKTLNLNFGPQHPAAHGVLRLILELDGEVVEKADPHIGLLHRGTEKLIESKTYIQAIPYFDRLDYVAPMNQEHAFALAIEKILKIEVPIRAQFIRVMFCEIGRILSHILNITTHALDVGALTPSLWGFEERETLMTFYERVSGSRLHANYFRAGGVHQDLPRGLDDDISKFANKFPKIIDDLETLLTDNRIFKQRNVDIGVVTK

SEQ ID NO: 79590 - protein, 286 aa, Unknown
  Bacterial polypetide isolated from the Sargasso Sea
MTKKIKNLNLNFGPQHPAAHGVLRLILELDGEVVEKADPHIGLLHRGTEKLIENKTYMQAVPYFDRLDYVAPMNQEHAFALAVEKILKIDVPIRAQFIRVIFCEIGRILSHILNVTTQAMDVGALTPTLWGFEEREKLMGFYERVSGSRLHANYFRAGGVHQDLPQGLEEDIAEFCESFPKIINDLESLLTDNRIFKQRNVDIGVVTKQDALDYSFSGVMIRGSGVPWDLRKSQPYDCYENLDFKVPVGKNGDCYDRYLCRIEEMKESVSIIKQCLLKMEKGPIKS

SEQ ID NO: 79591 - protein, 201 aa, Unknown
  Bacterial polypetide isolated from the Sargasso Sea
MISILVVIVPLFLIVAYVTYSERKIIGFMQSRMGPMRVGPSGLLQPIADVLKLVSKEIIIPSNANKGIFLTAPMLMLIPSLLVWSVIPLSEYFIISNINAGLLFILALTSLSVYGVILAGWASNSKYAFLGSMRSAAQIIAYEIAMGFALVGVLMLSGSLNLQNIIYAQSGSLFNWYWLPLFPLFLIYFIAGVAETNRAPF

SEQ ID NO: 79592 - protein, 118 aa, Unknown
  Bacterial polypetide isolated from the Sargasso Sea
MKLGRLLKTIFMLDFVKGLLIAIKEVFKSKKTINYPFEKGQVSPRARGEHALRRYPNGEERCIACKLCEAVCPAQAITIESSEREDGSRKTTRYDIDMLKCIYCGLCEESCPVDAIVQ

SEQ ID NO: 79593 - protein, 245 aa, Unknown
  Bacterial polypetide isolated from the Sargasso Sea
MAKETKKLNLNFGPQHPAAHGVLRLILELDGEVVEKADPHIGLLHRGTEKLIEYKTYAQAVPYFDRLDYVAPMNQEHAFALAIEKILKINVPIRAQFIRVIFCEIGRILSHLLNVTTQAMDVGALTPTLWGFEERETLMGFYERVSGSRLHANYFRAGGVHQDLPRGLEEDILKFCKKFPKIIDDLETLLTDNRIFKQRNVDIGVVSKQDALDYSFSGVMLRGSGISWDLRKSQSYECYDQLEFD

SEQ ID NO: 79594 - protein, 242 aa, Unknown
  Bacterial polypetide isolated from the Sargasso Sea
YGFIRFSVGMFPIASEYFTPLIFSLSVIAIIYTSLVALMQDDMKKLIAYSSIAHMGFVTLGIFTFNKQGIEGSIVQMFSHGLISAALFLCVGVLYDRTHSRLIKSYGGIVHVLPKYSFLFMVFVLATLGLPGTSGFVGEFLILVGAFKVNIVVAIMASIGVILAAAYILWLYKRVVFGKLDNVHLKKIKDVNFNEGSVLLILGIVILFFGFYPEPLFETVSVSVNNLINNYNLEIGKNTVLH

SEQ ID NO: 79595 - protein, 310 aa, Unknown
  Bacterial polypetide isolated from the Sargasso Sea
DLIVFYIGLELQSLALYVLASFNRDNVLSSESGLKYFVLSALSSGLLLYGCSLVYGFSSSTNFSQISFNYDQSTQGIIFGMVFILVGLAFKISAVPFHMWAPDVYQGSPTSVTLFFAILPKIAALTVFIRFLYTPFVNLIDQWQAIIIFLSIASMLFGAVAAIGQKNLKRLIAYSSISHMGYALAGLTTGTNEGIQSSVSYISIYLVMNLAFFSCIFMLKREDKYYESIDDLSGLSKNHPLLSFSLLIVLFSLAGIPPLAGFFAKFYVFMAVIEQSMFFLAIVGLLATVVAALYYLRIIKVIYFDNEVEK

SEQ ID NO: 79596 - protein, 294 aa, Unknown
  Bacterial polypetide isolated from the Sargasso Sea
KIMSKQTKTLNLNFGPQHPAAHGVLRLILELDGEIVEKADPHIGLLHRGTEKLIENKTYSQAIPYFDRLDYVAPMNQEHAFALAIEKILDIEVPIRGQYIRVIFCEIGRILSHILNITTQALDVGALTPSLWGFEEREKLMEFYERVSGSRLHANYFRPGGVHQDLPRGLDTDILKFCNEFPKIIDDLETLLTDNRIFKQRNVDIGIVSRDDALDYSFSGVMMRGSGVPWDLRKSQPYDCYEQLSFKVPVGKNGDCYDRYLCRVEEMRESVKIIKQCLEQLPKGPVKSQDNKIL

SEQ ID NO: 79597 - protein, 304 aa, Unknown
  Bacterial polypetide isolated from the Sargasso Sea
MPKETKTLNLNFGPQHPAAHGVLRLILELDGEVVEKADPHIGLLHRGTEKLIENKTYMQAVPYFDRLDYVAPMNQEHAFALAIEKILKIEVPIRAQFIRVMFCEIGRILSHILNVTTQALDVGALTPSLWGFEERETLMTFYERASGSRLHANYFRAGGIHQDLPAGLEKDILNFCESFPKIINDLENLLTDNRIFKQRNVDIGIVSKDDALNYSFSGVMLRGSGIPWDLRKSQPYDCYEQIEFKIPIGKNGDCYDRYLCRIEEMRESVSIIKQCLSMMPKGPIKSLDGKNTPPSKKEIKESME

SEQ ID NO: 79598 - protein, 120 aa, Unknown
  Bacterial polypetide isolated from the Sargasso Sea
ISPRFRGEHALRRYPNGEERCIACKLCEAVCPAQAITIESTEREDGSRKTTRYDIDMMKCIYCGLCEESCPVDAIVQGPNFEFSTETREELYYTKEKLLDNGDRWENVLEANIKADNIHR

SEQ ID NO: 79599 - protein, 272 aa, Unknown
  Bacterial polypetide isolated from the Sargasso Sea
MIFLNFIYSEIFICLAIMILLIIGVFKKNSSYLIYNLSILSLFVCLALIFNFPINENVELFNNSYKIDYLSSFMKILLILSGIFVLLSSSKYIQIIKINKIEYPILVLSSITGMMVMISSNDLILFYMGLELQSLALYVLSSFNRDNILSSESGLKYFVLSALSSGLLLYGCSLIYGFSGSTNFNIIAENINQDSYGLTFGIIFIITGLAFKISAVPFHMWAPDVYEGSPTSVTIFFAILPKIAALTVFIRILYVPFFNIIDQWQTIIVFLS

SEQ ID NO: 79600 - protein, 172 aa, Unknown
  Bacterial polypetide isolated from the Sargasso Sea
MNLNFGPQHPAAHGVLRLILELDGEVVEKIDPHIGLLHRGTEKLIEHKTYMQAVPYFDRLDYVAPMNQEHAFALGIEKLLNIEVPIRGQYIRVLFCEIGRILSHLLNITTQALDVGALTPSLWGFEERETLMTFYERVSGSRLHANYFRAGGVHQDLPRGLSEDILHFCNTF

SEQ ID NO: 79601 - protein, 81 aa, Unknown
  Bacterial polypetide isolated from the Sargasso Sea
MTKKTKTLNLNFGPQHPAAHGVLRLILELDGEVIEKADPHIGLLHRGTEKLIENKTYMQAVPYFDRLDYVAPMNQEHAFAL

SEQ ID NO: 79602 - protein, 76 aa, Unknown
  Bacterial polypetide isolated from the Sargasso Sea
MTKKIKNLNLNFGPQHPAAHGVLRLILELDGEVVEKADPHIGLLHRGTEKLIENKTYMQAVPYFDRLDYVAPMNPG

SEQ ID NO: 79603 - protein, 116 aa, Unknown
  Bacterial polypetide isolated from the Sargasso Sea
MKISRFLKTILMIDFLTGLILAVKETFKSKKTINYPFEKGSIGARARGEHALRRYPNGEERCIACKLCEAVCPAQAITIESKERNDGSRKTTRYDIDMLKCIYCGLCEESCPVDAI

SEQ ID NO: 79604 - protein, 311 aa, Unknown
  Bacterial polypetide isolated from the Sargasso Sea
LLVLGVFKNNSSKIIFYFSCLIILVSLAINLNINITQTIFLFNNSYLVDQLSLFIKSIIMISAFFVMLCSYNYVRINNILKIEYPILILCSLLGMLVMISSNDLIVFYIGLELQSLALYVLASFNRDNILSSESGLKYFVLSALSSGLLLYGCSLIYGFSNSTNFNEISQNFNFEYGVIFGMVFVIVGLAFKISAVPFHMWAPDVYQGSPTSVTVLFAILPKIAALTVFIKFLYGPFINLFEEWQAIIIFLSIASMILGAVAAIGQKNLKRLIAYSSISHMGYALAGLTTGTNQGIQSSIIYLIIYLIMNL

SEQ ID NO: 79605 - protein, 161 aa, Unknown
  Bacterial polypetide isolated from the Sargasso Sea
MNFSRLLKTIFLVEFISGLYIAVKELFRKSKTINYPFEKGPISPRMRGEHALRRYPNGEERCIACKLCEAVCPAQAITIESSERSDGSRKTTRYDIDMLKCIYCGLCQESCPVDAIVQGPNFEFATETREELYYNKDKLLENGDRWESVLAKNIKLDKPYR

SEQ ID NO: 79606 - protein, 84 aa, Unknown
  Bacterial polypetide isolated from the Sargasso Sea
MNFFRIIKTIFLLDFLKALLMAIKEIFKSKKTINYPFEKGKISPRFRGEHALRRYPNGEERCIACKLCETVCPAQAITIESYER

SEQ ID NO: 79607 - protein, 161 aa, Unknown
  Bacterial polypetide isolated from the Sargasso Sea
MNFIRLFKTIFLVEFVKGLYMAIKELFRKSKTINYPFEKGPISPRMRGEHALRRYPNGEERCIACKLCEAVCPAQAITIESAERSDGSRKTTRYDIDMLKCIYCGLCQESCPVDAIVQGPNFEFATETREELYYNKEKLLDNGDRWESVLAKNIKLDKPYR

SEQ ID NO: 79608 - protein, 244 aa, Unknown
  Bacterial polypetide isolated from the Sargasso Sea
MIFNDSYKIDYLSNFVKILIIISTIFVLLTSSQYLKSIKIFKVEYPILILSSILGMMVMVSSNDLIVFYIGLELQSLALYVLASFNRDNILSSESGLKYFVLSALSSGLLLYGCSLVYGFSSSTNFSQIGINYDQSTQGITFGMVFILVGLAFKISAVPFHMWAPDVYQGSPTSVTLFFAILPKIAALTVFIRFLYSPFLELIDQWQSIIIFLSIASMLFGAVAAIGQKNLKRLAAYSSISHMG

SEQ ID NO: 79609 - protein, 242 aa, Unknown
  Bacterial polypetide isolated from the Sargasso Sea
MEYLSTIFNEVYKILFLLVPVLVSVAMIVWLDRRVWAFVQKRQGPNVVGPFGLLQSLADALKYIFKEIIIPASSNKVIFILAPIITMTLALIAWAVIPFGEDQVLANINVGILYIFAVSSLGVYGIIMGGWASNSKYPFLGAIRSAAQMVSYEVSIGIIIINVLLCVGSLNLSEIVLAQKEMWFVIPLFPMFVIFFISSLAETNRPPFDLPEAEAELVAGYQTEYSGMMYAMFWFGDMRIFC

SEQ ID NO: 79610 - protein, 242 aa, Unknown
  Bacterial polypetide isolated from the Sargasso Sea
MYNLNLLFPEIFVSLSVMFLLILGVFKKNSSQLTFNLSLLTFLIATIFAVNETFSVERITLFNGSIVIDHLASLMKIITLIGGFLVLVISSSYLKTFKIFKIEYPILILSSVLGMMIMISSNDLMVFYMGLELQSLALYVLATFNRDQLKSSEAGLKYFVLSALSSGLLLYGCSLIYGFSGSTNFDVIANQLSSNEYTLTFGIVFILVGLAFKISAVPFHMWAPDVYEGSPTTVTLFFTMVP

SEQ ID NO: 79611 - protein, 134 aa, Unknown
  Bacterial polypetide isolated from the Sargasso Sea
KKSKTINYPFEKGPISPRMRGEHALRRYPSGEERCIACKLCEAVCPAQAITIESTERPDGSRKTTRYDIDMLKCIYCGLCQESCPVDAIVQGPNFEFATETREELYYNKQKLLDNGDRWESVLSKNIKLDKPYR

SEQ ID NO: 79612 - protein, 284 aa, Unknown
  Bacterial polypetide isolated from the Sargasso Sea
MDSYFLILFTEIYKILFLLVPVLVSVAMIVWLDRRVWAFVQKRRGPNVVGPFGLFQSLADALKYIFKEVIIPASSNKLVFVLAPVVTMTLALISWAVIPFSEDFVLADINVGILYLFAVSSLGVYGIIMGGWASNSKYPFLGAIRSAAQMVSYEVSIGVIIINVLLCVGSLNLSDIVMAQQNLWFVIPLFPMFVIFFISALAETNRPPFDLPEAEAELVAGYQTEYSGMMYAMFWLGEYANILLMCAMGAVLFLGGWLSPIDIFPFNAIPGPFWLYLKYYFYLF

SEQ ID NO: 79613 - protein, 117 aa, Unknown
  Bacterial polypetide isolated from the Sargasso Sea
RARGEHALRRYPNGEERCIACKLCEAVCPAQAITIESTEREDGSRKTVRYDIDMLKCIYCGLCEESCPVDAIVQGPNFEFATETREELYYNKEKLLENGDRWENILAANIKADNPYR

SEQ ID NO: 79614 - protein, 121 aa, Unknown
  Bacterial polypetide isolated from the Sargasso Sea
MTESNLTLNFGPQHPAAHGVLRLIMEMDGEVITNLDPHIGLLHRGTEKLAEIKPFNHSIGYMDRMDYVSMMCCEHPYVLAIESLLEIEPPKRAQYIRVMYDEITRIMNHLLWLGCHGLDIG

SEQ ID NO: 79615 - protein, 52 aa, Unknown
  Bacterial polypetide isolated from the Sargasso Sea
GYYHYSYSVVRGCDRIVPVDVYVPGCPPSAEALLYGIMQLQKKIRNKGSLER

SEQ ID NO: 79616 - protein, 245 aa, Unknown
  Bacterial polypetide isolated from the Sargasso Sea
CYYAPIIDEQGNMINDPIILKLDENKWWISLADSDVGLYAKGLASGLKLQADVSEPDVNILAVQGPKSFKLMEKVLGKKITELKFFGFDYFNFKGNKFFIARSGWSKQGGYEIYVENRKAGLDLYDELFSVGKEFNVKPGCPNLIERIENGLLSCGNDFDNYDNPYECGFDKYIDLNSGVDYLGKKALIQVSKEGIKKKLMGVKIDLDKIEMMQERPLLNGKSLVGYLRSAVYSPHFKKVVGIAM

SEQ ID NO: 79617 - protein, 119 aa, Unknown
  Bacterial polypetide isolated from the Sargasso Sea
MKITRFFKTILMTDFISGLFIAIKELFKPKKTINYPFEKGKISPRYRGEHALRRYPNGEERCIACKLCEAVCPAQAITIESTERSDGSRKTTRYDIDMMKCIYCGLCEESCPVDAIVQG

SEQ ID NO: 79618 - protein, 161 aa, Unknown
  Bacterial polypetide isolated from the Sargasso Sea
MKLGRLLKTIFMVDFITGLLIAIKEIFKSKKTINYPFEKGQVSSRARGEHALRRYPNGEERCIACKLCEAVCPAQAITIESAEREDGSRKTTRYDIDMLKCIYCGLCEESCPVDAIVQGPNFEFATETREELYYNKEKLLENGDRWENILAANIKADNPYR

SEQ ID NO: 79619 - protein, 282 aa, Unknown
  Bacterial polypetide isolated from the Sargasso Sea
MKKIPIIKNRRVRSTPFTSRIENQGVSAYSVYNHMLLPVSFGSIEDEYLHLKEHVQVWDVSVQREVEISGEDADKLVQYMTCRDLSNAKLGKCYYSPLIDGNGNLVNDPLIFKLDEKKWRLCIADSDVLFFAKGLASGKNFNVNIYEANVDTIAVQGPKSQSLMQKVFGDEIKELKFFNYKYYNFKGTKHLISKTGYSKQGGYEIHIENTNSGLELYDYFFKIGKEFKLKPGAPNAIERIEGGLLSYGNDIDNRDNPYECGFDKYVNLDTDMVFLGKDKLKE

SEQ ID NO: 79620 - protein, 287 aa, Unknown
  Bacterial polypetide isolated from the Sargasso Sea
MLLFFLTWELELIPVYLLLAIWGGKNRQYAATKFIIYTAGSSIFILIAALAMGFYGTEIPNFEFSHLAAQDFSQKFQILCYVGLLIAFGVKLPIVPLHTWLPDAHGEATAPVHMLLAGILLKMGGYALLRFNAQLLPVAHAQFAPLLIVLGVVNIIYAALTSFAQRNLKRKIAYSSISHMGFVLIGIGSFSSLGTSGAMLQMVSHGLIGASLFFLVGATYDRTKTLKLDEMSGVGQKMRIMFALWTACCLASLALPGMSGFVSELMVFTGFVTDEVYTLPFRVVMAS

SEQ ID NO: 79621 - protein, 269 aa, Unknown
  Bacterial polypetide isolated from the Sargasso Sea
RYVQVINLNKIEYPILILSSILGMMIMISSNDLIVFYMGLELQSLALYVLASFNRDNLLSTESGLKYFVLSALSSGLLLYGCSLTYGFSESTNFDQILINSTEFNYGTTFGIVFILVGLAFKISAVPFHMWAPDVYQGSPTSVTLFFAILPKIAALSVFIKFLYTPFANMNDQWQTIIVFISIASMIFGAVAAIGQKNLKRLIAYSSISHMGYALAGLATVSNQGIQSSITYISIYLVMNLAFFSCLFMLKRNDKYYENIEDLSGLSKK

SEQ ID NO: 79622 - protein, 310 aa, Unknown
  Bacterial polypetide isolated from the Sargasso Sea
ALSSGLLLYGCSLVYGFSGSTNFDIISNQLNSEEYVLTFGIVFILVGLAFKISAVPFHMWAPDVYEGSPTTVTLFFTIVPKVAALTVFIRFLYVPFLNLIDQWQMIIVFLSIASMVFGAVAAIGQTNIKRLIAYSSIGHIGYTLAGLATASNEGIQSSIIYISIYVVMNLALFSCLLMLRRKDQYYEDIDDLSGLSKNHPLLSLCLLLILFSLAGIPPLAGFFAKFYVFKAVLEQSMYFLAIVGLLSTVVAAFYYLRIIKIMYFDKEKDKYDTDHSLWLKFSLTVSTILILLYFIFPSQLVEVVSRINII

SEQ ID NO: 79623 - protein, 85 aa, Unknown
  Bacterial polypetide isolated from the Sargasso Sea
MIVDFLKDYLSIIIFLFVALALSIGFIVLNFLFSPKNPDPEKLSAYECGFEAFSDSRMEFDVRFYLVAIKFIIFDLEIAILFPWA

SEQ ID NO: 79624 - protein, 253 aa, Unknown
  Bacterial polypetide isolated from the Sargasso Sea
MANNYQNEKKTSENSIRNFNINFGPQHPAAHGVLRMVLELDGEIVERCDPHIGLLHRGTEKLMESRTYLQNLPYFDRLDYVAPMNQEHAWCLAIEKLLNVQITYRASLIRVLYCEIGRVLNHLLNITTQAMDVGAFTPISWGFEEREKLMVFYERACGARLHAAYFRPGGVHQDLSEDLLNDIMDWSISFPKVVNDIEELLTENRIFKQRNVDIGIVSKDEAFDWGFSGVMVRGSGLAWDLRRSQPYECYNDF

SEQ ID NO: 79625 - protein, 292 aa, Unknown
  Bacterial polypetide isolated from the Sargasso Sea
AAWPVTFKPRLFFFLLLAMDGGQIAVFAVQDMLLFFLAWELELIPVYLLLAIWGGKKRQYAATKFILYTAVSSLFILLVALAMAFSGGGPVSFEYSDLAAKHLGTGFQALCYAGLLIAFGVKLPIVPLHTWLPDAHGEATAPVHMLLAGILLKMGGYALFRFNASMFPDAHVQFAPLLVVLGVVNIIYAALTSFAQRNLKRKIAYSSISHMGFVLIGIGSFSPLAASGAMLQMISHGLIGASLFFLVGATYDRTHTLQLDEMGGVGQRMRKMFAMWTACSLASLALPGMSGF

SEQ ID NO: 79626 - protein, 72 aa, Unknown
  Bacterial polypetide isolated from the Sargasso Sea
MGVKINSNLDRQNKIPDEFKDLAKDFAEKGFITTSSDNLINWARTGSLHWMTFGLACCAVEMMQTSMPRYDL

SEQ ID NO: 79627 - protein, 257 aa, Unknown
  Bacterial polypetide isolated from the Sargasso Sea
IFVITSLGFKISAVPFHMWAPDVYEGSPTPITAFFTTAPKIAGIALLIRFLFEPFGNFWFDWHQIIIFISIASMILGAFAAIVQDNFKRLLAYSSIGHIGYILIGVVSANDSGIKAIFIYLVIYIFMNFGIFAILLSLKNDNGYIEKISNLSGLGKSNPIVSIVLTIMLFSMAGIPPLAGFFGKFYIFIAAIESKLFVLAIIGVLSSVIAAFYYLRIIKVIYFEENKENLEITLNLNTKFVIYLSALFIILFIFFQS

SEQ ID NO: 79628 - protein, 282 aa, Unknown
  Bacterial polypetide isolated from the Sargasso Sea
ILFLLIPVLVSVAMIVWLDRRVWAFVQKRRGPNVVGPFGLFQSLADALKYVFKEIIIPATSNKVVFILAPIVTMTLALISWAVIPFSEDIVLSNINVGILYLFAVSSLGVYGIIMGGWASNSKYPFLGAIRSAAQMVSYEVSIGVIIINVLLCVGSLNLSDIVKAQQNIWFVIPLFPMFVIFFISALAETNRPPFDLPEAEAELVAGYQTEYSGMMYAMFWLGEYANILLMCAMGSILFLGGWLSPIDIYPFNVIPGPFWFILKILFLFILFALVKATVPRY

SEQ ID NO: 79629 - protein, 161 aa, Unknown
  Bacterial polypetide isolated from the Sargasso Sea
MKLNRFFKIIFLSEFIKATIIAISEIFKKKKTINYPFEKGSISPRFRGEHALRRYPNGEERCIACKLCEAVCPAQAITIESEEKEDGSRRTTKYDIDMLKCIYCGLCEESCPVDAIVQGPNFEFATETREELYYNKEKLLDNGDRWETVLAQNIKLDKPYR

SEQ ID NO: 79630 - protein, 69 aa, Unknown
  Bacterial polypetide isolated from the Sargasso Sea
MPEPRYVISMGSCANGGGYYHYSYSVVRGCDKIVPVDIYVPGCPPSAEALLYGILQLQKKIRREGTLQR

SEQ ID NO: 79631 - protein, 149 aa, Unknown
  Bacterial polypetide isolated from the Sargasso Sea
MNLSRLLKTIFLVEFISGLSMAIKELFRKSKTINYPFEKGAISPRMRGEHALRRYPSGEERCIACKLCEAVCPAQAITIESTEREDGSRKTTRYDIDMLKCIYCGLCQESCPVDAIVQGPNFEFATETREELYYNKEKLLENGDKWESV

SEQ ID NO: 79632 - protein, 298 aa, Unknown
  Bacterial polypetide isolated from the Sargasso Sea
MSSILGMMVMISSNDLIVFYMGLELQSLALYVLATYNRDQLKSSEAGLKYFVLSALSSGLLLYGCSLVYGFSGSTNFDIISNQLNSEEYVLTFGIVFILVGLAFKISAVPFHMWAPDVYEGSPTTVTLFFTIVPKVAALTVFIRFLYVPFLNLIDQWQMIIVFLSIASMVFGAVAAIGQTNIKRLIAYSSIGHIGYTLAGLATASNEGIQSSIIYISIYVVMNLALFSCLLMLRRKDQYYEDIDDLSGLSKNHPLLSLCLLLILFSLAGIPPLAGFFAKFYVFKASIGTINVFLSYSR

SEQ ID NO: 79633 - protein, 68 aa, Unknown
  Bacterial polypetide isolated from the Sargasso Sea
MTKKIKNLNLNFGPQHPAAHGVLRLILELDGEVVEKADPHIGLLHRGTEKLIENKTYMQAVPYFDRLD

SEQ ID NO: 79634 - protein, 153 aa, Unknown
  Bacterial polypetide isolated from the Sargasso Sea
MTKKIKNINLNFGPQHPAAHGVLRLILELDGEVVEKADPHIGLLHRGTEKLIENKTYMQAVPYFDRLDYVAPMNQEHAFALAVEKILKIDVPIRAQYIRVIFCEIGRILSHILNVTTQALDVGALTPSLWGFEERETLMTFYERASGSRLHAN

SEQ ID NO: 79635 - protein, 249 aa, Unknown
  Bacterial polypetide isolated from the Sargasso Sea
PDVYQGSPTSVTIFFAILPKIAALTVFIKFLYVPFVNLIDQWQIIIIFLSIASMLFGSIAAIGQQNLKRLMAYSSISHMGFALAGVAVGSNEGIQSSIIYISIYLMMNLAFFSCIFMLRRNNEYYEKIDDLSGLSKNHPILSISLLISLFSLAGIPPLAGFFAKFYIFMAVIEEQMYALAIIGLLSTVIAAFYYLRLIKTIYFDKELEKYDTNHNIGLRVSLAISTIIILLYFIYPSSLLAIISNIKVI

SEQ ID NO: 79636 - protein, 67 aa, Unknown
  Bacterial polypetide isolated from the Sargasso Sea
MSLNFGPQHPAAHGVLRLILELEGEIVEKADPHIGLLHRGTEKLIENKTYTQALPYFDRLDYVAPMN

SEQ ID NO: 79637 - protein, 161 aa, Unknown
  Bacterial polypetide isolated from the Sargasso Sea
MKISRILKTIFLTDFITGLGIAIKESFKAKKTLNYPFEKGKISPRFRGEHALRRYPNGEERCIACKLCEAVCPAQAITIESTEREDGSRKTTRYDIDMLKCIYCGLCEESCPVDAIVQGPNFEFATHTREELYYNKEKLLDNGDKWESILEANIKADKPYR

SEQ ID NO: 79638 - protein, 74 aa, Unknown
  Bacterial polypetide isolated from the Sargasso Sea
IEIYPFNLIPQPIWLILKILILFILFALVKAIVPRYRYDQLMKLGWKIFLPFSLLWVVLTSSFLLYFNLLPGSN

SEQ ID NO: 79639 - protein, 62 aa, Unknown
  Bacterial polypetide isolated from the Sargasso Sea
MITNFLSEYLSIIIFLFISLLLSIGFIVINYIASPSNPDPEKLSAYECGFEAFDNARIEFDV

SEQ ID NO: 79640 - protein, 180 aa, Unknown
  Bacterial polypetide isolated from the Sargasso Sea
MSKEKKTLNLNFGPQHPAAHGVLRLILELDGEVVEHADPHIGLLHRGTEKLIENKTYLQALPYFDRLDYVAPMNQEHAFALAVEKILNIEVPIRAQFIRVMFCEIGRILSHILNITTQALDVGALTPSLWGFEERETLMTFYERVSGSRLHANYFRTGGVHQDLPRGLNEDIAKFCQNFP

SEQ ID NO: 79641 - protein, 62 aa, Unknown
  Bacterial polypetide isolated from the Sargasso Sea
MLSDFLKDYLSIIIFLFIALGLSCAFVLVNFILSPKKPDPEKLSPYECGFEPFQDSRMEFDV

SEQ ID NO: 79642 - protein, 309 aa, Unknown
  Bacterial polypetide isolated from the Sargasso Sea
LVQLMTCRDLSKSKVGNCYYVPLVDIEGGMVNDPLIYKLKNDLWRLCIADSDVLLFAKGIAAGKNLKVNIFEANIDTLAIQGPKSFKLMEEVFGNEINNLKFFKYDYFNFRSNKYLISRTGFSKQGGYEVHVENAKFGQDLYDHFFNIGKKYNLKPGAPNHAERIEGGLLSYGNDMLISDNPYECGFEKYVHLDSDIDFLGKDNLKKIKNKGIKKKLMGVKINTNKMELVDVDLLNNDNKIIGDLRSAAFSPTFKKIVGIAMVKKQSVENKENFKMNINGKFVEGEICELPINLIMKKAKIYIPTKTAM

SEQ ID NO: 79643 - protein, 237 aa, Unknown
  Bacterial polypetide isolated from the Sargasso Sea
MIPLLVSVAMIVWLDRRVWAFVQKRRGPNVVGPFGLLQTLADALKYIFKEIIIPASSNKFIFIIAPIITMTLALVAWAVIPFSKDFVLADINVGILYLFAVSSLGVYGIIMGGWASNSKYPFLGAIRSAAQMVSYEVSIGVIIINVLLCVGSLNLNDIVLAQQNMWFVLPLFPMFVIFFISALAETNRPPFDLPEAEAELVAGYQTEYSGMMYAMFWLGEYANILLMCAMGSILFLG

SEQ ID NO: 79644 - protein, 253 aa, Unknown
  Bacterial polypetide isolated from the Sargasso Sea
FLLAGIVFKISAVPFHMWAPDVYQGAATPVTSFFASVPKMAAIIILIRILYVPFDNFISSWSQIIIFVSFSSILLGSVVAIWQKNIKRLIAYSSIAHMGFATLALSTGNKSDIESILVYMIIYIVANIGFFSCLINIQNKTEKNINNISDLAGLSVNNPSLAISIALYMFSFAGIPPLAGFFAKYYVFISLINEGLIFLATFALIASVIGAFYYIRFVKVMFFDEVANTKKITFSRSLGLINSICFIFILGFI

SEQ ID NO: 79645 - protein, 139 aa, Unknown
  Bacterial polypetide isolated from the Sargasso Sea
LKEIFKSKKTINYPFEKGQVSPRSRGEHALRRYPNGEERCIACKLCEAVCPAQAITIESTERKDGSRKTTRYDIDMLKCIYCGLCEESCPVDAIVQGPNFEFATETREELYYNKEKLLENGDRWENILSANIKADNPYR

SEQ ID NO: 79646 - protein, 272 aa, Unknown
  Bacterial polypetide isolated from the Sargasso Sea
MSKKQKTLNLNFGPQHPAAHGVLRLILELDGEVVEKADPHIGLLHRGTEKLIENKTYAQAIPYFDRLDYVAPMNQEHAFALAIEKILKIEVPIRAQYIRVLFCEIGRILSHILNITTQALDVGALTPSLWGFEERETLMTFYERASGSRLHANYFRAGGVHQDLPRGLLEDIDKFSNNFPKVIDDLETLLTDNRIFKQRNVDIGIVSRQDALDYSFSGVMLRGSGIPWDLRKSQPYECYELFDFKIPVGKNGDCYDRYLCRIEEMRESVKII

SEQ ID NO: 79647 - protein, 278 aa, Unknown
  Bacterial polypetide isolated from the Sargasso Sea
RCYYAPIIDKQGGTLNDPVVLKLSEDRWWLSLADSDIGLYAKGIASGLSLQVEISEPDVNIMAVQGPKSFKLMEKVLGKKITELKFFGFDYYTFKENKFLIARSGWSKQGGYEIYVENREAGQMLYDELFSAGKEFNIEPGCPNLIERIESALLSAGNDFDSGDNPYECGFDKYIDTNSDINYLGKKALIKISKEGINRKLMGVLIDLDKIEVTEELPLYNGNNLVGNLRSATYSPNLKKVVGIAMIKKEYWDKKTPIEVKIGEKKSKGSICDLPFKI

SEQ ID NO: 79648 - protein, 181 aa, Unknown
  Bacterial polypetide isolated from the Sargasso Sea
MSKEKKTLNLNFGPQHPAAHGVLRLILELDGEVVEHADPHIGLLHRGTEKLIENKTYLQALPYFDRLDYVAPMNQEHAFALAVEKILKIDVPIRAQFIRVMFCEIGRILSHILNITTQALDVGALTPSLWGFEERETLMTFYERVSGSRLHANYFRTGGVHQDLPRGLADDIGKFVKISKS

SEQ ID NO: 79649 - protein, 269 aa, Unknown
  Bacterial polypetide isolated from the Sargasso Sea
HVEAPTGGSVILAAILLKMGGYGLLRFSLPITPDASSELSMIMVVLSLIAIIYIGMVALSQTDMKKLIAYSSVAHMGFVTLGTFVVFLNHEIASLENMNLAISGAMIQMISHGLISGALFLCIGVMYDRVHSREIDDYGGIALMMPRFAGLMVFFALANAALPGTSGFVGEVLVILASLKVNFWIALLSGTTLVIGAAYTLWMIKRVIFGDVTNEKINDIQDISAIELIPLMILAIMVLAMGVYPEPLMNLMYASINDLSKLVFLGAGI

SEQ ID NO: 79650 - protein, 40 aa, Unknown
  Bacterial polypetide isolated from the Sargasso Sea
RYRYDQLMRLGWKIFLPFSLAWVVLTASVLVFFDIMPKSI

SEQ ID NO: 79651 - protein, 269 aa, Unknown
  Bacterial polypetide isolated from the Sargasso Sea
MIEYFFQLFDQIYKIFFLLIPILVSVAMIVWLDRRVWAFVQKRRGPNVVGPFGLLQSLADALKYIFKEIIIPASANKIIFILAPIVTMTLALAAWAVIPFSDDFVLANINVGILYLFAISSLGVYGIIMGGWASNSKYPFLGAIRSAAQMVSYEVSIGVIIINVLLIVGSLNLIDIVLAQKNIWFIIPLFPMFIIFFISALAETNRPPFDLPEAEAELVAGYQTEYSGMMYAMFWLGEYANILLMCAMGSILFLGGWLPPLELYPFNLI

SEQ ID NO: 79652 - protein, 281 aa, Unknown
  Bacterial polypetide isolated from the Sargasso Sea
NLDEKNTGAVFGIVFIIVGLAFKVSAVPFHMWTPDVYEGSPTSVTSFFALVPKIAAISVFIRFMYVPFINVINQWQTIIIFLSIASMILGAVAAIGQSNIKRLMAYSSIGHMGYALAGIATGTNAGIQSTIIYLTIYLVMNLGAFGCIFMMRRENIFHENINELSGLSKNHPMLSLSFLVILFSLAGIPPLAGFFAKFYVFMAVIEVEMYSLAIIGLLTTVVSAFYYLRIIKVIYFDKPKKPFEESYDWGLKISLILSSILVLIYLIYPSILVDAIFFDLN

SEQ ID NO: 79653 - protein, 147 aa, Unknown
  Bacterial polypetide isolated from the Sargasso Sea
MNIGRILKIIFLVEFISGLYMAVKEMFRKSKTINYPFEKGPISPRMRGEHALRRYPNGEERCIACKLCEAVCPAQAITIESTERSDGSRKTTRYDIDMLKCIYCGLCQESCPVDAIVQGPNFEFATETREELNYNKEKLLDNGDRWE

SEQ ID NO: 79654 - protein, 105 aa, Unknown
  Bacterial polypetide isolated from the Sargasso Sea
MTKKIKNLNLNFGPQHPAAHGVLRLILELDGEVVEKADPHIGLLHRGTEKLIENKTYMQAVPYFDRLDYVAPMNQEHAFALAIEKILKIEVPIRAQFIRVMFCEI

SEQ ID NO: 79655 - protein, 101 aa, Unknown
  Bacterial polypetide isolated from the Sargasso Sea
MNLNFGPQHPAAHGVLRLILELDGEVVEKVDPHIGLLHRGTEKLIEHKTYTQALPYFDRLDYVAPMNQEHAFALATEKLLKIEVPIRAQYLRVIFCEIGRI

SEQ ID NO: 79656 - protein, 272 aa, Unknown
  Bacterial polypetide isolated from the Sargasso Sea
MTKKSKTLNLNFGPQHPAAHGVLRLILELDGEVVEKADPHIGLLHRGTEKLIENKTYIQAIPYFDRLDYVAPMNQEHAFALAIEKILKIEVPIRAQFIRVMFCEIGRILSHILNITTHALDVGALTPSLWGFEERETLMTFYERVSGSRLHANYFRAGGVHQDLPRGLAEDISKFATEFPKIIDDLETLLTDNRIFKQRNVDIGVVTKQDALDYSFSGVMLRGSNVPWDLRKSQPYDCYEQMEFKIPVGKNGDCYDRYLCRIEEMRESVKII

SEQ ID NO: 79657 - protein, 213 aa, Unknown
  Bacterial polypetide isolated from the Sargasso Sea
MNFPILSSLILLPSIGALFLFFTKSKSENKITTKYVALFTSLVNFFLSIYLWFLFDQTTSAFQFVEDRIWIKGLINYKVGVDGISILFIILTTFITPLCIISVNNSVTKRLNEFLIAILVMETFMIGVFCSLDLVVFYLFFEAGLIPMFLIIGIWGGARRVYSAFKFFLFTLLGSVLMLVAIISIYWITGTTDVVQLYELGIDTKYQNLLWLA

SEQ ID NO: 79658 - protein, 220 aa, Unknown
  Bacterial polypetide isolated from the Sargasso Sea
MTKKIKNLNLNFGPQHPAAHGVLRLILELDGEVVEKADPHIGLLHRGTEKLIENKTYMQAVPYFDRLDYVAPMNQEHAFALAIEKILKIEVPIRAQLIRVMFCEIGRILSHVLNVTTQALDVGALTPSLWGFEERETLMTFYERASGSRLHANYFRAGGVHQDLPAGLEEDILKFCETFPKVINDLEDLLTDNRIFKQRNVDIGIVSKQKGLDYSFTGIM

SEQ ID NO: 79659 - protein, 260 aa, Unknown
  Bacterial polypetide isolated from the Sargasso Sea
MGITFGLAFLLAGIVFKISAVPFHMWAPDVYQGAATPVTSFFASVPKMAAIIILIRILYVPFDNFISSWSQIIIFVSFSSILLGSVVAIWQKNIKRLIAYSSIAHMGFATLALSTGNKSDIESILVYMIIYIVANIGFFSCLINIQNKTEKNINNISDLAGLSVNNPSLAISIALYMFSFAGIPPLAGFFAKYYVFISLINEGLIFLATFALIASVIGAFYYIRFVKVMFFDEVANTKKITFSRSLGLINSICFIFILGF

SEQ ID NO: 79660 - protein, 256 aa, Unknown
  Bacterial polypetide isolated from the Sargasso Sea
SGLLLYGCSLVYGFSGSTNFNIISNQLNSEEYVLTFGIVFILVGLAFKISAVPFHMWAPDVYEGSPTTVTLFFSIVPKVAALTVFIRFLYVPFLNLIDQWQTIIVFLSIASMVFGAVAAIGQTNIKRLVAYSSIGHIGYTLAGLTTASNEGIQSSIIYISIYVVMNLALFSCLLMLRRKDQYYEDIDDLSGLSKNHPLLSLCLLLILFSLAGIPPLAGFFAKFYVFKAVLEQSMYFLAIVGLLSTVIAAFYYLRII

SEQ ID NO: 79661 - protein, 278 aa, Unknown
  Bacterial polypetide isolated from the Sargasso Sea
MTKKIKNLNLNFGPQHPAAHGVLRLILELDGEIVEKADPHIGLLHRGTEKLIENKTYMQAVPYFDRLDYVAPMNQEHAFALAVEKILKIDVPIRAQFIRVIFCEIGRILSHILNVTTQAMDVGALTPTLWGFEEREKLMGFYERVSGSRLHANYFRAGGVHQDLPQGLEEDIAEFCESFPKIINDLESLLTDNRIFKQRNVDIGVVTKQDALDYSFSGVMIRGSGVPWDLRKSQPYDCYENLDFKVPVGKNGDCYDRYLCRIEEMKQSVSIIKTCLLK

SEQ ID NO: 79662 - protein, 161 aa, Unknown
  Bacterial polypetide isolated from the Sargasso Sea
MNFSRLFKTIFLVEFISGLLIAIKELFRKSKTINYPFEKGPISPRMRGEHALRRYPNGEERCIACKLCEAVCPAQAITIESSERSDGSRKTTRYDIDMLKCIYCGLCQESCPVDAIVQGPNFEFATETREELYYNKEKLLENGDKWEPVLAKNIKLDKPYR

SEQ ID NO: 79663 - protein, 56 aa, Unknown
  Bacterial polypetide isolated from the Sargasso Sea
MTKRENYSLNFGPQHPAAHGVLRLVLELDGEVVERADPHIGLLHRGTEKLIENKTY

SEQ ID NO: 79664 - protein, 178 aa, Unknown
  Bacterial polypetide isolated from the Sargasso Sea
MTKEKKTLNLNFGPQHPAAHGVLRLILELDGEVVEHADPHIGLLHRGTEKLIENKTYLQALPYFDRLDYVAPMNQEHAFAIAVEKILNIEVPIRAKFIRVIFCEIGRILSHILNITTQALDVGALTPSLWGFEERETLMTFYERVSGSRLHANYFRTGGVHQDLPRGLTDDIAKFCQN

SEQ ID NO: 79665 - protein, 141 aa, Unknown
  Bacterial polypetide isolated from the Sargasso Sea
MTKEKKTLNLNFGPQHPAAHGVLRLILELDGEIVEKADPHIGLLHRGTEKLIENKTYSQAIPYFDRLDYVAPMNQEHAFALAIEKIMDVEVPIRGQYIRVIFCEIGRILSHILNITTQALDVGALTPSLWGFEEREKLMGF

SEQ ID NO: 79666 - protein, 55 aa, Unknown
  Bacterial polypetide isolated from the Sargasso Sea
MNNLENKKQIPDEFKQLAEDFSKNGFITTSFDNLVNWARTGSLHWMTFGLACCAV

SEQ ID NO: 79667 - protein, 136 aa, Unknown
  Bacterial polypetide isolated from the Sargasso Sea
MVKKNKTLNLNFGPQHPAAHGVLRLILELDGEIVEKIDPHIGLLHRGTEKLIEHKTYTQAVPYFDRLDYVAPMNQEHAFALAIEKLLRINVPIRGQYIRILFCEIGRILSHLLNITTQALDVGALTPSLWGFEERE

SEQ ID NO: 79668 - protein, 166 aa, Unknown
  Bacterial polypetide isolated from the Sargasso Sea
MNFPILSSLILLPTVGALFLFFTKDKEGNNVTAKYVALFTTVVNFLISIYLWISFDQSTSSFQFVEDRTWIEGFINYKVGVDGISILFIILTTFITPLCIISVNNSVKNRLRDFLIAILIMESFMIGVFCSLDLVVFYLFFEAGLIPMFLIIGIWGGPKKKFIQPI

SEQ ID NO: 79669 - protein, 179 aa, Unknown
  Bacterial polypetide isolated from the Sargasso Sea
MVKKTKSLNLNFGPQHPAAHGVLRLILELDGEVVEKADPHIGLLHRGTEKLIEQKTYTQALPYFDRLDYVAPMNQEHAFALAAEKLLNIEVPIRAKYIRVIFCEIGRILSHILNVTTQALDVGALTPSLWGFEERETLMTFYERASGSRLHANYFRTGGVHQDIPLKLVDDIEKFCKSF

SEQ ID NO: 79670 - protein, 146 aa, Unknown
  Bacterial polypetide isolated from the Sargasso Sea
MKGLLIAIKESFKPKKTLNYPFEKGKISPRYRGEHALRRYPNGEERCIACKLCEAVCPAQAITIESTAREDGSRKTTRYDIDMLKCIYCGLCEESCPVDAIVQGPNFEFATHTREELYYNKEKLLENGDRWENVLAANIKADNPYR

SEQ ID NO: 79671 - protein, 262 aa, Unknown
  Bacterial polypetide isolated from the Sargasso Sea
MVKKTKSLNLNFGPQHPAAHGVLRLILELDGEVVEKADPHIGLLHRGTEKLIEQKTYTQALPYFDRLDYVAPMNQEHAFALAAEKLLKIEVPIRAKYIRVIFCEIGRILSHILNVTTQALDVGALTPSLWGFEERETLMTFYERASGSRLHANYFRTGGVHQDIPLKLVEDIEKFCRSFPKIIDDLESLLTDNRIFKQRNVEIGIVTQQEALDHSFSGVMLRGSGVPWDLRRSQPYEIYKDLDFKIPVGKNGDCYDRYLCRI

SEQ ID NO: 79672 - protein, 56 aa, Unknown
  Bacterial polypetide isolated from the Sargasso Sea
SYLSLFTFSMLMLVTSENFLQLFFGWEGVGVCSYFLIGFWFKKQSANKAAIKAFLV

SEQ ID NO: 79673 - protein, 140 aa, Unknown
  Bacterial polypetide isolated from the Sargasso Sea
MKITRFFKTIFMVDFITGLLIALREMFKTKKTINYPFEKGKISPRFRGEHALRRYPNGEERCIACKLCEAVCPAQAITIESAERSDGSRKTTRYDIDMMKCIYCGLCEESCPVDAIVQGPNFEFSTETREELYYTKEKII

SEQ ID NO: 79674 - protein, 161 aa, Unknown; identical to SEQ ID NO: 79376
  Bacterial polypetide isolated from the Sargasso Sea

SEQ ID NO: 79675 - protein, 82 aa, Unknown
  Bacterial polypetide isolated from the Sargasso Sea
LFLGGWLSPIDIFPFNAIPGPFWLIFKILFLFILFALVKATVPRYRYDQLMKLGWKIFLPFSLFYVVLTSSFLLYFDLLPGK

SEQ ID NO: 79676 - protein, 225 aa, Unknown
  Bacterial polypetide isolated from the Sargasso Sea
KLPYTYALMIIGTLALTGFPFLSGFYSKDAIIEFAYLKGNTTGYYAAGIGIITAFLTSIYSWRLIFKTFHGEYNNKEIKIEETHESPLVMLVPLFILSIGAVFAGFLFKGLFIGHGENLFWAESIKFLEPLSTEHPPLWFLLLTPCLVLVSIPIAYYLFVKNKELPNSIVSMNKPLYNFLVNKWYFDELYDVLFIKSSKKLGLFLWKFCDGTIIDGFGPDGISSF

SEQ ID NO: 79677 - protein, 265 aa, Unknown
  Bacterial polypetide isolated from the Sargasso Sea
MAESQIKPLTLNFGPQHPAAHGVLRLVMEMDGEIVERADPHIGLLHRGTEKLIEHKTYLQAVPYFDRLDYVAPMCQEHAYALAVEKLLGIDVPKRGQYVRVLFSELSRILNHILNITTFALDVGAMTPLLWGFEEREFLMEFYERASGARLHAAYFRPGGVHQDLPEGMIEDVAKWAEKFPDFVEDMEHLLTNNRIFKQRTVDIGMVNQDEAQSLGFTGPCIRASGLPWDLRKSQPYDAYSEMDFDIPIGKTGDCYARYLVRVEE

SEQ ID NO: 79678 - protein, 122 aa, Unknown
  Bacterial polypetide isolated from the Sargasso Sea
MKLSRIFKTIFLLDFISGLSIAIKEIFKSKKTLNYPFEKGKISPRFRGEHALRRYPNGEERCIACKLCEAVCPAQAITIESTQRADGSRKTTRYDIDMMKCIYCGLCEESCPVDAIVQGPNF

SEQ ID NO: 79679 - protein, 300 aa, Unknown
  Bacterial polypetide isolated from the Sargasso Sea
SFITTLACLAAWPVTFKPRLFYFLLLAMDGGQIAVFAVQDMLLFFLAWELELIPVYLLLAIWGGKKRQYAATKFILYTAGSSLFILLVALAMAFSGGGPVSFEYSDLAAKHLGAGFQALCYAGLLIAFGVKLPIVPLHTWLPDAHGEATAPVHMLLAGILLKMGGYALFRFNASMFPDAHVQFAPLLVVLGVVNIIYAALTSFAQRNLKRKIAYSSISHMGFVLIGIGSFSPLAASGAMLQMISHGLIGASLFFLVGATYDRTHTLQLDEMGGVGQRMRKMFAMWTACSLASLALPGMSG

SEQ ID NO: 79680 - protein, 161 aa, Unknown
  Bacterial polypetide isolated from the Sargasso Sea
MKITRFFKTIFMIDFITGLLIGVVEMFKSKKTINYPFEKGKISPRFRGEHALRRYPNGEERCIACKLCEAVCPAQAITIESTERSDGSRKTTRYDIDMMKCIYCGLCEESCPVDAIVQGPNFEFSTETREELYYTKEKLLDNGDRWENILAANIKSDNPYR

SEQ ID NO: 79681 - protein, 240 aa, Unknown
  Bacterial polypetide isolated from the Sargasso Sea
MVDNFQNEKNIKESSVRNFNINFGPQHPAAHGVLRMVLELDGEVVDRCDPHIGLLHRGTEKLMESRTYLQNLPYFDRLDYVAPMNQEHAWCLAIEKLLNVKITYRASLIRVLYSEIGRVLNHLLNITTQAMDVGAFTPISWGFEEREKLMVFYERACGARLHAAYFRPGGVHQDLSEQLLNDIMIWSEEFPKIVNDIEDLLTENRIFKQRNVDIGVVNKDDAFEWGFSGVMVRGSGLAWD

SEQ ID NO: 79682 - protein, 161 aa, Unknown
  Bacterial polypetide isolated from the Sargasso Sea
MKISRLLKTIFMIDFVTGLLIAIKETFKTKKTINYPFEKGSLGIRSRGEHALRRYPNGEERCIACKLCEAVCPAQAITIESKERDDGSRKTIRYDIDMLKCIYCGLCEESCPVDAIVQGPNFEFATETREELYYTKERLLENGDRWENILAANIKADSSHR

SEQ ID NO: 79683 - protein, 60 aa, Unknown
  Bacterial polypetide isolated from the Sargasso Sea
MGSCANGGGYYHYSYSVVRGCDRIVPVDVYVPGCPPSAEALLYGILQLQKKIRNKGSIER

SEQ ID NO: 79684 - protein, 271 aa, Unknown
  Bacterial polypetide isolated from the Sargasso Sea
MSINTQPVTINLGPQHPSTHGVFRLRVTFDGEQVVDVEPVFGYLHRGTEKLAEERNYVQIVTLTDRLDYVAAMTNNLAYVRAVESLAGINVPDRGMYLRVISAELQRIASHLIATGFLLDELGAFHTPLIYCFRERERILELFEMLCGARITVSYMRPGGVFQDAPTDFWPRLDDFLNSMPGYLDELEGLITENEVVLARTRDMGILSAQDAIDASITGPVLRATGVQWDLRKAEPHEVYDRLDFDVPIGSVGDTYDRYYVRVQEMRQSLR

SEQ ID NO: 79685 - protein, 257 aa, Unknown
  Bacterial polypetide isolated from the Sargasso Sea
MLQHTVLSWLIWLPVFGSFFLMFTAKSTSVSFSRWFSLAISLLSLLLCVYLISHFDTNTSKMQFSDNHLWIPDLRIYYNLGVDGISMPLVVLTCFTTLIVVVASWKMVTEQVPQYLAAFLMMQGMVIGVFCSLDAILFYFFWEAMLIPMYLSIGIWGGGNRSYAAIKFFIYTFFGSALMLIALLYLRMHTGTFNILSWYHYPLSMFQQKLIFWAFFVAFAIKIPMWPLHTWLPDAHTEAPTGGSVILAALMLKLGGY

SEQ ID NO: 79686 - protein, 302 aa, Unknown
  Bacterial polypetide isolated from the Sargasso Sea
SSGLLLYGCSLIYGFSGSTNFYLISENIHSSEYGNIFGIVFILVGLAFKISAVPFHMWAPDVYEGSPTSVTLFFAVVPKVAALTVFIRFLYVPFVDLIDQWQMIIIFLSLASMIFGAVSAIGQKNLKRLIAYSSIGHMGYALAGLTVGTNSGIQSSIIYICIYLIMNLGFFCCLFMMKRKDEFFDNLEDLSGLSKNHPIVSLSMLILLFSLAGIPPMAGFFAKFYIFMSVIEQSMYFLAIVGLVTTVVSAFYYLKIIKIIYFDSPKEKYDQDHHFGLKISLTVTTLLILLYFIYPNGLVNLV

SEQ ID NO: 79687 - protein, 249 aa, Unknown
  Bacterial polypetide isolated from the Sargasso Sea
LALTGFPFLSGFYSKDAIIEFAYLKNSSMGNYAATIGITTAFLTSIYSWRLFFKTFHGPYNNKKILFNETHESPLVMLIPLFLLGIGAIFSGYFFKGIFIGHHSNEFWQGSIFFLNEIKHDTIPLWFLLTTPVLVLIAIPISFYLYIISPKILEDFKNTNMPLYKFLLNKWYIDEFYEKIFVNPTKKIGSFFWKKGDIGIIDKFGPDGISKLIKIISYKTGRLQTGFIYDYAFVMLLGLSILLTYLILK

SEQ ID NO: 79688 - protein, 74 aa, Unknown
  Bacterial polypetide isolated from the Sargasso Sea
MAEMQIKPITMNFGPQHPAAHGVLRLVLEMDGEVIERADPHIGLLHRGTEKLIEHKTYLQALPYFDRLDYVSPM

SEQ ID NO: 79689 - protein, 125 aa, Unknown
  Bacterial polypetide isolated from the Sargasso Sea
FEKGKISPRFRGEHALRRYPNGEERCIACKLCEAVCPAQAITIESEERADGSRKTTRYDIDMLKCIYCGLCEESCPVDAIVQGPNFEFATETREELYYNKEKLLDNGDRWESVLAQNIKLDKPYR

SEQ ID NO: 79690 - protein, 261 aa, Unknown
  Bacterial polypetide isolated from the Sargasso Sea
PYTYSLMIIGTLALTGFPLLSGFYSKDAIIEFAYLSGTTTGYYAAGIGIFTAFLTSIYSWRLMFKTFHGQYNNKEIKIEETHESPLIMLIPLIILSIGAIFAGFIFKDLFVGYEGINNFWNESIFFLEPLSTDHPPLWFLILTPTLVTLSIPFTYYLFVKNKNFPTQLVNINKPLYEFLFNKWYFDEIYDILFVKSSKRFGLFLWKFFDIKVIDGFGPDGISGLIKKFSIKANKFQSGYIYQYAFVMLLGFSAFLTFFIVK

SEQ ID NO: 79691 - protein, 84 aa, Unknown
  Bacterial polypetide isolated from the Sargasso Sea
MKISRILKTVLMIDFLTGLFIAIKETFKQKKTINYPFEKGSVSARARGEHALRRYPNGEERCIACKLCEAVCPAQAITIESKER

SEQ ID NO: 79692 - protein, 255 aa, Unknown
  Bacterial polypetide isolated from the Sargasso Sea
MFLLILGVFKNDSSKITFNLSLFVILITTVITFNETLSVTRESLFNGSVVIDSMSSLMKIITLIGGFLVLVISSTYLKTFKIYNIEYPVLILSSILGMMVMISSNDLIVFYMGLELQSLALYVLATYNRDQLKSSEAGLKYFVLSALSSGLLLYGCSLVYGFSGSTNFDIISNQLNSEEYVLTFGIVFILVGLAFKISAVPFHMWAPDVYEGSPTTVTLFFTIVPKIAALTVFIRFLYVPFLNLTDQWQMIIVFL

SEQ ID NO: 79693 - protein, 311 aa, Unknown
  Bacterial polypetide isolated from the Sargasso Sea
SISQSDFQFQSIQSWIPSLGINWHVGVDGISLWLVVLTGLITPLVLVAVDPHHDPKPYTAWLLLLQAGSFGAFMALDLFLFFVMFEIVLVPMYMLIGGWGYDDRRYAATKFFLYTMAGSALMLVAIVSVATLSAGDQGITFSVIELAERQALSTNTARLCFLAFALAFVIKVPIFPVHTWLPDAHTQAPTAGSVVLAAVMLKLGTYGLMRFGLYLFPEASVWAAPTLATLGVVGVIYGAIVATMQKDLKRLVAYSSVAHMGFIVLGIFAFTTQSLEGGVLQMVNHGISTGALFLLVGMLYERRKTRAIDEM

SEQ ID NO: 79694 - protein, 67 aa, Unknown
  Bacterial polypetide isolated from the Sargasso Sea
MKISRLLKTIFMIDFVTGLLIAIKETFKAKKTINYPFEKGSLGTRSRGEHALRRYPNGEERCIACKL

SEQ ID NO: 79695 - protein, 277 aa, Unknown
  Bacterial polypetide isolated from the Sargasso Sea
MKTFLIAKSRRLRGTPYTSRIEKQGVSAYTIYNHMLLPAAFGSVEDAYHHLKEHVQIWDVAAERQVEITGKDSAKLVQLMTCRDLSKSKDGRCYYCPMIDDNAGLINDPVVLRLNENRWWVSLADSDVILFAKGLAIGNKFDVKISEPDVDIMAVQGPKSFKLMEKVFGEKIVNLKFFGFDYFEFGGDKHLIAKSGWSKQGGYEIYMEHNESGLKLYDHLFEIGKEFNIRPGGPNLIERIESGLLSHGNDMDNGDNPYECGFDKYVNIDSDVDFLGK

SEQ ID NO: 79696 - protein, 238 aa, Unknown
  Bacterial polypetide isolated from the Sargasso Sea
MNFPILSSLILLPTIGALFIFFTRSSEKNNNTVKYVALFTSIVNFFLSIYLWALFDQTTSEFQFVEDRVWIKNFINYKVGIDGISILFILLTTFITPLCILSINNSIKNRLSEFLIAVLIMESFMIGVFCSLDLVIFYLFFEAGLIPMFLIIGIWGGTRRVYSAFKFFLYTLLGSVLMLVAIISIYWITGTTDVVELYKIGIDVKYQNLLWLAFFSSFAVKTPMWPVHTWLPDAHVEA

SEQ ID NO: 79697 - protein, 266 aa, Unknown
  Bacterial polypetide isolated from the Sargasso Sea
ELELIPVYLLLAIWGGKNRQYAATKFIIYTAGSSIFILLAALAMGFYGTEIPNFEFSHLAAQEFSQKFQILCYIGLLIAFGVKLPIVPLHTWLPDAHGEATAPVHMLLAGILLKMGGYALLRFNAQLLPVAHAQFAPLLIVLGVVNIIYAALTSFAQRNLKRKIAYSSISHMGFVLIGIGSFSSLGTSGAMLQMVSHGLIGASLFFLVGATYDRTKTLKLDEMSGVGQKMRIMFALWTACSLASLALPGMSGFVSGINGIYGICYR

SEQ ID NO: 79698 - protein, 291 aa, Unknown
  Bacterial polypetide isolated from the Sargasso Sea
SLVYGFTGSTNFQVISDNLDNSNTGAIFGIVFILVALAFKVSAVPFHMWTPDVYEGSPTSVTTFFALIPKIAALSVFIRFMYVPFVNVVDQWQVIIVFLSIASMILGAVGAIGQNNIKRLMAYSSIGHMGYALAGISTGSQEGVQSTIIYLTIYLVMNLGAFGCILMMKRENNFYENINDLSGMSKNHPLLSLVFLVILFSLAGIPPLAGFFAKFYVFMAVIKSEMYALAIIGLVTTVISAFYYLRIIKIIYFDKPKKAFDVSYDWGLKISLILSSILVLIYFIYPSILLD

SEQ ID NO: 79699 - protein, 87 aa, Unknown
  Bacterial polypetide isolated from the Sargasso Sea
MGVNFGGFAQKQKEIPEEFKELAKNFAEKGFITTSSENLINWARTGSLHWMTFGLACCAVEMMQTSMPRYDLERFGAAPRASPEAVR

SEQ ID NO: 79700 - protein, 156 aa, Unknown
  Bacterial polypetide isolated from the Sargasso Sea
MKKEKKTLNLNFGPQHPAAHGVLRLILELDGEVVEKADPHIGLLHRGTEKLIENKTYMQAVPYFDRLDYVAPMNQEHAFALAIEKILNIKVPIRAQYIRVMFCEIGRILSHILNVTTQAMDVGALTPTLWGFEERETLMGFYERASGSRLHANYFR

SEQ ID NO: 79701 - protein, 63 aa, Unknown
  Bacterial polypetide isolated from the Sargasso Sea
MKNNLDQVPEEFKKLAEDFSKNGFITTSIDNLINWSRSGSLHWMTFGLACCAVEMMQTAMPRY

SEQ ID NO: 79702 - protein, 150 aa, Unknown
  Bacterial polypetide isolated from the Sargasso Sea
MAEMQIKPITMNFGPQHPAAHGVLRLVLEMDGEVIERADPHIGLLHRGTEKLIEHKTYLQALPYFDRLDYVSPMNQEHAWALSVEKALGIEVPRRAQYIRVLYCEIGRILNHLLNLTTFAIDVGAMTPLLWGFEEREHLMGFYERAWGRG

SEQ ID NO: 79703 - protein, 161 aa, Unknown; identical to SEQ ID NO: 79412
  Bacterial polypetide isolated from the Sargasso Sea

SEQ ID NO: 79704 - protein, 161 aa, Unknown; identical to SEQ ID NO: 79578
  Bacterial polypetide isolated from the Sargasso Sea

SEQ ID NO: 79705 - protein, 79 aa, Unknown
  Bacterial polypetide isolated from the Sargasso Sea
MKNKIDQVPEEFKQLADDFSKNGFITTSLDNLINWSRSGSLHWMTFGLACCAVEMMQTSMPRYDLERFGAAPRASPRQS

SEQ ID NO: 79706 - protein, 224 aa, Unknown
  Bacterial polypetide isolated from the Sargasso Sea
MNFPILSSLILLPTIGAFFLFFTRSKKENNFTVKYVALFTSLVNFFLSIYLWILFDQSTSDFQFIENRIWIKGLINYKVGVDGISILFIILTTFITPLCIISVNNSIKKRLSEFLIAVLIMESFMIGVFCSLDLVVFYLFFEAGLIPMFLIIGIWGGSRRVYSAFKFFLYTLLGSVLMLVAIISIYWITGTTDVTQLYEVGIDKKYQNLLWLAFFSSFAVKTPM

SEQ ID NO: 79707 - protein, 325 aa, Unknown
  Bacterial polypetide isolated from the Sargasso Sea
EDAYHHLKEHVQIWDVAAERQVEISGKDSAKLVQLMTCRDLSKSKDGRCYYCPIIDDNAGLINDPVVLRLNENRWWVSLADSDVILFAKGLAIGNKFDVKISEPDVDIMAVQGPKSFKLMEKVFGEKIVNLKFFGFDYFEFGGDKHLIAKSGWSKQGGYEIYMEHNDSGLKLYDHLFEIGKEFNIRPGGPNLIERIESGLLSHGNDMDNGDNPYECGFDKYVNIDSDVDFLGKEKLKKIKAEGIKKKLMGVKIDAKEISVNGSMDLVDEDNNVIGELRSGCYNPTFKQVIGIAMINKPYFETSKSFKININGTDFDGKVCDLPFI

SEQ ID NO: 79708 - protein, 288 aa, Unknown
  Bacterial polypetide isolated from the Sargasso Sea
MENIDFILPEIFISIGIMFLLIVGVFKKNSSHLIYSMSILFLLITLGLIINFPFEMETYLFNNSYKIDPLSTFMKIVTILSGIFVLVSSYKYVSLENIFNIEYPVLILSSILGMLVMISSYDLIVFYIGLELQSLALYVLAAFSREKTKSSEAGLKYFVLSALSSGLLLYGCSLIYGFSGSTNFYLISENIHSSEYGNIFGIVFILVGLAFKISAVPFHMWAPDVYEGSPTSVTLFFAVVPKVAALTVFIRFLYVPFVSLMDQWQMIIIFLSVASMIFGAIAAIGQKN

SEQ ID NO: 79709 - protein, 82 aa, Unknown
  Bacterial polypetide isolated from the Sargasso Sea
MKKTKTLNLNFGPQHPAAHGVLRLILKLDGEVVEEADPHIGLLHRGTEKLIEHKTYTQALPYFDRLDYVAPMNQEHAFALAT

SEQ ID NO: 79710 - protein, 161 aa, Unknown
  Bacterial polypetide isolated from the Sargasso Sea
MKISRFFKTIFMTDFLGGLFMAIKEFFKPKKTINYPFEKGKISPRFRGEHALRRYPNGEERCIACKLCEAVCPAQAITIESAQREDGSRKTTRYDIDMMKCIYCGLCEESCPVDAIVQGPNFEFSTETREELYYTKEKLLDNGDRWENILDANIKADNIHR

SEQ ID NO: 79711 - protein, 161 aa, Unknown
  Bacterial polypetide isolated from the Sargasso Sea
MNFSRFFKTILMTDFIGGLFIAIKELFKSKKTINYPFEKGKISPRFRGEHALRRYPNGEERCIACKLCEAVCPAQAITIESSEREDGSRKTTRYDIDMMKCIYCGLCEESCPVDAIVQGPNFEFSTETREELYYTKEKLLDNGDRWENVLEANIKADNIHR

SEQ ID NO: 79712 - protein, 100 aa, Unknown
  Bacterial polypetide isolated from the Sargasso Sea
MYKLIKSFTLFELIQGLFLTFKYIFKSKVTINYPHEKGPLSPRFRGEHALRRYPSGEERCIACKLCEAVCPAQAITIEAEPREDGSRRTTRYDIDMTKCI

SEQ ID NO: 79713 - protein, 170 aa, Unknown
  Bacterial polypetide isolated from the Sargasso Sea
MSLNFGPQHPAAHGVLRLILELDGEVVEKIDPHIGLLHRGTEKLIEHKTYTQAVPYFDRLDYVAPMNQEHAFALAIEKLLKIEVPIRGQYIRVLFCEIGRILSHLLNITTQALDVGALTPSLWGFEERETLMTFYERVSGSRLHANYFRPGGVHKDLPMGLTEDITTFCE

SEQ ID NO: 79714 - protein, 298 aa, Unknown
  Bacterial polypetide isolated from the Sargasso Sea
MEGFLVLVISSTYLKTFKIYNIEYPVLILSSILGMMVMISSNDLIVFYMGLELQSLALYVLATYNRDQLKSSEAGLKYFVLSALSSGLLLYGCSLVYGFSGSTNFDIISNQLNSEEYFLTFGIVFILVGLAFKISAVPFHMWAPDVYEGSPTTVTLFFTIVPKIAALTVFIRFLYVPFLNLVDQWQMIIVFLSIASMVFGAVAAIVQTNIKRLVAYSSIGHIGYTLAGLATASNEGIQSSIIYISIYVIMNLALFSCLLMLRRKDQYYEDIDDLSGLSKNHPLLSLCFLLILFSLAGI

SEQ ID NO: 79715 - protein, 44 aa, Unknown
  Bacterial polypetide isolated from the Sargasso Sea
AFLFPWAVSLSNIGALGFYSMMFFLFILTVGFIYEWRNGALDWE

SEQ ID NO: 79716 - protein, 161 aa, Unknown
  Bacterial polypetide isolated from the Sargasso Sea
MKIIRFFKTIFMVDFITGLLIAIREIFKSKKTINYPFEKGKISPRFRGEHALRRYPNGEERCIACKLCEAVCPAQAITIESAERFDGSRKTTRYDIDMMKCIYCGLCEESCPVDAIVQGPNFEFSTETREELYYTKEKLLDNGDRWENILAANIKSDNPYR

SEQ ID NO: 79717 - protein, 39 aa, Unknown
  Bacterial polypetide isolated from the Sargasso Sea
RYRYDQLMRLGWKIFLPLSLTYVVLTASFLFYFNLLPTN

SEQ ID NO: 79718 - protein, 214 aa, Unknown
  Bacterial polypetide isolated from the Sargasso Sea
IRFSLGMFPVASEYFMPLVFILSVIAIIYTSLVALMQEDMKKLVAYSSIAHMGFVTLGIFTFNKQGIEGSMLQMLSHGLISAALFLCVGVLYDRNKSRLISSYGGLVNILPKYSFILMVFVLAALGLPGTSGFIGEFLVLIGAFKINYMVGVLATTGVVLSAAYMLWLYKRVIFGKLEKEDLKKMEDINLSEFALLSLLSFFIIFFGFYPEPLL

SEQ ID NO: 79719 - protein, 58 aa, Unknown
  Bacterial polypetide isolated from the Sargasso Sea
MIYNFLSEYLSIILFLFIALALSVGFIVINLLASPSNPDPEKLSAYECGFEAFDDSRM

SEQ ID NO: 79720 - protein, 92 aa, Unknown
  Bacterial polypetide isolated from the Sargasso Sea
MNTVFKFIKSFLLLELSKGLSLTLKYLFKKKVTINYPYEKNPISSRFRGEHALRRYPNGEERCIACKLCEAVCPAQAIVIEAEPRPDGSRRT

SEQ ID NO: 79721 - protein, 136 aa, Unknown
  Bacterial polypetide isolated from the Sargasso Sea
SFKSKKTLNYPFEKGKISPRFRGEHALRRYPNGEERCIACKLCEAVCPAQAITIESTEREDGSRKTTRYDIDMLKCIYCGLCEESCPVDAIVQGPNFEFSTETREELYYNKEKLLDNGDRWESLLAANIKADNPYR

SEQ ID NO: 79722 - protein, 105 aa, Unknown
  Bacterial polypetide isolated from the Sargasso Sea
MKISRLLKTIFMIDFVTGLLIAIKETFKAKKTINYPFEKGSLGTRSRGEHALRRYPNGEERCIACKLCEAVCPAQAITIESKERDDGSRKTIRYDIDMLKCIYCG

SEQ ID NO: 79723 - protein, 252 aa, Unknown
  Bacterial polypetide isolated from the Sargasso Sea
MQNLIYILPEIFLFIVATVLLITGLFLKNIKLINSLSIFSLLVTVILIFNQPFQSAFLNSFVVDEFSLVLKVMIVVGSIASLIMFVSSKDDLNINIYEFPILIIFSTIGMMVMVSANDLLAMFIGLELQSLSLYVLAALNRNSLLSSEAGIKYFILGALSSGLLLFGISYIYGFSGNTNFNLIAVNINPESLGLIIGIVFVLAGLAFKVSAVPFHMWTPDVYQGAPTPITGFFALAPKIEAMGLLVRFLFNS

SEQ ID NO: 79724 - protein, 234 aa, Unknown
  Bacterial polypetide isolated from the Sargasso Sea
MKLSLKYVIYGAFSSGIMLYGLSIIFGLTGTTKFFAIRDAIATLDSSSNLALTLSTIFVLAGFGYKISAVPFHFWTPDVYEGSPTPITAYLSVAPKAAGFALMIRFFNQVLVESDSISTIGWYADVSFAWPGLLGVISVVTMTMGNLVAIQQNSVKRMLAYSSIAHAGYMLMVFPTISSEGVFAVMIYLVMYLFMNLGAFFVLIYVVQKEGGENFEDFSGLGWRMPIVGIVMTV

SEQ ID NO: 79725 - protein, 49 aa, Unknown
  Bacterial polypetide isolated from the Sargasso Sea
HYSYSVVRGCDRIVPVDIYVPGCPPSAEALLYGILQLQKKIRNKGSLER

SEQ ID NO: 79726 - protein, 71 aa, Unknown
  Bacterial polypetide isolated from the Sargasso Sea
MNSKENQIPDEFKKLAKDFSENGFITTSLDNLANWARTGSLHWMTFGLACCAVEMMQTSMPRYDLERFGAA

SEQ ID NO: 79727 - protein, 49 aa, Unknown
  Bacterial polypetide isolated from the Sargasso Sea
HYSYSVVRGCDRIVPVDVYVPGCPPSAESLLYGILQLQKKIRNKGSLKR

SEQ ID NO: 79728 - protein, 161 aa, Unknown
  Bacterial polypetide isolated from the Sargasso Sea
MKISRFLKTIFLLDFLTALLIALKELFKAKKTINYPFEKGKLSPRSRGEHALRRYPNGEERCIACKLCEAVCPAQAITIESAERSDGSRKTTRYDIDMLKCIYCGLCEESCPVDAIVQGPNFEFATETREELYYNKEKLLANGDRWESVLAANIKADSPYR

SEQ ID NO: 79729 - protein, 211 aa, Unknown
  Bacterial polypetide isolated from the Sargasso Sea
MKKTKSLNLNFGPQHPAAHGVLRLILELDGEIIEKADPHIGLLHRGTEKLIENKTYTQALPYFDRLDYVAPMNQEHAFALAVEKILNIEVPTRAQYLRVIFCEIGRILSHLLNVTTQAMDVGALTPTLWGFEEREKLMGFYEKVSGSRLHANYFRPGGVHQDIPRGMDKEISEFCVNFPKIVDNLGTLITDNRIFKQRNVDIGDCLKTRCS

SEQ ID NO: 79730 - protein, 70 aa, Unknown
  Bacterial polypetide isolated from the Sargasso Sea
LAWVPGIIWFFLKTAIFLFMYLWMRATFPRYRYDQVMRLGWKVLIPVTIVWIFILALAVHAQCPPWFSTT

SEQ ID NO: 79731 - protein, 215 aa, Unknown
  Bacterial polypetide isolated from the Sargasso Sea
MDFPILSSLILLPTIGAIFILFGRSSSNYNAAKYISIFISLANFFISLYLWYLFDENTSSFQFVEERIWLQGFINYKVGIDGISILFIVLTAFITPLCIISVNSTIKNRLKDFLVAILFMETMMIGVFCSLDLVVFYLFFEAGLIPMFLIIGIWGGERRVYSAFKFFLYTLLGSVLMLVAIITIYWMTGTTDVIELYNIGIDAKYQNLLWLAFFS

SEQ ID NO: 79732 - protein, 278 aa, Unknown
  Bacterial polypetide isolated from the Sargasso Sea
GSSIFILLAALAMGFYGTEIPNFEFSHLAAQDFSQKFQILCYIGLLIAFGVKLPIVPLHTWLPDAHGEATAPVHMLLAGILLKMGGYALLRFNAQLLPVAHAQFAPLLIVLGVVNIIYAALTSFAQRNLKRKIAYSSISHMGFVLIGIGSFSSLGTSGAMLQMVSHGLIGASLFFLVGATYDRTKTLKLDEMSGVGQKMRIMFALWTACSLASLALPGMSGFVSELMVFTGFVTDEVYTLPFRVVMASLAAIGVILTPIYLLSMVREIFLWQRKNPIN

SEQ ID NO: 79733 - protein, 274 aa, Unknown
  Bacterial polypetide isolated from the Sargasso Sea
MTNLTLVFPEIFLSLSIMFLLILGVFKKNSSKLIQNISLIILLVTCVITFNETLVIQEILLFNSSVIIDYLSSFMKIVTLLAAFLVLVISSNYLKTLKIFKIEYPILILSSVLGMMIMISSNDLIVFYMGLELQSLALYVLATFNRDQLKSSEAGLKYFVLSALSSGLLLYGCSLIYGFTGSTNFNIIANQLNSNEYAITFGIVFILVGLAFKISAVPFHMWAPDVYEGSPTSVTLFFTMVPKIAAVTVFIRFLYVPFLNLIDQWQMILIFLSI

SEQ ID NO: 79734 - protein, 161 aa, Unknown
  Bacterial polypetide isolated from the Sargasso Sea
MKLNRIFKIIFLSEFIKAIFIAIKEILKKKKTINYPFEKGGISARFRGEHALRRYPNGEERCIACKLCEAVCPAQAITIENEERPDGSRKTIRYDIDMLKCIYCGLCEESCPVDAIVQGPNFEFSTETREELYYNKEKLLENGDRWESVLSENIKIDKPYR

SEQ ID NO: 79735 - protein, 320 aa, Unknown
  Bacterial polypetide isolated from the Sargasso Sea
MFFMVSANDLILFYLGLELQSLALYILAAIDRDNIRSTESGVKYFVLSSLSSGLLLYGCSLLYGFTGSTNFEVIKSELNPENIGSIFAMVFILVGLAFKVSAVPFHMWTPDVYEGSPTSITSFFSVAPKVAGLAAIIRFMQIPFANVLVEWQAIIIFISIASMILGAVAAIGQKNIKRLMAYSSIGHMGYALAGVATGTTSGYMSSLIYITIYVVMNIGAFACIFLMKKDGKYTEEINELSGISKKHPLIALSFLIILFSLAGIPPLGGFFAKFYVFMSVIESEMYVLAIIGLFNTVVSAFYYLRIIKIIYFDKLTKPFD

SEQ ID NO: 79736 - protein, 161 aa, Unknown
  Bacterial polypetide isolated from the Sargasso Sea
MKISRFFKTILMTDFIGGLLIAIKELFKSKKTINYPFEKGKISPRFRGEHALRRYPNGEERCIACKLCEAVCPAQAITIESTEREDGSRKTTRYDIDMMKCIYCGLCEESCPVDAIVQGPNFEFSTETREELYYTKEKLLDNGDRWENVLEANIKADNIHR

SEQ ID NO: 79737 - protein, 123 aa, Unknown
  Bacterial polypetide isolated from the Sargasso Sea
MNISRFFKTILMTDFIGGLYMALKEFFKPKKTINYPFEKGKISPRFRGEHALRRYPNGEERCIACKLCEAVCPAQAITIESAQRADGSRKTTRYDIDMMKCIYCGLCEESCPVDAIVQGPNFE

SEQ ID NO: 79738 - protein, 303 aa, Unknown
  Bacterial polypetide isolated from the Sargasso Sea
PFFPDKGEGKEVRWFALVVALITFLVTVGSYINGFDINNENVQLQESINWLPKLGLTWSVGADGISMPLILLTSFITSLAVLAAWPVKFKPKLFFFLILIMDGGQIAVFAVQDMLLFFLTWELELLPVYLLLAIWGGKNRQYAATKFIIYTAGSSIFILLAGLAMGFYGTEIPNFQFSHLANQDFSQNFQILCYVGLLIAFGVKLPIVPLHTWLPDAHGEATAPVHMLLAGILLKMGGYALLRFNAQLLPVAHAQFAPLLIVLGVVNIIYAALTSFAQRNLKRKIAYSSISHMGFVLIGIGRF

SEQ ID NO: 79739 - protein, 300 aa, Unknown
  Bacterial polypetide isolated from the Sargasso Sea
SHLAAQDFSQKFQILCYVGLLIAFGVKLPIVPLHTWLPDAHGEATAPVHMLLAGILLKMGGYALLRFNAQLLPVAHAQFAPLLIVLGVVNIIYAALTSFAQRNLKRKIAYSSISHMGFVLIGIGSFSSLGTSGAMLQMVSHGLIGASLFFLVGATYDRTKTLKLDEMSGVGQKMRIMFALWTACSLASLALPGMSGFVSELMVFTGFVTDEVYTLPFRIVMASLAAIGVILTPIYLLSMLREIFFGKENPKLTEERKLIDAEPREVYIIACLLLPIIGIGLYPRLVTESYIASINNLVDR

SEQ ID NO: 79740 - protein, 166 aa, Unknown
  Bacterial polypetide isolated from the Sargasso Sea
MLVTEMIRGMQLTMSMFWKQKLTLNYPNEKGALSPRFRGEHVLRRYPTGEERCIACKLCEAICPAQAITIEAEVREDGSRKTTRYDIDMTKCIFCGCAGATFFALAIRSPPLQPEGCVPLPRVGGTRARLRLPLTRRIVFPPARSPLSQLLPGGVPRRRHRRGAQL

SEQ ID NO: 79741 - protein, 129 aa, Unknown
  Bacterial polypetide isolated from the Sargasso Sea
INYPFEKGKISPRFRGEHALRRYPNGEERCIACKLCEAVCPAQAITIESSEREDGSRKTTRYDIDMMKCIYCGLCEESCPVDAIVQGPNFEFSTETREELYYTKEKLLDNGDRWENILAANIKSDNPYR

SEQ ID NO: 79742 - protein, 259 aa, Unknown
  Bacterial polypetide isolated from the Sargasso Sea
ISAVPFHMWAPDVYQGSPTSITLFFAILPKIAALTVFIRILYVPFINLMDQWQMIIVFLSIASMIFGSIAAIGQKNLKRLIAYSSISHMGYTLAGLTTGTNEGIQSSIIYISIYLVMNLGFFCCLFMLRRNDNYFEKIDDLSGLSKNHPALSFALLIILFSLAGIPPLAGFFAKFYIFMSVIEQQMYFLAIIGLLSTVIAAFYYLRIIKIIYFDPEKEKYDTDHNLGLKISLIISTLLILLYFTYPSPLIKIITNINII

SEQ ID NO: 79743 - protein, 296 aa, Unknown
  Bacterial polypetide isolated from the Sargasso Sea
FIFNDSYKIDYLSIFIKILILVSTLFVLLTSSQYLKSIKIYNVEYPILILSSILGMMVMVSSNDLIVFYIGLELQSMALYVLASFNRDNELSSESGLKYFVLSALSSGLLLYGCSLVYGFSSSTNFSEISFNYDQSNQGIIFGMVFILAGLAFKISAVPFHMWAPDVYQGSPTSVTLFFAILPKIAALTVFIRFLYTPFVNLIDQWQTIIIFISIASMLFGAVAAIGQKNLKRLIAYSSISHMGYALAGLTAGTNQGIQSSVSYISIYLVMNLAFFSCIFMLKRDDKYYENIEDLS

SEQ ID NO: 79744 - protein, 296 aa, Unknown
  Bacterial polypetide isolated from the Sargasso Sea
LAMGCGAPVAGIFHLVTHACFKAMLFLGSGSVIHAMEEVVGHQPVLAQDMRLMGGLRKKMPYTSTTFLIGCVAISGIPPLAGFWSKDEILGNAFISFPAFWFVGLLTAGMTAFYMFRLYFLTFEGDFRGENKELQKQLLIASQTTLDEENEEEHEEHGSIHESPWSMTFPLVFLAVPSVIIGFMGFPWDSKIANLLDPEEAETAAKAFELKEFLPLALASVVIASAGIIIAYQAYFVKKINLSVLFAEKFPSINRFLSNKWYLDDINEKLFVKGSRKLAKEVLEVDSKVVDGVVNL

SEQ ID NO: 79745 - protein, 137 aa, Unknown
  Bacterial polypetide isolated from the Sargasso Sea
VPNLIERIESGLLSHGNDMDNGDNPYECGFDKYVNINSDVDFLGKEKLKKIKAEGIKKKLMGVKIDVKEISVNGSMDLVDEDNNVIGELRSGCYNPTFKQVIGIAMINKPYFETSKSFKININGSDFDGKVCDLPFI

SEQ ID NO: 79746 - protein, 171 aa, Unknown
  Bacterial polypetide isolated from the Sargasso Sea
MTKKIKNLNLNFGPQHPAAHGVLRLILELDGEIVEKADPHIGLLHRGTEKLIENKTYMQAVPYFDRLDYVAPMNQEHAFALAIEKILKIDVPIRAQYIRVIFCEIGRILSHILNVTTQAMDVGALTPTLWGFEEREKLMGFYERVSGSRLHANYFRAGGVHQDLPQGLEQD

SEQ ID NO: 79747 - protein, 129 aa, Unknown
  Bacterial polypetide isolated from the Sargasso Sea
MKLNRILKIIFLSEFIKSIAIAFKEIFKNKKTINYPFEKGAISPRFRGEHALRRYPNGEERCIACKLCEAVCPAQAITIESEERSDGSRKTTRYDIDMLKCIYCGLCEESCPVDAIVQGPNFEFATETR

SEQ ID NO: 79748 - protein, 222 aa, Unknown
  Bacterial polypetide isolated from the Sargasso Sea
MKEIELNTTTINFGPQHPAAHGVLRLVVELEGEVVQRAEPHIGLLHRGTEKLIEYKTYLQAVPYFDRLDYVSPMCQEHAFALATEKLLGIEIPLRAKFIRVIFAEVTRILNHLLNIPAYAADIGAVTPFLWCFEEREKLLEFHEAVSGARFHAAYFRPGGVHQDMPEGMEDRLYEHFKNLPKFIDDLESLLTNNRILRQRSVDIGVISKSEAIEVGLFRPSS

SEQ ID NO: 79749 - protein, 257 aa, Unknown
  Bacterial polypetide isolated from the Sargasso Sea
MMVMISSNDLIVFYIGLELQSLSLYVLASFNRDQMKSSEAGLKYFVLSALSSGLLLYGCSLIYGFSGSTNFVIISENVSNDSFGLIFGLVFILVGLAFKISAVPFHMWAPDVYEGSPTSVTLFFAVVPKVAALTIFIRILYLPFFNMIDQWQIIIIFLAIASMIFGAVAAIGQKNIKRLIAYSSIGHMGYVLAGLSVGTNPGIQSSIIYISIYFVMNLALFCCLFMMRRNGKYYEEIEDLSGLSKNHPIISLSMLII

SEQ ID NO: 79750 - protein, 103 aa, Unknown
  Bacterial polypetide isolated from the Sargasso Sea
YAMFWLGEYANILLMCAMGSILFLGGWLSPIDLFPFNIIPAPIWLILKILFLFILFALIKAIVPRYRYDQLMKLGWKIFLPFSLIYVVLTASFLMYFDLLPGN

SEQ ID NO: 79751 - protein, 99 aa, Unknown
  Bacterial polypetide isolated from the Sargasso Sea
MKIYRIIKTIFMLDFAKGLTIAIKEAFKSKKTINYPFEKGRISPRFRGEHALRRYPNGEERCIACKLCEAVCPAQAITIESKERDDGSRKTTRYDIDML

SEQ ID NO: 79752 - protein, 188 aa, Unknown
  Bacterial polypetide isolated from the Sargasso Sea
YFEFGGDKHLIAKSGWSKQGGYEIYMEHNDSGLKLYDHLFEIGKEFNIRPGGPNLIERIESGLLSHGNDMDNGDNPYECGFDKYVNIDSDVDFLGKEKLKKIKAEGIKKKLMGVKIDAKEISVNGSMDLVDEDNNVIGELRSGCYNPTFKQVIGIAMINKPHFETSKSFKININGSDFDGKVCDLPFI

SEQ ID NO: 79753 - protein, 161 aa, Unknown
  Bacterial polypetide isolated from the Sargasso Sea
MNLNRILKTVFLTEFISAIIKAIKEIFKPKKTINYPFEKGHISPRYRGEHALRRYPNGEERCIACKLCEAVCPAQAITIESEERNDGSRKTTRYDIDMLKCIYCGLCQESCPVDAIVQGPNFEFATETREELYYNKEKLLDNGDRWESVLAKNLKTDKIYK

SEQ ID NO: 79754 - protein, 60 aa, Unknown
  Bacterial polypetide isolated from the Sargasso Sea
MLTEFLKDYLPIILFLIIALGLSLAFVAINYIAAPSKPDPEKLSAYECGFEPFNDSRMEF

SEQ ID NO: 79755 - protein, 94 aa, Unknown
  Bacterial polypetide isolated from the Sargasso Sea
MKLNRFFKIIFLSEFIKGIFIAIKEIFSKKKTINYPFEKGKISPRFRGEHALRRYPNGEERCIACKLCEAVCPAQAITIENEERSDGSRKTTRY

SEQ ID NO: 79756 - protein, 125 aa, Unknown
  Bacterial polypetide isolated from the Sargasso Sea
FEKGSISPRFRGEHALRRYPNGEERCIACKLCEAVCPAQAITIESEEKEDGSRKTTRYDIDMLKCIYCGLCQESCPVDAIVQGPNFEFATETREELYYNKKKLLDNGDRWEEVLSKNIKLDKIYR

SEQ ID NO: 79757 - protein, 161 aa, Unknown
  Bacterial polypetide isolated from the Sargasso Sea
MKISRILKTILLMDFLSGLLIAIKESFKAKKTLNYPFEKGKISPRFRGEHALRRYPNGEERCIACKLCEAVCPAQAITIDSYEREDGSRKTSRYDIDMLKCIYCGLCEESCPVDAIVQGPNFEFATETREELYYNKQKLLDNGDRWESLLAANIKADGPYR

SEQ ID NO: 79758 - protein, 70 aa, Unknown
  Bacterial polypetide isolated from the Sargasso Sea
YPFSLIPGPLWLIFKILLLFILFSLVKAIVPRYRYDQLMKLGWKIFLPLSLIWVVLTASYLFYFNLLPTN

SEQ ID NO: 79759 - protein, 291 aa, Unknown
  Bacterial polypetide isolated from the Sargasso Sea
LIAKSRRLRGTPYTSRIEEQGVTAYTIYNHMLLPAAFGSIEESYHHLKEHVQIWDVAAERQVEISGKDSAKLVQLMTCRDLSKSKDGRCYYCPIIDDNAGLINDPVVLRINENKWWISIADTDVILFAKGLAIGNKFDVEIIEPKVDIMAVQGPKSFKLMEKVFGEQITKLKFFGFDYFEFGGAKHLIAQSGWSKQGGYEVYVQNTEAGLKLYDHLFEIGKEFNVKPGCPNLIERIESGLLSHGNDMDNGDNPYECGFDKYINIDSDVIFLGKKELKTIKSEGINKKLMGV

SEQ ID NO: 79760 - protein, 302 aa, Unknown
  Bacterial polypetide isolated from the Sargasso Sea
MAFNGLISATVFIPTLGALVIAVLLKKNSHVFLFARFVALLNLILSALVLFSYQISESTDKFKLVDKYEHWIPFDSFKVQYYLGVDGFSAPLILLTGLLTAVAIFSSKNITHKIKQYFICLLLLETAVMGVFSSLDLFLFFIFWELELIPMFFLIMVWGSGRKNYSAMKFLIFTLISGALILFGILMLFASTKTFDITLLPSLIKEESLLIPMSIMFFVFFIAFSIKLPVWPLHTWLPDAHTDAPTAGSVMLAGVLIKMAGYGLIRICIGLFPESVSEYSLYIVILAVINVIYGAVITMRQT

SEQ ID NO: 79761 - protein, 209 aa, Unknown
  Bacterial polypetide isolated from the Sargasso Sea
MNFPILSSLILLPTIGALFLFFTKDKEGNNSTAKYVSLFTTSVNFLISIYLWISFDQSTSNFQFIEDRTWIEGFINYKVGVDGISILFIILTTFITPLCIISVNNSVKKRLRDFLIAILILESFMIGVFCALDLVVFYLFFEAGLIPMFLIIGIWGGPRRVYSAFKFFLYTLLGSVLMLVAIISIYWISGKTDVIKLYELGIDAKYQNL

SEQ ID NO: 79762 - protein, 53 aa, Unknown
  Bacterial polypetide isolated from the Sargasso Sea
MFAEFLKDYLPIILFLIIALGLSCAFVIINFILSPKNPDPEKLSAYECGFEPF

SEQ ID NO: 79763 - protein, 59 aa, Unknown
  Bacterial polypetide isolated from the Sargasso Sea
MEHLLSEYLPIAIFIGLSTVISVALLMVPFVIAPSNPDPEKLSAYECGFEAFSDSRMRL

SEQ ID NO: 79764 - protein, 122 aa, Unknown
  Bacterial polypetide isolated from the Sargasso Sea
GSVSPRSRGEHALRRYPNVRERCIACKLCEAVCPAQAITIESSEREDGSRKTTRYDIDMLKCIYCGLCEESCPVDAIVQGPNFEFSTETRDELYYNKEKLLENGDRWESVLAANINADSSHR

SEQ ID NO: 79765 - protein, 258 aa, Unknown
  Bacterial polypetide isolated from the Sargasso Sea
MDSYFSILFTEVYKILFLLVPVLVSVAMIVWLDRRVWAFVQKRRGPNVVGPFGLFQSLADALKYIFKEIIIPASSNKLVFVLAPVVTMTLALISWAVIPFGEDFVLADINVGILYLFAVSSLGVYGIIMGGWASNSKYPFLGAIRSAAQMVSYEVSIGVIIINVLLCVGSLNLSDIVMAQQNLWFVIPLFPMFVIFFISALAETNRPPFDLPEAEAELVAGYQTEYSGMMYAMFWLGEYANILLMCAMGAVLFLGWLV

SEQ ID NO: 79766 - protein, 165 aa, Unknown
  Bacterial polypetide isolated from the Sargasso Sea
MSRFKRFIFIIKEFLLIEVISGLLLTLKYFFKPKVTINYPFEKGFISSRFRGEHVLRRYESGEERCIACKLCEAVCPAQAITIEAEPREDGSRRTTRYDIDMTKCIYCGYCQESCPVDAIVEGPNYEFATETREELIYNKEKLLENGDRWEFEISKNLEKESKYL

SEQ ID NO: 79767 - protein, 72 aa, Unknown
  Bacterial polypetide isolated from the Sargasso Sea
MAKKIKNLNLNFGPQHPAAHGVLRLILELDGEIVEKADPHIGLLHRGTEKLIENKTYMQAVPYFDRLDYVAP

SEQ ID NO: 79768 - protein, 165 aa, Unknown
  Bacterial polypetide isolated from the Sargasso Sea
GIKYFVLSALSSGLLLYGCSLVYGFTGSTNFDQIALMTVDFNTGIIFGMVFIIVGLAFKISAVPFHMWSPDVYEGSPTSVTNFFSVVPKIAGVSIFIKFMYLPFREILTEWQYILIFMSIASMILSAVAAIGQKNIKRLMAYSSIGHIRYAIAGIAAGSENGFKS

SEQ ID NO: 79769 - protein, 258 aa, Unknown
  Bacterial polypetide isolated from the Sargasso Sea
PAAFGSLEDSYHHLKEHVQVWDVAAERQVEITGKDAAKLVQLMTCRDLSKSKDGRCYYCPIIDDNAGLINDPVVLRFNENKWWVSIADTDVILFAKGLAIGNKFDVNIIEPEVDIMAVQGPKSFKLMEKVFGEKITKLKFFGFDYFDFAGAKHLIAQSGWSKQGGYEIYVENNEAGLKLYDHLFEIGDEFNIRAGCPNLIERIESGLLSQGNDMDNGDNPYECGFDKYINIDSDVEFLGKEQLKKIKSEGIKRKLMGV

SEQ ID NO: 79770 - protein, 271 aa, Unknown
  Bacterial polypetide isolated from the Sargasso Sea
MEWFYQHILSLMIFTPLFASFFVFFSQTKKLALKITLFSSCLSFLISCLIWLKFDASSPSLQFVEAYSWIPSLGIQYIVGIDGLSLLLVLLTTLLSPLVLLSLSDKIKAYKEFLVLLLLLETAMLGALLAFDIVFFYVFWEAMLIPLYFIIGVWGGENKVYASTKFVLYTVSASLLMLIAALYLYLEHWHSFGIPSTSLLDLYKLSKLPLPAQNLLFFAFSLAFVVKMPLWPFHSWLPHAQTEAPTAGSVILAALFVKMGAYGFIRFSIPL

SEQ ID NO: 79771 - protein, 62 aa, Unknown
  Bacterial polypetide isolated from the Sargasso Sea
MTADFLKDYLPIILFLIIALGLSCAFVIINFILSPKNPDPEKLSAYECGFEPFQDSRMEFDV

SEQ ID NO: 79772 - protein, 126 aa, Unknown
  Bacterial polypetide isolated from the Sargasso Sea
MKISRFIKTILLADFISGLIIAIKESFKSKKTLNYPFEKGKISPRFRGEHALRRYPNGEERCIACKLCEAVCPAQAITIESTEREDGSRKTTRYDIDMLKCIYCGLCEESCPVDAIVQGPNFEFST

SEQ ID NO: 79773 - protein, 246 aa, Unknown
  Bacterial polypetide isolated from the Sargasso Sea
MEYLIVLYNEVYKILFLLIPILVSVAIIVWFDRRVWGFVQKRKGPNVVGPFGLFQTLADALKYIFKEIIIPASSNKVIFILAPIVTMTLALSAWAVIPLSEKMVIADINVGILYIFAISSLGVYGILMGGWASNSKYPFLGAVRSAAQMVSYEVSIGIIIINVLLCTGSLNLKEIVLAQQNLWFVVPLFPMFVIFFISALAETNRPPFDLPEAEAELVAGYQTEYSGMMYAMFWLGEYANILLMCA

SEQ ID NO: 79774 - protein, 243 aa, Unknown
  Bacterial polypetide isolated from the Sargasso Sea
MTKKIKNLNLNFGPQHPAAHGVLRLILELDGEVVEKADPHIGLLHRGTEKLIENKTYMQAVPYFDRLDYVAPMNQEHAFALAIEKILKIEVPSRAQYIRVIFCEIGRILSHILNVTTQALDVGALTPSLWGFEERETLMTFYERASGSRLHANYFRAGGVHQDLPAGLEDDIAKFCESFPKIINDLENLLTDNRIFKQRNVDIGVVTKEDALDYSFTGVMIRGSGVPWDLRKSQPYDCYEQIR

SEQ ID NO: 79775 - protein, 161 aa, Unknown
  Bacterial polypetide isolated from the Sargasso Sea
MNISRFFKTIFMTDFIGGLFIAIKELFKSKKTINYPFEKGKISPRFRGEHALRRYPNGEERCIACKLCEAVCPAQAITIESTEREDGSRKTTRYDIDMMKCIYCGLCEESCPVDAIVQGPNFEFSTETREELYYTKEKLLDNGDRWENVLEANIKADNIHR

SEQ ID NO: 79776 - protein, 161 aa, Unknown
  Bacterial polypetide isolated from the Sargasso Sea
MKLNRFFKIIFLSEFIKAIIIAISEIFKKKKTINYPFEKGSISPRFRGEHALRRYPNGEERCIACKLCEAVCPAQAITIESEEKPDGSRKTTKYDIDMLKCIYCGLCEESCPVDAIVQGPNFEFATETREELYYNKEKLLDNGDRWESVLAQNIKLDKPYR

SEQ ID NO: 79777 - protein, 261 aa, Unknown
  Bacterial polypetide isolated from the Sargasso Sea
YSHIKENFFSCEISCLYLLTIIGLLIIPASYDFVSLFVGLEISSIGSYVLIGYLNPNRLSLEGSIKYLILGAFSTGVFLFGIGLLYTETGSLNINEIVSNSSNIQLTYLSRLGGVFILCGLCFKISLVPFHMWAPDAYQAASSGITAFMAICIKLSIFVLSLRLSPLGMLLLPKDWVTCLVILSILSMTLGNIFALVQTSLKRMLAYSSIAHSGYMAIALCSMDTQNILPYQTILFYLISYGLSSLAIFGCLMLFESKDKE

SEQ ID NO: 79778 - protein, 288 aa, Unknown
  Bacterial polypetide isolated from the Sargasso Sea
MLVIFIGLEIMSISSYILVGMKRRVALSNEAALKYLLLGAFSTGFLLYGISLLYGATGTTYLPGIIESLQQGPFFSNPLAVAGVGLVIISMSFKIAIVPFHMWTPDVYTGAPTPVTGFLSAAAKAAGFAVFLRVLLTGIPLESENWKNLLWILAVLTMTVGNLMALRQNSVKRMLAYSSIAHAGYVMVAAVAGSAEALSGIFFYSCAYALMGTGAFGILTIRDLGKVPQTYDDLAGYGKRFPLPAFMMTLFMLSLVGLPLTGGFIAKLQIFSAALDEGWIWLTVIGVL

SEQ ID NO: 79779 - protein, 144 aa, Unknown
  Bacterial polypetide isolated from the Sargasso Sea
MKISRLLKTIFMIDFVTGLLIAIKETFKAKKTINYPFEKGSLGTRSRGEHALRRYPNGEERCIACKLCEAVCPAQAITIESKERDDGSRKTVRYDIDMLKCIYCGLCEESCPVDAIVQGPNFEFATESREELYYTKEKLLENGD

SEQ ID NO: 79780 - protein, 241 aa, Unknown
  Bacterial polypetide isolated from the Sargasso Sea
MVKKTKSLSLNFGPQHPAAHGVLRLILELDGEIVEKADPHIGLLHRGTEKLIEQKTYTQALPYFDRLDYVAPMNQEHAFALAAEKLLKVEVPIRAKYIRVIFCEIGRILSHILNVTTQALDVGALTPSLWGFEERETLMTFYERASGSRLHANYFRTGGVHKDIPMKLVEDIEKFCKSFPKIIDDLEGLLTDNRIFKQRNVEIGIVSKQEALDHSFSGVMLRGSGVPWDLRRSQPYEIYKD

SEQ ID NO: 79781 - protein, 253 aa, Unknown
  Bacterial polypetide isolated from the Sargasso Sea
IGTLALTGFPLLSGFYSKDAIIEFAYLKDSSLGYCAASIGIFTALLTSIYSWRLFFKTFHGNFNNQLIKIDKIHESPMIMIIPLIVLAVGSIFSGYFFKDLFIGIEKSYQFWSSSIFFLDPLSNDHPPKWFLYLTPTLVTISIPVAYYLFVKRKDLLLLIVDGNRPFYNFLKNKWYFDEIYEIIFVKSSKKIGIYFWKKIDGLIIDRFGPDGISNIIKILSNKAVKFQSGYIYQYAFIMLVGFSALLTYLIVK

SEQ ID NO: 79782 - protein, 240 aa, Unknown
  Bacterial polypetide isolated from the Sargasso Sea
MQEVYKILFLLIPVLVSVAMIVWLDRRVWAFVQKRQGPNVVGPFGLLQSLADALKYIFKEIIIPSSSNKVIFILAPIVTMTLALIAWAVIPFSATQVLADINVGILYLFAVSSLGVYGIIMGGWASNSKYPFLGAIRSAAQMVSYEVSIGVIIINVLLCVGSLNLNDIVIAQQNMWFVIPLFPMFVIFFISALAETNRPPFDLPEAEAELVAGYQTEYSGMMYAMFWLGEYANILLMCAM

SEQ ID NO: 79783 - protein, 235 aa, Unknown
  Bacterial polypetide isolated from the Sargasso Sea
MSKQTKTLNLNFGPQHPAAHGVLRLILELDGEIVEKADPHIGLLHRGTEKLIENKTYSQAIPYFDRLDYVAPMNQEHAFALAIEKILDIEVPIRGQYIRVIFCEIGRILSHILNITTQALDVGALTPSLWGFEEREKLMEFYERVSGSRLHANYFRPGGVHQDLPRGLDTDILKFCNEFPKIIDDLETLLTDNRIFKQRNVDIGIVSKDDALDYSFSGVMMRGSGVPWDLRKSQP

SEQ ID NO: 79784 - protein, 56 aa, Unknown
  Bacterial polypetide isolated from the Sargasso Sea
MDIAIADYLPILIFMFVALAISCLFVLANFLVAVNNPDPEKNSAYECGFEQLETLE

SEQ ID NO: 79785 - protein, 148 aa, Unknown
  Bacterial polypetide isolated from the Sargasso Sea
MKILRLLKTIFMVDFITGLLIAIREVFKSKKTINYPFEKGQVSPRARGEHALRRYPNGEERCIACKLCEAVCPAQAITIESTEREDGSRKTTRYDIDMLKCIYCGLCEESCPVDAIVQGPNFEFATETREELYYNKEKLLENGDRWEN

SEQ ID NO: 79786 - protein, 85 aa, Unknown
  Bacterial polypetide isolated from the Sargasso Sea
MYYFLGGWLPPIDINALSFIPAPFWLIFKILFLFILFALVKAIVPRYRYDQLMKLGWKVFLPLSLIWVVITAAYLLYFDLLPTQI

SEQ ID NO: 79787 - protein, 92 aa, Unknown
  Bacterial polypetide isolated from the Sargasso Sea
MSLIRFFKTIFMIDFLTGLIMAIKEIFKPKKTINYPFEKGSISPRARGEHALRRYPNGEERCIACKLCEAVCPAQAITIESSEREDGSRKTT

SEQ ID NO: 79788 - protein, 257 aa, Unknown
  Bacterial polypetide isolated from the Sargasso Sea
MTESNLTLNFGPQHPAAHGVLRLIMEMDGEVITNLDPHIGLLHRGTEKLAEIKPFNHSIGYMDRMDYVSMMCCEHPYVLAIESLLEIEPPKRAQYIRVMYDEITRIMNHLLWLGCHGLDIGAMALFLYCFREREDLYDAYEAVSGARMHATYYRPGGVYRDLPDEMPKYKANKFISEKKVKKLNYNRAGSLLDFIEDFTNRFPSLVDEYETLLTDNRIWKQRTVDIGVVTPERAMQLGFTGPMLRGSGIEWDLRRNQ

SEQ ID NO: 79789 - protein, 299 aa, Unknown
  Bacterial polypetide isolated from the Sargasso Sea
ITMTKKIKNLNLNFGPQHPAAHGVLRLILELDGEVVEKADPHIGLLHRGTEKLIENKTYMQAVPYFDRLDYVAPMNQEHAFALAIEKILNIEVPIRAQFIRVMFCEIGRILSHILNVTTQALDVGALTPSLWGFEERETLMTFYERASGSRLHANYFRAGGVHQDLPAGLEIDIAKFCESFPKILDDLENLLTDNRIFKQRNVDIGIVTKEDALDYSFSGVMIRGSGVPWDIRKSQPYDCYEQLEFKVPVGKNGDCYDRYLCRIEEMKESVSIIKQCLGKMEKGPIKTFDGKISPPSKK

SEQ ID NO: 79790 - protein, 199 aa, Unknown
  Bacterial polypetide isolated from the Sargasso Sea
MNFPILSSLILLPIVGALFLFFTKDKEGNNLTAKYVALFTTVVNFLISIYLWISFDQSTSSFQFVEDRTWIEGFINYKVGIDGISILFIILTTFITPLCIISVNNSVKNRLRDFLIAILIMESFMIGVFCALDLVVFYLFFEAGLIPMFLIIGIWGGARRVYSAFKFFLYTLLGSVLMLVAIISIYWITGTTDVVQLYE

SEQ ID NO: 79791 - protein, 230 aa, Unknown
  Bacterial polypetide isolated from the Sargasso Sea
MGFYGTEIPIFEFSHLAAQDFSQKFQILCYVGLLIAFGVKLPIVPLHTWLPDAHGEATAPVHMLLAGILLKMGGYALLRFNAQLLPVAHAQFAPLLIVLGVVNIIYAALTSFAQRNLKRKIAYSSISHMGFVLIGIGSFSSLGTSGAMLQMVSHGLIGASLFFLVGATYDRTKTLKLDEMSGVGQKMRIMFALWTACSLASLALPGMSGFVSELMVFTGFVTDEVYTLPF

SEQ ID NO: 79792 - protein, 64 aa, Unknown
  Bacterial polypetide isolated from the Sargasso Sea
MNLEDKTKKIPDEFKQLAKDFSDNGFITTSLDNLVNWSRTGSLHWMTFGLACCAVEMMQTSMPR

SEQ ID NO: 79793 - protein, 72 aa, Unknown
  Bacterial polypetide isolated from the Sargasso Sea
MIKCPEPRYVISWGSCANGGGYYHYSYSVVRGCDRIVPVDIYVPGCPPSAEALLYGIMQLQKKIRNKGSINR

SEQ ID NO: 79794 - protein, 84 aa, Unknown
  Bacterial polypetide isolated from the Sargasso Sea
MKLNRFFKIIFLSEFIKGLAIAIREILKRKKTINYPFEKGKISPRFRGEHALRRYPNGEERCIACKLCEAVCPAQAITIENEER

SEQ ID NO: 79795 - protein, 127 aa, Unknown
  Bacterial polypetide isolated from the Sargasso Sea
MAKEKKTLNLNFGPQHPAAHGVLRLILELDGEIVEHADPHIGLLHRGTEKLIENKTYLQALPYFDRLDYVAPMNQEHAFALAVEKILNIDVPIRAQFIRVMFCEIGRILSHILNITTQALDVGALTP

SEQ ID NO: 79796 - protein, 240 aa, Unknown
  Bacterial polypetide isolated from the Sargasso Sea
MSQIWLIPAFPLLGFLLNGFLGKFFGTRFVSFVGPMSIGLAFLQSIVLFFEMLKTEGHRIIENLYTWMAAGSFQVNISFQVDELSGLYLLIITGVGFLIHVYSIGYMKGESGYYRYFAYLNLFVFFMLILVLGDSFLLMFVGWEGVGLCSYLLIGYYFEKHSAAEACKKAFLFNRVGDFGVLSAVLLIFLSIGSLEFNTVNAQAAAQFEYGGVLVTVITLLLFLGATGKSAQIPLYVWLP

SEQ ID NO: 79797 - protein, 161 aa, Unknown
  Bacterial polypetide isolated from the Sargasso Sea
MKISRFFKTIFMTDFLRGLFMAIKEFFKPKKTINYPFEKGKISPRFRGEHALRRYPNGEERCIACKLCEAVCPAQAITIESAQREDGSRKTTRYDIDMMKCIYCGLCEESCPVDAIVQGPNFEFSTETREELYYTKEKLLDNGDRWENILDANIKADNIHR

SEQ ID NO: 79798 - protein, 138 aa, Unknown
  Bacterial polypetide isolated from the Sargasso Sea
MTDKDIKPITMNFGPQHPAAHGVLRLIMEMDGEIIERADPHIGLLHRGTEKLIENKTYIQALPYFDRLDYVSPMNQEHAYALAVEKLVNIDVPKRAKYIRVLFCEIGRILNHILNITTFAIDVGAMTPLLWGFEEREK

SEQ ID NO: 79799 - protein, 138 aa, Unknown
  Bacterial polypetide isolated from the Sargasso Sea
KESFKPKKTINYPFEKGKISPRFRGEHALRRYPNGEERCIACKLCEAVCPAQAITIESTERSDGSRKTTRYDIDMLKCIYCGLCEESCPVDAIVQGPNFEFATETREELYYNKEKLMENGDRWESILSANIKADNPYR

SEQ ID NO: 79800 - protein, 158 aa, Unknown
  Bacterial polypetide isolated from the Sargasso Sea
MKYIKSFTLFELLQGMFLTLKYMFKAKVTINYPHEKGPLSPRFRGEHALRRYPSGEERCIACKLCEAVCPAQAITIEAEPREDGSRRTTRYDIDMSKCIYCGLCQESCPVDAIVEGPNFEFATETREELMYTKEKLLENGDRWEQEIAQKIYLDRKYR

SEQ ID NO: 79801 - protein, 256 aa, Unknown
  Bacterial polypetide isolated from the Sargasso Sea
PEIVISVYALAALLLVAYTGKDRMAGILVWLTAALMAVMALWIGSTGQGTRTAFGGMFNDDGFARFAKVTILLSAAAVLVLGQEYMARRKILRFEYPLLIALSAVGMMVMVSAGDLMALYMGLELQSLALYVVASLRRDSAKSTEAGLKYFVLGALSSGLLLYGASLTYGYAGTTLFSGIIAAAEGQAPIGLLLGLVFVISGLAFKVSAVPFHMWTPDVYEGSPTPITAFFATAPKVAAMGLFARVVHDAFGGVVG

SEQ ID NO: 79802 - protein, 259 aa, Unknown
  Bacterial polypetide isolated from the Sargasso Sea
MLCYAGLLIAFGVKLPIVPLHTWLPDAHGEATAPVHMLLAGILLKMGGYALLRFNCELLPAAHSQFAPLLIALGVVNIIYAALTSFAQRNLKRKIAYSSISHMGFVLIGVGSFSALGTSGAMLQMISHGLIGASLFFLVGATYDRTHTLQLDEMGGVGQKMRIMFALWTVCALASLALPGMSGFVSELMVFAGFATDEAYTLPFRVVICALAAVGVVLTPIYLLSMLREIFFGKEKEELVSHSNLVDAEPREVYIIGCL

SEQ ID NO: 79803 - protein, 161 aa, Unknown
  Bacterial polypetide isolated from the Sargasso Sea
MSLIRILKTIFLIEFISGLYMAIKELFRKSKTINYPFEKGSISPRMRGEHALRRYPNGEERCIACKLCEAVCPAQAITIESTERSDGSRKTTRYDIDMLKCIYCGLCQESCPVDAIVQGPNFEFATETREELYYNKEKLLDNGDRWETVLAKNIKLDKPYR

SEQ ID NO: 79804 - protein, 130 aa, Unknown
  Bacterial polypetide isolated from the Sargasso Sea
MSLIRFFKTIFMIDFLTGLIMAIKEIFKPKKTINYPFEKGSISPRARGEHALRRYPNGEERCIACKLCEAVCPAQAITIESSEREDGSRKTTRYDIDMLKCIYCGLCEQSCPVDAIVQGPNFEFATETRE

SEQ ID NO: 79805 - protein, 161 aa, Unknown
  Bacterial polypetide isolated from the Sargasso Sea
MKIIRFLKTIFMVDFIIGLLISFREIFKSKKTINYPFEKGKISPRFRGEHALRRYPNGEERCIACKLCEAVCPAQAITIESAERSDGSRKTTRYDIDMMKCIYCGLCEESCPVDAIVQGPNFEFSTETREELYYTKEKLLDNGDRWENILAANIKSDNPYR

SEQ ID NO: 79806 - protein, 62 aa, Unknown
  Bacterial polypetide isolated from the Sargasso Sea
MNNKIDQVPDEFKQLADDFSKNGFITTSLDNLINWSRSGSLHWMTFGLACCAVEMMQTAMPR

SEQ ID NO: 79807 - protein, 175 aa, Unknown
  Bacterial polypetide isolated from the Sargasso Sea
MVGLNKVVYEIYVEHNDSGLKLYDHLFEIGKELNIKPGCPNLIERIESGLLSYGNDIDNRDNPYECGFDKYINIDSEVNFIGKEKLKKIKSDGIKKKLMGVMLDIDKISITGSLELSDQNNNIIGDLRSACYSPHFKKVIGIAMMKKPHWNVDQDIKAKINGEICVGKVCDLPFI

SEQ ID NO: 79808 - protein, 47 aa, Unknown
  Bacterial polypetide isolated from the Sargasso Sea
SYSVVRGCDRIVPVDVYVPGCPPSAEALLYGIMQLQKKIRNKGSLER

SEQ ID NO: 79809 - protein, 84 aa, Unknown
  Bacterial polypetide isolated from the Sargasso Sea
MKISRLLKTIFMIDFVTGLLIAIKETFKAKKTINYPFEKGSLGTRSRGEHALRRYPNGEERCIACKLCEAVCPAQAITIESKER

SEQ ID NO: 79810 - protein, 270 aa, Unknown
  Bacterial polypetide isolated from the Sargasso Sea
LSSGLLLYGCSLLYGFTGSTNFELIKNELTVENIGAIFAMVFILVGLSFKVSAVPFHMWTPDVYEGSPTSITNFFAVVPKVVGLAVIIRFMDVPFENILSDWQTIIIFISVASMILGAVAAIRQTNIKRLMAYSSIGHIGYILAGVATGTTYGYSSSLLYMTIYVIMNIGAFSCIYLMRKDGVYTEKISDLSGLSKKRPLLAVSFLIIFFSLAGIPPLGGFFAKFYVFLSVVESKMYILAIVGLMTTVISAFYYLKVVKIIYFDEAKTTF

SEQ ID NO: 79811 - protein, 317 aa, Unknown
  Bacterial polypetide isolated from the Sargasso Sea
RIYKKNPSSNEAAIKYFLFGALSSGIIIYGISLAYGITGSTNIGDVIYGFANLSPDMLPLGLLAIGMFIAGFGFKMGLVPFHMWLPDTYEGSPPTITALLAAGTKKAGFAAALRIVIMGAAALNLDWTLALGVIAIMTMTIGNVAAIMQKNLTRMLAYSSIGHAGYILIGISLAPYTGMGLQASLFHILNHAVMKGAAFIAVAGIVTTLAVTHLDKLKGLGRKMPITSLGLVISLLALAGVPPLNGFWSKLMLFGSAIDATSAVWWAPWLAVAGVLNSALSLAYYGWIMRKMYFEGETEKRVKEPASIVGVMIFSII

SEQ ID NO: 79812 - protein, 42 aa, Unknown
  Bacterial polypetide isolated from the Sargasso Sea
LFPWAISLGNIFLLGFSSMMIFLFILTVGFIYEWKKGALDWE

SEQ ID NO: 79813 - protein, 289 aa, Unknown
  Bacterial polypetide isolated from the Sargasso Sea
KLIFQATVIIFLISALILYFTPFEIQTNVSGIFIRDTFSKFFQILILLSVSCLLFMSKQYLQKNNLFKPEYPILIIFSTLGMMIMISSNNFLLLYLGLEIQSLSLYVVSSFRRDNYKSTEAGLKYFILGSLSSGLMLFGISLIYGSTGSINFEIISSMINFEGFFPGIVAGLVFLICGFAFKASAVPFHMWTPDVYEGSPTPVTAFFATVPKLAAVGVLLRVLFDCFGQIVESWQQVIIIISVLSMFLGSVAAIGQNNIKRLMAYSSIGHIGFVLMGVASGTDKGVSAV

SEQ ID NO: 79814 - protein, 225 aa, Unknown
  Bacterial polypetide isolated from the Sargasso Sea
MSEARIERLLSDLSELRSYIFINVDKLQSAVQQSELSTKGALNSLEFRLEAILQANLDTFWLLMCSILVFLMQAGFMCLESGLTRRKSSINVALKNLADFGIAVVTFWAFGFGLMYGASYSGLVGTKYFLFFTNVAGYQTYFVFQAMFVATAATIISGAVAERLKFFSYVIITFFTSGIIYPLVGHWIWAFDFSNPAKKFGWLGKLGFIDFAGASVVHSVGGWVA

SEQ ID NO: 79815 - protein, 161 aa, Unknown; identical to SEQ ID NO: 79378
  Bacterial polypetide isolated from the Sargasso Sea

SEQ ID NO: 79816 - protein, 109 aa, Unknown
  Bacterial polypetide isolated from the Sargasso Sea
KYSGMMYAMFWLGEYANILLMCAMGSILFLGGWLSPIDLFPFNIIPAPIWLILKILFLFILFALIKAIVPRYRYDQLMKLGWKIFLPFSLIYVVLTASFLMYFDLLPGN

SEQ ID NO: 79817 - protein, 239 aa, Unknown
  Bacterial polypetide isolated from the Sargasso Sea
FRFSVGMFPLASEYFTPLVFTLSVIAIIYTSLVALMQDDMKKLIAYSSVAHMGYVTLGIFTFNKQGIEGGIIQMFSHGLISAALFLCVGVLYDRAHSRLINNYGGVVNILPKYSFILMIFVLGTLGLPGTSGFVGEFLVLVGAFKVNFLVAILASIGVVLAAAYILWLYKRVIFGKLENNQIKEMKDLNKSEMGVLISIGILVIFFGFYPEPLFNTVNVSVDNLINNYNMEINKLTVLK

SEQ ID NO: 79818 - protein, 219 aa, Unknown
  Bacterial polypetide isolated from the Sargasso Sea
MIPVLVSVAMIVWLDRRVWAFVQKRQGPNVVGPFGLLQSIADALKYIFKEIIIPASSNKVIFILAPIITMTLALIAWAVIPFDEGQVLANINVGILYIFAVSSLGVYGIIMGGWASNSKYPFLGAIRSAAQMVSYEVSIGIIIINVLLCVGSLNLSDIVLAQKEMWFVVPLFPMFVIFFISSLAETNRPPFDLPEAEAELVAGYQTEYSGMMYAMFWLG

SEQ ID NO: 79819 - protein, 255 aa, Unknown
  Bacterial polypetide isolated from the Sargasso Sea
DFSQKFQILCYVGLLIAFGVKLPIVPLHTWLPDAHGEATAPVHMLLAGILLKMGGYALLRFNAQLLPVAHAQFAPLLIVLGVVNIIYAALTSFAQRNLKRKIAYSSISHMGFVLIGIGSFSSLGTSGAMLQMVSHGLIGASLFFLVGATYDRTKTLKLDEMSGVGQKMRIMFALWTACSLASLALPGMSGFVSELMVFTGFVTDEVYTLPFRVVMASLAAIGVILTPIYLLSMLREIFFGKENPKLIEERKLIDA

SEQ ID NO: 79820 - protein, 141 aa, Unknown
  Bacterial polypetide isolated from the Sargasso Sea
LTFKYIFKSKVTINYPHEKGPLSPRFRGEHALRRYPSGEERCIACKLCEAVCPAQAITIEAEPREDGSRRTTRYDIDMVKCIYCGLCQESCPVDAIVEGPNFEFATETREELMYNKEKLLENGDRWEQEISQNIKLDSEYR

SEQ ID NO: 79821 - protein, 235 aa, Unknown
  Bacterial polypetide isolated from the Sargasso Sea
SNDLIVFYMGLVLQSLALYVLASFNRDNLLSTESGLKYFVLSALSSGLLLYGCSLTYGFSESTNFDQILINSTEFNYGTTFGIVFILVGLAFKISAVPFHMWAPDVYQGSPTSVTLFFAILPKIAALSVFIKFLYTPFANMNDQWQTIIVFISIASMIFGAVAAIGQKNLKRLIAYSSISHMGYALAGLATVSNQGIQSSITYISIYLVMNLAFFSCLFMLKRNDKYYENIEDLS

SEQ ID NO: 79822 - protein, 137 aa, Unknown
  Bacterial polypetide isolated from the Sargasso Sea
MATSIIFLPLLGFLFCFLFGKQFNYKVYQISTTSILFLCTLFSWIIFIQFVNNKETEIIFILNWITSGNFIVDWSIRLDTLTAVMFIVVTTVSACVHLYSIGYMEEDPSKIRFMGYLSLFTFFMLVLVSSNNLLQMF

SEQ ID NO: 79823 - protein, 55 aa, Unknown
  Bacterial polypetide isolated from the Sargasso Sea
MLSDFLKDYLPIIIFLVLALGLSCAFVVVNFILSPKKPDPEKLSAYECGFEPFED

SEQ ID NO: 79824 - protein, 268 aa, Unknown
  Bacterial polypetide isolated from the Sargasso Sea
SKEKKTLNLNFGPQHPAAHGVLRLILELDGEVVEHADPHIGLLHRGTEKLIENKTYLQALPYFDRLDYVAPMNQEHAFALAVEKILNIEVPIRAQFIRVMFCEIGRILSHILNITTQALDVGALTPSLWGFEERETLMTFYERVSGSRLHANYFRTGGVHQDLPRGLNEDIAKFCQNFPKVINDLETLLTDNRIFKQRNVDIGIVTKQDALDYSFSGVMLRGSGVPWDLRKSQPYECYDQLDFKIPIGKNGDCYDRYLCRIEEMKESV

SEQ ID NO: 79825 - protein, 280 aa, Unknown
  Bacterial polypetide isolated from the Sargasso Sea
DYLSSFMKILTLIAAFLVLIVSSNYLKSLKIFKIEYPILILSSVLGMMIMISSNDLIVFYMGLELQSLSLYVLATFNRDQIKSSEAGLKYFVLSALSSGLLLYGCSLIYGFTGSTNFDVIANQLNSNEYTITFGIVFILVGLAFKISAVPFHMWAPDVYEGSPTSVTLFFTMVPKIAALTVFIRFLFVPFLNLIDQWQTILIFLSIASMVFGAVAAIGQKNLKRLIAYSSIGHVGYALAGLVTGSNEGIQSSVIYITIYILMNLGLFSCLLMMKRKKCLL

SEQ ID NO: 79826 - protein, 205 aa, Unknown
  Bacterial polypetide isolated from the Sargasso Sea
MNLGPQHPAAHGVLRLILEMDGEVVERADPHIGLLHRGTEKLIEHKTYLQAVPYFDRLDYVSPMCQEHAFALAVEGLLKCEVPIRAQYIRVLFSELTRILNHCLNIATNAIDVGATTPLLWLFEEREKIMGFYEAVSGSRMHSNYFQPGGVAQDMPDGMLEDIRKFANDFVPTLKDVEKLLTNNRIWKQRMVDIGVVTAKEAMDL

SEQ ID NO: 79827 - protein, 277 aa, Unknown
  Bacterial polypetide isolated from the Sargasso Sea
TIGIIFAMVFILVGLAFKVSAVPFHMWTPDVYEGSPTSVTSFFSVVPKVAGIVIFIRFMYLPFQEILDQWKYILVFISIASMILGAVAAIGQNNIKRLIAYSSIGHIGYAIAGMTSGTENGFKSTLIYISIYAVMNIGAFACIFLMKRNGKYIEDIQELSGTSRNHPLMSLSLLIILFSLAGIPPMAGFFAKFYVFMAVVESGMFTLAAIGLVTTVVSAFYYIRIIKIMYFDDPKKPFEQLKDFGIYGSLIVSCIFLISFFLYPSILNEIISNISIF

SEQ ID NO: 79828 - protein, 172 aa, Unknown
  Bacterial polypetide isolated from the Sargasso Sea
KLPYTYALMIIGTLALTGFPFLSGFYSKDAIIEFAYLKGNTTGYYAAGIGIITAFLTSIYSWRLIFKTFHGDYKNKEVKIEETHESPLVMLVPLFILSIGAVFAGFLFKGLFIGHGDNLFWSESIKFLEPLSTEHPPLWFLLLTPCLVLLSIPIAYYLFVKNKELSNSIVSY

SEQ ID NO: 79829 - protein, 75 aa, Unknown
  Bacterial polypetide isolated from the Sargasso Sea
MNLEDRKKNIPEEFKQLAQDFSDNGFITTSLDNLVNWARTGSLHWMTFGLACCAVEMMQTSMPRYDLERFGAAPR

SEQ ID NO: 79830 - protein, 160 aa, Unknown
  Bacterial polypetide isolated from the Sargasso Sea
TNQVLKLYDHLFEIGKEFNIKPGGPNLIERIESGLLSHGNDMDNGDNPYECGFDKYINIDSDVDFLGKEKLKKIKSDGIRKKLMGVKIDTKEISVTGSMDLIDENNKVIGELRSGCYNPTFGQVIGIAMINKPHFEESKSFKININGTHFDGKVCDLPFI

SEQ ID NO: 79831 - protein, 159 aa, Unknown
  Bacterial polypetide isolated from the Sargasso Sea
MIKYIKSFTLFELLQGMFLTLKYMFKAKVTINYPHEKGPLSPRFRGEHALRRYPSGEERCIACKLCEAVCPAQAITIEAEPREDGSRRTTRYDIDMSKCIYCGLCQESCPVDAIVEGPNFEFATETREELMYTKEKLLENGDRWEQEIAQNIYLDRKYR

SEQ ID NO: 79832 - protein, 78 aa, Unknown
  Bacterial polypetide isolated from the Sargasso Sea
MNLQDRKKDIPEEFKQLAQDFSDNGFITTSLDNLVNWARTGSLHWMTFGLACCAVEMMQTSMPRYDLERFGAAPRASP

SEQ ID NO: 79833 - protein, 65 aa, Unknown
  Bacterial polypetide isolated from the Sargasso Sea
MTESNLTLNFGPQHPAAHGVLRLIMELDGEVVNNLDPHIGLLHRGTEKLAEIKPFNHSIGYMDRM

SEQ ID NO: 79834 - protein, 254 aa, Unknown
  Bacterial polypetide isolated from the Sargasso Sea
MENLQLVLPEIFLSLSIMFLLIFGVFKKNSSRLVQSLSLAVLIVTAVITFNETIGINETKLFNNSIIIDYLSSLMKIITLLAAFLVLIISSNYLKTFKIFKIEYPILILSSVLGMMVMINSNDLIVFYMGLELQSLALYVLATFNRDQIKSSEAGLKYFVLSALSSGLLLYGCSLIYGFTGSTNFDVIASQLNSDVYALTFGIVFVLVGLAFKISAVPFHMWAPDVYEGSPTSVTLFFTMVPKIAALTVFIRFL

SEQ ID NO: 79835 - protein, 317 aa, Unknown
  Bacterial polypetide isolated from the Sargasso Sea
PCIKRLMENFQYILPEIFISVSITMFLLFGVFKKNSASLVYNLSIISLVILLALIINLSSLDTIYLFNESYLIDNLSNYMKIILVGSGIFVMLTGSKYIQVINLNKIEYPILILSSILGMMIMISSNDLIVFYMGLELQSLALYVLASFNRDNLLSTESGLKYFVLSALSSGLLLYGCSLTYGFSESTNFDQILINSTEFNYGTTFGIVFILVGLAFKISAVPFHMWAPDVYQGSPTSVTLFFAILPKIAALSVFIKFLYTPFANMNDQWQTIIVFISIASMIFGAVAAIGQKNLKRLIAYSSISHMGYALAGLTTS

SEQ ID NO: 79836 - protein, 58 aa, Unknown
  Bacterial polypetide isolated from the Sargasso Sea
MIYNYLTDYLSIIIFLFIALFLSIGFIAANFLASPSNPDPEKLSAYECGFEAFDDSRM

SEQ ID NO: 79837 - protein, 156 aa, Unknown
  Bacterial polypetide isolated from the Sargasso Sea
MKISRFLKIIFLIDFISGLSIAIKEIFKSKKTINYPFEKGKISPRFRGEHALRRYPNGEERCIACKLCEAVCPAQAITIESTQREDGSRKTTRYDIDMLKCIYCGLCEESCPVDAIVQGPNFEFATETREELYYNKQKLLDNGDRWENVLTANIKA

SEQ ID NO: 79838 - protein, 196 aa, Unknown
  Bacterial polypetide isolated from the Sargasso Sea
MTRRENYSLNFGPQHPAAHGVLRLVLELDGEVVERADPHIGLLHRGTEKLIENKTYIQALPYFDRLDYVSPMCQEHAFSLAVEKLLDIDVPIRGQFIRVMFSEITRILNHILNLTTFALDVGAMTPFLWLFEEREVLMEFYERVSGSRLHSAYFRPGGVHRDLPDGLVDDISNFCQRFPKKINDLEKLLETNRIFR

SEQ ID NO: 79839 - protein, 161 aa, Unknown
  Bacterial polypetide isolated from the Sargasso Sea
MKLSRLIKTVLMVDFAKGLLIAIKEVFKAKKTINYPFEKGQVSTRARGEHALRRYPNGEERCIACKLCEAVCPAQAITIESSEREDGSRKTTRYDIDMLKCIYCGLCEESCPVDAIVQGPNFEFATETREELYYNKEKLLENGDRWENILAANIKADNPYR

SEQ ID NO: 79840 - protein, 107 aa, Unknown
  Bacterial polypetide isolated from the Sargasso Sea
RNDVCNVWLGEYANILLMCAMGSILFLGGWLSPVDNEVFSSIPAPLWLIFKILFLFILFALVKAIVPRYRYDQLMKLGWKVFLPFSLIWVVLTAGYLLYFNLLPGQT

SEQ ID NO: 79841 - protein, 71 aa, Unknown
  Bacterial polypetide isolated from the Sargasso Sea
MSKQRKKLNLNFGPQHPAAHGVLRLILELDGEVVEKADPHIGLLHRGTEKLIENKTYVQAIPYFDRLDYVH

SEQ ID NO: 79842 - protein, 78 aa, Unknown
  Bacterial polypetide isolated from the Sargasso Sea
MNNKLDQVPEEFKQLAKDFSKNGFITTSLNNLINWSRSGSLHWMTFGLACCAVEMMQTAMPRYDLERFGAAPRGSPRQ

SEQ ID NO: 79843 - protein, 241 aa, Unknown
  Bacterial polypetide isolated from the Sargasso Sea
MDYFITLINEIYKILFLVIPILVSVAMIVWLDRRVWGLVQKRRGPNVVGPFGLFQTLADALKYIFKEIIIPASANKTIFILAPIITMTLALVAWAVIPLSETLVLSDINVGILYLFAISSLGVYGIIMGGWASNSKYPFLGAIRSAAQMVSYEVSIGIIIINVLLCVGSLNLNDIVLAQKNLWYVIPLFPMFVVFFISALAETNRPPFDLPEAEAELVAGYQTEYSGMMYAMFWLGEYANI

SEQ ID NO: 79844 - protein, 203 aa, Unknown
  Bacterial polypetide isolated from the Sargasso Sea
MSKEKKTLNLNFGPQHPAAHGVLRLILKLDGEIVEHADPHIGLLHRGTEKLIEHKTYAQAIPYFDRLDYVAPMNQEHAFALAIEKLIKLEVPIRAQYIRVLFCEIGRILSHILNVTTQALDVGALTPSLWGFEERETLMTFYERVSGSRLHANYFRPGGVHQDLPAGLEEDIFKFCESFPKVIDDLENLLTDNRIFKQRNVDI

SEQ ID NO: 79845 - protein, 313 aa, Unknown
  Bacterial polypetide isolated from the Sargasso Sea
GGFLVLIISSTILKSLEIYNIEYPVLILSSILGMMVMISSNDLIVFYMGLELQSLALYVLATYNRDQLTSSEAGLKYFVLSALSSGLLLYGCSLVYGFSGSTNFDIISNQLNSEEYVLTFGIVFILVGLAFKISAVPFHMWAPDVYEGSPTTVTLFFSIVPKIAALTVFIRFLYVPFLNLIDQWQMIIVFLSIASMIFGAVAAIGQTNIKRLIAYSSIGHIGYTLAGLATVSNEGIQSSIIYISIYVVMNLALFSCLLMLRRKNQYYEDIDDLSGLSKNHPLLSLCLLLILFSLAGIPPLAGFFAKFYVFKAV

SEQ ID NO: 79846 - protein, 161 aa, Unknown
  Bacterial polypetide isolated from the Sargasso Sea
MNLNRFLKTIFLTEFFLAIIKAIREIFRPKKTINYPFEKGQISPRYRGEHALRRYPNGEERCIACKLCEAVCPAQAITIESEERKDGSRKTTRYDIDMLKCIYCGLCQESCPVDAIVQGPNFEFATETREELYYNKDKLLDNGDRWESVLAKNLKTDKIYK

SEQ ID NO: 79847 - protein, 268 aa, Unknown
  Bacterial polypetide isolated from the Sargasso Sea
MEYLNIIFQEVYKILFLLIPVLVSVAMIVWLDRRVWAFVQKRQGPNVVGPFGLLQSLADALKYIFKEIIIPASSNKVIFILAPIITMTLAMIAWAVIPFGEDQVLANINVGILYIFAVSSLGVYGIIMGGWASNSKYPFLGSIRSAAQMVSYEVSIGIIIINVLLCVGSLNLSDIVVAQKNMWFIIPLFPMFVIFFISALAETNRPPFDLPEAEAELVAGYQTEYSGMMYAMFWLGEYANILLMCALGSILFLGGWLSPIDLYPFNLI

SEQ ID NO: 79848 - protein, 161 aa, Unknown
  Bacterial polypetide isolated from the Sargasso Sea
MKLSRFFKTIFMTDFVGGLLIATKELFRSKKTINYPFEKGKISPRFRGEHALRRYPNGEERCIACKLCEAVCPAQAITIESAAREDGSRKTTRYDIDMMKCIYCGLCEEACPVDAIVQGPNFEFSTETREELYYTKEKLLDNGDRWENVLAANIKADNPYR

SEQ ID NO: 79849 - protein, 217 aa, Unknown
  Bacterial polypetide isolated from the Sargasso Sea
MTKKIKNLNLNFGPQHPAAHGVLRLILELDGEVVEKADPHIGLLHRGTEKLIENKTYMQAVPYFDRLDYVAPMNQEHAFALAIEKILNIEVPIRAQFIRVMFCEIGRILSHILNVTTQALDVGALTPSLWGFEERETLMTFYERASGSRLHANYFRAGGVHQDLPAGLENDIASFCESFPKILDDLENLLTDNRIFKQRNVDIGIVTKEDALDYSFS

SEQ ID NO: 79850 - protein, 200 aa, Unknown
  Bacterial polypetide isolated from the Sargasso Sea
MKEVEINSTTLNFGPQHPAAHGVLRLVVELDGEVVERAEPHIGLLHRGTEKLIEYKTYLQAIPYFDRLDYVSPMCQEHAFALSTEKLLNIDVPLRAQYIRVMFAEITRILNHLLNIPAYAADIGAVTPFLWCFEQRERLLEFHEAVSGARFHAAYFRPGGVHQDLPKGLEENLYKYINTLPKFVDDLEELLTNNRILRQR

SEQ ID NO: 79851 - protein, 161 aa, Unknown
  Bacterial polypetide isolated from the Sargasso Sea
MKISRIIKTVFMADFVAGLLIGIKEIFKSKKTINYPFEKGKISPRFRGEHALRRYPNGEERCIACKLCEAVCPAQAITIESELRNDGSRKTTRYDIDMLKCIYCGLCEESCPVDAIVQGPNFEFGTETREELYYNKKKLLENGDKWETVLAENIKADSPFR

SEQ ID NO: 79852 - protein, 276 aa, Unknown
  Bacterial polypetide isolated from the Sargasso Sea
LKEHVQIWDVAAERQVEISGKDSAKLVQLMTCRDLSKSKDGRCYYCPIIDDNAGLINDPVVLRLNENRWWVSLADSDVILFAKGLAIGNKFDVKISEPDVDIMAVQGPKSFKLMEKVFGEKIVNLKFFGFDYFEFGGDKHLIAKSGWSKQGGYEIYMEHNESGLKLYDHLFEIGKEFNIRPGGPNLIERIESGLLSHGNDMDNGDNPYECGFDKYVNIDSDVDFLGKEKLKKIKAEGVKKKLMGVKIDAKEISVNGSMDLVDEDNNVIGELRSGCY

SEQ ID NO: 79853 - protein, 157 aa, Unknown
  Bacterial polypetide isolated from the Sargasso Sea
MVKKTKSLSLNFGPQHPAAHGVLRLILELDGEVVEKADPHIGLLHRGTEKLIEQKTYTQALPYFDRLDYVAPMNQEHAFALAAEKLLNVEVPIRAKYIRVIFCEIGRILSHILNVTTQALDVGALTPSLWGFEERETLMTFYERASGSRLHANYLER

SEQ ID NO: 79854 - protein, 128 aa, Unknown
  Bacterial polypetide isolated from the Sargasso Sea
MLSIFLPLLSYFSCIFLNGFLKERVLNGVSCTLMIFSTLFSIVSLIIFKLNGDQNYILTNWIASGSLNIDWSLNLNLLTVSMVIMVNFISTIIHIYSIGYMSKDPRKVVFMGYLSLFTFFMLFLVLLL

SEQ ID NO: 79855 - protein, 61 aa, Unknown
  Bacterial polypetide isolated from the Sargasso Sea
MTKKTKSLNLNFGPQHPAAHGVLRLILELDGEIVEKADPHIGLLHRGTEKLIEQKTYTQAL

SEQ ID NO: 79856 - protein, 161 aa, Unknown
  Bacterial polypetide isolated from the Sargasso Sea
MSLIRFFKTIFMIDFLTGLIMAVKEIFKPKKTINYPFEKGSVSPRARGEHALRRYPNGEERCIACKLCEAVCPAQAITIESSEREDGSRKTTRYDIDMLKCIYCGLCEQSCPVDAIVQGPNFEFATETREELYYNKEKLLENGDRWENILAANINADSSHR

SEQ ID NO: 79857 - protein, 84 aa, Unknown
  Bacterial polypetide isolated from the Sargasso Sea
SILFLGGWLSPLDLFPFNVIPAPIWLILKILFLFILFALIKAIVPRYRYDQLMKLGWKIFLPFSLIYVVLTASFLMYFDLLPGN

SEQ ID NO: 79858 - protein, 260 aa, Unknown
  Bacterial polypetide isolated from the Sargasso Sea
NISLLVYLITAVITFNETLSINPTTLFNESIIIDYLSSLMKIITLLGAFVVLLISSNYLRTFKIFKIEYPILILSSVLGMMIMISSNDLIVFYMGLELQSLALYVLATFNRDQLKSSEAGLKYFVLSALSSGLLLYGCSLIYGFTGSTNFNVISTQFNTNEYAITFGIVFILVGLSFKISAVPFHMWAPDVYEGSPTSVTLFFTMVPKIAALTVFIRFLYVPFLNLIDQWQMILVFLSIASMLFGAIAAIGQKNLKRLIA

SEQ ID NO: 79859 - protein, 239 aa, Unknown
  Bacterial polypetide isolated from the Sargasso Sea
MLLPVLTAVALMVWLDRRVWAFVQKRRGPNVVGPFGLFQSLADALKYLFKEIIIPASSNKIIFILAPIVTMTLALVAWAVIPFNESLVIADINVGILYLFAVSSLGVYGIIMGGWASNSKYPFLGSIRSAAQMVSYEVSIGVIIINVLLCVGSLNLTDIVLAQENLWFIIPLFPMFVIFFISALAETNRPPFDLPEAEAELVAGYQTEYSGMMYAMFWLGEYANILLMCSLGSILFLGG

SEQ ID NO: 79860 - protein, 267 aa, Unknown
  Bacterial polypetide isolated from the Sargasso Sea
FLALSSIAVYGVMLAGWSSGSKYPLLGSVRASAQMISYEAALGLAIATVFLTSGSLSTHDIVASQVAGNWNVLATGVVPFLVFLVAGTAELNRPPFDLVEAEQELVGGFHTEYSSLRFALFFLAEFMNVITMSATAVTLFLGGPAGPILTDTLGWVWPVFWFSLKVFAFLFCFVWLRATLPRLRYDQLMDLGWKVLIPVAMGWFLLIGAMGVADNRGWPVVPVVLVGIAVMAGGAALLIGAVSKARAERLADAFPEHDDAPTPGGLR

SEQ ID NO: 79861 - protein, 224 aa, Unknown
  Bacterial polypetide isolated from the Sargasso Sea
MVKKTKSLSLNFGPQHPAAHGVLRLILELDGEIVEKADPHIGLLHRGTEKLIEQKTYTQALPYFDRLDYVAPMNQEHAFALAAEKLLNVEVPIRAKYIRVIFCEIGRILSHILNVTTQALDVGALTPSLWGFEERETLMTFYERASGSRLHANYFRTGGVHKDIPLKLVEDIEKFCKSFPKIIDDLEGLLTDNRIFKQRNVEIGIVSKQEALDHSFSGVMLRGS

SEQ ID NO: 79862 - protein, 158 aa, Unknown
  Bacterial polypetide isolated from the Sargasso Sea
KRFLKTIFMTEFIIGLSVAIKEVFKKKKTINYPFEKGKISPRARGEHALRRYPNGEERCIACKLCEAVCPAQAITIESKERSDGSRKTTRYDIDMLKCIYCGLCEESCPVDAIVQGPNFEFATETREELFYNKEKLLENGDRWENILAANIKADNAHR

SEQ ID NO: 79863 - protein, 161 aa, Unknown
  Bacterial polypetide isolated from the Sargasso Sea
MKITRFFKTILMTDFVGGLFIAVKEIFKSKKTINYPFEKGKISPRFRGEHALRRYPNGEERCIACKLCEAVCPAQAITIESSERADGSRKTTRYDIDMMKCIYCGLCEESCPVDAIVQGPNFEFSTETREELYYTKEKLLDNGDRWENVLAANIKSDNPYR

SEQ ID NO: 79864 - protein, 215 aa, Unknown
  Bacterial polypetide isolated from the Sargasso Sea
MSKEKKTINLNFGPQHPAAHGVLRLILELDGEVVEHADPHIGLLHRGTEKLIENKTYLQALPYFDRLDYVAPMNQEHAFALAVEKILDIEVPMRAQFIRVMFCEIGRILSHILNITTQALDVGALTPSLWGFEERETLMTFYERVSGSRLHANYFRTGGVHQDLPRGLTDDISKFCQNFPKVINDLETLLTDNRIFKQRNVDIGVVSKQDALDYS

SEQ ID NO: 79865 - protein, 161 aa, Unknown
  Bacterial polypetide isolated from the Sargasso Sea
MKINRVLKIIFLSEFISGLIIAVKEMFRPSKTINYPHEKGSISPRMRGEHALRRYPSGEERCIACKLCEAVCPAQAITIESTERPDGSRKTTRYDIDMLKCIYCGLCEESCPVDAIVQGPNFEFATETREELYYNKEKLLDNGDRWESVLAKNIKLDKPYR

SEQ ID NO: 79866 - protein, 291 aa, Unknown
  Bacterial polypetide isolated from the Sargasso Sea
GVDGINILLIILSTFLTPLVIVSIISGESKKKQELCSLLMILECGMLGALVAFDMLFFYVFWEIMLIPMYFIIGIWGGQNKIYATTKFVIYTVLGSLFMIAAAIMLYLLHYSQFGFYSTSLLDLYKVKIIDQNYQNLLFAAFAIAFAIKVPIWPFHTWLPHAHTEAPTSGSVILASVMLKMGTYGILRFAIPLFPEASILFSPYILSLGIVGIIFGALVAWVQKDAKKMIAYSSVSHLGYVIIGSVAFYAGKINEEALLGASYQMINHGISTGALFLLIGMIYERRHTRMI

SEQ ID NO: 79867 - protein, 142 aa, Unknown
  Bacterial polypetide isolated from the Sargasso Sea
MKEVELNTTTINFGPQHPAAHGVLRLVVELEGEVVQRAEPHIGLLHRGTEKLIEYKTYLQAVPYFDRLDYVSPMCQEHAFALATENLLGINVPERAKYIRVIFAEITRILNHLLNIPAYAADIGAVTPFLWCFEEREKLLEF

SEQ ID NO: 79868 - protein, 116 aa, Unknown
  Bacterial polypetide isolated from the Sargasso Sea
MAGIRTEPVTVNLGPQHPSTHGVFRLRVTFDGEEIIDSEPIFGYLHRGTEKLAESRNYVQIVTLTDRLDYVSSMSNNLAYVSAVEKLADIQVPERAQYIRVISAELQRIASHLMAT

SEQ ID NO: 79869 - protein, 391 aa, Unknown
  Bacterial polypetide isolated from the Sargasso Sea
MTKKIKNLNLNFGPQHPAAHGVLRLILELDGEVVEKADPHIGLLHRGTEKLIENKTYMQAVPYFDRLDYVAPMNQEHAFALAIEKILNIDVPIRAQYIRVMFCEIGRILSHILNVTTQALDVGALTPSLWGFEERETLMTFYERASGSRLHANYFRAGGVHQDLPAGLENDIARFCESFPKIINDLENLLTDNRIFKQRNVDIGVVTKDDALDYSFSGVMIRGSGIPWDLRKSQPYDCYSQLEFKIPIGKNGDCYDRYLCRIEEMKESVSIIKQCLSKMEKGPIKTFDGKISPPSKKEIKQSMEALIHHFKLFTEGYRVPKDEIYTAVEAPKGEFGVYLISDGSSKPYKCKIRAPGFSHLQSMDYLIKGHMLADVPAVLGSLDIVFGEVDR

SEQ ID NO: 79870 - protein, 391 aa, Unknown
  Bacterial polypetide isolated from the Sargasso Sea
MAKQQKTLNLNFGPQHPAAHGVLRLILELDGEVVEKADPHIGLLHRGTEKLIEHKTYTQAVPYFDRLDYVAPMNQEHAFALAIEKILKIEVPIRAQYIRVLFCEIGRILSHILNITTQALDVGALTPSLWGFEERETLMTFYERASGSRLHANYFRAGGVHKDLPRGLENDIADFIKKFPKIIDDLESLLTDNRIFKQRNVDIGIVTKQDALDYSFSGVMLRGSNVAWDLRKSQPYDCYEQMDFNIPVGKNGDCYDRYLCRVEEMRESIRIIDQCLKNMPKGPIKSLDGKITPPSKKELKESMEALIHHFKLFTEGYRVDKDEIYTAVEAPKGEFGVYLISDGSSKPYKCKIRAPGFSHLQAMDYLIKGHMLADVPAVLGSLDIVFGEIDR

SEQ ID NO: 79871 - protein, 161 aa, Unknown
  Bacterial polypetide isolated from the Sargasso Sea
MKISRILKTVLMIDFLTGLKIAIKETFKQKKTINYPFEKGSVSPRARGEHALRRYPNGEERCIACKLCEAVCPAQAITIESKEREDGSRKTTRYDIDMLKCIYCGLCEESCPVDAIVQGPNFEFATENREELYYNKEKLLENGDRWESVLAANIKADNSHR

SEQ ID NO: 79872 - protein, 350 aa, Unknown
  Bacterial polypetide isolated from the Sargasso Sea
MKKEKKTLNLNFGPQHPAAHGVLRLILELDGEVVEKADPHIGLLHRGTEKLIENKTYIQAVPYFDRLDYVAPMNQEHAFALAIEKILNIKVPIRAQYIRVVFCEIGRILSHILNVTTQAMDVGALTPTLWGFEERETLMGFYERVSGSRLHANYFRAGGVHKDLPTGLDNDILEFCDKFPRIINDLETLLTDNRIFKQRNVDIGIVSKQDALDYSFSGVMLRGSGVAWDLRKSQPYDCYEELDFKIPVGKNGDCYDRYLCRIEEMKESVNLIKQCLNNLPKGPIKTDDGKISPPPKKEIKQSMEALIHHFKLFTEGYRVDKDEIYTAVEAPKGEFGVYLISDGSSNLTNV

SEQ ID NO: 79873 - protein, 212 aa, Unknown
  Bacterial polypetide isolated from the Sargasso Sea
MVRILVVAVVILLCVAYLILWERKLIGWMHVRLGPNRVGPAGLLQPIADVLKLLLKEVIQPAQASRWIYMIAPIMVVVPAFAVWAVIPFQAGAVLGDINAGLLYAMAISSIGVYGVILAGWASNSKYAFLGAMRAAAQMVSYEISMGFALVVVLMTSGSLNLSDIVGSQERGIFAGYGLNFLSWNWLPLLPMFVVYFISGIAETNRHPFDVV

SEQ ID NO: 79874 - protein, 161 aa, Unknown
  Bacterial polypetide isolated from the Sargasso Sea
MKLSRILKTILLIDFLSGLIIAIKESFKSKKTLNYPFEKGKISPRFRGEHALRRYPNGEERCIACKLCEAVCPAQAITIESTEREDGSRKTTRYDIDMIKCIYCGLCEESCPVDAIVQGPNFEFSTETREELYYNKEKLLDNGDRWESLLAANIKADNPYR

SEQ ID NO: 79875 - protein, 200 aa, Unknown
  Bacterial polypetide isolated from the Sargasso Sea
MLLVPILVSVAIIVWFDRRVWGFVQKRKGPNVVGPFGLLQTLADALKYIFKEIIIPASANKIVFILAPIVTMTLALSAWAVIPFSDKLFISDINVGILYIFAISSLGVYGIIMGGWASNSKYPFLGAIRSAAQMVSYEVSIGIIIINVLLCVGSLNLRDIVLAQKDLWFIVPLFPMFVIFFISALAETNRPPFDLPEAEA

SEQ ID NO: 79876 - protein, 162 aa, Unknown
  Bacterial polypetide isolated from the Sargasso Sea
MNFIIKNIKSFVLYELFLGMFLTLKYMFKSKVTINYPHEKGPLSPRFRGEHALRRYPNGEERCIACKLCEAVCPAQAITIDAEPREDGSRRTTRYDIDMSKCIYCGLCQESCPVDAIVEGPNFEFATETREELMYNKEKLLSNGDKWEYEISQNLELDSPYR

SEQ ID NO: 79877 - protein, 370 aa, Unknown
  Bacterial polypetide isolated from the Sargasso Sea
MKNDLFKFEYPILILFSTLGMMIMISSKNFLLLYLGLEIQSLSLYVISSFRRENLKSTEAGLKYFILGSLSSGLMLFGISLIYGSTGSINFELISSLITSKGFYPGIIAGLVFLISGFAFKASAVPFHMWTPDVYEGSPTPVTAFFATVPKIAAVAVLLRVLFDCFGPLLESWQQVIILISVLSMLLGSIAAIGQDNIKRLMAYSSIGHIGFVLIGIASGTDKGLSAVLIYMVLYVIMNIGVFVFILNMERNGVAVTSINSLNMYNEVSKGQTLFLTILLFSLAGIPPLAGFFGKFFIFNAAINAGLSWLAIIGGISSVIAAFYYLRIVYLMYFGMVSDPLNGNMPTSHWLILSGSAYINVDWNYKPLWS

SEQ ID NO: 79878 - protein, 183 aa, Unknown
  Bacterial polypetide isolated from the Sargasso Sea
MPKEKKTLNLNFGPQHPAAHGVLRLILELDGEVVEKADPHIGLLHRGTEKLIENKTYMQAVPYFDRLDYVAPMNQEHAFALAIEKIMEIDVPIRAQYIRVIFCEIGRILSHILNITTQALDVGALTPSLWGFEEREKLMEFYERVSGSRLHANYFRAGGVHQDLPRGLENDISEFCKSFPKNY

SEQ ID NO: 79879 - protein, 161 aa, Unknown
  Bacterial polypetide isolated from the Sargasso Sea
MKISRLFKTIFMLDFLIAMYVAIKEIFKPKKTINYPFEKGKISARARGEHALRRYPNGEERCIACKLCEAVCPAQAITIESTERDDGSRKTTRYDIDMMKCIYCGLCEESCPVDAIVQGPNFEFATETREELYYNKEKLLENGDRWENILAANIRADKPYR

SEQ ID NO: 79880 - protein, 141 aa, Unknown
  Bacterial polypetide isolated from the Sargasso Sea
MAIKELFRKSKTINYPFEKGPISPRMRGEHALRRYPNGEERCIACKLCEAVCPAQAITIESSERSDGSRKTTRYDIDMLKCIYCGLCQESCPVDAIVQGPNFEFATETREELYYNKEKLLQNGDRWESVLAKNIKMDKPYR

SEQ ID NO: 79881 - protein, 250 aa, Unknown
  Bacterial polypetide isolated from the Sargasso Sea
LALTGFPFLSGFYSKDAIIEFAYISETKFGIYAAGIGVLTAVMTSIYSWRLIFKTFHGDYKNKDLSIDTMHESPLSMMLPLVLLAVGAIFSGFLFKELFIGHDTMYNFWGESIKFLEPLRKEHPPTWFLFLTPTLVVLAIPLSYYLFVKNTKIVDEIVSINMPVYIFLQKKWYFDELYDQIFIKPSKYFGIFLWKKIDGLIIDKFGPDGISNLVKLFSFKAVKFQSGYIYQYAFIMLLGFSILLTLLIVK

SEQ ID NO: 79882 - protein, 302 aa, Unknown
  Bacterial polypetide isolated from the Sargasso Sea
MTKKIKNLNLNFGPQHPAAHGVLRLILELDGEIVEKADPHIGLLHRGTEKLIENKTYMQAVPYFDRLDYVAPMNQEHAFALAIEKILKIDVPIRAQFIRVVFCEIGRILSHILNVTTQALDVGALTPSLWGFEERETLMTFYERVSGSRLHANYFRTGGVHQDLPNGLEEDILKFCDNFPKIIDDLENLLTDNRIFKQRNVDIGIVSKEDALDYSFSGVMIRGSGIPWDLRKSQPYDCYNQLNFKIPVGKNGDCYDRYLCRIEEMKESVSIIKQCFSKMEKGPVKSSDGKITPPPKKEIKES

SEQ ID NO: 79883 - protein, 161 aa, Unknown
  Bacterial polypetide isolated from the Sargasso Sea
MKILRILKTILMLDFLSGLFIAIREAIKPKKTLNYPFEKGKISPRARGEHALRRYPNGEERCIACKLCEAVCPAQAITIESKQREDGSRKTTRYDIDMLKCIYCGLCEESCPVDAIVQGPNFEFATETREELYYNKEKLLENGDRWESVLAANIKADSPYR

SEQ ID NO: 79884 - protein, 121 aa, Unknown
  Bacterial polypetide isolated from the Sargasso Sea
KISPRFRGEHALRRYPNGEERCIACKLCEAVCPAQAITIESAERADGSRKTTRYDIDMMKCIYCGLCEESCPVDAIVQGPNFEFSTETREELYYTKEKLLDNGDRWENVLAANIKTDNPYR

SEQ ID NO: 79885 - protein, 150 aa, Unknown
  Bacterial polypetide isolated from the Sargasso Sea
MVDFLTGLLIALKELFKTKKTINYPFEKGKISPRARGEHALRRYPNGEERCIACKLCEAVCPAQAITIDSVERPDGSRKTTRYDIDMLKCIYCGLCEESCPVDAIVQGPNFEFATETREELYYNKEKLLENGDRWESVLAANIKADSPYR

SEQ ID NO: 79886 - protein, 248 aa, Unknown
  Bacterial polypetide isolated from the Sargasso Sea
MEYLQILGNEVYKILFLVIPVLVSVALIVWLDRRVWGLVQKRRGPNVVGPFGLFQTLADALKYIFKEIIIPASANKVVFILAPIVTMTLALVAWAVIPMSEDLVLADINVGVLYLFAVSSLGVYGIIMGGWASNSKYPFLGAIRSAAQMVSYEVSIGIIIINVLLCVGSLNLTDIVLAQKDLWYVIPLFPMFVIFFISALAETNRPPFDLPEAEAELVAGYQTEYSGMMYAMFWLEEYAKYSTYVCNG

SEQ ID NO: 79887 - protein, 161 aa, Unknown
  Bacterial polypetide isolated from the Sargasso Sea
MKIIRLLKTIFLIDFISAFFLAIKQIFIRKKTINYPFEKGKISPRFRGEHALRRYPNGEERCIACKLCEAVCPAQAITIESEIRLDGSRKTTKYDIDMVKCIYCGLCEESCPVDAIVQGPNFEFGTETREELYYDKEKLLENGDRWERVLKENIKIDSPHR

SEQ ID NO: 79888 - protein, 335 aa, Unknown
  Bacterial polypetide isolated from the Sargasso Sea
LTWSLGADGMSMPLILLTSFITALAVLAAWPVKFKPKLFFFLILVMDGGQIAVFAVQDMLLFFLTWELELIPVYLLLAIWGGKNRQYAATKFIIYTAGSSIFILLAALAMGFYGTEVPNFEFSHLAAQDFSQKFQILCYVGLLIAFGVKLPIVPLHTWLPDAHGEATAPVHMLLAGILLKMGGYALLRFNAQLLPVAHAQFAPLLIVLGVVNIIYAALTSFAQRNLKRKIAYSSISHMGFVLIGIGSFSSLGTSGAMLQMVSHGLIGASLFFLVGATYDRTKTLKLDEMSGVGQKMRIMFALWTACSLASLALPGMSGFVSELMVFTGFVTDEVY

SEQ ID NO: 79889 - protein, 161 aa, Unknown
  Bacterial polypetide isolated from the Sargasso Sea
MKITRFFKTILMTDFIGGLLIAIKELFKPKKTINYPFEKGKISPRFRGEHALRRYPNGEERCIACKLCEAVCPAQAITIESAAREDGSRKTTRYDIDMMKCIYCGLCEESCPVDAIVQGPNFEFSTETREELYYTKEKLLDNGDRWENVLEANIKADNIHR

SEQ ID NO: 79890 - protein, 467 aa, Unknown
  Bacterial polypetide isolated from the Sargasso Sea
MISFIPEIFTLFASMSILMLGLIKKAATKIHLFSITFSIILFALTIIIQNTEVIYIFDKTLKFDTGTAFFKQICISLFIIIILVSNQFLIDKKIQRAEFYSLLFLSLLGTLLLISSENLIMIFLGIELTALCLYSMIALSKNNILSYEAAIKYFVLSIIASGLLLFGFSFLYGISSSLNLSDILNDQLYFENLSIYFFSYILIFVGIAFKFAAAPFHMWLPDIYEGSPYIVTTFISSIPKIGIFYIAFRFLDNNLIMLNDLFLYFLMSIGLLSIALGNIFALSQTKVMRLLAYSGIANAGFIFLGIFVSSNSSFYVPAFYIIIYSISSVGIISILSVLSSKGFNIVYINDLKGFVNNSAFLSLSFLIILLSLAGIPFTAGFYAKYIIFNELISREFFVIALIAIIFTAIGLYYYLRIIWFIYFEDGFSTLYNVKNPISNFVIFLIPIIIIILFLVPDLLLDRLISIL

SEQ ID NO: 79891 - protein, 471 aa, Unknown
  Bacterial polypetide isolated from the Sargasso Sea
MINLNFIYSEIFICLAIMILLIIGVFKKNSAYLIYNLSILSLFVCLALILNFPIDANVELFNNSYKIDYLSSFMKILLILSGIFVLLSSSKYIQIVKINKIEYPILVLSSMTGMIVMISSNDLILFYIGLELQSLALYVLASFNRDNILSSESGLKYFVLSALSSGLLLYGCSLIYGFSGSTNFHLIAENISKDSYGLTFGIIFIITGLAFKISAVPFHMWAPDVYEGSPTSVTIFFAILPKIAALTVFIRILYVPFFNIIDQWQIIIVFLSIASMLFGSVAAIGQKNLKRLIAYSSIGHMGYALAGISTGTNQGIQSSITYISIYLFMNLAFFACLFMLRRDEKYFENIEDLSGLSKNHPILSFSFLIVLFSLAGIPPLVGFFAKFYIFTAVIEQSMYSLAIIGLLSTVIAAFYYLRLIKVIYFDPEKEKFEKNHNIGLKISLAFSTIFILFYFIYPSPLIEIIEKINII

SEQ ID NO: 79892 - protein, 227 aa, Unknown
  Bacterial polypetide isolated from the Sargasso Sea
MPKQNKTLNLNFGPQHPAAHGVLRLILELDGEVVEKADPHIGLLHRGTEKLIENKTYMQAVPYFDRLDYVAPMNQEHAFALAIEKILKIEVPARAQFIRVMFCEIGRILSHILNITTHALDVGALTPSLWGFEERETLMTFYERASGSRLHANYFRAGGVHQDLPRGLDNDIAKFCETFPKIINDLETLLTDNRIFKQRNVDIGIVSKEDALDYSFSGVMIRGSGIP

SEQ ID NO: 79893 - protein, 123 aa, Unknown
  Bacterial polypetide isolated from the Sargasso Sea
MTLSRIFKTIFLVEFIKGLLMAVKEMFKKSKTVNYPFEKGPISPRMRGEHALRRYPNGEERCIACKLCEAVCPAQAITIESTERSDGSRKTTKYDIDMLKCIYCGLCQESCPVDAIVQGPNFE

SEQ ID NO: 79894 - protein, 417 aa, Unknown
  Bacterial polypetide isolated from the Sargasso Sea
MAEIQNYTMNFGPQHPAAHGVLRLVLEMNGEVIQSADPHIGLLHRGTEKLAETKPYNQSIGYMDRLDYVSMVCNEHGYVLAIEKLLKLTPPKRAQYIRAMFDEITRILNHLMWLGTHGLDVGAMTMFLYCFREREDLMDCYEAVSGTRMHATYYRPGGVYRDLPDVMPKFETSDKRKKKQVDQLNYNREGSLLDFIESFTDRFPSCIDEYETLLTDNRIWKQRTVNIAVIPPERAINLGFTGAMLRGSGVEWDLRKKQPYSVYSELDFDIPVGVNGDCYDRYLVRVEEMRQSNKIIQQCIKWLRENPGPVMTDDKKISPPQRIGMKDDMESLIHHFKLFTEGYCVPEGEAYAAVEAPKGEFGVYLVSDGANKPYRVKIRAPGFSHLSAMSEMVVGHMLADVVAVMGTMDVVFGEIDR

SEQ ID NO: 79895 - protein, 161 aa, Unknown
  Bacterial polypetide isolated from the Sargasso Sea
MKISRLLKTIFMIDFISGFIIAIKQTYKPKKTINYPFEKGKISPRARGEHALRRYPNGEERCIACKLCEAVCPAQAITIESTERDDGSRKTTRYDIDMLKCIYCGLCEESCPVDAIVQGPNFEFSTETREELYYNKEKLLENGDRWESVLAANIRSDKAYR

SEQ ID NO: 79896 - protein, 452 aa, Unknown
  Bacterial polypetide isolated from the Sargasso Sea
MILGVFKKNSSLLIFNLSLVTISVSIILTFNETFSLNRITLFNNSIVIDHMASLMKIITLIGAFLVLGISSTYLKSFKIFKIEYPILILSSVLGMMIMISSNDLMVFYMGLELQSLALYVLATFNKDQLKSSEAGLKYFVLSALSSGLLLYGCSLIYGFSGSTNFDIIANQLTSDEYALTFGIVFILVGLAFKISAVPFHMWAPDVYEGSPTTVTLFFTMVPKIAALTVFIRFLYVPFLNLIDQWQMIIVFLSIASMIFGAIAAIGQTNIKRLVAYSSIGHVGYTLAGLATGSNDGIQSSIIYISIYVVMNLALFSCLLMLKRNDQYFEDIDDLSGLSKNHPLLSLSLLIILFSLAGIPPLAGFFAKFYVFKAVIEQSMYFLAIVGLLSTVIAAFYYLRIIKIIYFDKEKEQYDSDHGFWLKFSLTFSTILILLYFIFPSQLIEVVSRIIII

SEQ ID NO: 79897 - protein, 391 aa, Unknown
  Bacterial polypetide isolated from the Sargasso Sea
MTKKIKNLNLNFGPQHPAAHGVLRLILELDGEVVEKADPHIGLLHRGTEKLIENKTYMQAVPYFDRLDYVAPMNQEHAFALAIEKILEIDVPIRAQYIRVIFCEIGRILSHILNVTTQALDVGALTPSLWGFEERETLMTFYERASGSRLHANYFRAGGVHQDLPHGLENDIGKFCQTFPKIINDLESLLTDNRIFKQRNVDIGIVTKEDALDYSFSGVMIRGSGVPWDLRKSQPYDCYDQLDFKIPVGKNGDCYDRYLCRIEEMKESVSIIKQCLSKMEKGPIKSLDGKISPPAKKDIKKSMEALIHHFKLFTEGYRVPKDEIYTAVEAPKGEFGVYLISDGSSKPYKCKIRAPGFSHLQSMDYLIKGHMLADVPAVLGSLDIVFGEVDR

SEQ ID NO: 79898 - protein, 143 aa, Unknown
  Bacterial polypetide isolated from the Sargasso Sea
MFLTLKYMFKAKVTINYPHEKGPLSPRFRGEHALRRYPSGEERCIACKLCEAVCPAQAITIEAEPREDGSRRTTRYDIDMSKCIYCGLCEESCPVDAIVEGPNFEFATETREELMYTKEKLLENGERWEQEIAQNIYLDRKYR

SEQ ID NO: 79899 - protein, 319 aa, Unknown
  Bacterial polypetide isolated from the Sargasso Sea
MVILGVAGMIIPVINVVRRERGSSTFYGAIAFGGLLLALGFVIFQFYTDNVAPAAIFSEDVLVDDGFGSFFAIAMLIVSIMTVAGSFNYMRKKSNPAIYFSLILLSTIGMVLIAFATDLVMLFVAWELMSIPTYILAGFNKKSSASNEAAIKYFLFGALSSGIIIYGISLAYGITGSTNIGDVIYGFANLSPDMLPLGLLAIGMFIAGFGFKMGLVPFHMWLPDTYEGSPPTITALLAAGTKKAGFAAALRIIIMGAAALNLDWTLALGVIAIMTMTIGNVAAIMQKNLTRMLAYSSIGHAGYILIGISLAPFTGWDTG

SEQ ID NO: 79900 - protein, 161 aa, Unknown
  Bacterial polypetide isolated from the Sargasso Sea
MKISRILKTLFMTDFLRGLMIAIKQLFKTKKTLNYPFEKGKISPRARGEHALRRYPNGEERCIACKLCEAVCPAQAITIESEQRDDGSRKTTRYDIDMLKCIYCGLCEESCPVDAIVQGPNFEFATETREELYYNKEKLLENGDRWENVLAANIKADNPYR

SEQ ID NO: 79901 - protein, 418 aa, Unknown
  Bacterial polypetide isolated from the Sargasso Sea
AFGGMFINDAFSRFSKIIILLSGAVVLIMGQDYMSRRGFLRFEYPLIIALSVVGMMVMVSAGDLMALYMGLELQSLALYVIAAFKRDSLKSTEAGLKYFVLGALSSGLLLYGSALTYGYSGTTLFNGILENVNANSPSLGLLFGLALVIAGLAFKVSAVPFHMWTPDVYEGAPTPVTAFLATVPKMAAICLFIRVMFDAFGNILDDWQQIIVLISILSMFLGAFAAIGQNDFKRLLAYSSIAHMGYALIGLAAGTEFGVQSVLEYMTIYITMNIGVFAILMSMQRDGQSVTEIASLRMISETDPGKAVALLILLFSLAGVPPMLGFFAKFEVLRAAINADLIYLAIMGVLASVIGAFYYLKIVYLIYFGEMPETPLDNSKTPILKTIWTASAAIMVFGVVSLFGLEEMAKAAASSLLN

SEQ ID NO: 79902 - protein, 391 aa, Unknown
  Bacterial polypetide isolated from the Sargasso Sea
MTKKIKNLNLNFGPQHPAAHGVLRLILELDGEVVEKADPHIGLLHRGTEKLIENKTYMQAVPYFDRLDYVAPMNQEHAFALAIEKILDIDVPIRAQYIRVMFCEIGRILSHILNVTTQALDVGALTPSLWGFEERETLMTFYERASGSRLHANYFRAGGVHQDLPAGLENDIAKFCETFPKIINDLENLLTDNRIFKQRNVDIGVVTKDDALDYSFSGVMIRGSGIPWDLRKSQPYDCYDQLDFKIPVGKNGDCYDRYLCRIEEMKESVSIIKQCLARMEKGPIKTFDGKISPPPKAEIKQSMEALIHHFKLFTEGYRVPKDEIYTAVEAPKGEFGVYLISDGSSKPYKCKIRAPGFSHLQSMDYLIKGHMLADVPAVLGSLDIVFGEVDR

SEQ ID NO: 79903 - protein, 470 aa, Unknown
  Bacterial polypetide isolated from the Sargasso Sea
MNLDLIFPEIFLSLAIMSLLMVGVFKQNSTRLVYNLSTITLVILLSLVINLISINEYLVFNESYKIDILSTLMKTLTIIAAIFVMISSYNYLKSLNILKIEYPILILSSILGMMLMISSNDLIVFYLGLELQSLALYVLASFNRDNILSSESGLKYFVLSALSSGLLLYGCSLVYGFSGSTNFNIISNSSSNIDNGLIFGLVFIIVGLAFKISAVPFHMWAPDVYQGSPTSVTFFFAALPKVAALTVFIRFLYTPFINLIDQWQTILIFISIASMVFGAVAAIGQSNLKRLIAYSSIGHMGYALAGLASGTNQGIQSSVIYIFIYVVMTLAFFSCLLMLRKKNIFYENIDDLSGLSSNHPILSICLLIVLFSLAGIPPLAGFFAKFYVFMAVIEQSMYFLAIVGLMSTVIAAFYYLRLIKIIYFDKPKDTYEKDHNIGLRVTLAISTGFLILYFIYPGIFNELVSRINLI

SEQ ID NO: 79904 - protein, 472 aa, Unknown
  Bacterial polypetide isolated from the Sargasso Sea
MENLNLILPEIFISLSIMFLLILGVFKNDSSKITFNLSLFAILITTIITFNETFSVTRETLFNESVVIDSMSSLMKIITLIGGFLVLVISSTYLKTYKIYNIEYPVLILSSILGMMVMISSNDLIVFYMGLELQSLALYVLATYNRDQLKSSEAGLKYFVLSALSSGLLLYGCSLVYGFSGSTNFDIISNQLNSNEYVLTFGIVFILVGLAFKISAVPFHMWAPDVYEGSPTTVTLFFTIVPKIAALTVFIRFLYVPFLNLIDQWQMIIIFLSIASMVFGAVAAIGQTNIKRLIAYSSIGHIGYTLAGLATASNEGIQSSIIYISIYVVMNLALFSCLLMLRRKDQYYEDIEDLSGLSKNHPLLSLCLLVILFSLAGIPPLAGFFAKFYVFKAVLEQSMFFLAIVGLLSTVVAAFYYLRIIKIIYFDKEKDKYDTDHSLWLKFSLTVSTILILLYFIFPSQLIEVVSRINII

SEQ ID NO: 79905 - protein, 161 aa, Unknown
  Bacterial polypetide isolated from the Sargasso Sea
MNILRFFKTIFMTDFIGGLFIAIKELFKSKKTINYPFEKGKISPRFRGEHALRRYPNGEERCIACKLCEAVCPAQAITIESAEREDGSRKTTRYDIDMMKCIYCGLCEESCPVDAIVQGPNFEFSTETREELYYTKEKLLDNGDRWENVLEANIKADNIHR

SEQ ID NO: 79906 - protein, 391 aa, Unknown
  Bacterial polypetide isolated from the Sargasso Sea
MTKKIKNLNLNFGPQHPAAHGVLRLILELDGEVVEKADPHIGLLHRGTEKLIENKTYMQAVPYFDRLDYVAPMNQEHAFALAVEKILKIDVPIRAQYIRVIFCEIGRILSHILNVTTQALDVGALTPSLWGFEERETLMTFYERASGSRLHANYFRAGGVHQDLPKGLEEDISNFCETFPKVINDLESLLTDNRIFKQRNVDIGIVSKEDALDYSFSGVMIRGSGVPWDLRKSQPYDCYEDLDFKIPVGKNGDCYDRYLCRIEEMKESVSIIKQCLSKMEKGPVKSLDGKISPPSKKDIKQSMEALIHHFKLFTEGYRVPKDEIYTAVEAPKGEFGVYLISDGSSKPYKCKIRAPGFSHLQSMDYLIKGHMLADVPAVLGSLDIVFGEVDR

SEQ ID NO: 79907 - protein, 391 aa, Unknown
  Bacterial polypetide isolated from the Sargasso Sea
MTKEKKTLNLNFGPQHPAAHGVLRLILELDGEIVEKADPHIGLLHRGTEKLIENKTYTQAIPYFDRLDYVAPMNQEHAFALAIERIMDVEVPIRGQYIRVIFCEIGRILSHILNITTQALDVGALTPSLWGFEEREKLMGFYERVSGSRLHANYFRPGGVHKDLPRGLEKDILDFCKTFPKIIDDLETLLTDNRIFKQRNVDIGIVTKEDALNYSFSGVMLRGSGIPWDLRKSQPYDCYEQIDFKIPIGKNGDCYDRYLCRIEEMRESVKIIEQCLKNLPKGPVKSMDNKLTPPPKKEIKQSMEALIHHFKLFTEGYRVKKDEIYTAVEAPKGEFGVYLISDGSNRPYKCKIRAPGFSHLQAMDYLIKGHMLADVPAVLGSLDIVFGEIDR

SEQ ID NO: 79908 - protein, 146 aa, Unknown
  Bacterial polypetide isolated from the Sargasso Sea
MTGLLIALREMFKTKKTINYPFEKGKISPRFRGEHALRRYPNGEERCIACKLCEAVCPAQAITIESAERSDGSRKTTRYDIDMMKCIYCGLCEESCPVDAIVQGPNFEFSTETREELYYTKEKLLDNGDRWENVLAANIKSDNPYR

SEQ ID NO: 79909 - protein, 391 aa, Unknown
  Bacterial polypetide isolated from the Sargasso Sea
MTKKIKNLNLNFGPQHPAAHGVLRLILELDGEVVEKADPHIGLLHRGTEKLIENKTYMQAVPYFDRLDYVAPMNQEHAFALAVEKILKIDVPIRAQYIRVIFCEIGRILSHILNVTTQALDVGALTPSLWGFEERETLMTFYERASGSRLHANYFRAGGVHQDLPKGLEEDIAKFCETFPKIINDLESLLTDNRIFKQRNVDIGVVTKEDALDYSFSGVMIRGTGVPWDLRKSQPYDCYESLDFKIPVGKNGDCYDRYLCRIEEMKESVSIIKQCLAKMEKGPIKSLDGKISPPPKAEIKQSMEALIHHFKLFTEGYRVPKDEIYTAVEAPKGEFGVYLISDGSSKPYKCKIRAPGFSHLQSMDYLIKGHMLADVPAVLGSLDIVFGEVDR

SEQ ID NO: 79910 - protein, 236 aa, Unknown
  Bacterial polypetide isolated from the Sargasso Sea
MSIVFQEVYKILFLLVPVLVSVAMIVWLDRRVWAFVQKRQGPNVVGPFGLLQSLADALKYIFKEIIIPSSSNKVIFILAPIVTMTLALIAWAVIPFSATQVLADINVGILYLFAVSSLGVYGIIMGGWASNSKYPFLGAIRSAAQMVSYEVSIGVIIINVLLCVGSLNLNDIVIAQQNMWFVIPLFPMFVIFFISALAETNRPPFDLPEAEAELVAGYQTEYSGMMYAMFWLGEYA

SEQ ID NO: 79911 - protein, 482 aa, Unknown
  Bacterial polypetide isolated from the Sargasso Sea
MVILGVAGMIIPVINVLRRERGSSTFYGAIAFGALLLALGFVIFQFYDDNLAPAAVFSEDVLADDGFGSFFAIAMLIVSIMTVAGSFNYMRKRSNPAIYFSLILLSSIGMVLIAFATDLVMLFVAWELMSIPTYILAGFNKKNPSSNEAAIKYFLFGALSSGIIIYGISLAYGITGSTNIGDVIYGFANLSPDMLPLGLLAIGMFIAGFGFKMGLVPFHMWLPDTYEGSPPTITALLAAGTKKAGFAAALRIIIMGAAALNLDWTLALGVIAIMTMTIGNVAAIMQKNLTRMLAYSSIGHAGYILIGISLAPFTGMGLQASLFHILNHAVMKGAAFIAVAGIVTTLAVTHMDKIKGLGRKMPITAFGLVISLLALAGVPPLNGFWSKLMLFGSAIDATSVVWWAPWLAIAGVLNSALSLAYYGWIIRKMYFEGETEKRIKEPASIVGVMIFSVIFMVTIGVYPEPIIQFVEMITPSISTVMP

SEQ ID NO: 79912 - protein, 476 aa, Unknown
  Bacterial polypetide isolated from the Sargasso Sea
SYINGFDISNENVQLKENISWLPDLGLTWSVGADGMSMPLILLTSFITALAVLAAWPVKFKPKLFFFLILVMDGGQIAVFAVQDMLLFFLTWELELIPVYLLLAIWGGKNRQYAATKFIIYTAGSSIFILLAALAMGFYGTEIPNFEFSHLAAQDFSQKFQILCYIGLLIAFGVKLPIVPLHTWLPDAHGEATAPVHMLLAGILLKMGGYALLRFNAQLLPVAHAQFAPLLIVLGVVNIIYAALTSFAQRNLKRKIAYSSISHMGFVLIGIGSFSSLGTSGAMLQMVSHGLIGASLFFLVGATYDRTKTLKLDEMSGVGQKMRIMFALWTACSLASLALPGMSGFVSELMVFTGFVTDEVYTLPFRVVMASLAAIGVILTPIYLLSMLREIFFGKENPKLVEERKLIDAEPREVYIIACLLLPIIGIGLYPRLVTESYIASINNLVDRDLTAVKGAVKTNIFSGTKTNEILKAPTI

SEQ ID NO: 79913 - protein, 225 aa, Unknown
  Bacterial polypetide isolated from the Sargasso Sea
MDGSKGFEDVLTGEQKIRNFNINFGPQHPAAHGVLRLVLELDGEIVDRCDPHIGLLHRGTEKLMESRTYLQNLPYFDRLDYVAPMNQEHAWCLAIERLTGTEIPRRASLIRVLFSEIGRVLNHLLNVTTQAMDVGALTPPLWGSEERETLMIFYERACGARLHAAYFSPGGVHQDLTKELLADIDSWAVEFLKVLADIDALLTENRIFKQRNVDIGIVSEDRYSV

SEQ ID NO: 79914 - protein, 640 aa, Unknown
  Bacterial polypetide isolated from the Sargasso Sea
MSEARIERLLSDLSELRSYIFINVDKLQSAVQQSELSTKGALNSLEFRLEAILQANLDTFWLLMCSILVFLMQAGFMCLESGLTRRKSSINVALKNLADFGIAVVTFWAFGFGLMYGASYSGLVGTKYFLFFTNVAGYQTYFVFQAMFVATAATIISGAVAERLKFFSYVIITFFTSGIIYPLVGHWIWAFDFSNPAKKFGWLGKLGFVDFAGASVVHSVGGWVALSVLLIVGPRTGRFRKGEAGKKTFQGSNTPMAALGALILWFGWFGFNGGANLAMDLRIPLILINTFMAASAGLISSSIMGIIVMKKPEPMFMITGPIAGLVSITASCAFVSPANAIIIGAIAGILSGSFLVILEKLKIDDVVNAIPVHLICGIWGTLAIAIFGDMEKMGIEISRSQQLYVQLIGIVSIGAFCFISSYIIFYIVNYFYPLRVSKINEELGLNIAEHNASTDTHELLNILGKQVETQDYTLRAPQDSFTETGLIGTQYNRMMYKLEEAEKQKNMWKNRVSNEIKLAMQVQKKLMPDRDMDNYPVFGLNIPAREISGDFYDFYPLDDQIYFNLSDVSGKGVNAGMVMAKAITLFKIFARQQYKPNEILFEMNNDLHQTNPSGTFVTSIIGRYNLKTDEVELANARTST

SEQ ID NO: 79915 - protein, 391 aa, Unknown
  Bacterial polypetide isolated from the Sargasso Sea
MTKKIKNLNLNFGPQHPAAHGVLRLILELDGEVVEKADPHIGLLHRGTEKLIENKTYMQAVPYFDRLDYVAPMNQEHAFALAVEKILDIDVPIRAQFIRVMFCEIGRILSHILNVTTQALDVGALTPSLWGFEERETLMTFYERASGSRLHANYFRAGGVHQDLPAGLETDIAKFCETFPKIINDLENLLTDNRIFKQRNVDIGVVTKEDALDYSFSGVMIRGSGVPWDLRKSQPYDCYNQLEFKIPVGKNGDCYDRYLCRIEEMKESVKIIKQCLSKMEKGPIKTFDGKITPPSKKDIKQSMEALIHHFKLFTEGYRVPEDEIYTAVEAPKGEFGVYLISDGSSRPYKCKIRAPGFSHLQSMDYLIKGHMLADVPAVLGSLDIVFGEVDR

SEQ ID NO: 79916 - protein, 272 aa, Unknown
  Bacterial polypetide isolated from the Sargasso Sea
MFLLVPVLVSVAMIVWLDRRVWAFVQKRQGPNVVGPFGLLQSLADALKYIFKEIIIPASSNKIIFILAPIITMTLALIAWAVIPFGEDQVLANINVGILYIFAVSSLGVYGIIMGGWASNSKYPFLGSIRSAAQMVSYEVSIGIIIINVLLCVGSLNLSDIVLAQQKIWFIIPLFPMFVIFFISALAETNRPPFDLPEAEAELVAGYQTEYSGMMYAMFWLGEYANILLMCALGSILFLGGWLSPIELYPFNLIPGAIWLILKYYFYLFYLH

SEQ ID NO: 79917 - protein, 161 aa, Unknown
  Bacterial polypetide isolated from the Sargasso Sea
MKISRFLKTILMTDFVGGLFIAIKELFKPKKTINYPFEKGKISPRFRGEHALRRYPNGEERCIACKLCEAVCPAQAITIESAAREDGSRKTTRYDIDMMKCIYCGLCEESCPVDAIVQGPNFEFSTETREELYYTKEKLLDNGDRWENVLEANIKADNIHR

SEQ ID NO: 79918 - protein, 343 aa, Unknown
  Bacterial polypetide isolated from the Sargasso Sea
MVDLYKSLTIIAPELILALVAMTLLMIGSFYQKKSINLIITLSFITLIILSINELIPDENQTFAFNAFFIEDKLSSFAKFVIFFTSSLSIIMSANWLRNYDKSAFEFPVLILFSTLGMALMVSANDLVSLYLAIELQSLPLYVLATFNRNDSFSSESGVKYFILGALSSGLLLYGSSLIYGFTGSIFLNEISQLIVPSNQLGITFGLAFLLAGIIFKISAVPFHMWAPDVYQGAATPVTSFFASVPKMAAMIILIRILYVPFDNFITSWSQIIIFVSFSSILLGSVVAIWQSNIKRLIAYSSIAHMGFATLALSTGNKSDIESILIYMIIYIVANIGFFSLCD

SEQ ID NO: 79919 - protein, 391 aa, Unknown
  Bacterial polypetide isolated from the Sargasso Sea
MTKENEKFRINFGPQHPAAHGVLRLILDLDGEVVERVEPHIGLLHRGTEKLIENKTYLQALPYFDRLDYVAPMNQEHAFALATEQLLNINVPIRAQHIRVLFSEIGRILNHMINVPAQAMDVGALTPTLWGWEEREKLMTFYERACGSRLHAAYFRTGGVHQDIDDSLINDIYDFCDPFLKVVDDLESLLTENRIFKQRNVDIGVVSKKDVLDWGLTGVMARGSGYNWDLRKTQPYESYSEYDFKIPVGKNGDNYDRYLIRVEECRQSILIMKQAIEKLKPGPIVTDDRKVAPPKRAEMKVSMEALIHHFKLYTEGYDVGPGEVYASIEAPKGEFGVYLIADGTNKPYRCKIRAPGFAHLQALDYLTRGHLLPDLSAVLGSLDLVFGEVDR

SEQ ID NO: 79920 - protein, 161 aa, Unknown
  Bacterial polypetide isolated from the Sargasso Sea
MKLSRILKTIFMVDFATGLLIAIKEVFKSKKTINYPFEKGKLSPRARGEHALRRYPNGEERCIACKLCEAVCPAQAITIESTEREDGSRKTTRYDIDMLKCIYCGLCEESCPVDAIVQGPNFEFATETREELYYNKEKLLENGDRWENILAANIKADNPYR

SEQ ID NO: 79921 - protein, 391 aa, Unknown
  Bacterial polypetide isolated from the Sargasso Sea
MSKEKKTLNLNFGPQHPAAHGVLRLILELDGEVVEHADPHIGLLHRGTEKLIENKTYIQALPYFDRLDYVAPMNQEHAFALAIEKILNIEVPIRAKFIRVMFCEIGRILSHILNITTQALDVGALTPSLWGFEERETLMTFYERVSGSRLHANYFRAGGVHQDLPRGLNEDIAKFCIKFPKVIDDLETLLTDNRIFKQRNVDIGVVSKQDALDYSFSGVMLRGSGIPWDLRKSQPYECYDQMDFKIPVGKNGDCYDRYLCRIEEMRESVKIINQCLAQMPSGPVKTLDGKISPPPKKEIKESMEALIHHFKLFTEGYRVKKDEIYVAVEAPKGEFGVYLISDGSSKPYKCKIRAPGFSHLQAMDYLIKGHMLADVPAVLGSMDVVFGEIDR

SEQ ID NO: 79922 - protein, 392 aa, Unknown
  Bacterial polypetide isolated from the Sargasso Sea
MQKVELNTTTINFGPQHPAAHGVLRLVVELEGEVVQRAEPHIGLLHRGTEKLIEYKTYLQAVPYFDRLDYVSPMCQEHAFALATEKLLGIEIPERAKFIRVIFAEVTRILNHLLNIPAYAADIGAVTPFLWCFEEREKLLEFHEAVSGARFHAAYFRPGGVHQDMPEGMEEKLFNHFKNLPKFIDELESLLTNNRILRQRSVDIGVISKSEAIEWGCSGPVLRSAGVAWDLRRSQPYDAYDQVDFDIPVGKKGDCFDRYLVRIEEMRQSINIINQCLNKIKPGPIAIEDNKITPPKRNQMKKSMEALIHHFKLFTEGYRVPNGHVYTAVEAPKGEFGVYLVSDGSSKPYRCKIRAPGFAHLQILNALSKGHLMADIAAILGSLDIVFGEIDR

SEQ ID NO: 79923 - protein, 391 aa, Unknown
  Bacterial polypetide isolated from the Sargasso Sea
MTKKIKNLNLNFGPQHPAAHGVLRLILELDGEVVEKADPHIGLLHRGTEKLIENKTYMQAVPYFDRLDYVAPMNQEHAFALAIEKILKIDVPIRAQYIRVIFCEIGRILSHILNVTTQALDVGALTPSLWGFEERETLMTFYERASGSRLHANYFRAGGVHQDLPAGLEEDIGKFCETFPKIINDLENLLTDNRIFKQRNVDIGIVTKSDALDYSFTGVMMRGSGVPWDLRKAQPYDCYDQLEFKIPVGKNGDCYDRYLCRIEEMKESVSIIKQCLLKIEKGPIKSQDGKISPPPKKELKQSMEALIHHFKLFTEGYRVPKDEIYTSVEAPKGEFGVYLISDGSNKPYKCKIRAPGFSHLQSMDYLIKGHMLADVPAVLGSLDIVFGEVDR

SEQ ID NO: 79924 - protein, 143 aa, Unknown
  Bacterial polypetide isolated from the Sargasso Sea
MVIAIKESFKSKKTLNYPFEKGKISPRFRGEHALRRYPNGEERCIACKLCEAVCPAQAITIESTEKEDGSRKTTRYDIDMLKCIYCGLCEESCPVDAIVQGPNFEFSTETREELYYNKQKLLDNGDRWESLLAANIKADNPYR

SEQ ID NO: 79925 - protein, 266 aa, Unknown
  Bacterial polypetide isolated from the Sargasso Sea
MDFKNKVVVITGASSGIGEAAAEQFAKRGANLVLVARRKEKLEQVAQKLSKYSIKTLIQVCDVSDKQQVKQMSEKVIETFSRIDILVNNAGFVIYGKVEELSIEDIESQMQTNYFGTINCTKYFLPHFLKQNSGHMVNVASVGGSFGVPGIASYCATKFAMLGFSEGLHHELHGTNVGVTVVSPIMVRTSLFDHPSFKNFTKFATGISLSADTVANAIIKASDSSRLEIVVPSFVRIGIWFKQTFPFLINPIIGNRFRKQLDKRDS

SEQ ID NO: 79926 - protein, 150 aa, Unknown
  Bacterial polypetide isolated from the Sargasso Sea
MTDFISGLFIAIKELFKSKKTINYPFEKGKISPRYRGEHALRRYPNGEERCIACKLCEAVCPAQAITIESAERADGSRKTTRYDIDMMKCIYCGLCEESCPVDAIVQGPNFEFSTETREELYYTKEKLLDNGDRWENVLAANIKSDNPYR

SEQ ID NO: 79927 - protein, 161 aa, Unknown; identical to SEQ ID NO: 79378
  Bacterial polypetide isolated from the Sargasso Sea

SEQ ID NO: 79928 - protein, 321 aa, Unknown
  Bacterial polypetide isolated from the Sargasso Sea
MFLLIFGVFKKNSSQLVYNLTTVSLVAALALIINLDTQIQSSLFNNSYNIDSLARFMKILLILSGIFVMLSSSKYIQISKISKIEYPILILCSILGMMVMISSNDLIVFYMGLELQSLALYVLASFNRDNLLSTESGLKYFVLSALSSGLLLYGCSLIYGFSETTNFNQIMVNTKEIEYGLTFGIVFILVGLAFKISAVPFHMWAPDVYQGSPTSVTVFFALLPKIAALTVFIRFLYIPFYELGDQWQMIIIFLSIASMVFGAVAAIGQNNLKRLIAYSSISHMGYALAGLSTGTTQGVQSSITYITIYLVMNLAFFSCLF

SEQ ID NO: 79929 - protein, 402 aa, Unknown
  Bacterial polypetide isolated from the Sargasso Sea
MSSLMKIITLIGGFLVLVISSTYLKTFKIYNIEYPVLILSSILGMMVMISSNDLIVFYMGLELQSLALYVLATYNRDQLKSSEAGLKYFVLSALSSGLLLYGCSLVYGFSGSTNFDIISNQLNSEEYVLTFGIVFILVGLAFKISAVPFHMWAPDVYEGSPTTVTLFFTIVPKVAALTVFIRFLYVPFLNLIEQWQMIIVFLSIASMVFGAVAAIGQTNIKRLIAYSSIGHIGYTLAGLATASNEGIQSSIIYISIYVVMNLALFSCLLMLRRKDQYYEDIEDLSGLSKNHPLLSLCLLVILFSLAGIPPLAGFFAKFYIFKAVLEQSMFFLAIVGLLSTVVAAFYYLRIIKIIYFDKEKDKYDTDHSLWLKFSLTVSTILILLYFIFPSQLIEVVSRINVI

SEQ ID NO: 79930 - protein, 546 aa, Unknown
  Bacterial polypetide isolated from the Sargasso Sea
MSTYFYTHFSTLILGTLGAGLSNFPWLSASILFPIGSAFVIPFFPDKGDGKEVRWFALSIALITFLITVGSYINGFDISNENVQLKENISWLPDLGLTWSVGADGMSMPLILLTSFITALAVLAAWPVKFKPKLFFFLILVMDGGQIAVFAVQDMLLFFLTWELELIPVYLLLAIWGGKNRQYAATKFIIYTAGSSIFILLAALAMGFYGTEIPNFEFSHLAAQDFSQKFQILCYVGLLIAFGVKLPIVPLHTWLPDAHGEATAPVHMLLAGILLKMGGYALLRFNAQLLPVAHAQFAPLLIVLGVVNIIYAALTSFAQRNLKRKIAYSSISHMGFVLIGIGSFSSLGTSGAMLQMVSHGLIGASLFFLVGATYDRTKTLKLDEMSGVGQKMRIMFALWTACSLASLALPGMSGFVSELMVFTGFVTDEVYTLPFRVVMASLAAIGVILTPIYLLSMLREIFFGKENLKLIEERKLIDAEPREVYIIACLLLPIIGIGLYPRLITESYIASINNLVDRDLNAVKGAVKTNIFSGTKTNDILKAPTI

SEQ ID NO: 79931 - protein, 159 aa, Unknown; identical to SEQ ID NO: 79831
  Bacterial polypetide isolated from the Sargasso Sea

SEQ ID NO: 79932 - protein, 372 aa, Unknown
  Bacterial polypetide isolated from the Sargasso Sea
MKEIEINTTTINFGPQHPAAHGVLRLVVELDGEVVERAEPHIGLLHRGTEKLIEYKTYLQAVPYFDRLDYVSPMCQEHAFALATEKLLGIEVPQRAQYIRVIFAEITRLLNHLLNIPAYAADIGAVTPFLWCFEEREKLLQFHEAVSGARFHAAYFRPGGVHQDMPEGMEEKLGKHFETLPKFIDDLESLLTNNRILRQRSVDIGVISKDEAIEWGCTGPVLRSAGVPWDLRRSQPYDAYDKVEFEIAVGKKGDCFDRYLVRIEEMRQSISIIQQCLKKIKSGEISVIDNKITPPKRSEMKHSMESLIHHFKLFTEGYRVPEGETYNAVEAPKGEFGVFLVSDGSSKPYRCKIRAPGFAHLQTLDFLSQGHL

SEQ ID NO: 79933 - protein, 120 aa, Unknown
  Bacterial polypetide isolated from the Sargasso Sea
ISPRFRGEHALRRYPNGEERCIACKLCEAVCPAQAITIESAQREDGSRKTTRYDIDMMKCIYCGLCEESCPVDAIVQGPNFEFSTETREELYYTKEKLLDNGDRWENVLEANIKADNIHR

SEQ ID NO: 79934 - protein, 70 aa, Unknown
  Bacterial polypetide isolated from the Sargasso Sea
MAKEKKTLNLNFGPQHPAAHGVLRLILELDGEVVEKVDPHIGLLHRGTEKLIENKTYIQAVPYFDRLDYV

SEQ ID NO: 79935 - protein, 161 aa, Unknown; identical to SEQ ID NO: 79376
  Bacterial polypetide isolated from the Sargasso Sea

SEQ ID NO: 79936 - protein, 266 aa, Unknown
  Bacterial polypetide isolated from the Sargasso Sea
MENLNLILPEIFISLSIMFLLILGVFKNDSSKITFNLSLFAILITAIITINETFSVSRETLFNESVVIDHMSSLMKIITLIGGFLVLVISSTYLKTFKIFNIEYPVLILSSILGMMVMISSNDLIVFYMGLELQSLALYVLATYNRDQIKSSEAGLKYFVLSALSSGLLLYGCSLVYGFSGSTNFDIISNQLNSKEYVLTFGIVFILVGLAFKISAVPFHMWAPDVYEGSPTTVTLFFTIVPKIAALTVFIRFLYVPFLNLIDQWQ

SEQ ID NO: 79937 - protein, 392 aa, Unknown
  Bacterial polypetide isolated from the Sargasso Sea
MTEKENEKFRINFGPQHPAAHGVLRLILDLDGEVVERVEPHIGLLHRGTEKLIESKTYLQALPYFDRLDYVAPMNQEHAFALATEQLLNINIPIRAQHIRVLFSEIGRILNHMINVPAQAMDVGALTPTLWGWEEREKLMTFYERACGSRLHAAYFRTGGVHQDIDESLINDIYEFCDPFLKVVDDLESLLTENRIFKQRNVDIGVVTKKDVLDWGLTGVMARGSGYNWDLRKTQPYESYDEYDFKIPVGKNGDNYDRYLIRVEECRQSVLIMKQAIEKLKPGPIVTDDRKVAPPKRAEMKISMEALIHHFKLYTEGYDVGPGEVYASIEAPKGEFGVYLIADGTNKPYRCKIRAPGFAHLQALDYLTRGHLLPDLSAVLGSLDLVFGEVDR

SEQ ID NO: 79938 - protein, 143 aa, Unknown
  Bacterial polypetide isolated from the Sargasso Sea
MVKKTKSLNLNFGPQHPAAHGVLRLILELDGEVVEKADPHIGLLHRGTEKLIENKTYVQAVPYFDRLDYVAPMNQEHAFALAIEKILKIDVPIRAQYLRVMFCEIGRILSHILNITTQAMDVGALTPTLWGFEERETLMGFYE

SEQ ID NO: 79939 - protein, 482 aa, Unknown
  Bacterial polypetide isolated from the Sargasso Sea
MVILGVAGMIIPVINVVRKERGSSTFYGAIAFGALLLALGFVIFQFYDDNLAPAAIFSEDVLVDDGFGSFFAIAMLIVSIMTVAGSFNYMRKKSNPAIYFSLILLSSIGMVLIAFATDLVMLFVAWELMSIPTYILAGFNKKNPSSNEAAIKYFLFGALSSGIIIYGISLAYGITGSTNIGDVIYGFANLSPDMLPLGLLAIGMFIAGFGFKMGLVPFHMWLPDTYEGSPPTITALLAAGTKKAGFAAALRIVIMGAAALNLDWTLALGVIAIMTMTIGNVAAIMQKNLTRMLAYSSIGHAGYILIGISLAPYTGMGLQASLFHILNHAVMKGAAFIAVAGIVTTLAVTHLDKLKGLGRKMPITSLGLVISLLALAGVPPLNGFWSKLMLFGSAIDATSAVWWAPWLAVAGVLNSALSLAYYGWIMRKMYFEGETEKRVKEPASIVGVMIFSIIFMVTIGVYPEPIIQFVEMVTPSMSSVMP

SEQ ID NO: 79940 - protein, 68 aa, Unknown
  Bacterial polypetide isolated from the Sargasso Sea
MKEIEVNSTTINFGPQHPAAHGVLRLVVELDGEVVERAEPHIGLLHRGTEKLIEYKTYLQASTNILIV

SEQ ID NO: 79941 - protein, 497 aa, Unknown
  Bacterial polypetide isolated from the Sargasso Sea
MNNLQSLSFFYPELLLTLVILFAIIYDLLIDSSESGKVGWVLVFGLVLVAIAIWFQDSSKVTTLFTDAVVLDPFSTFFKLLIILATIFVSVVSLYSNELRDYRKGEYFYLLGIITFGLFMMVSSIDLIMVYVSIEIVSIMSFVLAGYLKKNTRSNEAALKYVVYGAFSSGIMLFGLSYIYGLTGSTNFFQIQQILAASGSESNSAILMAVVMILAGFGYKVSAVPFHFWTPDVYEGSPTTITAYLSIAPKAGAFAMMIRFFNQVLADGGAMSGLGSISRTDLPWASLISLLAVLTMTVGNVVAIQQDNIKRMLAYSSIAHAGYMLLAMPVMSGDSIYAIMVYLVMYLFMNLGAFFVVITIKNKTDGETFDDYKGLGWEMPIVGITMTLFMVSLTGLPPTAGFIGKFYIFASLIQGGGSFYWLVVIGGVNSVVSLYYYLRVVKVMYFDGDRKDSLVSPPKVLTGMLLATAVPTMVLGIYWVPIAKWIKESLVFFIQTI

SEQ ID NO: 79942 - protein, 161 aa, Unknown
  Bacterial polypetide isolated from the Sargasso Sea
MKINRIFKIIFLSEFVSALLKGVKEIFKSKKTINYPYEKGPISPRFRGEHALRRYPNGEERCIACKLCEAVCPAQAITIESEEKGDGSRKTTRYDIDMLKCIYCGLCQESCPVDAIVQGPNFEFSTETREELYYNKEKLLDNGDRWESVISKNLKLDKVYK

SEQ ID NO: 79943 - protein, 57 aa, Unknown
  Bacterial polypetide isolated from the Sargasso Sea
MIISEKEKKIPDEFKKLAKDFSDNGFITTSFDNLVNWARTGSLHWMTFGLACCAVEM

SEQ ID NO: 79944 - protein, 161 aa, Unknown
  Bacterial polypetide isolated from the Sargasso Sea
MKLRRIFKTVFMVDFITGLSMAVKELFKEKKTINYPFEKGKISPRFRGEHALRRYPNGEERCIACKLCEAVCPAQAITIESTERADGSRKTTRYDIDMLKCIYCGLCEESCPVDAIVQGPNFEFATETREELYYNKEKLLENGDRWESVLAANIKADNPYR

SEQ ID NO: 79945 - protein, 159 aa, Unknown
  Bacterial polypetide isolated from the Sargasso Sea
MLQIIKSFALYELLKGLILTFKYIFKSKVTINYPHEKGPLSPRFRGEHALRRYPNGEERCIACKLCEAVCPAQAITIEAEPRTDGSRRTTKYDIDMSKCIYCGLCEESCPVDAIVEGPNYEFATETREELMYNKEKLLSNGDMWEQEIAQNLQLDSKYR

SEQ ID NO: 79946 - protein, 325 aa, Unknown
  Bacterial polypetide isolated from the Sargasso Sea
EDSYHHLKQYVQIWDVAAERQVEISGKDSAKLVQLMTCRDLSKSKDGRCYYCPIIDDNAGLINDPVVLRLNENKWWVSLADSDVILFAKGLAIGNKFDVKIFEPDVDIMAIQGPKSFELMEKVFGDKIVNLKFFGFDYFEFGGDKHLIARSGWSKQGGYEIYVEHNVSGLKLYDHLFEIGKEFNIKPGCPNLIERIESGLLSYGNDIDNGDNPYECGFDKYINIDSEVNFLGKEKLKKIKSEGIKKKLMGVMLDIDKISITGSLDLSDQDNNIIGELRSACYSPHFKKVIGIAMMKKSHWNIDQDVKASINGDICVGKVCDLPFI

SEQ ID NO: 79947 - protein, 288 aa, Unknown
  Bacterial polypetide isolated from the Sargasso Sea
MFEYIQILSQEIYKILFLLVPILVSVAMIVWLDRRVWGLVQKRRGPNVVGPFGLFQTLADALKYVFKEIIIPASANKTVFILAPIVTMTLALVAWAVIPISEQLVLSDINVGILYLFAVSSLGVYGIIMGGWASNSKYPFLGAIRSAAQMVSYEVSIGIIIINVLLCVGSLNLKDIVLAQKDLWYVIPLFPMFVIFFISALAETNRPPFDLPEAEAELVAGYQTEYSGMMYAMFWLGEYANILLMCAMGAILFLGGWLPIIDIYPINYIPAPIWMILKILFLFFLFAL

SEQ ID NO: 79948 - protein, 161 aa, Unknown
  Bacterial polypetide isolated from the Sargasso Sea
MNLNRFLKTIFLTEFFLAIIKAIREIFRPKKTINYPFEKGKISPRYRGEHALRRYPNGEERCIACKLCEAVCPAQAITIESEERKDGSRKTTRYDIDMLKCIYCGLCQESCPVDAIVQGPNFEFATETREELYYNKKKLLDNGDRWESVLAKNLKTDKIYK

SEQ ID NO: 79949 - protein, 316 aa, Unknown
  Bacterial polypetide isolated from the Sargasso Sea
MIGVFKKNSESFIYNFSCIILLVGLAININLNPQFPIDLFNNSYKIDYFTTLIKSVILISAFLVMLCSLNYVKQNDILKIEYPILILSSILGMLVMVSSNDLIVFYVGLELQSLALYVLAAFKRDNILSSESGLKYFILSALSSGLLLYGCSLIYGFSSSTNFDLIYQNSESIEYGIIFGIVFVLVGLAFKITAVPFHMWAPDVYDGSPTSVTVIFAILPKIAALTVFINFLYGPFLEMFDQWQAVIIFLSIGSMVFGAVAAIGQKKLKRLIAYSSISHMGFALAGLSVGTNEGIQNSIIYLIIYLIMNIAFFCCL

SEQ ID NO: 79950 - protein, 161 aa, Unknown
  Bacterial polypetide isolated from the Sargasso Sea
MNIIRIFKTVFLIDFLIGLLIAIKETFKPKKTLNYPFEKGKISPRYRGEHALRRYPNGEERCIACKLCEAVCPAQAITIESTAREDGSRKTTRYDIDMLKCIYCGLCEESCPVDAIVQGPNFEFATHTREELYYNKEKLLENGDRWENVLAANIKADNPYR

SEQ ID NO: 79951 - protein, 379 aa, Unknown
  Bacterial polypetide isolated from the Sargasso Sea
MTKKIKNLNLNFGPQHPAAHGVLRLILELDGEVVEKADPHIGLLHRGTEKLIENKTYMQAVPYFDRLDYVAPMNQEHAFALAVEKILNVDVPIRAQYIRVIFCEIGRILSHILNVTTQALDVGALTPSLWGFEERETLMTFYERASGSRLHANYFRAGGVHQDLPKGLEEDIAKFCETFPKIINDLESLLTDNRIFKQRNVDIGVVTKEDALDYSFSGVMIRGSGVPWDLRKSQPYDCYKSLDFKIPVGKNGDCYDRYLCRIEEMKESVSIIKQCLSKMEKGPIKSLDGKISPPPKAQIKQSMEALIHHFKLFTEGYRVPKDEIYTAVEAPKGEFGVYLISDGSSKPYKCKIRAPGFSHLQSMDYLIKGHMLADVPAVL

SEQ ID NO: 79952 - protein, 400 aa, Unknown
  Bacterial polypetide isolated from the Sargasso Sea
AGVTVFISLHYIAEQEMNYGEYYVLLLSALMGMMVMTSSLEMLVIFIGLEIMSISSYILVGMKRRVALSNEAALKYLLLGAFSTGFLLYGISLLYGATGTTYLPGIIKSLQQGPFFSNPLAVAGVGLVIISMSFKIAIVPFHMWTPDVYTGAPTPVTGFLSAAAKAAGFAVFLRVLLTGIPLESENWKNLLWILAVLTMTVGNLMAFRQNSVKRMLAYSSIAHAGYVMVAAVAGSAEALSGIFFYSCAYALMGTGAFGILTIRDLGKVPQTYDDLAGYGKRFPLPAFMMTLFMLSLVGLPLTGGFIAKLQIFSAALDEGWIWLTVIGVLNSALSVYYYLRVVVFMYMREGAIPEGVSEEDNQLPGFAVAGLAGTAVAVLYLGIFPETLLNLATDSISALL

SEQ ID NO: 79953 - protein, 161 aa, Unknown
  Bacterial polypetide isolated from the Sargasso Sea
MNISRFFKTIFMADFLGGLYMAIKEFFKPKKTINYPFEKGKISPRFRGEHALRRYPNGEERCIACKLCEAVCPAQAITIESAQREDGSRKTTRYDIDMMKCIYCGLCEESCPVDAIVQGPNFEFSTETREELYYTKEKLLDNGDRWENILDANIKADNIHR

SEQ ID NO: 79954 - protein, 278 aa, Unknown
  Bacterial polypetide isolated from the Sargasso Sea
MKTFLIAKSRRLRGTPYTSRIEKQGVTAYTIYNHMLLPAAFGSVEDAYHHLKEHVQIWDVAAERQVEISGKDSAKLVQLMTCRDLSKSKDGRCYYCPIIDDNAGLINDPVVLRLNENRWWVSLADSDVILFAKGLAIGNKFDVKISEPDVDIMAVQGPKSFQLMEKVFGEKIVNLKFFGFDYFEFGGDKHLIAKSGWSKQGGYEIYMEHNESGLKLYDHLFEIGKEFNIRPGGPNLIERIESGLLSHGNDMDNGDNPYECGFDKYVNIDSDADFLGKE

SEQ ID NO: 79955 - protein, 161 aa, Unknown
  Bacterial polypetide isolated from the Sargasso Sea
MKISRFLKTILMLDFIGGLIIAIKELFKSKKTINYPFEKGKISPRYRGEHALRRYPNGEERCIACKLCEAVCPAQAITIESAERADGSRKTTRYDIDMMKCIYCGLCEESCPVDAIVQGPNFEFSTETREELYYTKEKLLDNGDRWENVLAANIKADNPYR

SEQ ID NO: 79956 - protein, 288 aa, Unknown
  Bacterial polypetide isolated from the Sargasso Sea
MNLNFGPQHPAAHGVLRLILELDGEVVEKVDPHIGLLHRGTEKLIEHKTYTQALPYFDRLDYVAPMNQEHAFALATEKLLKIDVPIRAQYLRVIFCEIGRILSHLLNITTQALDVGALTPSLWGFEERETLMTFYERASGSRLHANYFRTGGVHQDVPNNLLKDIGIFSEKFPKIIDDLENLLTDNRIFKQRNVQIGVVTKEEALSHSFSGVMLRGSGVAWDLRKSQPYECYKNLDFKIPVGKNGDCYDRYLCRVDEMRESVKIIKQCLKKIPTGPIKTIDGKISPPK

SEQ ID NO: 79957 - protein, 392 aa, Unknown
  Bacterial polypetide isolated from the Sargasso Sea
MKEVELNTTTINFGPQHPAAHGVLRLVVELEGEVVQRAEPHIGLLHRGTEKLIEYKTYLQAVPYFDRLDYVSPMCQEHAFALATENLLGINIPERAKYIRVIFAEITRILNHLLNIPAYAADIGAVTPFLWCFEEREKLLEFHEAVSGARFHAAYFRPGGVHQDMPEGMEEKLFEHFKTLPKFIDDLESLLTNNRILRQRSVDIGIISKTEAIEWGCSGPVLRSAGVAWDLRRSQPYDAYDQVDFEVPVGKKGDCFDRYLVRIEEMRQSISIINQCLNKIKQGPISIEDNKITPPKRNQMKKSMEALIHHFKLFTEGYRVPAGQVYSAVEAPKGEFGVYLVSDGSSKPYRCKIRAPGFAHLQTLDHLSKGHLMADIAAILGSLDIVFGEIDR

SEQ ID NO: 79958 - protein, 161 aa, Unknown
  Bacterial polypetide isolated from the Sargasso Sea
MKISRILKTIFLVDFLTGLLIALKELFKRKKTINYPFEKGKISPRARGEHALRRYPNGEERCIACKLCEAVCPAQAITIESAERSDGSRKTTRYDIDMLKCIYCGLCEESCPVDAIVQGPNFEFATETREELYYNKEKLLANGDRWESVLAANIKADSPYR

SEQ ID NO: 79959 - protein, 391 aa, Unknown
  Bacterial polypetide isolated from the Sargasso Sea
MSKQTKTLNLNFGPQHPAAHGVLRLILELDGEVVEKADPHIGLLHRGTEKLIENKTYSQAIPYFDRLDYVAPMNQEHAFALAIEKILDIEVPIRGQYIRVIFCEIGRILSHILNITTQALDVGALTPSLWGFEEREKLMEFYERVSGSRLHANYFRPGGVHQDLPRGLDTDILKFCNEFPKIIDDLETLLTDNRIFKQRNVDIGIVSKDDTLNYSFSGVMMRGSGVPWDLRKSQPYDCYEQLSFKVPIWKNGDCYDRYLCRVEEMRESVKIIKQCLEQLPKGPVKSQDNKITPPPKKEIKESMEALIHHFKLFTEGYRVKKDEIYTAVEAPKGEFGVYLISDGSSKPYKCKIRAPGFSHLQAMDYLIKGHMLADVPAVLGSLDIVFGEIDR

SEQ ID NO: 79960 - protein, 290 aa, Unknown
  Bacterial polypetide isolated from the Sargasso Sea
MKSFSIAKSRRLRGTPYTSRIEKQGVTAYTIYNHMLLPAAFGSIEDSYHHLKQYVQIWDVAAERQVEISGKDSAKLVQLMTCRDLSKSKDGRCYYCPIIDDNAGLINDPVVLRLNENKWWVSLADSDVILFAKGLAIGNKFDVKIFEPDVDIMAIQGPKSFELMEKVFGDKIVNLKFFGFDYFEFGGDKHLIARSGWSKQGGYEIYVEHNVSGLKLYDHLFEIGKEFNIKPGCPNLIERIESGLLSYGNDIDNGDNPYECGFDKYINIDSEVNFLGKEKLKKIKSEGIKK

SEQ ID NO: 79961 - protein, 81 aa, Unknown
  Bacterial polypetide isolated from the Sargasso Sea
MNLEERKKNIPEEFKQLAQDFSDNGFITTSLDNLVNWARTGSLHWMTFGLACCAVEMMQTSMPRYDLERFGAAPRASPRQS

SEQ ID NO: 79962 - protein, 471 aa, Unknown
  Bacterial polypetide isolated from the Sargasso Sea
MENLQLIIPELFISIMIMFLLIFGVFKKNSSQLVYNLTTVSLVAALALIINLDTQIQSSLFNNSYNIDSLARFMKILLILSGIFVMLSSSKYIQISKISKIEYPILILCSILGMMVMISSNDLIVFYMGLELQSLALYVLASFNRDNLLSTESGLKYFVLSALSSGLLLYGCSLIYGFSETTNFNQIMVNTKEIEYGLTFGIVFILVGLAFKISAVPFHMWAPDVYQGSPTSVTVFFALLPKIAALTVFIRFLYIPFYELGDQWQMIIIFLSIASMVFGAVAAIGQKNLKRLIAYSSISHMGYALAGLSTGTTQGVQSSITYITIYLVMNLAFFSCLFMLKRNDEYYENIDDLSGLSKNHPLLSLSLLVVLFSLAGIPPLAGFFAKFYIFVAVINEKMYFLAIVGLLATVIAAFYYLRIIKIIYFDPEKEKFETKHNLGLKFTLVASTFFILAYFIYPSGIVDIISQININ

SEQ ID NO: 79963 - protein, 247 aa, Unknown
  Bacterial polypetide isolated from the Sargasso Sea
MIEYLQILGQEIYKIIFVLVPILVSVAMIVWLDRRVWGLVQKRRGPNVVGPFGLFQTLADALKYIFKEIIIPASANKTVFILAPIVTMTLALVAWAVIPMSQNLVLADINVGILYLFAVSSLGVYGIIMGGWASNSKYPFLGAIRSAAQMVSYEVSIGIIIINVLLCVGSLNLNDIVLAQKELWYVIPLFPMFVIFFISALAETNRPPFDLPEAEAELVAGYQTEYSGMMYAMFWLGEYANILLMCA

SEQ ID NO: 79964 - protein, 399 aa, Unknown
  Bacterial polypetide isolated from the Sargasso Sea
MSEARIERLLSDLSELRSYIFINVDKLQSAVQQSELSTKGALNSLEFRLEAILQANLDTFWLLMCSILVFLMQAGFMCLESGLTRRKSSINVALKNLADFGIAVVTFWAFGFGLMYGASYSGLVGTKYFLFFTNVAGYQTYFVFQAMFVATAATIISGAVAERLKFFSYVIITFFTSGIIYPLVGHWIWAFDFSNPAKKFGWLGKLGFIDFAGASVVHSVGGWVALSVLLIVGPRTGRFRKGEEGKKTFQGSNTPMAALGALILWFGWFGFNGGANLAMDLRIPLILINTFMAASAGLISSSIMGIIVMKKPEPMFMITGPIAGLVSITASCAFVSPANAIIIGAIAGILSGSFLVILEKLKIDDVVNAIPVHLICGIWGTLAIAIFGDMEKMGIEISR

SEQ ID NO: 79965 - protein, 472 aa, Unknown
  Bacterial polypetide isolated from the Sargasso Sea
MENLNLILPEIFISLSVMFLLILGVFKKDSSQLIFNLSLFTILITAIITINETYSISRVTLFKDSVVIDPMASLMKVITLIGGFLVLVISSNYLKVFKIFKIEYPILILSSILGMMVMISSNDLMVFYMGLELQSLALYVLATFNRDQLKSSEAGLKYFVLSALSSGLLLYGCSLIYGFSGSTNFDVIANQLNSNEYALTFGIVFILVGLAFKISAVPFHMWAPDVYEGSPTSVTLFFTMVPKIAALTVFIRFLYVPFLNLIDQWQMIIIFLSIASMIFGAIAAIGQTNIKRLVAYSSIGHIGYTLAGLATGSNDGIQSSIIYISIYVVMNLALFSCLLMLKRNEQYYEDIDDLSGLSKNHPLLSLCLLIILFSLAGIPPLAGFFAKFYVFKAVIEQSMYFLAIVGLLSTVIAAFYYLRIIKIIYFDKEKEKYDTDHGIWLKFSLTFSTILILLYFIFPSQLIEVVSRINII

SEQ ID NO: 79966 - protein, 369 aa, Unknown
  Bacterial polypetide isolated from the Sargasso Sea
MKNFLIAKSRRLRGTPYTSRIEKQGVTAYTIYNHMLLPAAFGSVEDAYHHLKEHVQIWDVAAERQVEISGKDSAKLVQLMTCRDLSKSKDGRCYYCPIIDDNAGLINDPVVLRLNENRWWISLADSDVILFAKGLAIGNKFDVKISEPDVDIMAVQGPKSFQLMEKVFGEKIVNLKFFGFDYFEFGGDKHLIAKSGWSKQGGYEIYMEHNESGLKLYDHLFEIGKEFNIKPGGPNLIERIESGLLSHGNDMDNGDNPYECGFDKYINIDSDVDFLGKEKLRKIKSEGIKKKLMGVKIDTKEISVTGSMDLIDENNKVIGELRSGCYNPTFGQVIGIAMINKPHFEESKSFKININGSHFDGKVCDLPFI

SEQ ID NO: 79967 - protein, 353 aa, Unknown
  Bacterial polypetide isolated from the Sargasso Sea
YTSRVEKQGVTHYTVYNHMLLPAAFGPLDELYHHLKEHVQVWDAAVQRQLEISGKDSSKLVQLMTCRDLSKSKVGRCYYCPIIDDNAGLINDPVVLKLSDTRWWISLSDSDVGLFAKGLAIGRNFDVKISEPDVDIFSVQGPKSFKLMEKVLGPKITQLKFFGFDYFEFGGAKHLIARSGWSKQGGYEVYMEHTEAGLALYDKLFEVGDEFNLKPGCPNLIERIESSLLSYGNDMDLGDNPYECGFDNYINLDNDIEFLGKEALKRIRSEGVKKKLMGVKLDIDNISVTGSMNLYDSKNEIIGELRSGSYNPMFKQAIGIAMIKKPYFKPSQEFKVNINGKNVSGKVCDLPFI

SEQ ID NO: 79968 - protein, 161 aa, Unknown
  Bacterial polypetide isolated from the Sargasso Sea
MKISRFFKTIFLTDFIGGLLIAIKELFKSKKTINYPFEKGKISPRFRGEHALRRYPNGEERCIACKLCEAVCPAQAITIESAEREDGSRKTTRYDIDMMKCIYCGLCEESCPVDAIVQGPNFEFSTETREELYYTKEKLLDNGDRWENVLEANIKADNIHR

SEQ ID NO: 79969 - protein, 241 aa, Unknown
  Bacterial polypetide isolated from the Sargasso Sea
MILLIPVLTAVAMIVWLDRRVWAFVQKRRGPNVVGPFGLFQSLADALKYMFKEIIIPASSNKIIFILAPIVTMTLALVAWAVIPFSETFVIADINVGILYLFAVSSLGVYGIIMGGWASNSKYPFLGSIRSAAQMVSYEVSIGIIVINVLLCVGSLNLSDIVKAQQNLWFIIPLFPMFIIFFISALAETNRPPFDLPEAEAELVAGYQTEYSGMMYAMFWLGEYANILLMCAMGSILFLGG

SEQ ID NO: 79970 - protein, 150 aa, Unknown
  Bacterial polypetide isolated from the Sargasso Sea
MIDFLRGLIIAIKEMFKPKKTINYPFEKGKISPRFRGEHALRRYPNGEERCIACKLCEAVCPAQAITIESSEREDGSRKTTRYDIDMLKCIYCGLCEESCPVDAIVQGPNFEFATETREELYYTKEKLLENGDRWESVLAANIKADNPHR

SEQ ID NO: 79971 - protein, 161 aa, Unknown
  Bacterial polypetide isolated from the Sargasso Sea
MKLSRFFKTILMVDFLGGLVIAIKELFKSKKTINYPFEKGKISPRFRGEHALRRYPNGEERCIACKLCEAVCPAQAITIESAEREDGSRKTTRYDIDMMKCIYCGLCEESCPVDAIVQGPNFEFSTETREELYYTKEKLLDNGDRWENVLAANIRADNPYR

SEQ ID NO: 79972 - protein, 416 aa, Unknown
  Bacterial polypetide isolated from the Sargasso Sea
MTESNLTLNFGPQHPAAHGVLRLIMEMDGEVITNLDPHIGLLHRGTEKLAEIKPFNHSIGYMDRMDYVSMMCCEHPYVLAIESLLEIEPPKRAQYIRVMYDEITRIMNHLLWLGCHGLDIGAMALFLYCFREREDLYDAYEAVSGARMHATYYRPGGVYRDLPDEMPKYKANKFISEKKVKKLNYNRAGSLLDFIEDFTNRFPSLVDEYETLLTDNRIWKQRTVDIGVVTPERAMQLGFTGPMLRGSGIEWDLRRNQSYEVYDELDFLIPVGVNGDCYDRYLVRVEEMRQSNLIIQQCIKWLRANPGPVMIEDHKYRAPKRDSMKHDMESLIYHFKHFTEGYSVPEGNTYKAIEHPKGEFGVFLLSDGANKPYRLKVRAPSFAHLAAIDEMSKGHMLADVVSIIGTLDIVFGEIDR

SEQ ID NO: 79973 - protein, 196 aa, Unknown
  Bacterial polypetide isolated from the Sargasso Sea
MNLNFGPQHPAAHGVLRLILELDGEVVERADPHIGLLHRGTEKLIETKTYTQAIPYFDRLDYVAPMNQEHAFALAVEKLLKIDVPRRAQYIRVIFCEIGRILSHLLNVTTQALDVGALTPSLWGFEEREKLMVFYERVSGSRLHANYFRPGGVHIDMPTGLAEDIDKFCDDFPKVINNLEDLLTDNRIFKQRNVDI

SEQ ID NO: 79974 - protein, 159 aa, Unknown
  Bacterial polypetide isolated from the Sargasso Sea
MIKYIKSFTLFELLQGMFLTLKYMLKAKVTINYPHEKGPLSPRFRGEHALRRYPSGEERCIACKLCEAVCPAQAITIEAEPREDGSRRTTRYDIDMSKCIYCGLCQESCPVDAIVEGPNFEFATETREELMYTKEKLLENGDRWEQEIAQNIYLDRKYR

SEQ ID NO: 79975 - protein, 182 aa, Unknown
  Bacterial polypetide isolated from the Sargasso Sea
LAFKISAVPFHMWAPDVYEGSPTSVTLFFAVAPKIAALTVIIRFLYVPFVNVIDQWQLIIVFLSLASMIFGAVAAIGQKNLKRLIAYSSIGHMGYALAGLCVGTNQGIQSSILYISIYLVMNLGFFSCLFMLKRNNTYFENIDDFVGIIKKSSTNFTFTDGSIIFFGRDSTISWFFCKVLYI

SEQ ID NO: 79976 - protein, 171 aa, Unknown
  Bacterial polypetide isolated from the Sargasso Sea
IAATAELNRPPFDLVEAEQELVGGFHTEYSSIRFALFFLAEFMNVITMSAIMVTLFFGGPAGPIFFGMTWFWPTIWFLLKVLAFLFVFVWFRATLPRLRYDQLMHLGWKVLIPLILFWLMFISLKELRAAYDWNWVATYGAALIALLAGTALLVAGLRAGDRAYEDEMEDV

SEQ ID NO: 79977 - protein, 97 aa, Unknown
  Bacterial polypetide isolated from the Sargasso Sea
MAKENKTLNLNFGPQHPAAHGVLRLILELDGEVVEKADPHIGLLHRGTEKLIENKTYMQAVPYFDRLDYVAPMNQEHAFALAVERILKIEVPARAQY

SEQ ID NO: 79978 - protein, 449 aa, Unknown
  Bacterial polypetide isolated from the Sargasso Sea
MSLIAAQSASSFPVLNALILVPIIGALVVVLLPNSRPELMRPIGALFSSIAAALSLYVMAQFSIHQPGFQFESIQSWIPSLGINWHVGVDGISLWLVVLTGLITPIVLVAVDPHHDPKPYTAWLLLLQAGSFGAFLALDLFLFFVMFEIVLVPMYMLIGGWGYDDRRYAATKFFLYTMAGSALMLVAIVSVATLSAGDQSVTFNVVELAERQALSTNTARLCFLAFALAFVIKVPVFPVHTWLPDAHTQAPTAGSVVLAAVMLKLGTYGLLRFGLYLFPEASVWAAPTLATLGVVGVIYGAIVATMQKDLKRLVAYSSVAHMGFIVLGIFAFTTQSLEGGVLQMINHGLSTGALFLLVGMLYERRKTRAIEELSGIQSAAPIFAGFFTVVMLSSIGVPGLNGFVGEFLILIGSYDTRRWWTIVAATGVILAALYLLWAYQRVFHGEPTT

SEQ ID NO: 79979 - protein, 203 aa, Unknown
  Bacterial polypetide isolated from the Sargasso Sea
MLVPVLVSVAMVVWLDRRVWAFVQKRQGPNVVGPFGLLQSLADALKYIFKEIIIPSSSNKVIFILAPIVTMTLALISWAVIPFSATQVLADINVGILYLFAVSSLGVYGIIMGGWASNSKYPFLGAIRSAAQMVSYEVSIGVIIINVLLCVGSLNLNDIVIAQQNLWFVIPLFPMFVIFFISALAETNRPPFDLPEAEAELVA

SEQ ID NO: 79980 - protein, 290 aa, Unknown
  Bacterial polypetide isolated from the Sargasso Sea
MTKKNKTLNLNFGPQHPAAHGVLRLILELDGEIVEKADPHIGLLHRGTEKLIEHKTYTQALPYFDRLDYVAPMNQEHAFALATEKLLNIEIPIRAKYIRVIFCEIGRILSHILNVTTQALDVGALTPSLWGFEERETLMTFYERASGSRLHANFFRTGGVHQDLPTKLLEDIGVFCETFPKTIDDLESLLTDNRIFKQRNVEIGIVTKQEALSHSFSGVMLRGSGVAWDLRKSQPYECYKDLNFKIPVGKNGDCYDRYLCRIEEMRESVKIINQCLKNLPKGPVKTIDGK

SEQ ID NO: 79981 - protein, 271 aa, Unknown
  Bacterial polypetide isolated from the Sargasso Sea
GAGMPMWKHRLAGSVILASVLLKVGGYGMIRFLLPITTEAGIYLSDYMIYLSLIAIIYISFVAFAQEDMKKLIAYSSVAHMGFVTMGIFLVFNLMGNNPTAAAIGLEGAMVQMISHGLISAALFFCIGIMYKHSHSRLIKDNFGVAQFMPIFSFMMVFFLMANSGLPGTSGFVGEFLVITSSLGSSFLFGFLAALSLILSASYSLKLGKNVLFGDNQKNSQGYLECKSNEKIVLGTLVIFVLYLGISPDLLFNLLDKSVSDIISSISLGKA

SEQ ID NO: 79982 - protein, 186 aa, Unknown
  Bacterial polypetide isolated from the Sargasso Sea
MKEVEINSTTLNFGPQHPAAHGVLRLVVDLDGEVVKRAEPHIGLLHRGTEKLIEYKTYLQAVPYFDRLDYVSPMCQEHAFALSTEKLLNLEVPMRAQYIRVIFAEITRILNHLLNIPAYAADIGAVTPFLWCFEKREKLLEFHEAVSGARFHAAYFRPGGVHQDMPKGMEEKLYDYINTLPKFIDD

SEQ ID NO: 79983 - protein, 217 aa, Unknown
  Bacterial polypetide isolated from the Sargasso Sea
MIEYLIIVLSEIYKISILLIPVLTAVAMIVWLDRRVWAFVQKRRGPNVVGPFGLFQSLADALKYVFKEIIIPASSNKFIFILAPIVTMTLALVAWAVIPFSETFVIADINVGILYLFAVSSLGVYGIIMGGWASNSKYPFLGSIRSAAQMVSYEVSIGIIIINVLLCVGSLNLSDIVKAQQNLWFVIPLFPMFVIFFISALAETNRPPFDLPEAELN

SEQ ID NO: 79984 - protein, 281 aa, Unknown
  Bacterial polypetide isolated from the Sargasso Sea
YDQSTQGIYFEMVLFSRGLALKISAVPFHMWLPDVYQGHQTSVTLFFAILPKIAALTVFIRFLYTPFINLIDQWQTIIIFLAIASMLFGAVAAIGQKNLKRLIAYSSISHMGYALAGLTTGTNQGIQSSVSYISIYLVMNLAFFSCIFMLKREEKYYENIEDLSGLSKNHPMLSFSLLITLFSLAGIPPLAGFFAKFYVFMAVIEQSMFFLAIVGLLATVIAAFYYLRIIKVIYFDNELDKYDTNHSIGLKLSLIITTILILTYFIYPNSLIDFVSNINLV

SEQ ID NO: 79985 - protein, 297 aa, Unknown
  Bacterial polypetide isolated from the Sargasso Sea
TYGFSESTNFDQILINSTEFNYGTTFGIVFILVGLAFKISAVPFHMWAPDVYQGSPTSVTLFFAILPKIAALSVFIKFLYTPFANMNDQWQTIIVFISIASMIFGAVAAIGQKNLKRLIAYSSISHMGYALAGLATVSNQGIQSSITYISIYLVMNLAFFSCLFMLKRNDKYYENIDDLSGLSKKHPILSFSLLIVLFSLAGIPPLAGFFAKFYVFLAVIEQSMYFLAIVGLLATVVAAFYYLRIIKIIYFDPEKEEYETSHNLGLKITLAISTIFILAYFIYPSSITEIVSKITMI

SEQ ID NO: 79986 - protein, 102 aa, Unknown
  Bacterial polypetide isolated from the Sargasso Sea
MKEIEVNTTTINFGPQHPAAHGVLRLVVELDGEVVERAEPHIGLLHRGTEKLIEYKTYLQAVPYFDRLDYVSPMCQEHAFAIATEKLLGIEVPERAQIYQSY

SEQ ID NO: 79987 - protein, 165 aa, Unknown
  Bacterial polypetide isolated from the Sargasso Sea
MTKKIKNLNLNFGPQHPAAHGVLRLILELDGEVVERADPHIGLLHRGTEKLIENKTYMQAVPYFDRLDYVAPMNQEHAFALATEKILEIDVPIRAQYIRVIFCEIGRILSHILNVTTQAMDVGALTPTLWGFEEREKLMGFYERVSGSRLHANYFRAGGVHQDLP

SEQ ID NO: 79988 - protein, 411 aa, Unknown
  Bacterial polypetide isolated from the Sargasso Sea
MNSIKIRLCSMMFLQFFIWGGWFVTLGTFLSQNLQATGPQTGMAFSTQSWGAIIAPFIVGLIADRFFNAERLLGILHLVGAVLMYLMYQAADFTTFYPLVLGYMLAYMPTLALVNSVSFGQLKQPELEFGQIRVWGTIGWIAAGLVISYAFGWDAQQAIADGALKNTFLMCAVASLVLGVYSFTLPATPPAGRGQQLKLGELLGLDALALLKDRNFALFFLASVLICIPLAFYYQNANPFLTGIGVENATGKMTLGQVSEVLFMLALPVFLNRFGIRWTLLLGMAAWVLRYVLFAYGDAGQGVWLLVVGIALHGICYDFFFVSGQIYTNSKAGVKIRSAAQGLITLATYGIGMLIGFSVAGQITQAYTSAEATDWTSIWLFPAVFAAVVLVLFAVIFKNEPLQQQAEDKQP

SEQ ID NO: 79989 - protein, 160 aa, Unknown
  Bacterial polypetide isolated from the Sargasso Sea
MVKKTKSLNLNFGPQHPAAHGVLRLILELDGEVVEKADPHIGLLHRGTEKLIEHKTYTQALPYFDRLDYVAPMNQEHAFALAAEKLLNVEVPIRAKYIRVIFCEIGRILSHILNVTTQALDVGALTPSLWGFEERETLMTFYERASGSRLHANYFRIRWC

SEQ ID NO: 79990 - protein, 161 aa, Unknown
  Bacterial polypetide isolated from the Sargasso Sea
MKFNRFLKIIFLSEFINAIIIAIKEIFKKKKTINYPFEKGSISPRFRGEHALRRYPNGEERCIACKLCEAVCPAQAITIESEERPDGSRKTTRYDIDMLKCIYCGLCEESCPVDAIVQGPNFEFATETREELYYNKDKLLDNGDRWESVLSENIKLDKPYR

SEQ ID NO: 79991 - protein, 161 aa, Unknown
  Bacterial polypetide isolated from the Sargasso Sea
MNLTRIFKTIFLIEFLRGLLMAIKEIFKKSKTINYPFEKGSISPRMRGEHALRRYPNGEERCIACKLCEAVCPAQAITIESSERPDGSRKTTRYDIDMLKCIYCGLCQESCPVDAIVQGPNFEFATETREELYYNKQKLLDNGDRWESVLSKNIKLDKPYK

SEQ ID NO: 79992 - protein, 40 aa, Unknown
  Bacterial polypetide isolated from the Sargasso Sea
RYDQLMRLGWKIFLPFSLIYLVLTASFLFYFDKLPNGNIS

SEQ ID NO: 79993 - protein, 471 aa, Unknown
  Bacterial polypetide isolated from the Sargasso Sea
MDKINLVYPELLVSLSIMFLLMYGVFAKKSASTVYNLSSISIFVSLILLLSFPINTQWSLFNDSYQIDYLSTFMKVLILIFGIFVLGISKKYVFSINILKIEYPILILASILGMMVMISSNDLIIFYIGLELQSLALYVLASFNRDNILSSESGIKYFILSALSSGLLLYGCSLIYGFSGSTNFQIISEQIISNSYGLTFGIVFILVGLAFKISAVPFHMWAPDVYQGSPTSVTAFFALLPKVAALTVLIRILYVPFVNMLDQWQLIVVFLSIASMILGSIAAIGQKNLKRLIAYSSISHMGYALAGISTGTNEGIQSSITYMLIYLIMNLAFFSCVFMMKKNDKYYENLDDLSGISKNHPILSFCFLIILFSLAGIPPLAGFFAKFYIFTAVIEQSMFFLAIVGLLSTVIAAFYYLRIIKIIYFDTERENFDKDHSISLKLSLFISTTVIILYFTYPSKISEIVEKITII

SEQ ID NO: 79994 - protein, 161 aa, Unknown
  Bacterial polypetide isolated from the Sargasso Sea
MNFSRILKTIFLVEFISGLYLAIRELFRKSKTINYPFEKGSISPRMRGEHALRRYPSGEERCIACKLCEAVCPAQAITIESTERADGSRKTTRYDIDMLKCIYCGLCQESCPVDAIVQGPNFEFATETREELYYNKEKLLANGDRWESVLAKNIKLDKPYR

SEQ ID NO: 79995 - protein, 232 aa, Unknown
  Bacterial polypetide isolated from the Sargasso Sea
MSKQSKTLNLNFGPQHPAAHGVLRLILELDGEVVEKADPHIGLLHRGTEKLIENKTYTQAVPYFDRLDYVAPMNQEHAFALAIEKILKIEVPIRAKFIRVIFCEIGRILSHLLNITTQALDVGALTPSLWGFEERETLMTFYERVSGSRLHANYFRAGGVHQDLPRGLDKDISNFCGNFPKAINELEALLTDNRIFKQRNVDIGIVSKEDALEYSFSGVMLRGSGVPWDLRK

SEQ ID NO: 79996 - protein, 426 aa, Unknown
  Bacterial polypetide isolated from the Sargasso Sea
MALIINLSSFNKIYLFNSSYLIDNLSNYMKIILVGSGIFVMLTGSRYIQVINLNKIEYPILILSSILGMMIMISSNDLIVFYMGLELQSLALYVLASFNRDNLLSTESGLKYFVLSALSSGLLLYGCSLTYGFSESTNFDQILINSTEFNYGTTFGIVFILVGLAFKISAVPFHMWAPDVYQGSPTSVTLFFAILPKIAALSVFIKFLYTPFANMNDQWQTIIVFISIASMILGAVAAIGQKNLKRLIAYSSISHMGYALAGLATVSNQGIQSSITYISIYLVMNLAFFSCLFMLKRNDKYYENIEDLSGLSKKHPILSFSLLIVLFSLAGIPPLAGFFAKFYVFLAVIEQSMYFLAIVGLLATVVAAFYYLRIIKIIYFDPEKEEFETSHNLGLKITLAISTIFILAYFIYPSGITEVVSKIIMI

SEQ ID NO: 79997 - protein, 495 aa, Unknown
  Bacterial polypetide isolated from the Sargasso Sea
MNNLLSISLFWPELLLTATILIAIVVDIFSQSPKSNKVSNYVIIGLLATLVAVFITSHSPTTLFMDSLAFDPFASFFKSIVIVATLFVIVISRYSNEFEGYHTGEYYALLCIMVFGMFLMASAIDLITVYLSIEVVSLMSFILAGYLKNNPRSNEASLKYVIYGAFSSGIMLYGLSIIFGLTGTTKFFAIRDAIATLDSTSNLSLTLSTVFVLAGFGYKISAVPFHFWTPDVYEGSPTPITAYLSVAPKAAGFALMIRFFNQVFVDGDSLSGLGWYSDVSFAWPELLGIISVATMSLGNLVAIQQNSVKRMLAYSSIAHAGYMLMVFPTISSEGVFAVMIYLVMYLFMNLGAFFVLIYVIQKEGGESFEHFSGLGWRMPIVGIVMTVFMFSLTGLPPTVGFIGKFYLFVAVINAGSSFYWIAFFGAINTVISLYYYMRVVKTMYLDGKPSDEIQVPPFSITAILLILAVPSIFFGIYWTPILNWVKDSLLFFVQI

SEQ ID NO: 79998 - protein, 151 aa, Unknown
  Bacterial polypetide isolated from the Sargasso Sea
IFLKLVKNLILNPGGPNLIERIESGLLSHGNDMDNGDNPYECGFDKYINIDSDVDFLGKEKLKKIKSEGVKKKLMGVKIDTKEISVTGSMDLIDENNKVIGELRSGCYNPTFGQVIGIAMINKPHFEESKSFKININGTHFDGKVCDLPFI

SEQ ID NO: 79999 - protein, 265 aa, Unknown
  Bacterial polypetide isolated from the Sargasso Sea
MIDLNYIYSEIFISLSIMFLLLLGVFKKEGTALVHNFAIFSLLITLLLIFNHPLSIEVNLFNGSYKIDYLSSFMKILTIVSGIFVLIISSSYLKFLKILQMEYPILILSSILGMLVMISSNDLMVFYIGLELQSLSLYVLASFNRDQIKSSEAGLKYFILSALSSGLLLYGCSLIYGFSGTTNFTIISEIIVNDQEGLVFGIVFILVGLAFKISAVPFHMWAPDVYEGSPTSVTLFFAIVPKIAALTVFIRILYLPFFNMFDQWQ

SEQ ID NO: 80000 - protein, 115 aa, Unknown
  Bacterial polypetide isolated from the Sargasso Sea
MNFSRFLKTIFMTDFIGGLFIAIKEIFKPKKTINYPFEKGKISPRFRGEHALRRYPNGEERCIACKLCEAVCPAQAITIESFQREDGSRKTTRYDIDMMKCIYCGLCEESCPVDA

SEQ ID NO: 80001 - protein, 161 aa, Unknown
  Bacterial polypetide isolated from the Sargasso Sea
MNIFRIFKTVFLIDFLTGLLIAIKELFKPKKTLNYPFEKGKISPRYRGEHALRRYPNGEERCIACKLCEAVCPAQAITIESTAREDGSRKTTRYDIDMLKCIYCGLCEESCPVDAIVQGPNFEFATHTREELYYNKEKLLENGDRWENVLAANIKADNPYR

SEQ ID NO: 80002 - protein, 161 aa, Unknown
  Bacterial polypetide isolated from the Sargasso Sea
MNISRFFKTILMTDFISGLFIAIKELFKPKKTINYPFEKGKISPRFRGEHALRRYPNGEERCIACKLCEAVCPAQAITIESAEREDGSRKTTRYDIDMMKCIYCGLCEEACPVDAIVQGPNFEFSTETREELYYTKEKLLDNGDRWENVLEANIKADNIHR

SEQ ID NO: 80003 - protein, 384 aa, Unknown
  Bacterial polypetide isolated from the Sargasso Sea
MNLNFGPQHPAAHGVLRLILELDGEVVEKVDPHIGLLHRGTEKLIEHKTYTQALPYFDRLDYVAPMNQEHAFALATEKLLKIEVPIRAQYLRVIFCEIGRILSHLLNITTQALDVGALTPSLWGFEERETLMTFYERASGSRLHANYFRTGGVHQDITNDLLNDIGIFSEKFPKVIDDLENLLTDNRIFKQRNVDIGIVTKEDALSHSFSGVMLRGSGVAWDLRKSQPYECYKNLDFKVPIGKNGDCYDRYLCRIEEMRESVKIIKQCLKQIPKGPIKTVDGKISPPKKEELKESMEALIHHFKLFTEGYRVPKGEVYSSVEAPKGEFGVYLISDGSNKPYRCKIRAPGFSHLQAIDYLTKGHMLADVPAVLGSLDIVFGEVDR

SEQ ID NO: 80004 - protein, 244 aa, Unknown
  Bacterial polypetide isolated from the Sargasso Sea
PFLSGFYSKDAIIEFAYLRGNTAGYYAAGIGIFTAFLTSIYSWRLIFKTFHGEYNNKEIKIDETHESPIVMLLPLVLLSVGALFAGFLFKELFIGYEGVNNFWRDSIFFLKPLSTDHPPLWFLLLTPILVILSIPLAYYLFLKNKNLPDQIANINKPLYNFLLNKWYFDELYDVLFVKPSKKLGLFLWKFFDLKIIDGFGPDGISLLIKKFSVRANKFQSGYIYQYAFVMLLGFSALLTFLIVK

SEQ ID NO: 80005 - protein, 115 aa, Unknown
  Bacterial polypetide isolated from the Sargasso Sea
VAGYQTEYSGMMYAMFWLGEYANILLMCAMGSILFLGGWLSPISIYPFDLIPSPLWLIFKIIFLFVLFSLVKAIVPRYRYDQLMKLGWKIFLPLSLVWVVLTSGYLLYFNLLPVN

SEQ ID NO: 80006 - protein, 392 aa, Unknown
  Bacterial polypetide isolated from the Sargasso Sea
MKEVELNTTTINFGPQHPAAHGVLRLVVELEGEVVQRAEPHIGLLHRGTEKLIEYKTYLQAVPYFDRLDYVSPMCQEHAFALATENLLGINVPERAKYIRVIFAEITRILNHLLNIPAYAADIGAVTPFLWCFEEREKLLEFHEAVSGARFHAAYFRPGGVHQDMPEGMEEKLFEHFKTLPKFIDDLESLLTNNRILRQRSVDIGIISKSEAIEWGCSGPVLRSAGVAWDLRRSQPYDAYDQVDFEVPVGKKGDCFDRYLVRIEEMRQSISIINQCLNKIKPGPISIEDNKITPPKRNQMKKSMEALIHHFKLFTEGYRVPAGQVYSAVEAPKGEFGVYLVSDGSSKPYRCKIRAPGFAHLQTLDHLSKGHLMADIAAILGSLDIVFGEIDR

SEQ ID NO: 80007 - protein, 384 aa, Unknown
  Bacterial polypetide isolated from the Sargasso Sea
MNLNFGPQHPAAHGVLRLILELDGELVEKVDPHIGLLHRGTEKLIEHKTYTQALPYFDRLDYVAPMNQEHAFALATEKLLKLDVPIRAQYLRVIFCEIGRILSHLLNVTTQALDVGALTPSLWGFEERETLMTFYERASGSRLHANYFRTGGVHQDVPNNLLKDIGIFCEKFPKIIDDLENLLTDNRIFKQRNVEIGIVTKEEALAHSFSGVMLRGSGVSWDLRKSQPYECYRNLDFKIPVGKNGDCYDRYLCRVEEMRESVKIIKQCLKQIPIGPIKTIDGKISPPKKEEIKESMEALIHHFKLFTEGYRVPKGEVYTAVEAPKGEFGVYLISDGSNKPYRCKIRAPGFSHLQAMNYLIKGHMLADVPAVLGSLDIVFGEVDR

SEQ ID NO: 80008 - protein, 121 aa, Unknown
  Bacterial polypetide isolated from the Sargasso Sea
MMASAASRHDLERIGMMPRSSPRQADVMIVAGTVTMKMALRVKKLYEQMADPKYVISMGSCATSGGPYWQHGYHVLKGVDLVVPVDVYVPGCPPRPEALIEGLLKLQEKIQTERPLTRKLA

SEQ ID NO: 80009 - protein, 473 aa, Unknown
  Bacterial polypetide isolated from the Sargasso Sea
MNLYGISGEIFLAISGMIALLISVFSSKDSSLKITTRFCNLSLLISLILIVLSHQNSGYLFNEMYVYDGLSLYSKILIILGTILTLLIGIKPQKIDDFNQPEYPVLILFSVLGMVLMTSSKNLISLYMALELQSLPLYVIAAINRDNLKSSEAGLKYFILGALSSGLLLFGMSLVYGAVGDTSFSSISEVSSQNMSSILLVGLVFILSGLAFKISLVPFHMWTPDVYEGAPTPVTAFFAIVPKIAAITILVRVTFSAFDNAVTSWQQIIIFLSLLSMILGSFAAIMQTNLKRLMAYSSIAHMGYALVGVASGLLEGVSGVLIYLAIYIIMNVGAFIIILSMRRDNQIVEEIYDLKGISKTHPFLAFGFVTILFSMAGIPPLAGFFGKWLVFYSAVNANLVFLAIIGVLTSVVGAFYYLRIIKIMYFDENDVSLDVIENKSSMAILGLMLFLTLSFGLFLNWFVETTMGIVSLI

SEQ ID NO: 80010 - protein, 472 aa, Unknown
  Bacterial polypetide isolated from the Sargasso Sea
MENLNLILPEIFISLSIMFLLILGVFKNDSSKITFNLSLFAILITTIITINETFSVTRETLFNESVVIDSMSSLMKIITLIGGFLVLVISSTYLKTFKIYNIEYPVLILSSILGMMVMISSNDLIVFYMGLELQSLALYVLATYNRDQLKSSEAGLKYFVLSALSSGLLLYGCSLVYGFSGSTNFDIISNQLNSEEYVLTFGIVFILVGLAFKISAVPFHMWAPDVYEGSPTTVTLFFTIVPKVAALTVFIRFLYVPFLNLIDQWQMIIVFLSIASMVFGAVAAIGQTNIKRLIAYSSIGHVGYTLAGLATASNDGIQSSIIYISIYVVMNLALFSCLLMLRRKDQYYEDIDDLSGLSKNHPLLSLSLLLILFSLAGIPPLAGFFAKFYVFKAVLEQSMYFLAIVGLLSTVVAAFYYLRIIKIMYFDKEKDKYDTDHSLWLKLSLTVSTILILLYFIFPSQLIEVVSRINII

SEQ ID NO: 80011 - protein, 161 aa, Unknown
  Bacterial polypetide isolated from the Sargasso Sea
MKISRLLKTIFMIDFVTSLLIAIKETFKAKKTINYPFEKGSLGTRSRGEHALRRYPNGEERCIACKLCEAVCPAQAITIESKERDDGSRKTVRYDIDMLKCIYCGLCEESCPVDAIVQGPNFEFATETREELYYTKEKLLENGDRWENILAANIKADSSHR

SEQ ID NO: 80012 - protein, 161 aa, Unknown
  Bacterial polypetide isolated from the Sargasso Sea
MKLNRILKIIFLSEFIKSLAIAFKEIFKKKKTINYPFEKGAISPRFRGEHALRRYPNGEERCIACKLCEAVCPAQAITIESEERADGSRKTTRYDIDMLKCIYCGLCEESCPVDAIVQGPNFEFATETREELYYNKEKLLKNGDQWESVLDKNLKLDKPYR

SEQ ID NO: 80013 - protein, 213 aa, Unknown
  Bacterial polypetide isolated from the Sargasso Sea
MLPVLVSVAMIVWLDRRVWAFVQKRRGPNVVGPFGLFQSLADALKYIFKEVIIPASANKAVFILAPIVTMTLALISWAVIPFSENFVLADINVGILYLFAVSSLGVYGIIMGGWASNSKYPFLGAIRSAAQMVSYEVSIGVIIINVLLCVGSLNLSDIVLAQKNLWFVIPLFPMFIIFFISALAETNRPPFDLPEAEAELVAGYQTEYSGMMY

SEQ ID NO: 80014 - protein, 161 aa, Unknown
  Bacterial polypetide isolated from the Sargasso Sea
MKISRFFKTIFMADFVSGLAIAIKELFKSKKTINYPFEKGKISPRFRGEHALRRYPNGEERCIACKLCEAVCPAQAITIESSEREDGSRKTTRYDIDMMKCIYCGLCEESCPVDAIVQGPNFEFSTETREELYYTKEKLLDNGDRWENILEANIKADSSHR

SEQ ID NO: 80015 - protein, 104 aa, Unknown
  Bacterial polypetide isolated from the Sargasso Sea
GEERCIACKLCEAICPAQAITIESAEREDGSRKTTRYDIDMLKCIYCGLCEESCPVDAIVQGPNFEFATETREELYYNKEKLLDNGDRWETILAANIKADKPFR

SEQ ID NO: 80016 - protein, 284 aa, Unknown
  Bacterial polypetide isolated from the Sargasso Sea
MLSILIWLPVIGIIPVLCYNRPEQANIARSIALLVALVHLLLCAVMIHHFDASKGDLQFVEWTNWIPVIKVHYYLGVDGISMPLVVLTSFTTLIIVLASWTMVSEKVAQYLAAFLLTQAMVIGVFCALDAVLFYVFWEAMLIPMYISIGIWGGANRSYAAIKFFMYTFFGSALMLVALLYMRMHTGTFNIMQWHNAPLGLWPQQWLFVAFFFGFAVKVPMWPLHTWLPDAHTEAPTGGSVVLAALMLKLGGYGFLRFSLPIVPDGCAWFAWAMIILSLIAIVYV

SEQ ID NO: 80017 - protein, 304 aa, Unknown
  Bacterial polypetide isolated from the Sargasso Sea
AISQLGPDSNLALILSIVFILVGLGYKISAVPFHFWTPDVYEGSPTSITAYLSVAPKAAGFALIIRFFNIAFGSNSAMGSDAWSSLNSLPWPFLIALLSAATMTIGNLVAIQQQSVKRMLAYSSIAHAGYMMMAIPVMSQSGIYGIMIYLFMYMLMNLGAFFVVMYVQDKFDGENFDSFNGLGWKMPLLGISMTLFMVALTGLPPTSGFVGKFYIFAAVIEAGNQYYWLAFVGVINSVVSLYYYIKVVRHMYFEGERSDIVSLPESKLTTSLVLVLALPTFFLGWYFSPLVEWANNSLNFFLGI

SEQ ID NO: 80018 - protein, 283 aa, Unknown
  Bacterial polypetide isolated from the Sargasso Sea
KSKDGRCYYCPIIDDNAGLINDPVVLRFNENKWWVSIADTDVILFAKGLAIGNKFDVNIIEPEVDIMAVQGPKSFKLMEKVFGEKITNLKFFGFDYFDFAGAKHLIAQSGWSKQGGYEIYVENNEAGLKLYDHLFEIGDEFNIRAGCPNLIERIESGLLSQGNDMDNGDNPYECGFDKYINIDSDVEFLGKEQLKKIKSEGIKRKLMGVKIDTDKISVTGSMNLTDEKNNIIGELRSGCYNPTFKQVIGIAMIKKPYFEAKQTFKIDINGNSFNGTVCDLPFI

SEQ ID NO: 80019 - protein, 103 aa, Unknown
  Bacterial polypetide isolated from the Sargasso Sea
MNIVRLLKIIFLVEFISGLYMAIKELFRKSKTINYPFEKGAISPRMRGEHALRRYPNGEERCIACKLCEAVCPAQAITIESTERLDGSRKTLDMILICFNVFI

SEQ ID NO: 80020 - protein, 161 aa, Unknown
  Bacterial polypetide isolated from the Sargasso Sea
MNFSRLLKTIFLVEFISGLYMAVKELFRKSKTINYPFEKGPISPRMRGEHALRRYPNGEERCIACKLCEAVCPAQAITIESSERSDGSRKTTRYDIDMLKCIYCGLCQESCPVDAIVQGPNFEFATETREELYYNKEKLLENGDRWESVLAKNIKLDKPYR

SEQ ID NO: 80021 - protein, 470 aa, Unknown
  Bacterial polypetide isolated from the Sargasso Sea
MTEIKYISPEIILLISIFSLLMIGVFIKKSFNIVYRLSNLVLALTLFVVLSGNYETTKIFDESIIIDNFSTFMKSLILISSFFILSMSKKYLVDIKNNKFEYPIIVILSILGMFIMVGSNDLIVFYLGLELQSLSLYILAAIDRDNSRSSEAGVKYFVLSALSSGLLLYGCSLLYGFSGSTNFEIILLNSDNENVGNIFAMVFILVGLAFKVSAVPFHMWTPDVYEGSPTTVTMFFSVVPKIAGLAVFIKFMYVPFYSVLDEWQYILVFISIASMILGAVAAIGQNNIKRLIAYSSIGHIGYAIAGIAAGTENGFRNAIVYMTIYAVMNIGAFSFVLLMKRGEKYIEEISELSGASKNHPLMCFGLLTILFSLAGIPPLAGFFAKFYIFMSVIESGMFGLAIVGLVTTVVSAFYYIRIVKIMYFDESKKPFENFKDVSIHGSLILSSMILIAFFLYPSALNDVVSKITIF

SEQ ID NO: 80022 - protein, 137 aa, Unknown
  Bacterial polypetide isolated from the Sargasso Sea
MVKKTKSLNLNFGPQHPAAHGVLRLILELDGEVVEKADPHIGLLHRGTEKLIEQKTYTQALPYFDRLDYVAPMNQEHAFALAAEKLLKIEVPIRAKYIRVIFCEIGRILSHILNVTTQALDVGALTPSLWGFEERGN

SEQ ID NO: 80023 - protein, 73 aa, Unknown
  Bacterial polypetide isolated from the Sargasso Sea
MNNKLDQVPEEFKQLADDFSKNGFITTSLDNLINWSRSGSLHWMTFGLACCAVEMMQTAMPRYDLERFGAAPR

SEQ ID NO: 80024 - protein, 117 aa, Unknown
  Bacterial polypetide isolated from the Sargasso Sea
RFRGEHALRRYPNGEERCIACKLCEAVCPAQAITIESAEREDGSRKTTRYDIDMMKCIYCGLCEESCPVDAIVQGPNFEFSTETREELYYTKEKLLDNGDRWENVLEANIKADNIHR

SEQ ID NO: 80025 - protein, 391 aa, Unknown
  Bacterial polypetide isolated from the Sargasso Sea
MTKKIKNLNLNFGPQHPAAHGVLRLILELDGEVVEKADPHIGLLHRGTEKLIENKTYMQAVPYFDRLDYVAPMNQEHAFALATEKVLKIDVPIRAQYIRVIFCEIGRILSHILNVTTQALDVGALTPSLWGFEERETLMTFYERASGSRLHANYFRAGGVHQDLPQGLEEDIAKFCETFPKIINDLESLLTDNRIFKQRNVDIGVVTKEDALDYSFSGVMIRGSGVPWDLRKSQPYDCYEQLEFKIPVGKNGDCYDRYLCRIEEMKESVSIIKQCLSKMEKGPIKSLDGKISPPSKKEIKQSMEALIHHFKLFTEGYRVPKDEIYTAVEAPKGEFGVYLISDGSNKPYKCKIRAPGFSHLQSMDYLIKGHMLADVPAVLGSLDIVFGEVDR

SEQ ID NO: 80026 - protein, 359 aa, Unknown
  Bacterial polypetide isolated from the Sargasso Sea
RLRGTPYTSRIEEQGVTAYTIYNHMLLPAAFGSIEDSYYHLKEHVQIWDVAAERQVEISGKDSAKLVQLMTCRDLSKSKDGRCYYCPIIDDNAGLINDPVVLRINENKWWISIADTDVILFAKGLAIGNKFDVKIIEPKVDIMAVQGPKSFQLMEKVFGEQITKLKFFGFDYFEFGGAKHLIAQSGWSKQGGYEVYVQNTEAGLKLYDHLFEIGKEFNIKPGCPNLIERIESGLLSHGNDMDNGDNPYECGFDKYVNIDSDVIFLGKEKLKKIKSEGIKRKLMGVKLDLDKISLTGSLDLADDNNKIIGELRSACYSPHFKKVIGIAMMKKSHWNIDQNVKASINGDICSGKVCDLPFI

SEQ ID NO: 80027 - protein, 471 aa, Unknown
  Bacterial polypetide isolated from the Sargasso Sea
MENLQYILPEIFISASIMLFLLVGVFKKNSASLIYNLSNISLVILLALIINLSSLDKVYLFNNSYLIDNLSNYMKIILVGSGIFVMLTGSKYIQVINLNKIEYPILILSSILGMMIMISSNDLIVFYMGLELQSLALYVLASFNRDNLLSTESGLKYFVLSALSSGLLLYGCSLTYGFSESTNFNQILINSTEFNYGTTFGIVFILVGLAFKISAVPFHMWAPDVYQGSPTSVTLFFAILPKIAALSVFIKFLYTPFANMNDQWQTIIVFISIASMIFGAVAAIGQKNLKRLIAYSSISHMGYALAGLATVSNQGIQSSITYISIYLVMNLAFFSCLFMLKRNEKYYENIEDLSGLSKKHPILSFSLLIVLFSLAGIPPLAGFFAKFYVFLAVIEQSMYFLAIVGLLATVVAAFYYLRIIKIIYFDPEKEEYETSHNLGLKITLAISTIFILAYFIYPSSITEIVSKITLI

SEQ ID NO: 80028 - protein, 141 aa, Unknown
  Bacterial polypetide isolated from the Sargasso Sea
MAIKELFSKSKTINYPFEKGSISPRMRGEHALRRYPSGEERCIACKLCEAVCPAQAITIESTERADGSRKTTRYDIDMLKCIYCGLCQESCPVDAIVQGPNFEFATETREELYYNKEKLLANGDRWESVLAKNIKLDKPYR

SEQ ID NO: 80029 - protein, 161 aa, Unknown
  Bacterial polypetide isolated from the Sargasso Sea
MKISRLLKTIFMIDFLTGLIIAIKEIFKQKKTINYPHEKGAISPRTRGEHALRRYPNGEERCIACKLCEAVCPAQAITIESKEREDGSRKTTRYDIDMIKCIYCGLCEESCPVDAIVQGPNFEFSTETREELYYNKEKLLENGDRWESILAANINADSSHR

SEQ ID NO: 80030 - protein, 246 aa, Unknown
  Bacterial polypetide isolated from the Sargasso Sea
MTKEKKTLNLNFGPQHPAAHGVLRLILELDGEVVEKADPHIGLLHRGTEKLIEYKTYTQAVPYFDRLDYVAPMNQEHAFALAVEKILNIDVPIRGQYIRVIFCEIGRILSHILNVTTQAMDVGALTPTLWGFEEREKLMGFYERASGSRLHANYFRPGGVHQDLPRGLLEDITKFCENFPKIIDDLETLLTDNRIFKQRNVDIGIVSKQDALDYSFSGVMLRGSGVPWDLRKSQPYDCYNQIDFKI

SEQ ID NO: 80031 - protein, 352 aa, Unknown
  Bacterial polypetide isolated from the Sargasso Sea
MAWLPTSESWPGLTFIFVVIVCAVPVFLFIAVYALVAIYGETKISSFIQDKVGPMGQGVGLHAWRWGLLQPVADALKLILKEDIIPSSADKKLFILAPFIVFIGAFIAFSALPFSQTIIIADMNIGVFYILAVSSLGVIGLILAGWSSNNKWSLYGAMRSAAQIVSYEIPAALSIVTVIMLTSTMSMQGIIHYQSGLVWGFLPNWLIFNNPFTFLAFFIFFISGLAECNRTPFDIPEAESELVAGAFTEYSGMRYAFFFLSEYANMFVVSGVAAAAFLGGWQSPIPGMFNSPGWGLFWFLSKSMFLIFVMIWVRWTFPRLRVDQLMDVCWKGFIPISLVNIFGIGIWYLIIG

SEQ ID NO: 80032 - protein, 496 aa, Unknown
  Bacterial polypetide isolated from the Sargasso Sea
MNNLNSLVFFWPELILSVTILAAVIADLFYQRKDSHKVAYWSIGGLILAYIAIRLQSAAPMGLFMDTVALDPFSQFFKILILLSTIIVMLISFISGELKEYRLGEYFSIMTIMTFGLFLMSSSIDMLMVYLSIEIVSIMSFFLAGYLKRNSSSNEASLKYVIYGAFSSGIMLYGFSLLFGLTGSTNFFEMQSAIAALGPESNLALVLATVFILVGFGYKISAVPFHFWTPDVYEGSPTTITAYLSVAPKAAGFALLIRFFNQIFGNMSEGMTSSWSAVNDLPWPELIAILSAATMTLGNLVAIQQNNVKRMLAYSSIAHAGYMMMALPIMSNTSIEGIMMYLIMYLFMNLGAFFVVIYVNDQIGGEEFSHFDGLGWRMPIVGIAMTLFMVALTGLPPTAGFVGKFYIFAAVIEAGSKFYWLAFVGVINSVVSLYYYIRVVKHMYLSGERSDELVNPSSKLALVILLVLAIPSFVFGWYFSPVAEWISRSTIMFQGM

SEQ ID NO: 80033 - protein, 266 aa, Unknown
  Bacterial polypetide isolated from the Sargasso Sea
MDFKNKVVVITGASSGIGEAAAEQFAKRGANLVLVARRKEKLEQVAQKLSKYSIKTLIQVCDVSDKQQVKEMSEKVIETFSRIDILVNNAGFVIYGKVEELSIEDIESQMQTNYFGTINCTKYFLPHFLKQNSGHMVNVASVGGSFGVPGIASYCATKFAMLGFSEGLHHELHGTNVGVTVVSPIMVRTSLFDHPSFKNFTKFATGISLSADTVANAIIKASDSSKLEIVVPSFVRIGIWFKQTFPFLINPIIGNRFRKQLEKRDS

SEQ ID NO: 80034 - protein, 119 aa, Unknown
  Bacterial polypetide isolated from the Sargasso Sea
MDNGDNPYECGFDKYVNIDSNVDFLGKEKLKKIKAEGIKKKLMGVKIDAKEISVNGSMDLVDEDNNVIGELRSGCYNPTFKQVIGIAMINKPHFETSKSFKININGSDFHGKVCDLPFI

SEQ ID NO: 80035 - protein, 453 aa, Unknown
  Bacterial polypetide isolated from the Sargasso Sea
MENFQYILPEIFISVSIMLFLLVGVFKKNSASLIYNLSNISLVILLALIINLSSLDTIYLFNESYLIDNLSNYMKIILVGSGIFVMLTGSKYIQVINLNKIEYPILILSSILGMMIMISSNDLIVFYMGLELQSLALYVLASFNRDNLLSTESGLKYFVLSALSSGLLLYGCSLTYGFSETTNFDQILINSTEFNYGTTFGIVFILVGLAFKISAVPFHMWAPDVYQGSPTSVTLFFAILPKIAALSVFIKFLYTPFANMNDQWQTIIVFISIASMIFGAVAAIGQKNLKRLIAYSSISHMGYALAGLATVSNQGIQSSITYISIYLVMNLAFFSCLFMLKRNDKYYENIEDLSGLSKKHPILSFSLLIVLFSLAGIPPLAGFFAKFYVFLAVIEQSMYFLAIVGLLATVVAAFYYLRIIKIIYFDPEKEEYETSHNLGLKITLAISTTIYFS

SEQ ID NO: 80036 - protein, 349 aa, Unknown
  Bacterial polypetide isolated from the Sargasso Sea
MTKEKKTLNLNFGPQHPAAHGVLRLILELDGEIVEKADPHIGLLHRGTEKLIENKTYSQAIPYFDRLDYVAPMNQEHAFALAIEKIMDVEVPIRGQYIRVIFCEIGRILSHILNITTQALDVGALTPSLWGFEEREKLMGFYERVSGSRLHANYFRPGGVHKDLPRGLENDILEFCKTFPKIIDDLETLLTDNRIFKQRNVDIGIVSKEDALNYSFSGVMLRGSGIPWDLRKSQPYDCYEQIDFKIPIGKNGDCYDRYLCRIEEMRESVKIIEQCLKNLPKGPVKSMDNKLTPPPKKEIKQSMEALIHHFKLFTEGYRVKKDEIYTAVEAPKGEFGVYLISDGTNPDPI

SEQ ID NO: 80037 - protein, 422 aa, Unknown
  Bacterial polypetide isolated from the Sargasso Sea
MSSYFFTHFALHTIGTLGGGISNFPWLSVSILFPIGCAFLIPFFPDKGEGKEVRWFALSVALITFLVTVGSYINGFDINNEDVQLKESINWLPNLGLTWSVGADGISMPLILLTSFITALAVLAAWPVKFKPKLFFFLILIMDGGQIAVFAVQDMLLFFLSWELELLPVYLLLAIWGGKNRQYAATKFIIYTAGSSIFILLAALAMGFYGTEVPNFEFSHLANQDFGQNFQILCYIGLLIAFGVKLPIVPLHTWLPDAHGEATAPVHMLLAGILLKMGGYALLRFNAQLLPIAHAQFAPLLILLGVVNIIYAALTSFAQRNLKRKIAYSSISHMGFVLIGIGSFSSLGTSGAMLQMVSHGLIGASLFFLVGATYDRTKTLKLDEMGGVGQKMRIMFALWTACSLASLALPGMSGFVSELMVF

SEQ ID NO: 80038 - protein, 161 aa, Unknown
  Bacterial polypetide isolated from the Sargasso Sea
MKISRIIKTIFLIDFLNGLLIAIKEAFKSKKTLNYPFEKGKISPRFRGEHALRRYPNGEERCIACKLCEAVCPAQAITIESTEREDGSRKTTRYDIDMLKCIYCGLCEESCPVDAIVQGPNFEFSTETREELYYNKQKLLDNGDRWESVLAANIKADNPYR

SEQ ID NO: 80039 - protein, 161 aa, Unknown
  Bacterial polypetide isolated from the Sargasso Sea
MNLNRFLKTIFLAEFIKGLFIAIKEIFKKKKTINYPFEKGSISPRFRGEHALRRYPNGEERCIACKLCEAVCPAQAITIESEEKDDGSRKTTRYDIDMLKCIYCGLCEESCPVDAIVQGPNFEFATETREELYYNKEKLLDNGDRWESVLAQNIKLDKPYR

SEQ ID NO: 80040 - protein, 161 aa, Unknown
  Bacterial polypetide isolated from the Sargasso Sea
MNIIRIFKTVFLIDFLTGLLIAIKESFKPKKTLNYPFEKGKISPRYRGEHALRRYPNGEERCIACKLCEAVCPAQAITIESTAREDGSRKTTRYDIDMLKCIYCGLCEESCPVDAIVQGPNFEFATHTREELYYNKEKLLENGDRWENVLAANIKADNPYR

SEQ ID NO: 80041 - protein, 86 aa, Unknown
  Bacterial polypetide isolated from the Sargasso Sea
MKLSRILKTVLLIDFINGLIIAIKESFKSKKTLNYPFEKGKISPRFRGEHALRRYPNGEERCIACKLCEAVCPAQAITIESTERED

SEQ ID NO: 80042 - protein, 363 aa, Unknown
  Bacterial polypetide isolated from the Sargasso Sea
SSILGMLVMVSSNDLIVFYVGLELQSLALYVLAAFKRDNILSSESGLKYFILSALSSGLLLYGCSLIYGFSSSTNFDLIYQNSESIEYGIIFGIVFVLVGLAFKITAVPFHMWAPDVYDGSPTSVTVIFAILPKIAALTVFINFLYGPFLEMFDQWQAVIIFLSIGSMVFGAVAAIGQKKLKRLIAYSSISHMGFALAGLSVGTNEGIQNSIIYLIIYLIMNIAFFCCLFMLKRENQYFDKVEDLSGLSKNHPLLSLSMMIILFSLAGIPPLAGFFAKFYIFTAVIEQSMYFLAIVGLLSTVIAAFYYIRLIKVMYFDEQREKYDLNHSIGLKMILVVSSTIILIYFINPNIINNFVSNITII

SEQ ID NO: 80043 - protein, 161 aa, Unknown; identical to SEQ ID NO: 79775
  Bacterial polypetide isolated from the Sargasso Sea

SEQ ID NO: 80044 - protein, 243 aa, Unknown
  Bacterial polypetide isolated from the Sargasso Sea
MTESNLTLNFGPQHPAAHGVLRLIMELDGEVVTNLDPHIGLLHRGTEKLAEIKPFNHSIGYMDRMDYVSMMCCEHPYVLAIESLLEIEPPKRAQYIRVMFDEITRIMNHLLWLGCHGLDIGAMALFLYCFREREDLYDAYEAVSGARMHATYYRPGGVYRDLPSEMPKYKANKFISEKKVKKLNYNREGSLLDFIEDFTNRFPSLVDEYETLLTDNRIWKQRTVDIGVVTPERAMQLGFTGPM

SEQ ID NO: 80045 - protein, 391 aa, Unknown
  Bacterial polypetide isolated from the Sargasso Sea
MTKKIKNLNLNFGPQHPAAHGVLRLILELDGEVVEKADPHIGLLHRGTEKLIENKTYMQAVPYFDRLDYVAPMNQEHAFALAIEKILKIDVPIRAQYIRVIFCEIGRILSHILNVTTQAMDVGALTPTLWGFEEREKLMGFYERVSGSRLHANYFRAGGVHQDLPQGLEDDIAQFCMDFPKIINDLESLLTDNRIFKQRNVDIGVVSKQDALDYSFSGVMIRGSGVPWDLRKSQPYDCYENLEFKVPVGKNGDCYDRYLCRIEEMKESVSIIQQCLSKMEVGPIKSLDGKISPPPKKDLKQSMEALIHHFKLFTEGYRVPKDEIYTAVEAPKGEFGVYLISDGSSKPYKCKIRAPGFSHLQSMDYLIKGHMLADVPAVLGSLDIVFGEVDR

SEQ ID NO: 80046 - protein, 391 aa, Unknown
  Bacterial polypetide isolated from the Sargasso Sea
MSKQTKTLNLNFGPQHPAAHGVLRLILELDGEVVEKADPHIGLLHRGTEKLIENKTYSQAIPYFDRLDYVAPMNQEHAFALAIEKILDIEVPIRGQYIRVIFCEIGRILSHILNITTQALDVGALTPSLWGFEEREKLMEFYERVSGSRLHANYFRPGGVHQDLPRGLDADILKFCNEFPKIIDDLETLLTDNRIFKQRNVDIGIVSKDDALDYSFSGVMMRGSGVAWDLRKSQPYDCYEQLSFKVPIGKNGDCYDRYLCRVEEMRESVKIIKQCLEQLPKGPVKSQDNKITPPPKKEIKESMEALIHHFKLFTEGYRVKKDEIYTAVEAPKGEFGVYLISDGSSKPYKCKIRAPGFSHLQAMDYLIKGHMLADVPAVLGSLDIVFGEIDR

SEQ ID NO: 80047 - protein, 137 aa, Unknown
  Bacterial polypetide isolated from the Sargasso Sea
MSALIEKNESGLLSYGNDFDNNDNPYECGFDKFVHLDTPVDFLGKKELRKIKTNGIKKKLMGVKINAKEINVFKSISLLDNSGKIIGEIRSGVYSPTFKQVIGIAMIKKPYFKESQSFNIEINGKSFIGKVCDLPFI

SEQ ID NO: 80048 - protein, 365 aa, Unknown
  Bacterial polypetide isolated from the Sargasso Sea
YPAIGYSENLGLIISYVGAFTLIFAASMAIVSNDIKKVLAYSSISQLGYMFLALGVGSYGAAILHLFAHAWFKALLFLGAGSVGHAVHTFDMKLMGGMRNKMKKTYLTMLVGTISLIGIFPLSGFWSKDEILIGVKSESTFLLVIALIGVVMTAFYMTRMMAMTFFGDFKGGHDNIKYDDIHESPNLMTIPMIILAIPSVIIGVIFSSPIDLGFIEKHAMVSFLDHNKLVFPNYEYHEFKFDIMIASVSTILALVGISFSILNFKKYKFNINFLNKLISNKYYLDYLYETLITEKLFYKYFSKLFSVVEEKLIDNFSYKLTASLRWMSNKISISQNGQLQLQSITFVLGFLIILISYLVYLGAGG

SEQ ID NO: 80049 - protein, 390 aa, Unknown
  Bacterial polypetide isolated from the Sargasso Sea
MTKKIKNLNLNFGPQHPAAHGVLRLILELDGEVVEKADPHIGLLHRGTEKLIENKTYMQAVPYFDRLDYVAPMNQEHAFALAIEKILKIDVPIRAQYIRVIFCEIGRILSHILNVTTQALDVGALTPSLWGFEERETLMTFYERVSGSRLHANYFRAGGVHQDLPNGLEEDILKFCDSFPKIINDLENLLTDNRIFKQRNVDIGIVSKEDALDYSFTGVMIRGSGIPWDLRKSQPYDCYNQLDFKIPIGKNGDCYDRYLCRIEEMKESVSIIKQCISKMEKGPVKSSDGKITPPTKKEIKQSMEALIHHFKLFTEGYRVPRDEIYTAVEAPKGEFGVYLISDGSSKPYKCKIRAPGFTHLQSMDYLIKGHMLADVPAVLGSMDIVFGEVD

SEQ ID NO: 80050 - protein, 457 aa, Unknown
  Bacterial polypetide isolated from the Sargasso Sea
MVDLFESLIIIAPELILAITAMSLLMIGSFYQKKSINLINTLSFLTLLILSFNELIFNNIQIFAFNGFFIEDKLSSFAKFIIFLTSALSIIMSANWLRNYDKTAFEFPILILFSTLGMALMVSANDLVSLYLAIELQSLPLYVLATFNRNDSFSSESGVKYFILGALSSGLLLYGSSLIYGFTGTIFLNEISQLTLSSNQLGITFGLAFLLAGIVFKISAVPFHMWAPDVYQGAATPVTSFFASVPKMAAIIILIRILYVPFDNFISSWSQIIIFVSFSSILLGSVVAIWQKNIKRLIAYSSIAHMGFATLALSTGNKSDIESILVYMIIYIVANIGFFSCLINIQNKTEKNINNISDLAGLSVNNPSLAISIALYMFSFAGIPPLAGFFAKYYVFISLINEGLIFLATFALIASVIGAFYYIRFVKVMFFDEVANSKKIIFSRSLGLINSICFIFI

SEQ ID NO: 80051 - protein, 369 aa, Unknown
  Bacterial polypetide isolated from the Sargasso Sea
MKTFLIAKSRRLRSTPYTSRIEKQGVTAYTIYNHMLLPAAFGSVEDAYHHLKEHVQIWDVAAERQVEISGKDSAKLVQLMTCRDLSKSKDGRCYYCPIIDDNAGLINDPVVLRLNENRWWISLADSDVILFAKGLAIGNKFDVKISEPDVDIMAVQGPKSFQLMEKVFGEKIVNLKFFGFDYFEFGGDKHLIAKSGWSKQGGYEIYMEHNESGLKLYDHLFEIGKEFNIRPGGPNLIERIESGLLSHGNDMDNGDNPYECGFDKYVNIDSDVDFLGKEKLKKIKAEGIKKKLMGVKIDAKEISVNGSMDLVDEDNNIIGELRSGCYNPTFEQVIGIAMINKPHFETSKSFKININGSDFDGKVCDLPFI

SEQ ID NO: 80052 - protein, 384 aa, Unknown
  Bacterial polypetide isolated from the Sargasso Sea
MTLNFGPQHPAAHGVLRLILELEGEIVEKADPHIGLLHRGTEKLIENKTYTQALPYFDRLDYVAPMNQEHAFALATEKLLKIEVPIRAKYIRVIFCEIGRILSHILNVTTQALDVGALTPSLWGFEERETLMTFYERASGSRLHANYFRTGGVHKDLPTKLIEDIGKFCETFPKIIDDLEDLLTENRIFKQRNVDIGLVSKKDALDHSFTGVMLRGSGVPWDLRKSQPYECYQDLKFKIPVGKNGDCYDRYLCRIEEMRESIKIIKQCIESLPKGPIKTVDGKISPPNRDDLKQSMEALIHHFKLFTEGFRVPAGNVYSAVEAPKGEFGVYLISDGSNRPYRCKIRAPGFSHLQAMDYLIKGHMLADVPAVLGSLDIVFGEVDR

SEQ ID NO: 80053 - protein, 192 aa, Unknown
  Bacterial polypetide isolated from the Sargasso Sea
MNFLNLLFYFIASVVLVSSVLMITVNKTVNAALLLVFIFFNMAIIWLLLGAEFLGIVLVLVYVGAVLVLFLFVVMMLAKQDLVDNSKNKYFITSAIISTIMFVELYLIINTLNDNQFVSDKFIQIDNTLLIGSSLFTNYIIAFEVASVILLVSIIAAIAITYDTKRKVLRQNISDQVGTKKQDRIKIIKDLK

SEQ ID NO: 80054 - protein, 82 aa, Unknown
  Bacterial polypetide isolated from the Sargasso Sea
MKLNRIFKIIFLSEFIKAIFIALKEIFKKKKTINYPFEKGAISPRFRGEHALRRYPNGEERCIACKLCEAVCPAQAITIESE

SEQ ID NO: 80055 - protein, 242 aa, Unknown
  Bacterial polypetide isolated from the Sargasso Sea
MDSYFSILFSEVYKIIFLLVPVLVSVAMIVWLDRRVWAFVQKRRGPNVVGPFGLFQSLADALKYIFKEIIIPASSNKLVFVLAPVVTMTLALISWAVIPFGEDFVLADINVGILYLFAVSSLGVYGIIMGGWASNSKYPFLGAIRSAAQMVSYEVSIGVIIINVLLCVGSLNLSDIVIAQQNLWFVIPLFPMFVIFFISALAETNRPPFDLPEAEAELVAGYQTEYSGMMYAMFWLGEYANI

SEQ ID NO: 80056 - protein, 265 aa, Unknown
  Bacterial polypetide isolated from the Sargasso Sea
MVGCFEVPDQDHLVTAQGIIPGANCQKPPLVALASTALPREFGITVWNLYKGQRKNWREGLDEYAKSQDLVLLQESATRPDMLEWLKAGDFQWQQLQAFTQGGVSFGVMTVAKTPQAFVCGVRSPEPLLRIPKSGLVSLYPLQGDPDGVLVVNLHAVNFELGMATFREQLNDLTALIHRHQGSVILAGDFNTWSDKREFWLNKLVVELGLQEAIPVPDLRRTAFGRPLDHLYYRNLDLVEVSSPATDASDHNPIMARFAAQAITP

SEQ ID NO: 80057 - protein, 392 aa, Unknown
  Bacterial polypetide isolated from the Sargasso Sea
MSETEIKPITMNFGPQHPAAHGVLRLVFEMDGEIIKRADPHIGLLHRGTEKLIENKTYLQALPYFDRLDYVSPMNQEHAWSLAVEKVLSINVPERGQYIRVLFCELGRILNHILNLTAFAIDVGAMTPLLWGFEEREILLSFYERASGARFHAAYFRPGGVHQDIPEELLDDIHKWLKNFPNFINDLETLLTENRIFKQRTVDIGVVSKEDALNLGFSGPPLRASGHAWDLRKDQPYDVYSKMDFDIPIGNTGDCYARYLVRVEEMRQSCKIIEQCINNMPKGIVLANDAKMAPPSRKEMKGSMEALIHHFKLYTEGVHVPEAETYTAVEAPKGEFGVFLVSDGTNKPYRAKLRAPGFQFLAATEHMCKGHMLADSVAVIGSMDLVFGEIDR

SEQ ID NO: 80058 - protein, 64 aa, Unknown
  Bacterial polypetide isolated from the Sargasso Sea
MGHIYGSCANGGGYYHYSYSVVRGCDRIVPVDIYVPGCPPTAEALVYGILQLQKKIKRKNKFVR

SEQ ID NO: 80059 - protein, 268 aa, Unknown
  Bacterial polypetide isolated from the Sargasso Sea
WTPDVYEGSPTTITAYLSVAPKAAGFAMIIRFFHQIFSDGNALGLNLIGATDMPWPEIIGVLAVVTMTLGNLVAIQQESVKRMLAYSSIAHAGYMMLALPVISIDAVEAVMIYLFVYLFMNLGAFFIVITIKNKIGGETFEDYRGLGWKMPFVGSVMTLFMLSLTGLPPTAGFVGKLYIFKTLIGAGESFYWLVIAGGVNSVISLYYYFHVVKVMFLEGERSDEIIQPPAPLFGLLIVTAVPSLLLGLYWNPLVTWVKDSLIFYTQTL

SEQ ID NO: 80060 - protein, 121 aa, Unknown
  Bacterial polypetide isolated from the Sargasso Sea
KISPDFRGEHALRRYPMVKERCIACKLCEAVCPAQAITIESAERSDGSRKTTRYDIDMMKCIYCGLCEESCPVDAIVQGPNFEFSTETREELYYTKEKLLDNGDRWENILAANIKSDNPYR

SEQ ID NO: 80061 - protein, 292 aa, Unknown
  Bacterial polypetide isolated from the Sargasso Sea
KRQGPNVVGPFGLLQSLADALKYIFKEIIIPSSSNKVIFILAPIVTMTLALISWAVIPFSATQVLADINVGILYLFAVSSLGVYGIIMGGWASNSKYPFLGAIRSAAQMVSYEVSIGVIIINVLLCVGSLNLNDIVIAQQNLWFVIPLFPMFVIFFISALAETNRPPFDLPEAEAELVAGYQTEYSGMMYAMFWLGEYANILLMCAMGAILFLGGWLSPIEIYPFTLVPGAVWLILKILLLFFLFALVKAIVPRYRYDQLMKLGWKVFLPMSLIWVVLTASFLFYFNLLPVN

SEQ ID NO: 80062 - protein, 269 aa, Unknown
  Bacterial polypetide isolated from the Sargasso Sea
MGGVRNKLPITYILMLIGTLALTGFPLLSGFYSKDAIIEFAYLKGNTLGYYAASIGIFTALLTSIYSWRLFFKTFHGDFNNQTISIDKIHESPMVMTIPLVILAVGSIFAGYFFKDLFISHKESYEFWNSSIFFLEQLSKDHPPKWFLFLTPSLVVISIPFAYLLFIKRKDLLVNIVEGNQPFYNFLKNKWYFDEVYEFIFVRSLKKIGVYFWKKIDGLIIDRFGPDGISNIIKTLSNKAVKFQSGYIYQYAFIMLVGFSALLTYLIIK

SEQ ID NO: 80063 - protein, 159 aa, Unknown
  Bacterial polypetide isolated from the Sargasso Sea
MYKLIKSFTLFELFQGLFLTFKYIFKSKVTINYPHEKGPLSPRFRGEHALRRYPSGEERCIACKLCEAVCPAQAITIEAEPREDGSRRTTRYDIDMTKCIYCGLCQESCPVDAIVEGPNFEFATETREELIYNKDKLLENGDRWEQEIAQNIHLDRKYR

SEQ ID NO: 80064 - protein, 139 aa, Unknown
  Bacterial polypetide isolated from the Sargasso Sea
LIFFISALAETNRLPFDLPEDESTLVAGFFTEYSSASFVLFFLGEYASMILMSSMTVILFLGGWLPPFDVYPLNVIPGVIWFTVKVIFILFLFIWVRGTFPRYRYDQLMRLGWKVFLPFSLFWVVATSGFLVYFDMLPN

SEQ ID NO: 80065 - protein, 64 aa, Unknown
  Bacterial polypetide isolated from the Sargasso Sea
YVISMGSCANGGGYYHYSYSVVRGCDRIVPVDVYVPGCPPSAEALLYGILQLQKKIRKKGSFIR

SEQ ID NO: 80066 - protein, 162 aa, Unknown
  Bacterial polypetide isolated from the Sargasso Sea
MNKVLKFIKSFLLLELSKGLSLTLKYLFKKKVTINYPYEKNPISSRFRGEHALRRYPNGEERCIACKLCEAVCPAQAIVIEAEPRPDGSRRTTRYDIDMTKCIYCGFCQEACPVDAIVEGPNFEFSTETRHELFYDKERLLANGDRWEDEIARNLEKENNFR

SEQ ID NO: 80067 - protein, 90 aa, Unknown
  Bacterial polypetide isolated from the Sargasso Sea
MSSMTVILFMGGWLPPFDIFPLNAVPGVIWFVIKVIFILFLFIWVRGTFPRYRYDQLMRLGWKIFLPLSLLWVVLTAGFLIVFDMVPNSL

SEQ ID NO: 80068 - protein, 64 aa, Unknown
  Bacterial polypetide isolated from the Sargasso Sea
WVISMGSCANGGGYYHYSYSVVRGCDRIVPVDIYVPGCPPTAEALVYGILQLQKKIKRKNTYKS

SEQ ID NO: 80069 - protein, 90 aa, Unknown
  Bacterial polypetide isolated from the Sargasso Sea
MIANFLSEYLSIIIFLFISLLLSIGFIVINYIASPSNPDPEKLSAYECGFEAFDNARIEFDVRFYLVCILFIIFDLEFAFYFPGQYHLEI

SEQ ID NO: 80070 - protein, 293 aa, Unknown
  Bacterial polypetide isolated from the Sargasso Sea
IEYPILLLSSILGMMIMVSSNDLIVFYMGLELQSLALYVLASFDRNNKLSSESGLKYFVLSALSSGLLLYGCSLIYGFSGTTNFNEISKNISEVQYGLTLGIVFILVGLSFKISAVPFHMWAPDVYAGSPTSVTMFFAILPKIAALTVFIKFLYIPFINLIDQWKIIIIFLSISSMIFGAVAAIGQRNLKRLMAYSSISHMGFALAGLSVGTNYGIQSSISYISIYLVMNVAFFSCLFMLKRNNNYFESLDDLSGLSKNHPLLSVSLLIILFSLAGIPPLAGFFAKILCIFIG

SEQ ID NO: 80071 - protein, 181 aa, Unknown
  Bacterial polypetide isolated from the Sargasso Sea
MRYLLGVIIINVLLCVGSLNLNDIVIAQQNLWFVIPLFPMFVIFFISALAETNRPPFDLPEAEAELVAGYQTEYSGMMYAMFWLGEYANILLMCAMGAILFLGGWLSPIEIYPFTLVPGPAWLVLKILLLFLLFALVKAIVPRYRYDQLMKLGWKVFLPLSLIWVVLTASYLFYFNLLPVN

SEQ ID NO: 80072 - protein, 58 aa, Unknown
  Bacterial polypetide isolated from the Sargasso Sea
MVFKILLLFFMFAIIKAIVPRYRYDQLMRLGWKVFLPFSLIYVVITASFLVFFDLLPK

SEQ ID NO: 80073 - protein, 106 aa, Unknown
  Bacterial polypetide isolated from the Sargasso Sea
GMMYAMFWLGEYANILLMCALGSILFLGGWLAPMDTPLFEMVPPPAWLILKILFLFVLFALIKAIVPRYRYDQLMRLGWKVFLPFSLIWVVLTSGYLLYFDLLPVY

SEQ ID NO: 80074 - protein, 148 aa, Unknown
  Bacterial polypetide isolated from the Sargasso Sea
VFPLFPMFVIFFISALAETNRPPFDLPEAEAELVAGYQTEYSGMMYAMFWLGEYANILLMCAMGSILFLGGWLSPIDLYPFNLIPSPVWLILKILMLFIVFALIKAIVPRYRYDQLMKLGWKVFLPFSLLWVVLTSSYLFYFDLLPKN

SEQ ID NO: 80075 - protein, 256 aa, Unknown
  Bacterial polypetide isolated from the Sargasso Sea
LVTHAFFKALLFLGAGNVSHAVHSFEMEKMGNLKSKMPVTYYTFILGSLSLVGIFPLAGFWSKDEIINTAYHGANLASTIVLIGSLIGVIMTAFYTFRMVFLTFNDRIKSSKSIEIEESPKTMLVPVIILSIFAVITGFLINPPIDIFMFEKHWFLHYQHHKIININLLIATISTLLAILGISAAWIFYKNRNLTNRLFTNASISHILHKKWFFDDLYEFIIVKQIFYRFITRMIQIFDDIIINRFSDLVGSLAKS

SEQ ID NO: 80076 - protein, 258 aa, Unknown
  Bacterial polypetide isolated from the Sargasso Sea
NKIIFILAPVVTMTLALISWAVIPFGENFVLANINVGILYLFAVSSLGVYGIIMGGWASNSKYPFLGSIRSAAQMISYEVSIGVIIINVLLCVGSLNLTDIVLAQKKIWFVVPLFPMFVIFFISALAETNRPPFDLPEAEAELVAGYQTEYSGMMYAMFWLGEYANILLMCAMGSILFLGGWLSPISIYPFDLIPSPIWLIFKIIFLFILFSLVKAIVPRYRYDQLMKLGWKIFLPLSLVWVVLTSSYLLYFNLLPVN

SEQ ID NO: 80077 - protein, 274 aa, Unknown
  Bacterial polypetide isolated from the Sargasso Sea
KRKQNNKFISLFLILEGLLIGVFCSFDSILFYIFFESMLIPLFLIIGIWGGDNKIYATLKFFIYTFAGSVLMLISLIYLSNQADSFYIVDFYNLNLPLDIQIYIFLAFLIAFGIKIPMWPVHTWLPDAHVQAPSAGSVILAAVLLKVGGYGLIRFLLPIAPEAGYFLNDILIPLSLIAIIYISLVALAQQDMKKLIAYSSVAHMGFVTLGIFLLFNVFDPSADKNILLIGLQGSVIQMISHGLISAGLFFCIGIIYTRTHKRSIDDQSGIGQVM

SEQ ID NO: 80078 - protein, 289 aa, Unknown
  Bacterial polypetide isolated from the Sargasso Sea
RLGEPQAGWLATATVSGSFLSALAVFFGLATKPPEERVYEVTLFEWIPSGELSVGMGFLADPLSIAMALFVTGVGALIHMYAIGYMHGDPKFSKFFLYLNLFVFAMLMLVLGDNLLITFLGWEGVGACSYFLISFWHEEPANATAGKKAFVTNRVGDWGFMVAMFLLFFNIGSLKYSDIFSSVIEADALTQTTATGIVVMLFIGAAGKSAQFPLYLWLPDAMAGPTPVSALIHAATMVTSGVYLLTRMNPVLAEAAGWSTDLIWIVGLFTALFAATAAVAQNDIKKVLA

SEQ ID NO: 80079 - protein, 95 aa, Unknown
  Bacterial polypetide isolated from the Sargasso Sea
MNIKSADNKIPEEFKQIAKDFSENGYITTSFDNLVNWARSGSLHWMTFGLACCAVEMMQTSMPRYDLERFGAAPRGSPRQSDVMIVAGTLTNKMA

SEQ ID NO: 80080 - protein, 46 aa, Unknown
  Bacterial polypetide isolated from the Sargasso Sea
NVIPGVIWFTLKVIFILFLFIWVRGTFPRYRYDQLMRLGWKVFLPF

SEQ ID NO: 80081 - protein, 299 aa, Unknown
  Bacterial polypetide isolated from the Sargasso Sea
MDILNIIGYDLLKIFSLITPVLITVALVVWIDRRVWGLVQLRRGPNVVGPFGVLQSLADAFKFIFKEVIIPAGANKIIFILAPIVTMSLALLAWAVIPFSENIYVTNINVGILYLFAVSSLGVYGIIMAGWASNSKYPFLGALRSAAQMVSYEVSIGFIIVTVLLCVGSLNLVDIVMAQKKIWFAIPLFPMFVIFFISSLAETNRPPFDLPEAEAELVAGYQTEYSGMMYALFWLGEYANILLMCAMGSILFLGGWLSPLDISPFNLIPGPIWFIIKIIFLFFLFAIIKAIVPRYRYDQ

SEQ ID NO: 80082 - protein, 309 aa, Unknown
  Bacterial polypetide isolated from the Sargasso Sea
CCSIAITQNDIKRVIAYSTCSQLGYMFFAAGLGAYNASIFHLMTHGFFKALLFLSAGSVIHAMHHEQDMTKMGGLFNKIPFTAIMMWIGSLAIIGFPYFSGYYSKESILENAYFANIYLSNYAYVVGITTALLTAFYSWRLLFLTFHGANRSDIEIYNQVKESPWVMRLPLIVLAFGSIVVGMFFAEFYIGDLKKEFWNSCIVLINEKNHYLPFIQTLIIKASVSIGILIAVYLYFYNKNAASKLSSNFSLLYSISFNKWYIDEIFDYFVVKPYFFISKLFWKKGDEQTIDKYGPNGIASLILYSSKYF

SEQ ID NO: 80083 - protein, 102 aa, Unknown
  Bacterial polypetide isolated from the Sargasso Sea
MGVTNNHLDDKTKKIPEEFKQLAKDFAEKGFITTSSDNLINWARTGSLHWMTFGLACCAVEMMQTSMPRYDLERFGAAPRASPRQSDVMIVAGTLTNKMAPA

SEQ ID NO: 80084 - protein, 282 aa, Unknown
  Bacterial polypetide isolated from the Sargasso Sea
MPQASEIAWLIPVFPLIGAVLSGLGLISFNKKINNSREIVSVGLISFVGISAVISYKALIEQVNGYQSVEKLFVWANAGDFTIPMGFVIDPLGSVMLALVTTITLLVMIYSHGYMSHDRGYVRFFTYLALFSSSMMGLIISPNLLEIYVFWELVGMCSYLLVGFWYDRDGAAHAAQKAFVVNRVGDFGLLLGILGLFWATNSFDFNEIATGISQSVSDNSLPVWAALLLCFLVFLGPMAKSAQFPLHVWLPDAMEGPTPISALIHAATMVAARIFLVARLQP

SEQ ID NO: 80085 - protein, 35 aa, Unknown
  Bacterial polypetide isolated from the Sargasso Sea
LGSIGLLGFCSMMIFLFILTVGFIYEWKKGALDWE

SEQ ID NO: 80086 - protein, 272 aa, Unknown
  Bacterial polypetide isolated from the Sargasso Sea
MAEFFTTPLGIAVIIVAQCLAIVGFVMISLLFLVYGDRKIWAAVQMRRGPNVVGTFGLLQSVADALKYVLKEVVVPAGADKAVFILAPMTSFVLAILAWAVIPMNEGWVLSDINVAVLFVFAVSSLEVYGVIMGGWASNSKYPFLGSLRSAAQMISYEVSIGLIIIGVIISTGSLNFSSIVAAQDTAYGFFGWYWLPHLPMVFLFFISCLAETNRPPFDLPEAESELVAGYQVEYSATPFLLFMAGEYIAIFLMCALTSLLFFRWLAVAHPG

SEQ ID NO: 80087 - protein, 286 aa, Unknown
  Bacterial polypetide isolated from the Sargasso Sea
FLLIPVLVSVAMIVWLDRRIWAFVQKRQGPNVVGPFGLLQSLADAFKYIFKEIIIPSSSNKVIFILAPIVTMTLALVSWAVIPFSATQVIADINVGILYLFAVSSLGVYGIIMGGWASNSKYPFLGAIRSAAQMVSYEVSIGVIIINVLLCVGSLNLNDIVIAQKNIWFVIPLFPMFVIFFISALAETNRPPFDLPEAEAELVAGYQTEYSGMMYAMFWLGEYANILLMCAMGSILFLGGWLSPIETYPFNLIPGAVWLIFKILLLFILFALVKAIVPRYRYDQLM

SEQ ID NO: 80088 - protein, 162 aa, Unknown
  Bacterial polypetide isolated from the Sargasso Sea
MSFIKKSSRALLLTELISGMALTLKYMFKPKVTVNYPFEKGPLSPRFRGEHALRRYPNGEERCIACKLCEAICPAQAITIEAQPRADGSRRTTRYDIDMTKCIYCGFCEEACPVDAIVEGPNFEFATETREELMYNKDKLLDNGERWEGHLAQRLSADAPYR

SEQ ID NO: 80089 - protein, 49 aa, Unknown
  Bacterial polypetide isolated from the Sargasso Sea
LWVRATFPRYRYDQLMRLGWKVFLPFSLLWVALTAGALIAFDWLPNPGA

SEQ ID NO: 80090 - protein, 82 aa, Unknown
  Bacterial polypetide isolated from the Sargasso Sea
MTAEFLKEYLPIILFLVIALGLSCAFIAINFILSPKNPDPEKLSAYECGFEPFEDSRMEFDVRFYLDAILFIIFDLEIAFLF

SEQ ID NO: 80091 - protein, 287 aa, Unknown
  Bacterial polypetide isolated from the Sargasso Sea
AIGAGAYVAAIFHLVTHAFFKALLFLGAGAVIHEMHHEQNIYKMGGLRKKMPVTAAMMGIGTLAISGIPPLAGFWSKDEILASVFSRGGIYYGFWALSLLAALMTAFYMGRHWLLIFVKEPSNELDSVNEAPKNMTRPLILLGLFSIFIGFINTPFFHGLEKVLHETLYNVEVTHLPKGITLAVLAFLSIGAGFTGLALAYLIYIFDIFSYFKIKIPFLKQFKKLSKDVLYLNKIGNLIFVKGMKSLSRKVAVSVDGMTIDGFINGVARSFLKSSQQISFSQTGLVR

SEQ ID NO: 80092 - protein, 92 aa, Unknown
  Bacterial polypetide isolated from the Sargasso Sea
MGIDTNFYSRKPIISSKANNKGYVLAKFNDLLSWARSGSLWPMSFGLACCAVEMMQTGASRYDLDRFGVVFRPSPRQSDVMIVAGTLTNKMA

SEQ ID NO: 80093 - protein, 284 aa, Unknown
  Bacterial polypetide isolated from the Sargasso Sea
MHSAADFAWLIPLLPLCGAVLIGLGLISFNDLFNRSRKPVAITLLTSVGASAFISYAVLAEQLSGKPPVEHLFIWASAGSFELPMGYVIDPLAAIMLALVTTIAFLVMIYSHGYMAHDPGYVRFFTYLALFSSSMLGLIVSPNLLEIYVFWELVGMCSYLLVGFWYDRDGAAHAAQKAFIVNRVGDFGLLLGILGLFWATGSFDFHGIADGLSVAVGSGNVPMWAALTLCILVFMGPMAKSAQFPLHVWLPDAMEGPTPISALIHAATMVAAGVFLVARLDPLF

SEQ ID NO: 80094 - protein, 299 aa, Unknown
  Bacterial polypetide isolated from the Sargasso Sea
SLLYGFTGSTNFQVISNNVGDINIGTIFAMIFILVGLAFKVSAVPFHMWTPDVYEGSPTSVTSFFAIVPKIAGIAVFIRFMYSPFQNILDQWQYILVFISIASMILGAVAAINQKNIKRLIAYSSISHMGYAIAGISTGTESGFKSTIIYILIYSAMNIGFFAFVFLMKRSGKYIEDINELSGISKNHPLAALSLLIVLFSLAGIPPLAGFFAKFYIFMSVIESGMYALAIIGLVTTVVSAFYYIRIVKVMYFDSPKKPFENFKNYGVYGSLIFSCIFLSSFFMYPSVFNGIISKINIF

SEQ ID NO: 80095 - protein, 101 aa, Unknown
  Bacterial polypetide isolated from the Sargasso Sea
MFWLGEYANILLMCALGSILFLGGWLSPIDIYPFTLVPGAVWLIFKILFLFILFALVKATVPRYRYDQLMRLGWKIFLPFSLIYVVLTASYLFYFNLLPTN

SEQ ID NO: 80096 - protein, 296 aa, Unknown
  Bacterial polypetide isolated from the Sargasso Sea
IRFSGSTNFDIISNQLNSNEYVLTFGIVFILVGLAFKISAVPFHMWAPDVYEGSPTTVTLFFTMVPKIAALTVFIRFLYVPFLNLIDQWQMIIVFLSIASMIFGAVAAIGQTNIKRLIAYSSISHIGYTLAGLATASNEGIQSSIIYISIYVVMNLALFCCLLMLRRKDQYYEDISDLSGLSKNHPLLSLCLLVILFSLAGIPPLAGFFAKFYVFIAVLEQSMYFLAIVGLLSTVVASFYYLRIIKIIYFDKEKDKYDTNHSLWLKFSLTVSTILILLYFIFPSQLIEVVSRINII

SEQ ID NO: 80097 - protein, 199 aa, Unknown
  Bacterial polypetide isolated from the Sargasso Sea
MELAVTLWATLKILTICVPLMLSVAYLTFAERKIIGYIQARVGPNRVGPRGLLQPIADALKLLCKEIVIPTGANKVLFLTAPILALAPSLAAWAVIPFDSSLVLSDINAGLLYVLALTSLGVYGIIIAGWASNSKYAFLGSMRSAAQIVSYEIAMGFALVGVLIAAGSLNLGTIVRAQDSELGLFGWFWAPLFPVFIIY

SEQ ID NO: 80098 - protein, 46 aa, Unknown
  Bacterial polypetide isolated from the Sargasso Sea
EIAFLFPWAISLGKIGLLGFCSMMIFLFILTVGFVYEWKKGALDWE

SEQ ID NO: 80099 - protein, 188 aa, Unknown
  Bacterial polypetide isolated from the Sargasso Sea
ICCPDGSYEVSIGVIIINVLLCVGSLNLTDIVLAQENLWFIIPLFPMFVIFFISALAETNRPPFDLPEAEAELVAGYQTEYSGMMYAMFWLGEYANILLMCALGSILFLGGWLPPIDTFPFNFVPDSLWLIFKMLFLFILFALVKAIVPRYRYDQLMKLGWKIFLPMSLVWVVITASYLFYFELLPGN

SEQ ID NO: 80100 - protein, 93 aa, Unknown
  Bacterial polypetide isolated from the Sargasso Sea
NILLMCAMGAILFLGGWMSPIDVYPFTLVPGAIWLILKILLLFILFALVKAIVPRYRYDQLMRLGWKVFLPLSLTWVVLTASYLFYFNLLPVN

SEQ ID NO: 80101 - protein, 71 aa, Unknown
  Bacterial polypetide isolated from the Sargasso Sea
MLENYLPIAIFIIIAGVLGLLMLGLGFLFGKGAKTKAKLSPYECGFEEFEDARIPFDVRYYLVAILFIILI

SEQ ID NO: 80102 - protein, 278 aa, Unknown
  Bacterial polypetide isolated from the Sargasso Sea
QLKSSEAGLKYFVLSALSSGLLLYGCSLIYGFTGSTNFNVISTQFNTNEYVITFGIVFILVGLAFKISAVPFHMWAPDVYEGSPTSVTLFFTMVPKIAALTVFIRFLYVPFLNLIDQWQMILVFLSIASMLFGAIAAIGQKNLKRLIAYSSISHIGYALAGLATGSNEGIQSSVIYMTIYIIMNLGFFSCLLMMKRNNIYYEQIDDLSGLSKNHPLLSISLLIILFSLAGIPPLAGFFAKFYIFKSVIEQSMYFLAIVGLLSTVVAAFYYLRIIKIMY

SEQ ID NO: 80103 - protein, 103 aa, Unknown
  Bacterial polypetide isolated from the Sargasso Sea
MGLENIHKDGFVLAKSTNLFDWARTGSMWPMTFGLACCAVEMMHAGASRYDIDRFGMLFRPSPRQSDVMIVAGTLVNKMAPALRKVYDQMADPKWVISMGSCA

SEQ ID NO: 80104 - protein, 172 aa, Unknown
  Bacterial polypetide isolated from the Sargasso Sea
INVLLCVGSLNLSDIVLAQKNLWFVVPLFPMFIIFFISALAETNRPPFDLPEAEAELVAGYQTEYSGMMYAMFWLGEYANILLMCSLGSILFLGGWLSPVDIFPFNIIPGPFWMIFKMLLLFILFSLVKAIVPRYRYDQLMKLGWKIFLPLSLTWVVLTASYLLYFDLLPVN

SEQ ID NO: 80105 - protein, 163 aa, Unknown
  Bacterial polypetide isolated from the Sargasso Sea
LNLSDIVLAQKDLWFVIPLFPMFIIFFISALAETNRPPFDLPEAEAELVAGYQTEYSGMMYAMFWLGEYANILLMCAMGSILFLGGWLSPIDLFPFNVIPAPIWLILKILFLFILFALIKAIVPRYRYDQLMKLGWKIFLPFSLIYVVLTASFLMYFDLLPGN

SEQ ID NO: 80106 - protein, 75 aa, Unknown
  Bacterial polypetide isolated from the Sargasso Sea
MIYNFLTDYLSIVIFLFIALFLSIGFIVANYLASPSNPDPEKLSAYECGFEAFDDSRMEFDVRFYLVAILFIIFD

SEQ ID NO: 80107 - protein, 76 aa, Unknown
  Bacterial polypetide isolated from the Sargasso Sea
MIYNFLSEYLSIIIFLLISLVLSIGFIVANYLASPSNPDPEKLSAYECGFEAFDDSRMEFDVRFYLVAILFIIFDL

SEQ ID NO: 80108 - protein, 167 aa, Unknown
  Bacterial polypetide isolated from the Sargasso Sea
ILGIIMTKVLKFIKSFLLLELTKGLSLTLKYLFKKKVTINYPYEKNPISSRFRGEHALRRYPNGEERCIACKLCEAVCPAQAIVIEAEPRPDGSRRTTRYDIDMTKCIYCGFCQEACPVDAIVEGPNFEFSTETRQELFYDKERLLANGDRWEDEIARNLEKENNFR

SEQ ID NO: 80109 - protein, 278 aa, Unknown
  Bacterial polypetide isolated from the Sargasso Sea
YNASIFHLMTHGFFKALLFLSAGSVIHALHHEQDMRKMGGLFKKLPFTGLMMWIGSLAIIGFPYFSGYYSKESILENAYFSTSYMANFAYFVGILTALLTAFYSWRLLFLTFHGENRSEISIYDNANESSWVMKFPLLILAFGSVFVGIFFSEFFIGKLKYSFWNESIILLDQGKHYLPFVQTFLIKFSVAIGVLIAAYFYFYNKNIALKFSKYFNTLYLISLNKWYIDEIYNFIIVKNYFSLADLFWKRGDQNFIDRYGPNGISKLISLSSSFFSRL

SEQ ID NO: 80110 - protein, 88 aa, Unknown
  Bacterial polypetide isolated from the Sargasso Sea
MLEYLPILVFLGIALGLGIILLLAAAVIAIRNPDPEKVSAYECGFNAFDDARMKFDVRFYLVSILFIIFDLEIAFLFPWAVAFQDISM

SEQ ID NO: 80111 - protein, 268 aa, Unknown
  Bacterial polypetide isolated from the Sargasso Sea
MGSGAYTAGLFHLWTHAFFKALLFLAAGSVIHAVHTNNMSEMGGLRKEMPRTFMTFIIGTVALAGLPPLAGFFSKDEILASLNHEGHTFFFYIAVAGAFITAFYMTRAVLLTFYGEYRGHGHPHESDSMMTTPLLVLAFLAVVGGWVNIPGIYTGFTTWVTTRKNGIIEYHPESFDYFALFSGLSAGLIGIGLAYYIYQVISEPQNGDNRIKFQPVWRILENKYYLDDFYFKFIIDPIKITFAKTVDKFNTEILDRFINSFGNAASYL

SEQ ID NO: 80112 - protein, 253 aa, Unknown
  Bacterial polypetide isolated from the Sargasso Sea
VLAPVVTMTLALISWAVIPFGEDFVLADINVGILYLFAVSSLGVYGIIMGGWASNSKYPFLGAIRSAAQMVSYEVSIGVIIINVLLCVGSLNLSDIVMAQQNLWFVIPLFPMFVIFFISALAETNRPPFDLPEAEAELVAGYQTEYSGMMYAMFWLGEYANILLMCAMGSVLFLGGWLSPIDIFPFNVIPGPFWLIFKILFLFILFALVKATVPRYRYDQLMKLGWKIFLPFSLFYVVLTSSFLLYFDLLPGK

SEQ ID NO: 80113 - protein, 246 aa, Unknown
  Bacterial polypetide isolated from the Sargasso Sea
MTLALISWAVIPFGEDFVLADINVGILYLFAVSSLGVYGIIMGGWASNSKYPFLGAIRSAAQMVSYEVSIGVIIINVLLCVGSLNLSDIVLAQQNLWFVIPLFPMFVIFFISALAETNRPPFDLPEAEAELVAGYQTEYSGMMYAMFWLGEYANILLMCAMGAVLFLGGWLSPIDIFPFNAIPGPFWLIFKILFLFILFALVKATVPRYRYDQLMKLGWKIFLPFSLFYVVLTSSFLLYFDLLPGK

SEQ ID NO: 80114 - protein, 210 aa, Unknown
  Bacterial polypetide isolated from the Sargasso Sea
FYGIIMGGWASNSKYPFLGAIRSAAQMVSYEVSIGVIIINVLLCVGSLNLNDIVIAQQNLWFAIPLFPMFVIFFISALAETNRPPFDLPEAEAELVAGYQTEYSGMMYAMFWLGEYANILLMCAMGAILFLGGWLSPIEIYPFTLVPGPLWLILKILLLFFLFALVKAIVPRYRYDQLMKLGWKVFLPLSLVWLVLTASFLFYFNLLPVN

SEQ ID NO: 80115 - protein, 189 aa, Unknown
  Bacterial polypetide isolated from the Sargasso Sea
RSAAQMVSYEVSIGVIIINVLLCVGSLNLSDIVMAQQNLWFVIPLFPMFVIFFISALAETNRPPFDLPEAEAELVAGYQTEYSGMMYAMFWLGEYANILLMCAMGSVLFLGGWLSPIDIFPFNAIPGPFWLIFKILFLFILFALVKATVPRYRYDQLMKLGWKIFLPFSLFYVVLTSSFLLYFDLLPGK

SEQ ID NO: 80116 - protein, 261 aa, Unknown
  Bacterial polypetide isolated from the Sargasso Sea
LIGIWGGSNRLYATMKFVIYTMVGSLLMLVALIYTAILFKEINNGWSFNILDWYGMNIAPETQTWLFLGFAVAFAVKIPLFPFHTWLPDAHYEAPTAGSVQLAAVMLKFGPYGFLRFAMPVFPVAVYELTPLFITLSLIGIIYGGLVAMVQKQIKRLIAYSSVAHMGYIVLGLFALNTQGVYGGWIQMINHAIVTGALFLVVGMIYERTHTQEIVDYGGVIHTMPLFSVFLVFFSMASVGLPGLNGFVGEVLAMVGAARVN

SEQ ID NO: 80117 - protein, 121 aa, Unknown
  Bacterial polypetide isolated from the Sargasso Sea
MKFLYVEYFPIFVFLVVAIVLAVVIFGASYLLSSHESDSEKLSTYECGFDAYDDSRNTFDVRFYLVAILFIIFDLEISFLFPWSLTLGTISAFGFWTMAIFLIILTVGFVYEWKKGALDWE

SEQ ID NO: 80118 - protein, 203 aa, Unknown
  Bacterial polypetide isolated from the Sargasso Sea
ASNSKYPFLGSLRSASQMISYEVSIGFIIIGVIISAGSLNLSEIVLAQKGDYGMLNWFWLPHLPMVFFFLVSALDETNRPPFDLPEAEAELVAGYQVEYTSTPYLLFMIGELSAVLLMTALITILFFGGWLSPVSFLPDGFFWMLSKMLLFFFIFSLIKGLVPRYRYDQLMRLGWKVMLPVSLGWVVFVSFMAHFKLLTYARW

SEQ ID NO: 80119 - protein, 272 aa, Unknown
  Bacterial polypetide isolated from the Sargasso Sea
LKYIFKEIIIPASSNKFVFVLAPVVTMTLALISWAVIPFGEDFVLADINVGILYLFAVSSLGVYGIIMGGWASNSKYPFLGAIRSAAQMVSYEVSIGVIIINVLLCVGSLNLSDIVMAQQNLWFVIPLFPMFVIFFISALAETNRPPFDLPEAEAELVAGYQTEYSGMMYAMFWLGEYANILLMCAMGSVLFLGGWLSPIDIFPFNTIPGPFWLIFKILFLFILFALVKATVPRYRYDQLMKLGWKIFLPFSLFYVVLTSSFLLYFDLLPGK

SEQ ID NO: 80120 - protein, 76 aa, Unknown
  Bacterial polypetide isolated from the Sargasso Sea
FRKVYDQMAEPRYVISMGSCANGGGYYHYSYSVVRGCDRIVPVDVYVPGCPPTAEALVYGILQLQKKIKRTGTLWR

SEQ ID NO: 80121 - protein, 107 aa, Unknown
  Bacterial polypetide isolated from the Sargasso Sea
LDRFGVIFRPSPRQSDVMIVAGTLVNKMAPALRRVYDQMSEPRWVISMGSCANGGGYYHYSYAVVRGCDRVVPVDVYVPGCPPTAEALLFGIIQLQKKIRRTNTIAR

SEQ ID NO: 80122 - protein, 168 aa, Unknown
  Bacterial polypetide isolated from the Sargasso Sea
MAVIVLSLVWLERKALGRLQLRLGPTRTGPFGLLQPIADAVKLVLKEDIVPNDAERVIFWVAPIIVVISAFMLWVTIPFTPGIVVENLENMGLFYIGAVGVIGILGLVLAGWGSANKYGVIGGLRAAAQLISYEIPLIMVLISVAIVTQTFNLVDIVNLQSPVPFVLV

SEQ ID NO: 80123 - protein, 58 aa, Unknown
  Bacterial polypetide isolated from the Sargasso Sea
YLVAILFIIFDLEIAFLFPWAISLGKIGLFGFISMMIFLFILTVGFVYEWKKGALDWE

SEQ ID NO: 80124 - protein, 62 aa, Unknown
  Bacterial polypetide isolated from the Sargasso Sea
EAFDDARGRFDVRFYLVAILFIIFDLEVAFLFPWAITLGKNWLVWILVYDDISCYTNNWIHL

SEQ ID NO: 80125 - protein, 76 aa, Unknown
  Bacterial polypetide isolated from the Sargasso Sea
MAQDFSDNGFITTSLDNLVNWARTGSLHWMTFGLACCAVEMMQTSMPRYDLERFGAAPRASPRQSDVMIVAGTLTN

SEQ ID NO: 80126 - protein, 106 aa, Unknown
  Bacterial polypetide isolated from the Sargasso Sea
MNKVLKFIKSFLLLELSKGLSLTLKYLFKKKVTINYPYEKNPISSRFRGEHALRRYPNGEERCIACKLCEAVCPAQAIVIEAEPRPDGSRRTTRYDIDMTKCIYCG

SEQ ID NO: 80127 - protein, 283 aa, Unknown
  Bacterial polypetide isolated from the Sargasso Sea
GVYLVPRSSVLFALAPFSSAIVGGVGVLTALFAATIALKQNDIKKVLAYSTVSQLGYMFLGVGVGAYAAGVFHLMTHAFFKALLFLGSGAVIHSMHEAYHATHSHEDAQDMRNMGGLHRPMRITCITMWIATLAIAGIWPFAGFFSKDEIIWYAGAWAGAEGAPYPQLYTVYWILALVAALLTAFYMTRMMVMTFHGKNRTGEKEQGHLHEAPPVMWIPLAVLALLSVFGGWINVPDALSAGWAGLGGLLPMSEWLHHWLEPVTAQAHHVQEVNLGKYSYYAP

SEQ ID NO: 80128 - protein, 170 aa, Unknown
  Bacterial polypetide isolated from the Sargasso Sea
MLCVGSLNLNDIVLAQKNMWFVVPLFPMFVIFFISALAETNRPPFDLPEAEAELVAGYQTEYSGMMYAMFWLGEYANILLMCAMGSILFLGGWLAPLEIEVLSFIPAPFWLIFKILFLFILFALVKAIVPRYRYDQLMKLGWKIFLPLSIIWVVITAGYLLYFNLLPVQL

SEQ ID NO: 80129 - protein, 88 aa, Unknown
  Bacterial polypetide isolated from the Sargasso Sea
MNNKIDQVPDEFKQLADDFSKNGFITTSFDNLINWSRSGSLHWMTFGLACCAVEMMQTSMPRYDLERFGAAPRASPRQSDVMIVAGTL

SEQ ID NO: 80130 - protein, 159 aa, Unknown
  Bacterial polypetide isolated from the Sargasso Sea
MQGTRADYCVPTPCGARRAVLRTRQRPGAANGFSPANPVRGQCPLTDLSQYLPILIFLVIAIALSSVIVFLPLAVARLTGTHRPNADKLSEYECGFPAFEDPRSQFDVRFYLVAILFIIFDLEAAFLFPWAVSLDMTGWAGWTTMMVFLGELAIGLAYA

SEQ ID NO: 80131 - protein, 224 aa, Unknown
  Bacterial polypetide isolated from the Sargasso Sea
NVGILYLFAVSSLGVYGIIMGGWASNSKYPFLGAIRSAAQMVSYEVSIGVIIINVLLCVGSLNLNDIVIAQQNLWFVIPLFPMFVIFFISALAETNRPPFDLPEAEAELVAGYQTEYSGMMYAMFWLGEYANILLMCAMGAILFLGGWLSPIEIYPFTLVPGAVWLILKILLLFFLFALVKAIVPRYRYDQLMKLGWKVFLPMSLTWVVLTASFLFYFNLLPVN

SEQ ID NO: 80132 - protein, 272 aa, Unknown
  Bacterial polypetide isolated from the Sargasso Sea
VGVLIAVAFLLLADRKVWAGVQMRKGPNVVGPFGLLQSFADMIKFVLKEVVIPAGADKAVFIIAPIITVILAFMAWAVIPFAPGWVVSDLNVGILYIFAVSSLGVYGIIMGGWASNSKYPFLGSLRSAAQMVSYEVSLGLIIINVILLAGTMNLSAIVDSQKGMFWNWYGFGGGADTWPLVVILFPMSIIFFISALAETNRPPFDLPEAESELVAGYQVEYSSTPYLLFMMGEYVNIVFMSAMISLLFFGGWNPGVPQAWMDGLPAWIAYTI

SEQ ID NO: 80133 - protein, 194 aa, Unknown
  Bacterial polypetide isolated from the Sargasso Sea
MLFFQTTIKILAIVVPVMIAVAYFTYAERKVIGFIQGRIGPNRVGLFGFRLWGLGQPIADAVKLIAKEIIIPLNANRSLFIIAPILSLAPALAAWAVIPFDDTKVLANINAGLLYVLALTSLAVYGVIIAGWASNSKYAFLGAIRSAAQIVAYEIAMGFALVGVLIAAGSLNLGEIVNAQSGSVIHWFWLPLLP

SEQ ID NO: 80134 - protein, 138 aa, Unknown
  Bacterial polypetide isolated from the Sargasso Sea
KYIFKAKVTINYPHEKGPLSPRFRGEHALRRYPNGEERCIACKLCEAVCPAQAITIEAEPREDGSRRTTRYDIDMTKCIYCGLCQESCPVDAIVEGPNFEFATETREELIYNKNKLLENGDRWEQEIAQNIHLDRNYR

SEQ ID NO: 80135 - protein, 212 aa, Unknown
  Bacterial polypetide isolated from the Sargasso Sea
MDLSLITSNSSLILILESVFKILIVLIPLLLFVAYLTLAERRIIGFMQLRKGPNVVGLFGLLQPWADALKLLSKETILPSGSSKVVFIIAPMLTFILSMIAWSVIPFSEDFVIADINVGILYLFAISSLGVYGVIMAGWASNSKYAFLGALRSAAQMVSYEVSIGFVMVSVLLCVGSLNLGDIINAQKNLWFVVPLFPMFVVFFISTLAETN

SEQ ID NO: 80136 - protein, 199 aa, Unknown
  Bacterial polypetide isolated from the Sargasso Sea
NSKYPFLGSIRSAAQMVSYEVSIGVIIINVLLCVGSLNLSDIVLAQQELWFIIPLFPMFVIFFISALAETNRPPFDLPEAEAELVAGYQTEYSGMMYAMFWLGEYANILLMCAMGSILFLGGWLSPIDLFPFNAIPDPLWFIFKILFLFILFALVKATVPRYRYDQLMKIGWKIFLPLSLFWVVLTASYLLYFDLLPKN

SEQ ID NO: 80137 - protein, 86 aa, Unknown
  Bacterial polypetide isolated from the Sargasso Sea
SILFLGGWLPLMDIYPLNVIPAPIWMILKILFLFLLFALIKAIVPRYRYDQLMRLGWKIFLPFSLIYLVLTASFLFYFDKLPKVNI

SEQ ID NO: 80138 - protein, 177 aa, Unknown
  Bacterial polypetide isolated from the Sargasso Sea
IGVIIINVLLCAGSLNLNDIVMAQKKIWFVIPLFPMFVIFFISALAETNRPPFDLPEAEAELVAGYQTEYSGMMYAMFWLGEYANILLMCAMGSILFLGGWLPLIDIYPFSIIPTPIWLIFKILFLFILFALVKAIVPRYRYDQLMKLGWKVFLPLSLIWVVFTASYLFYFDLLPVY

SEQ ID NO: 80139 - protein, 118 aa, Unknown
  Bacterial polypetide isolated from the Sargasso Sea
SRFRGEHALRRYPNGEERCIACKLCEAVCPAQAIVIEAEPRPDGSRRTTRYDIDMTKCIYCGFCQEACPVDAIVEGPNFEFSTETRHELFYDKERLLANGDRWEDEIARNLEKENNFR

SEQ ID NO: 80140 - protein, 116 aa, Unknown
  Bacterial polypetide isolated from the Sargasso Sea
AGYQTEYSGMMYAMFWLGEYANILLMCAMGSILFLGGWLPIMDIYPLNIIPAPVWMILKILFLFLLFALIKAIVPRYRYDQLMRLGWKVFLPFSLIYLVLTSSFLFYFDKLPKVNF

SEQ ID NO: 80141 - protein, 256 aa, Unknown
  Bacterial polypetide isolated from the Sargasso Sea
MIYLNIFFSEIYKIAFLLIPVLVAVALIVWLDRRVWAFVQKRKGPNVVGPFGLLQTLADALKFIFKEIIIPASANKVIFILAPIVTLTLALIAWAVIPFSEEMVLANINVGILYLFAVSSLSVYGIIMGGWASNSKYPFLGAIRSAAQMISYEVSIGIIIVNVLLCVGSLNLNKIVLAQENVWFIFPLFPMFVVFFISALAETNRPPFDLPEAESELVAGYQTEYSGMMYAMFWLGEYANILLLCAMGSILFFGGW

SEQ ID NO: 80142 - protein, 128 aa, Unknown
  Bacterial polypetide isolated from the Sargasso Sea
NYPFEKGPLSPRFRGEHALRRYPSGEERCIACKLCEAVCPAQAITIEAEPRADGSRRTTRYDIDMTKCIYCGYCEEACPVDAIVEGPNFEFATETREELLYNKDKLLENGDRWETELAGRLKADAPYR

SEQ ID NO: 80143 - protein, 308 aa, Unknown
  Bacterial polypetide isolated from the Sargasso Sea
GAYVAAIFHLVTHAFFKALLFLGAGAVIHEMHHEQNIYKMGGLRKKMPVTAAMMGIGTLAISGIPPLAGFWSKDEILASVFSRGGIYYGFWALSLLAAFMTAFYMGRHWLLIFVKEPTSDIENIHEAPKNMTRPLILLGIFSIFIGFINTPFFHGLEKVLDETLKSVEVTHLPEGITLAILAVLSIGAGFSGLGLAYLIYIFDIFSYFKIKLPFLSEIKLLSKEVLFLDKVGNAIFVRSLKTLSRKVAVTVDNMTIDGIVNGVAKSFLRSSQQISLAQTGLVRNYVVYFGLFMLVLIVIYLFFTGVLI

SEQ ID NO: 80144 - protein, 189 aa, Unknown
  Bacterial polypetide isolated from the Sargasso Sea
SNSKYPFLGAIRSAAQMVSYEVSIGVIIINVLLCVGSLNLTDIVLAQENLWFIVPLFPMFVVFFISALAETNRPPFDLPEAEAELVAGYQTEYSGMMYAMFWLGEYANILLMCSLGSILFLGGWLSPIDIYPFTVIPAPLWLIFKILLLFILFSLVKAIVPRYRYDQLMKLGWKIFLPLSLSWVVLTAS

SEQ ID NO: 80145 - protein, 274 aa, Unknown
  Bacterial polypetide isolated from the Sargasso Sea
PVLPLAGAVITGLGLISFNRTINRLRKPVALLLISCVGAAAVLSYAILAGQLAGAPPVESLFVWASAGSFVLPMGFVVDPLAAVMLSLVTTIALLVMVYSHGYMAHDKGYVRFFTYLALFSSSMLGLIISPNLLEIYVFWELVGMCSYLLVGFWYDRDGAAHAAQKAFVVNRVGDFGLLLGILGLFWATGSFDFQGIADGLRDGLSSGAIAPWAALLLCLLVFLGPMAKSAQFPLHVWLPDAMEGPTPISALIHAATMVAAGVFLVARLDPLYS

SEQ ID NO: 80146 - protein, 33 aa, Unknown
  Bacterial polypetide isolated from the Sargasso Sea
KIGLLGFVSRMIFLFILTVGFIYEWKKGALDWE

SEQ ID NO: 80147 - protein, 123 aa, Unknown
  Bacterial polypetide isolated from the Sargasso Sea
EAEAELVAGYQTEYSGMMYAMFWLGEYANILLMCAMGSILFLGGWLPIIDIYPLNMIPSPIWMIIKILFLFLLFALIKAIVPRYRYDQLMRLGWKVFLPFSLLYLVLTASFLFYFDKLPKGNF

SEQ ID NO: 80148 - protein, 290 aa, Unknown
  Bacterial polypetide isolated from the Sargasso Sea
IDSVRHKAHSCFFTVSQIGYMFLGLGVGAWSAAIFHLMTHAFFKALLFLASGTVILSVHHEQSIFKMGGLRKALPVSFASFLIGSLALTAFPYTSGYFSKDEILLAAFELEGVGTYLWLGGVIGAFFTGIYTFRLFFIVFFGENKGHLPEKEVGGWHMNGPLILLMILSLVGGFITVPVEAVFSHGAAHEEHHVSALVHGFMIAMPLVGIFISYMFFYAKKWSIEDLMSRPIAQKLHRLWHSGWGMDWLYDRIFVFPFVWLSRINKDDLIDKLYTFIAMVSRLANSYVVR

SEQ ID NO: 80149 - protein, 162 aa, Unknown
  Bacterial polypetide isolated from the Sargasso Sea
MSFITKYIKSFTLFELMKGLALTLRYFFKPKVTINYPNQKGPLSPRFRGEHALRRYPNGEERCIACKLCEAVCPAQAITIEAEPKPDGSRRTTRYDIDMTKCIYCGLCQEACPVDAIVEGPNFEYATETREELLYDKEKLLRNGDIWEKQISENIRRDSKFR

SEQ ID NO: 80150 - protein, 286 aa, Unknown
  Bacterial polypetide isolated from the Sargasso Sea
MIYKATIIIIPIIIFLILNNNFENIKIFNNSFVLDEFSSFMKILILVSSFFVLIMSKKYIQDIKNDKFEYPVIMLIAILGMFFMVSSNDLILFYLGLELQSLSLYILASIDRDNLRSSEAGIKYFVLSALSSGLLLYGCSLLYGFTGSTNFQIISNNVGDINIGTIFAMIFILVGLAFKVSAVPFHMWTPDVYEGSPTSVTSFFAIVPKIAGIAVFIRFMYSPFQNILDQWQYILVFISIASMILGAVAAINQKNIKRLIAYSSISHMGYAIAGISTGTESGLKVQ

SEQ ID NO: 80151 - protein, 305 aa, Unknown
  Bacterial polypetide isolated from the Sargasso Sea
ISSESGLKYFVLSALSSGLLLYGCSLIYGFSGSTNFFIIADNLTESSYGLTFGIVFILVGLAFKISAVPFHMWAPDVYEGSPTSVTAFFAILPKIAALTIFVRVLYVPFFNLINDWQMIVIFLSIASMLFGSIAAIGQSNLKRLIAYSSISHMGYALAGLSTGTNQGIQSSITYITIYLFMNLAFFGCILMLRRDDKYFENIEDLSGLSKHHPVLSFSFLIVLFSLAGIPPLAGFFAKFYIFTAVIEESMYFLAIVGLLSTVIAAYYYLRLIKIIYFDSEKEKYETNHNIGLKISLLISSNIYSF

SEQ ID NO: 80152 - protein, 163 aa, Unknown
  Bacterial polypetide isolated from the Sargasso Sea
MIKNIILDVKKFFLIEILKGLGLTLKYFFKRKVTINYPYEKGPISPRFRGEHALRRYPNGEERCIACKLCEAICPAQAIKIEAEPRPDGSRRTTRYDIDMTKCIYCGFCAEACPVDAIVEGPNFEFATETREELFYDKKKLLENGDRWEEQIAAAQKLDSPYR

SEQ ID NO: 80153 - protein, 142 aa, Unknown
  Bacterial polypetide isolated from the Sargasso Sea
MYKLIKSFTLFELFQGLFLTFKYIFKSKVTINYPHEKGPLSPRFRGEHALRRYPSGEERCIACKLCEAVCPAQAITIEAEPREDGSRRTTRYDIDMTKCIYCGLCQESCPVDAIVEGPNFEFATETREELIYNKDKLLENGR

SEQ ID NO: 80154 - protein, 114 aa, Unknown
  Bacterial polypetide isolated from the Sargasso Sea
VAGFFTEYSSASFVLFFLGEYASMILMSSMTVILFLGGWLPPFDVYPLNVVPGVIWFTVKVIFILFLFIWVRGTFPRYRYDQLMRLGWKVFLPFSLFWVVATSGFLVYFDMLPN

SEQ ID NO: 80155 - protein, 289 aa, Unknown
  Bacterial polypetide isolated from the Sargasso Sea
MTEIFSQLFFTIGGVLSDLTSSNFGFVLILIGQGLLMAVFLLLSAYFLIYADRKVWAAVQLRRGPNVVGAFGLLQSGADMLKLVFKEIVVPAGSDKFVFFLAPVVSFVMAILAWAVVPLNEGWQLSNINVAILYVFAISSLEVYGVIMGGWASNSKYPFLGSLRSAAQMISYEVSIGLVIIGVIISTGSMNFGAIVAAQDTDYGIFGWYWLPHLPMLFLFFISALAETNRPPFDLPEAESELVAGFQVEYSSTPFLLFMAGELIAVFLMCALTSLLFFGGWLSPIPALP

SEQ ID NO: 80156 - protein, 242 aa, Unknown
  Bacterial polypetide isolated from the Sargasso Sea
LLLQIGMLGCFAAMDVVLFYVFFELMLIPMYLLIGIWGGANRLYATIKFFLYTFLGSLLMLVALLYTASIYMDLNGSWSFSVLDWYGMDIPADTQYWLFIGFAAAFAVKIPIFPLHTWLPDAHYEAPTAGSVQLAAVLLKFGPYGFLRFAMPVFPAAVYELSTFFIVLALIGIIYGGMVAMVQPQIKRLIAYSSVAHMGYIVLGLFALNLQGLYGSWIQMINHAIVTGALFLVVGMIYERTH

SEQ ID NO: 80157 - protein, 74 aa, Unknown
  Bacterial polypetide isolated from the Sargasso Sea
MTAEFLKDYLPIILFLIVALGLSCAFVVVNFILSPNHPDPEKLSAYECGFEPFQDSRMEFDVRFYLVAILFIIF

SEQ ID NO: 80158 - protein, 83 aa, Unknown
  Bacterial polypetide isolated from the Sargasso Sea
FLGGWLPLMDVYPLNLLPAPAWMILKILFLFLLFALIKAIVPRYRYDQLMRLGWKIFLPFSLVYLVLTASFLFYFEKLPKVNI

SEQ ID NO: 80159 - protein, 155 aa, Unknown
  Bacterial polypetide isolated from the Sargasso Sea
MAEFWDGYLWPGIIIVGQILLIIVPIMGAVAYLTLAERKVIAAMQLRKGPNVVGPFGLFQPVADGLKLLVKETVVPSGANRVVFILAPMLTFILALVAWAVIPFDAGWVLADINVGILYLFAISSLGVYGIIMAGWASNSKYAFLGALRSAAQMV

SEQ ID NO: 80160 - protein, 84 aa, Unknown
  Bacterial polypetide isolated from the Sargasso Sea
MNDKIEQVPDEFKQLADDFSKNGFITTSLNNLINWSRSGSLHWMTFGLACCAVEMMQTAMPRYDVERFGAAPRGSPRQSDVMIV

SEQ ID NO: 80161 - protein, 292 aa, Unknown
  Bacterial polypetide isolated from the Sargasso Sea
IFVLLSSNKYVQIININKIEYPILILSSILGMIVMISSNDLILFYVGLELQSLALYVLASFNRDNLLSSESGLKYFVLSALSSGLLLYGCSLIYGFSGSTNFFIIRDALLQDSYGLTFGIVFILVGLAFKISAVPFHMWAPDVYEGSPTSVTTFFAILPKIAALTVFIRFLYVPFLNLIEQWQLIIIFLSIASMLFGSIAAIGQKKLKRLIAYSSIAHMGYALAGLATGTNAGIQSSISYITIYLFMNLGFFSCMFMLRREDKYFENIEDLSGLSKNHPLLSFSLLLVLFSL

SEQ ID NO: 80162 - protein, 285 aa, Unknown
  Bacterial polypetide isolated from the Sargasso Sea
VVGPFGLFQSLADALKYIFKEIIIPASSNKLVFVLAPVVTMTLALISWAVIPFGEDFVLADINVGILYLFAVSSLGVYGIIMGGWASNSKYPFLGAIRSAAQMVSYEVSIGVIIINVLLCVGSLNLSDIVLAQQNLWFVIPLFPMFVIFFISALAETNRPPFDLPEAEAELVAGYQTEYSGMMYAMFWLGEYANILLMCAMGAVLFLGGWLSPIDIFPFNVIPGPFWLIFKILFLFILFALVKATVPRYRYDQLMKLGWKIFLPFSLFYVVLTSSFLLYFDLLPG

SEQ ID NO: 80163 - protein, 247 aa, Unknown
  Bacterial polypetide isolated from the Sargasso Sea
ASSNKLVFVLAPVVTMTLALISWAVIPFGKDLVLADINVGILYLFAVSSLGVYGIIMGGWASNSKYPFLGAIRSAAQMVSYEVSIGVIIINVLLCVGSLNLSDIVMAQQNLWFVIPLFPMFVIFFISALAETNRPPFDLPEAEAELVAGYQTEYSGMMYAMFWLGEYANILLMCAMGSVLFLGGWLSPIDIFPFNAIPGPFWLIIKILFLFILFALVKATVPRYRYDQLMKLGWKIFLPFSLFYVVL

SEQ ID NO: 80164 - protein, 233 aa, Unknown
  Bacterial polypetide isolated from the Sargasso Sea
MTYINIFFAEFYKIIFLLLPVLVSVALIVWLDRRVWAFVQKRRGPNVVGPFGLFQTLADALKYIFKEIIIPASANKIIFVLAPVITLTLALIAWAVIPFSNEMVLADINVGILYLFAISSLSVYGIIMGGWASNSKYPFLGAIRSAAQMVSYEVSIGIIIINVLLCVGSLNLNKIVLAQESVWFIFPLFPMFVIFFISALAETNRPPFDLPEAESELVAGYQTEYSGMMYAMF

SEQ ID NO: 80165 - protein, 139 aa, Unknown
  Bacterial polypetide isolated from the Sargasso Sea
MFRYLNKIRSFVLIELFRGMYLTFKYMFKSKVTLNYPHEKGPLSPRFRGEHALRRYPNGEERCIACKLCEAVCPAQAITIESEPREDGSRRTTRYDIDMTKCIYCGLCQESCPVDAIVEGPNFEFATETREELMYNKEK

SEQ ID NO: 80166 - protein, 214 aa, Unknown
  Bacterial polypetide isolated from the Sargasso Sea
SSLGVYGIIMGGWASNSKYPFLGAIRSAAQMVSYEVSIGVIIINVLLCVGSLNLSDIVMAQQNLWFVIPLFPMFVIFFISALAETNRPPFDLPEAEAELVAGYQTEYSGMMYAMFWLGEYANILLMCAMGAVLFLGGWLSPIDIFPFNAIAGPFWLIFKILFLFILFALVKATVPRYRYDQLMKLGWKIFLPFSLFYVVLTSSFLLYFDLLPGK

SEQ ID NO: 80167 - protein, 105 aa, Unknown
  Bacterial polypetide isolated from the Sargasso Sea
HFFFFFFGEYINILLMCAMMTIMFFGGWYPPIDIAPFNLVPGFIWFLIKMMAIFYMISMVKAFVPRYRYDQLMRLGWKVFLPLSLLAVVVTSSVLFFFNLAPVFS

SEQ ID NO: 80168 - protein, 99 aa, Unknown
  Bacterial polypetide isolated from the Sargasso Sea
MGVNNFLGKKLNEIPDQPEQDKILTAVADEMSNKGFVIGQADKLFNWAKSGSLWPMTFGLACCAVEMMHSAASRYDMDRYGMLFRPSPRQSDVMIVAGT

SEQ ID NO: 80169 - protein, 72 aa, Unknown
  Bacterial polypetide isolated from the Sargasso Sea
DLYPFNLIPGVFWLIFKILFLFILFALVKAVVPRYRYDQLMRLGWKIFLPLSLTYVILTASYLFYFNLLPTI

SEQ ID NO: 80170 - protein, 67 aa, Unknown
  Bacterial polypetide isolated from the Sargasso Sea
IPGAIWLILKILLLFFLFALVKAIVPRYRYDQLMRLGWKVFLPFSLIWVVITASYLFFFNLLPVNKL

SEQ ID NO: 80171 - protein, 46 aa, Unknown
  Bacterial polypetide isolated from the Sargasso Sea
LVKAIVPRYRYDQLMRLGWKVFLPLSLIWVVLTASYLFYFNLLPGN

SEQ ID NO: 80172 - protein, 183 aa, Unknown
  Bacterial polypetide isolated from the Sargasso Sea
MVSYEVSIGFVIITVLLCVGSLNLSKIVLAQQTVWFAIPLLPMFIIFFISALAETNRLPFDLPEDESTLVAGFFTEYSSASFVLFFLGEYASMILMSSMTVILFLGGWLPPFDVYPLNVVPGVIWFTLKVIFILFLFIWVRGTFPRYRYDQLMRLGWKVFLPFSLFWVVVTSGFLVYFDMLPN

SEQ ID NO: 80173 - protein, 162 aa, Unknown
  Bacterial polypetide isolated from the Sargasso Sea
MAFIDRTARAFLLAELVQGLSLTLRAMFKPKVTINYPYEKGPLSPRFRGEHALRRYPNGEERCIACKLCEAVCPALAITIEAEPREDGSRRTTRYDIDMTKCIYCGYCQEACPVDAIVEGPNFEFATETREELFYNKDKLLSNGDRWEHEIAANLELDAPYR

SEQ ID NO: 80174 - protein, 193 aa, Unknown
  Bacterial polypetide isolated from the Sargasso Sea
MNFINDFGISVFGYSDFSSFIIIILKILAIVLPLLISVAYLTLAERRVIGLMQLRKGPNVVGPFGLFQPFADALKLMSKETIIPKEANKFLFLLAPMITFILALIAWAVIPFDENNVLADINVGILYLFAVSSLAVYGIIIAGWASNSKYAFLGALRSAAQMVSYEVSIGLIIITVLLCVGSLNLTEYCQRTK

SEQ ID NO: 80175 - protein, 169 aa, Unknown
  Bacterial polypetide isolated from the Sargasso Sea
LLCVGSLNLSDIVMAQQNLWFVIPLFPMFVIFFISALAETNRPPFDLPEAEAELVAGYQTEYSGMMYAMFWLGEYANILLMCAMGSVLFLGGWLSPIDIFPFNAISGPFWLIFKILFLFILFALVKATVPRYRYDQLMKLGWKIFLPFSLFYVVLTSSFLLYFDLLPGK

SEQ ID NO: 80176 - protein, 258 aa, Unknown
  Bacterial polypetide isolated from the Sargasso Sea
MELIFLLPIFLPFLTAIFLFLNKKLFSELVTNFFTLNSALLSFAIAAYSFIALSLNKFKPVNVELFQWISNPDISIGFTLDGLSGIMLILVTGLSFIIQLFSTSYMEKDEKHCNYFVYFNFFVFSMLLLVMSSNFLVMFLGWELVGLSSYLLISFWSKKPAAAKAGNKAFVINRVGDFGFLIGLMIILDTYNTFDFYQILQNTDGVNESTITAISLFLLLGAFGKSAQFPLFSWLPDAMEGPTPASALIHAATIGTAG

SEQ ID NO: 80177 - protein, 100 aa, Unknown
  Bacterial polypetide isolated from the Sargasso Sea
MKLIDTDEKLKKVPDEFKQIAKDFAEKGFITTSTNNLINWARTGSLHWMTFGLACCAVEMMHTSMPRYDLERFGAAPRASPRQSDVMIVAGTLTNKMAPA

SEQ ID NO: 80178 - protein, 100 aa, Unknown
  Bacterial polypetide isolated from the Sargasso Sea
MFWLGEYANILLLCALGSILFLGGWLSPIDVYPLNIIPGVFWMTFKILLLFFLFAIIKAIVPRYRYDQLMRLGWKVFLPFSLIYVVLTASFLVYFDLLPK

SEQ ID NO: 80179 - protein, 257 aa, Unknown
  Bacterial polypetide isolated from the Sargasso Sea
KFVFVLAPVVTMTFLLISWAVIPFDEDFVLADINVGILYLFAVSSLGVYGIIMGGWASNSKYPFLGAIRSAAQMVSYEVSIGVIIINVLLCVGSLNLSDIVMAQQNLWFVIPLFPMFVIFFISALAETNRPPFDLPEAEAELVAGYQTEYSGMMYAMFWLGEYANILLMCAMGAVLFLGGWLSPIDIFPFNVIPGPFWLIFKILFLFILFALVKATVPRYRYDQLMKLGWKIFLPFSLFYVVLTSSFLLYFDLLPGK

SEQ ID NO: 80180 - protein, 280 aa, Unknown
  Bacterial polypetide isolated from the Sargasso Sea
HILDWYGMNIVPETQTWLFLGFAVAFAVKIPLFPFHTWLPDAHYEAPTAGSVQLAAVMLKFGPYGFLRFAMPVFPAAVYELTPLFITLSLIGIVYGGLVAMVQKQIKRLIAYSSVAHMGYIVLGLFALNTQGVYGGWIQMINHAIVTGALFLVVGMIYERTHTQEIVDYGGVIHTMPLFSVFLVFFSMASVGLPGLNGFVGEVLAMVGAARVNIWYGIIAAAGVIIAAIYMLWMVQRVLFGPLVKDMVKGLNDLSLREVVVLVPLAFWTVFLGVYPQPVF

SEQ ID NO: 80181 - protein, 74 aa, Unknown
  Bacterial polypetide isolated from the Sargasso Sea
MLSDFLSDYLPIVLFLIIALGLSFAFVLINFILSPKKPDPQKLSAYECGFEPFEDSRMEFDVRFYLVAILFIIF

SEQ ID NO: 80182 - protein, 125 aa, Unknown
  Bacterial polypetide isolated from the Sargasso Sea
LPEAEAELVAGYQTEYSGMMYAMFWLGEYANILLMCALGSILFLGGWLSPIDVYPLNLIPGAVWMIIKILILFFMFAIIKAIVPRYRYDQLMRLGWKVFLPFSLIYVVLTASFLIYFDLLPNKGI

SEQ ID NO: 80183 - protein, 179 aa, Unknown
  Bacterial polypetide isolated from the Sargasso Sea
VSIGVIIINVLLCVGSLNLTDIVLAQKNIWFVIPLFPMFIIFFISALAETNRPPFDLPEAEAELVAGYQTEYSGMMYAMFWLGEYANILLMCALGSILFLGGWLSPINISPFNDIPEPFWLIFKILFLFILFALVKAIVPRYRYDQLMKLGWKIFLPFSLIWVVLTAGYLIYFDLLPQT

SEQ ID NO: 80184 - protein, 162 aa, Unknown
  Bacterial polypetide isolated from the Sargasso Sea
MNTVIKFFQKFFLLEIIKGLFLTLKYLFKKKVTINYPYEKNFISSRFRGEHALRRYPNGEERCIACKLCEAVCPAQAIVIEAEPRPDGSRRTTRYDIDMTKCIYCGFCQEACPVDAIVEGPNFEFSTETREELFYDKERLLANGDRWETEIAKNLKIDSPYR

SEQ ID NO: 80185 - protein, 48 aa, Unknown
  Bacterial polypetide isolated from the Sargasso Sea
LWVRATTPRYRYDQLMRLGWKVFLPFSLLWLVLTAGFLVFTGSTPNIY

SEQ ID NO: 80186 - protein, 81 aa, Unknown
  Bacterial polypetide isolated from the Sargasso Sea
NGHQALRKVYDQMPEPIYVISMGSCANGGGYYHYSYSVVRGCDRIVPVDVYVPGCPPSAEALLYGILQLQKKIRKKGSFIR

SEQ ID NO: 80187 - protein, 312 aa, Unknown
  Bacterial polypetide isolated from the Sargasso Sea
MAGIVLAALALLSMTSAQSTAFGGMFRADAFADYMKLLVLMGSFAAVFMSVRPLEYDDINKPEFFLLVILALVGMMLMISANDLMSLYMAVELQSLPLYVVAAMRTNSLRSSEAGLKYFLLGALSSGMLLYGASLVYGFAGTTSFAGIAAAVSEADLPAGFIIGMVFMITGIAFKVSAAPFHMWTPDVYEGSPSPVTALFAIAPKVAAIALMLRLTFGAFGNIAHEWSQVIMALSVASMVVGALGAIMQSDIKRMMAYSSIAHMGYALAGLAAGTHEGAFGVMIYMTSYVFMGAGTFAIILLMRRDGQSATR

SEQ ID NO: 80188 - protein, 270 aa, Unknown
  Bacterial polypetide isolated from the Sargasso Sea
LADALKYIFKEIIIPSSSNKIIFILAPIVTMTLALISWAVIPFSNNFVLADINVGILYLFAVSSLGVYGIIMGGWASNSKYPFLGAIRSAAQMVSYEVSIGVIIINVLLCVGSLNLSDIVLAQKGMWFILPLFPMFVIFFISALAETNRPPFDLPEAEAELVAGYQTEYSGMMYAMFWLGEYANILLMCAMGSILFLGGWLSPLNFYPFDLIPPALWMILKILLLFILFALVKAIVPRYRYDQLMKLGWKIFLPFSLIYVVLTASFLIYF

SEQ ID NO: 80189 - protein, 117 aa, Unknown
  Bacterial polypetide isolated from the Sargasso Sea
MLADFLKDYFSIIVFLIIALGLSFLFIIINFALSPKNPDPEKLSSYECGFEPFNDSRMEFDVRFYLVAILFIIFDLEIAFLFPWAISLGSIGFLGFISMMIFLFILTVGFVYEWKKG

SEQ ID NO: 80190 - protein, 142 aa, Unknown
  Bacterial polypetide isolated from the Sargasso Sea
MFVIFFISALAETNRPPFDLPEAEAELVAGYQTEYSGMMYAMFWLGEYANILLMCSLGSILFLGGWLSPIDIYPFTIVPAPLWLMLKILLLFILFSLVKAIVPRYRYDQLMKLGWKIFLPLSLTWVVLTASYLFYFNLLPVN

SEQ ID NO: 80191 - protein, 159 aa, Unknown; identical to SEQ ID NO: 80063
  Bacterial polypetide isolated from the Sargasso Sea

SEQ ID NO: 80192 - protein, 94 aa, Unknown
  Bacterial polypetide isolated from the Sargasso Sea
CNILLMCAMGAILFLGGWMSPIDIYPFTLVPGAIWLILKILLLFILFALVKAIVPRYRYDQLMRLGWKVFLPLSLIWVVLTSSYLFYFNLLPVN

SEQ ID NO: 80193 - protein, 85 aa, Unknown
  Bacterial polypetide isolated from the Sargasso Sea
ILFLGGWLSPIDAYPFNIIPGAFWMILKILILFFMFALIKAIVPRYRYDQLMRLGWKIFLPFSLIYVVLTASFLVYFDLLPNRGF

SEQ ID NO: 80194 - protein, 248 aa, Unknown
  Bacterial polypetide isolated from the Sargasso Sea
MTLALSAWAVIPLSEKIIIADINVGILYIFAISSLGVYGIIMGGWASNSKYPFLGAIRSAAQMVSYEVSIGIIIINVLLCVGSLNLTDIVLAQENLWFIIPLFPMFVIYFISALAESNRPPFDLPEAEAELVAGYQTEYSGMMYAMFWLGEYANILLLCALGAILFLGGWLSPVDIYPLNAIPGVFWMIFKILILFFMFAIIKAIVPRYRYDQLMRLGWKIFLPFSLIYVVMTASFLVYFDLLPNKSF

SEQ ID NO: 80195 - protein, 92 aa, Unknown
  Bacterial polypetide isolated from the Sargasso Sea
MNLDQYLPVLLFILVGIAVGVVPLVLGYILGPNRPDAAKNSPYECGFEAFEDARMKFDVRYYLVAILFILFDLEIAFLFPWAVTLHEVGVAG

SEQ ID NO: 80196 - protein, 286 aa, Unknown; identical to SEQ ID NO: 80150
  Bacterial polypetide isolated from the Sargasso Sea

SEQ ID NO: 80197 - protein, 274 aa, Unknown
  Bacterial polypetide isolated from the Sargasso Sea
IHSFKNEQDINKMGGVWRKLPYTWVLMIIGTLALTGFPLFSGFYSKDAIIEFAYLRGNSVGYYAASIGVITALLTSIYSWRLIFKTFHGDFQSSNIKIEEIKESPLVMIIPLIVLSIGSIFAGFVFKDLFLLKGDFFNFWNDSIKFLEPLSSSHPPLWFIILTPVLVTLSIPLSYYLFLKDKKILESFVNTNRPLYQFLQKKWYFDELYDYIFIKLFKNLGLFFWKIIDIKIIDKFGPDGLSSLIKYFSLKASNFQSGHIYQYAFVMLLGFSVF

SEQ ID NO: 80198 - protein, 313 aa, Unknown
  Bacterial polypetide isolated from the Sargasso Sea
CNNFSWKIERNVKEYMICFLILETLILGVFCSLDLVLFYLFFESGLIPMFLIIGIWGGNNRVYAAFKFFLYTLLGSILMLFAVIYMWKVSGTTDITKLMFFDFNSSDFELFGFNISGGIQSILWMAFFASFAVKLPMWPFHTWLPDAHVQAPTGGSVVLAAILLKMGGYGFLRFSLPMFPDASLIFQNFIFSISVIAIIYTSLVALMQKDIKKLIAYSSVAHMGFVTLGIFSMNQQSIDGAIFQMISHGIISAALFLLVGVIYDRMHTRDIDFYGGLVSLMPKYALFFIFFTMANVGLPGTSGFVGEFLVLLG

SEQ ID NO: 80199 - protein, 260 aa, Unknown
  Bacterial polypetide isolated from the Sargasso Sea
ISSNDLILFYVGLELQSLALYVLASFNRDNLKSSESGLKYFVLSALSSGLLLYGCSLIYGFSGSTNFFVIRETLTQDSYGLTFGIVFILVGLAFKISAVPFHMWAPDVYEGSPTSVTTFFAILPKIAALTVFIRFLYVPFVNLIEQWQIIIIFLSISSMLFGAIAAIGQKNLKRLVAYSSISHMGYALAGLSTGTNEGIQTSITYITIYLFMNLGFFSCMFMLRREDKYFENIDDLSGLSKNHPLLSFSFLIILFSLAGI

SEQ ID NO: 80200 - protein, 227 aa, Unknown
  Bacterial polypetide isolated from the Sargasso Sea
ADINVGILYLFAVSSLGVYGIIMGGWASNSKYPFLGAIRSAAQMVSYEVSIGVIIINVLLCVGSLNLSDIVLAQKDLWFVIPLFPMFIIFFISALAETNRPPFDLPEAEAELVAGYQTEYSGMMYAMFWLGEYANILLMCAMGSILFLGGWLSPIDLFPFNVIPAPIWLILKILFLFILFALIKAIVPRYRYDQLMKLGWKIFLPFSLIYVVLTASFLMYFDLLPGN

SEQ ID NO: 80201 - protein, 280 aa, Unknown
  Bacterial polypetide isolated from the Sargasso Sea
VDILPALPELILAALALVLVLVAAFGGEGTRNTRRVTRISLSGILLALALIWFGAANDEAAFGGMHRADSFADYMKVLVLLGTFGALYMSITPLAKDDIDKPEFSILVLLALVGMMLMISANDLMSLYMAVELQSLPLYVVAAMRTKSLQSSEAGLKYFLLGALSSGLLLYGASLVYGFAGTTTFAGIATAVSSDQLPSVFIVGMVFMISGIAFKVSAAPFHMWTPDVYEGSPSPVTALFAIAPKVAAMALMMRLTYGAFGSISDQWSQVLIAISIASMV

SEQ ID NO: 80202 - protein, 242 aa, Unknown
  Bacterial polypetide isolated from the Sargasso Sea
DFAGIAVSLSAGGLSVAFIVGMVFMVSGLAFKVSAAPFHMWTPDVYEGSPTPVTALFAIAPKVAALALLMRLTYGAFGQIADQWSQVLVALSIASMAVGALGAIMQTDIKRMMAYSSIAHMGYALAGLAAGTPSGAAGVMIYMTGYVFMGAGTFAIILLMRRDGQAATRITDLKGLSQTHPLLAVGLLVMMFSMAGIPPLAGFFGKWYVFLAAVQAGLVPLAVIGVVMSVVGAFYYLRIIRL

SEQ ID NO: 80203 - protein, 162 aa, Unknown
  Bacterial polypetide isolated from the Sargasso Sea
MSFLKNSSRALLLSELISGMALTFKYMFKPKVTVNYPFEKGPLSPRFRGEHALRRYPNGEERCIACKLCEAICPAQAITIEAEPRTDGSRRTTRYDIDMTKCIYCGFCEEACPVDAIVEGPNFEFATETREELMYNKDKLLENGERWEGHLNQRLSADAPYR

SEQ ID NO: 80204 - protein, 71 aa, Unknown
  Bacterial polypetide isolated from the Sargasso Sea
DQMPEPRYVISMGSCANGGGYYHYSYSVVRGCDRIVPVDIYVPGCPPSAEALLYGIMQLQKKIRNKGSLER

SEQ ID NO: 80205 - protein, 131 aa, Unknown
  Bacterial polypetide isolated from the Sargasso Sea
MALISNSVRSWFLTELASGMGIIFKHMFHSKATLNYPHEKGAISSRFRGEHALRRYSNGEERCIACKLCEAVCPALAITIEAEPRDDGSRRTTRYDIDMLKCIYCGFCQEACPVDAIVEGPNFEFAAETRE

SEQ ID NO: 80206 - protein, 244 aa, Unknown
  Bacterial polypetide isolated from the Sargasso Sea
LALIAWAVIPFGENIVLADINVGILYLFAVSSLGVYGIIMGGWASNSKYPFFGSIRSAAQMVSYEVSIGVIIINVLLCVGSLNLTDIVLAQQKLWFIIPLFPMFVIFFISALAETNRPPFDLPEAEAELVAGYQTEYSGMMYAMFWLGEYANILLMCAIGSLLFLGGWLPPVDIYPFNELPSPIWLILKILLLFLLFALVKAIVPRYRYDQLMKLGWKVFLPFSLFYVVLTASFLIYFNLLPNN

SEQ ID NO: 80207 - protein, 100 aa, Unknown
  Bacterial polypetide isolated from the Sargasso Sea
MGVKFNFNSEKQKQIPEEFKDLAKDFAEKGFITTSSENLVNWARTGSLHWMTFGLACCAVEMMQTSMPRYDLERFGAAPRASPRQSDVMIVAGTLTNKMA

SEQ ID NO: 80208 - protein, 107 aa, Unknown
  Bacterial polypetide isolated from the Sargasso Sea
YGVILAGWASNSKYAFLGSMRAAAQMVAYEIAMGFALVGVLMAGGSLKLGEIVAAQSGGVLSWFWIPLFPLFIVYFISGIAETNRHPFDLAEGEAEIVAGFHVEYSG

SEQ ID NO: 80209 - protein, 159 aa, Unknown
  Bacterial polypetide isolated from the Sargasso Sea
MYKIIKSFTLFELFQGLFLTFKYIFKSKVTINYPHEKGPLSPRFRGEHALRRYPSGEERCIACKLCEAVCPAQAITIEAEPREDGSRRTTRYDIDMTKCIYCGLCQESCPVDAIVEGPNFEFATETREELIYNKDKLLENGDRWEQEIAQNIHLDSKYR

SEQ ID NO: 80210 - protein, 40 aa, Unknown
  Bacterial polypetide isolated from the Sargasso Sea
FPRYRYDQLMRLGWKFFLPFSLFWVVATSGFLVYFDMLPN

SEQ ID NO: 80211 - protein, 56 aa, Unknown
  Bacterial polypetide isolated from the Sargasso Sea
KILLLFFLFALIKAIVPRYRYDQLMRLGWKVFLPFSLIWVVITASYLFYFNLLPVN

SEQ ID NO: 80212 - protein, 106 aa, Unknown
  Bacterial polypetide isolated from the Sargasso Sea
ASFVLFFLGEYASMILMSSMTVILFMGGWLPPFDIFPLNAVPGVIWFVIKIIFILFLFIWVRGTFPRYRYDQLMRLGWKIFLPLSLLWVVLTAGFLIIFDMVPNSL

SEQ ID NO: 80213 - protein, 61 aa, Unknown
  Bacterial polypetide isolated from the Sargasso Sea
MIAKILFLFLLFALIKAIVPRYRYDQLMRLGWKVFLPFSLIYLVLTASFLFYFDKLPKGNF

SEQ ID NO: 80214 - protein, 170 aa, Unknown
  Bacterial polypetide isolated from the Sargasso Sea
VLLCVGSLNLSDIVLAQKDLWFVIPLFPMFIIFFISALAETNRPPFDLPEAEAELVAGYQTEYSGMMYAMFWLGEYANILLMCAMGSILFLGGWLSPIDLFPFNVIPAPVWLILKILFLFILFALIKAIVPRYRYDQLMKLGWKIFLPFSLIYVVLTASFLMYFDLLPGN

SEQ ID NO: 80215 - protein, 72 aa, Unknown
  Bacterial polypetide isolated from the Sargasso Sea
DLYPFNLIPGAIWLILKILLLFFLFALVKAVVPRYRYDQLMRLGWKIFLPLSLTYVVLTASYLFYFNLLPSI

SEQ ID NO: 80216 - protein, 68 aa, Unknown
  Bacterial polypetide isolated from the Sargasso Sea
PEPRYVISMGSCANGGGYYHYSYSVVRGCDRIVPVDVYVPGCPPSAEALLYGVLQLQKKIRKKGSLSR

SEQ ID NO: 80217 - protein, 78 aa, Unknown
  Bacterial polypetide isolated from the Sargasso Sea
MTAEFIKDYLPIILFLIIALGLSCAFVVINFVLAPKNPDPEKLSAYECGFEPFQDSRMEFDVRFYLVAILFIIFDLEI

SEQ ID NO: 80218 - protein, 180 aa, Unknown
  Bacterial polypetide isolated from the Sargasso Sea
KFPIGVIIINVLLCVGSLNLSDIVMAQQNLWFVIPLFPMFVIFFISALAETNRPPFDLPEAEAELVAGYQTEYSGMMYAMFWLGEYANILLMCAMGAVLFLGGWLSPIDIFPFNVIPGPFWLIFKILFLFILFALVKATVPRYRYDQLMKLGWKIFLPFSLFYVVLTSSFLIYFDLLPGK

SEQ ID NO: 80219 - protein, 266 aa, Unknown
  Bacterial polypetide isolated from the Sargasso Sea
LIWIVGLFTALFAATAAVAQNDIKKVLAYSTVSQLGFMFVAVGSGLYVAAIFHMITHAFFKALLFLGAGSVIHGMHHEQDMRKYGALRKAMPITAFTFIIGWLAIAGIPPFSGFWSKDEVLLAAWNENKIAWVMLLAAAVMTAFYMSRLVFMTFFGEKRWGTAVTEEEAHESETEKHEIAPHESPMVMWLPLVLLSGLAAIAGLLNLPFSHDTKHLEKWLEPILFGNEVHVTASGQTKWLLAVIAIIGASIGVIAAIFVYLKNRVA

SEQ ID NO: 80220 - protein, 299 aa, Unknown
  Bacterial polypetide isolated from the Sargasso Sea
MIYLNSFFIEVYKVLFLLLPVLVSVALIVWLDRRVWAFVQKRKGPNVVGPFGLLQTLADALKFIFKEIIIPASANKFIFILAPIITLTLALIAWAVIPFSNDMVLANINVGILYLFAVSSLSVYGIIMGGWASNSKYPFLGAIRSAAQMVSYEVSIGIIIINVLLCVGSLNLNKIVLAQENIWFIFPLFPVFVIFFISALAETNRPPFDLPEAESELVAGYQTEYSGMMYAMFWLGEYANILLLCALGSILFLGGWLSPLDIYPFNLLPGVFWMILKILVLFILFSLVKNSCTKDTDLI

SEQ ID NO: 80221 - protein, 90 aa, Unknown
  Bacterial polypetide isolated from the Sargasso Sea
MSSMTVILFMGGWLPPFDIFPLNAIPGVIWFVIKIIFILFLFIWVRGTFPRYRYDQLMRLGWKVFLPLSLLWVVLTAGFLIAFDMVPNSL

SEQ ID NO: 80222 - protein, 276 aa, Unknown
  Bacterial polypetide isolated from the Sargasso Sea
QIEYPILILSSVLGMMIMISSNDLIVFYMGLELQSLALYVLATFNRDQLKSSEAGLKYFVLSALSSGLLLYGCSLIYGFTGSTNFNVISTQFNANEYAITFGIVFILVGLAFKISAVPFHMWAPDVYEGSPTSVTLFFTMVPKIAALTVFIRFLYVPFLNLIDQWQMILVFLSIASMLFGAIAAIGQKNLKRLIAYSSISHIGYALAGLATGSNDGIQSSVIYMTIYIIMNLGFFSCLLMMRRNNIYYEQIEDLSGLSKNHPLLSISLLIILFSLA

SEQ ID NO: 80223 - protein, 301 aa, Unknown
  Bacterial polypetide isolated from the Sargasso Sea
MVSIFLNSISTLLNERLTTFITINGALLSFTVSLFMFGALLLDKFQPISLKLYTWFPDPEIKFEFLLDGLSGTMMLLVTGLGLVIQIFSTSYMSGDPRYVKYFVYFNFFVFSMLLLVMSANFLVMFFGWELVGLSSYLLISFWSEKKEAAKAGNKAFVLNRIGDFGFLIALMMILNTYDTFSFKTVFATTLINQPQNLDLIVVFLMIGAFGKSAQFPLFSWLPDAMEGPTPASALIHAATMVTAGVFMLVRISPLLQFSELSSILIISIGLLTALISAFAAINQNDIKKVLAYSTFHSWDL

SEQ ID NO: 80224 - protein, 161 aa, Unknown
  Bacterial polypetide isolated from the Sargasso Sea
TTATQLLKSFTLWEFLKAHALTLKYFFKPKVTINYPFEKSPLSPRFRGEHALRRYPNGEERCIACKLCEAVCPAQAITIESEPREDGSRRTTRYDIDMTKCIYCGFCQEACPVDAVVEGPNFEYATETREELLYDKAKLLANGDKWERAIAANLEADAPYR

SEQ ID NO: 80225 - protein, 253 aa, Unknown
  Bacterial polypetide isolated from the Sargasso Sea
TNFYEISKNLNVDQYGFSFGLVFILVGLAFKVSAVPFHMWAPDVYEGSPTAVTLFFAIAPKIAAITVFVRFLYEPFFIFMDQWQIILIFISIASMLLGAFAAIGQKNIKRLIAYSSISHMGYALAGLCAGSNEGIQSTIIYIVIYMIMNLGLFSCLFMMRRAEKYYENIEDLSGLSKNHPAISVCLLIILFSLAGIPPMAGFFAKFYVFSALIEKSMYSIVIIGLISAVISAFYYLRIIKIIYFDKPVEKFDA

SEQ ID NO: 80226 - protein, 130 aa, Unknown
  Bacterial polypetide isolated from the Sargasso Sea
TNRPPFDLPEAEAELVAGYQTEYSGMMYAMFWLGEYANILLMCAMGSILFLGGWLSPIEIYPFDLIPSPFWLIFKILLLFLLFSLVKAVVPRYRYDQLMKLGWKIFLPFSLLWVVLTASYLYYFNLLPIT

SEQ ID NO: 80227 - protein, 44 aa, Unknown
  Bacterial polypetide isolated from the Sargasso Sea
AFLFPWAISLGHIGIFGFISMLIFLSILTVGFIYEWKKGALDWE

SEQ ID NO: 80228 - protein, 298 aa, Unknown
  Bacterial polypetide isolated from the Sargasso Sea
RSSEAGIKYFVLSALSSGLLLYGCSLLYGFTGSTNFQVISNNVGDINIGTIFAMIFILVGLAFKVSAVPFHMWTPDVYEGSPTSVTSFFAIVPKIAGIAVFIRFMYSPFQNILDQWQYILVFISIASMILGAVAAINQKNIKRLIAYSSISHMGYAIAGISTGTESGFKSTMIYILIYSAMNIGFFAFVFLMKRSGKYVEEINELSGISKNHPLAALSLLIVLFSLAGIPPLAGFFAKFYIFMSVIESGMYTLAIIGLITTVVSAFYYIRIVKVMYFDNPKKPFESFKDYGIYGSLIF

SEQ ID NO: 80229 - protein, 57 aa, Unknown
  Bacterial polypetide isolated from the Sargasso Sea
FKILFLFFLFAIIKAIVPRYRYDQLMRLGWKVFLPFSLIYVVLTASFLLYFDKLPKG

SEQ ID NO: 80230 - protein, 122 aa, Unknown
  Bacterial polypetide isolated from the Sargasso Sea
PEAEAELVAGYQTEYSGMMYAMFWLGEYANILLMCAMGAILFLGGWMSPVEIYPFTLVPGAIWLILKILLLFILFALVKAIVPRYRYDQLMRLGWKVFLPLSLIWVVLTASYLFYFNLLPTN

SEQ ID NO: 80231 - protein, 277 aa, Unknown
  Bacterial polypetide isolated from the Sargasso Sea
NRLYATFKFFLYTLAGSVLMLLAIIFIISKVKSGNIELISDFTFDQQIELILFLCFFASFAVKVPMFPFHTWLPDAHVQAPTSGSVILAGVLLKLGAYGFIRLSLPFFEYASIYFQPMIFALSCVAIVYTSIVALRQLDMKKMIAYSSVAHMGFVTIGIFTLTQDGINGAYFQMISHGIVSAALFLIVGVVYERHHTRMISDYSGVTNVMPKYSFFFMIFMLSSVGLPGTSGFVGEFLVIMSTISVSVYLTFFTAIGVILGASYMLLLYKNVNFGDL

SEQ ID NO: 80232 - protein, 54 aa, Unknown
  Bacterial polypetide isolated from the Sargasso Sea
AFCLFIFLWVRATFPRYRYDQLMRLGWKVFLPISLAAVAIVAGILVAFDWLPKG

SEQ ID NO: 80233 - protein, 162 aa, Unknown
  Bacterial polypetide isolated from the Sargasso Sea
MNAITRSVKSIFLAELVIGMALTLRMFFKPKVTVNYPYEKGPLSPRFRGEHALRRYPNGEERCIACKLCEAICPAQAITIEAEPRDDGSRRTTRYDIDMTKCIYCGYCEEACPVDAIVEGPNFEFATETREELMYDKAKLLANGDRWETEIGERLRLDAPYR

SEQ ID NO: 80234 - protein, 258 aa, Unknown
  Bacterial polypetide isolated from the Sargasso Sea
NKFIFILAPVVTMSLALIAWAVIPFSEDYVLADINVGILYIFAVSSLGVYGIIMGGWASNSKYPFLGAIRSAAQMVSYEVSIGIIIINVLLCVGSLNLSDIVKAQKDLWFIIPLFPMFVIFFISALAETNRPPFDLPEAEAELVAGYQTEYSGMMYAMFWLGEYANILLMCSLGSILFLGGWLPPSQNYLFMFVPAPLWLIFKILLLFILFSLVKAIVPRYRYDQLMKLGWKIFLPLSLFWVVLTSSYLFYFNLLPVN

SEQ ID NO: 80235 - protein, 92 aa, Unknown
  Bacterial polypetide isolated from the Sargasso Sea
MIISEKEKQIPDEFKKLANDFSENGFITTSFDNLVNWARTGSLHWMTFGLACCAVEMMHTSMPRYDLERFGAAPRGSPRQSDVMIVAGTLTN

SEQ ID NO: 80236 - protein, 119 aa, Unknown
  Bacterial polypetide isolated from the Sargasso Sea
MNLAAYFPVLLFLIVGTGLGVALVSIGKILGPNKPDTEKNAPYECGFEAFEDARMKFDVRYYLVAILFIIFDLETAFLFPWGVALRDIGWTGFMAMMIFLLEFLLGFAYIWKKGGLDWE

SEQ ID NO: 80237 - protein, 375 aa, Unknown
  Bacterial polypetide isolated from the Sargasso Sea
IHAATMVAAGIFLVARLQPLYSIFPSIQFIIAFVGTITCFLGASIALTQMDLKKGLAYSTVSQLGYMMLAMGCGAPVAGIFHLVTHACFKAMLFLGSGSVIHAMEEVVGHQPVLAQDMRLMGGLRKKMPYTSTTFLIGCVAISGIPPLAGFWSKDEILGNAFISFPAFWFVGLLTAGMTAFYMFRLYFLTFEGDFRGENKELQKQLLIAAKTNLDEENEEEHEEHGYIHESPWSMTFPLVFLAVPSGIIGFMGLPWDSKIASLLDPEEAETAAKAFELKEFLPLALASVLIASAGIIIAYQAYFVKKINLSVLFAEKFPSINRFLSNKWYLDDINEKLFVKGSRKLAKEVLEVDSKVVDGVVNLTGLCTLGSGES

SEQ ID NO: 80238 - protein, 333 aa, Unknown
  Bacterial polypetide isolated from the Sargasso Sea
MIENINILITEIYKIFLLLIPILTAVALIVWLDRRVWAFVQKRKGPNVVGPFGLFQSLADALKYIFKEIIIPASANKIIFILAPIVTMTLALVSWAVIPFSEDFVLADINVGILYLFAVSSLGVYGIIMGGWASNSKYPFLGAIRSAAQMVSYEVSIGVIIINVLLCVGSLNLTDIVLAQKNLWFIVPLFPMFVIFFISALAETNRPPFDLPEAEAELVAGYQTEYSGMMYAMFWLGEYANILLMCSMGSILFLGGWLPPIDLYPFTFIPAPLWLILKILLLFILFSLVKAIVPRYRYDQLMKLGWKIFLPLSLTWVVLTASYLFYFNLLPVN

SEQ ID NO: 80239 - protein, 273 aa, Unknown
  Bacterial polypetide isolated from the Sargasso Sea
ALKYIFKEIIIPASANKIIFILAPIVTMTLALISWAVIPFSEEIVLANINVGILYLFAVSSLGVYGIIMGGWASNSKYPFLGAIRSAAQMVSYEVSIGVIIINVLLCVGSLNLTDIVLAQENLWFIVPLFPMFVIFFISALAETNRPPFDLPEAEAELVAGYQTEYSGMMYAMFWLGEYANILLMCSMGSILFLGGWLSPIDLYPFTLVPAPLWLILKILLLFILFALVKAIVPRYRYDQLMKLGWKIFLPLSLTWVVLTASYLFYFNLLPVN

SEQ ID NO: 80240 - protein, 326 aa, Unknown
  Bacterial polypetide isolated from the Sargasso Sea
YLLKFYKILFLLVPVLVSVAMIVWLDRRVWAFVQKRRGPNVVGPFGLFQSLADALKYIFKEIIIPASSNKLVFVLAPVVTMTLALISWAVIPFGEGFVLADINVGILYLFAVSSLGVYGIIMGGWASNSKYPFLGAIRSAAQMVSYEVSIGVIIINVLLCVGSLNLSDIVMAQQNLWFVIPLFPMFVIFFISALAETNRPPFDLPEAEAELVAGYQTEYSGMMYAMFWLGEYANILLMCAMGAVLFLGGWLSPIDIFPFNAIPGPFWLIFKILFLFILFALVKATVPRYRYDQLMKLGWKIFLPFSLFYVVLTSSFLLYFDLLPGK

SEQ ID NO: 80241 - protein, 233 aa, Unknown
  Bacterial polypetide isolated from the Sargasso Sea
MAEFFASSWGIALILISQGLMMAVFLLLSAYFLIYADRKVWAAVQMRRGPNVVGAFGLLQSGADMLKLVFKEIIIPAGADKPVFFLAPLISFVMAILAWAVIPLNDGWVLSEINVALLFVFAISSLEVYGVIMGGWASNSKYPFLGSLRSAAQMISYEVSIGLIIIGVIISTGSMNFGDIVRAQEGEFGIFNWYWLPHLPMVFLFFISALAETNRPPFDLPEAESELVAGFQV

SEQ ID NO: 80242 - protein, 336 aa, Unknown
  Bacterial polypetide isolated from the Sargasso Sea
ALVQNDIKRIIAYSTISQLGYMTAALGASLYSLAIFHLITHAFFKALLFLCAGSIIIKCHHEQDIRKIGGLRRFMPITYMAFLYASLSLIGFPLTSGFYSKETIIDAVGYYGHTIPYIMLLLSIFTTTLYTAKIFSKVFFGESTLHLDSELKNKENDTEMLIPLVVLTIPSVFLGIFIYDSLMLGTLFGTSLAAQELVVSFYNNYVINSLNFFLHSFLTINFLILLSAIIFGYFYYYKKSFVIKTPSFIKNILTEEYGFNTFSSKYIPELQNFITKYLWRRVDISAIDNGFVNNTSYLLNKISHKVRKVHTGFIYHYSLTIISALILLLLIIGYKN

SEQ ID NO: 80243 - protein, 293 aa, Unknown
  Bacterial polypetide isolated from the Sargasso Sea
MIWLISILIVGGLLAWVSERYDKNYPRVIALITVLSDLLLMIAILQSEPASAEWISVLQIEWIPRFGISLYFALDGLSLLLILLTAFLGAIAIGSAWDEIKTRPGFFYFNLLWTLAGVIGVFTALDLFLFFFFWEVMLIPMYFIIAIWGHENKNYAAMKFFIFTQVTGMLMLVSILVLAYSHYTQFGLYSFKYEDLLSVRLASSVQFWVMLGFFISFTTKLPSVPFHSWLPDAHSQAPTAGSVILAGILLKTGAYGLIRFTVPLFPEASMSFAPVAMSLAALSILYCAKVAFA

SEQ ID NO: 80244 - protein, 331 aa, Unknown
  Bacterial polypetide isolated from the Sargasso Sea
MDYVYSLISETYKILFLLLPLLTAVAMIVWLDRRVWAFVQKRRGPNVVGPFGLFQSLADALKYIFKEIIIPASSNKVVFILAPITTMTLALISWAVIPFSEDFVLSDINVGILYLFAISSLGVYGIIMGGWASNSKYPFLGAIRSAAQMVSYEVSIGVIIINVLLCVGSLNLTDIVLAQEKIWFIIPLFPMFVIFFISALAETNRPPFDLPEAEAELVAGYQTEYSGMMYAMFWLGEYANILLMCAMGSILFLGGWISPIDSYPFNLIPPALWFIFKILLLFILFALVKAIVPRYRYDQLMKLGWKIFLPFSLIWVVLTAGFLLYFDLLPK

SEQ ID NO: 80245 - protein, 415 aa, Unknown
  Bacterial polypetide isolated from the Sargasso Sea
MINAVYFLIPEIFLSLSIFTFIIFGVFKKNSFDLIYRATIIILPIVIFLILNNNFENIEIFNNSFALDEFSSFMKILILVSSFFVLIMSKKYIQDINNNKFEYPVIMLIAILGMFFMVSSNDLILFYLGLELQSLSLYILASIDRDNLRSSEAGIKYFVLSALSSGLLLYGCSLLYGFTGSTNFQVISNNVGDINIGTIFAMIFILVGLAFKVSAVPFHMWTPDVYEGSPTSVTSFFAIVPKIAGIAVFIRFMYSPFQNILDEWQYILVFISIASMILGAFAAINQKNIKRLIAYSSISHMGYAIAGISTGTESGFKSTIIYILIYSAMNIGFFAFVFLMKRSGKYIEDINELSGISKNHPLAALSLLIVLFSLAGIPPLAGFFAKFYIFMSVIESGMYALAIIGLVTTVVFCFL

SEQ ID NO: 80246 - protein, 364 aa, Unknown
  Bacterial polypetide isolated from the Sargasso Sea
MQYAEFPILSLIIFSPVLGIALAGVFRDASDGIPAKVAALSSSLLTFLLSLYLWFHFDASEEGLQLVERTGWIPQFNIEYFLGLDGLNLFFLLIITFITPLALLGSWNLQKRNWQFQIQMLLLEIGMLGCFAAFDVVLFYVFFEVMLVPMYFLIGIWGGSNRLYATMKFVIYTMVGSLLMLVALIYTAILFKEINNGWSFNILDWYGMNIAPETQTWLFLGFAVAFAVKIPLFPFHTWLPDAHYEAPTAGSVQLAAVMLKFGPYGFLRFAMPVFPAAVYELTPLFITLSLIGVIYGGLVAMVQKQIKRLIAYSSVAHMGYIVLGLFALNTQGVYGGWIQMINHAIVTGALFLVVGMIYERTHTQ

SEQ ID NO: 80247 - protein, 472 aa, Unknown
  Bacterial polypetide isolated from the Sargasso Sea
MENLNLVLPEIFISLSIMFLLVLGVFKKDSSKITFILSLFAILITAIITINETFSVSRETLFNESVVIDSLSSLMKIITLVGGFLVLVISSSYLKTFKMYNIEYPILILSSILGMMVMISSNDLIVFYMGLELQSLALYVLATYNRDQLKSSEAGLKYFVLSALSSGLLLYGCSLVYGFSGSTNFDIISNQLNSNEYVLTFGIVFILVGLAFKISAVPFHMWAPDVYEGSPTTVTLFFTMVPKIAALTVFIRFLYVPFLNLIDQWQMIIVFLSIASMIFGAVAAIGQTNIKRLIAYSSISHIGYTLAGLATVSNEGIQSSIIYISIYVVMNLALFCCLLMLRRKDQYYEDISDLSGLSKNHPMLSLCLLVILFSLAGIPPLAGFFAKFYVFIAVLEQSMYFLAIVGLLSTVVAAFYYLRIIKIIYFDKEKDKYDTDHSLWLKFSLTVSTILILLYFIFPSQLIEVVSRINII

SEQ ID NO: 80248 - protein, 327 aa, Unknown
  Bacterial polypetide isolated from the Sargasso Sea
NGVWSFSVLDWYGMDISNDTQYWLFIGFAAAFAVKIPIFPLHTWLPDAHYEAPTAGSVQLAAVLLKFGPYGFLRFAMPIFPAAVYELSTLFLVLALIGIIYGGMVAMVQPQIKRLIAYSSVAHMGYIVLGLFALNIQGLYGSWIQMINHAIVTGALFLVVGMIYERTHTQEISDYGGVAHTMPKFSVFLIFFSMASIGLPGLNGFVGEVLAMIGAAKVNIWYGIVAAFGVLIAAIYMLWMVQRVVFGPMTKDMVKRLNDFTLREVVVLVPLVFWTIFLGVYPQPFFERIEVSINHYIQLIKSQEPRFAQDEAESPGLTKFLVWNLEE

SEQ ID NO: 80249 - protein, 335 aa, Unknown
  Bacterial polypetide isolated from the Sargasso Sea
MIIEYLTILFSEIYKILFLLIPVLTAVAMIVWLDRRIWAFVQKRRGPNVVGPFGLFQSLADALKYMFKEIIIPASSNKIIFILAPIVTMTLALVAWAVIPFSETFVLANINVGILYIFAVSSLGVYGIIMGGWASNSKYPFLGSIRSAAQMVSYEVSIGVIIINVLLCVGSLNLSDIVLAQKNLWFVIPLFPMFIIFFISALAETNRPPFDLPEAEAELVAGYQTEYSGMMYAMFWLGEYANILLMCAMGSVLFLGGWLPPLDIEALSFVPTPFWMIFKILFLFILFALVKAIVPRYRYDQLMKLGWKIFLPLSLVWVVLTASYLLYFNLLPVQI

SEQ ID NO: 80250 - protein, 256 aa, Unknown
  Bacterial polypetide isolated from the Sargasso Sea
MDNIFSMYLYPAAIIAAKSVFLITALLITIAFLLLADRKIWAAVQMRRGPNVVGAFGLLQSFADLLKFVLKEVIIPSKADKAVFLLAPFITTVFAISAWAVIPFDAGIVLADINIGVLYILAISSLGVYGIIMGGWASNSKYPFLGALRSAAQMVSYEVSIGFVIITVILLSGSLNLSDIVNAQSGDYGILNWYFIPLFPMFVVFFISALAETNRPPFDLPEAESELVAGFMVEYSSTPYLMFMLGEYVSIVLMCA

SEQ ID NO: 80251 - protein, 151 aa, Unknown
  Bacterial polypetide isolated from the Sargasso Sea
MDVLEKINESQNGFVTASSKDLFKWASTGSMWPMTFGLACCAVEMMHAGASRYDLDKFGMMFRPSPRQSDVIIVAGTLVNKMAPAIRKVYDQMADPKWVISMGSCANGGGYYHYSYSVVRGCDRIIPVDVYVSRLSSNRRGSALWSFTAKK

SEQ ID NO: 80252 - protein, 333 aa, Unknown
  Bacterial polypetide isolated from the Sargasso Sea
MIEYLNILITEVYKIFLLIIPILTAVAIIVWLDRRVWAFVQKRRGPNVVGPFGLFQSLADALKYIFKEIIIPASANKIIFVLAPVVTMTLALISWAVIPFSEEMVLANINVGILYLFAVSSLGVYGIIMGGWASNSKYPFLGAIRSAAQMVSYEVSIGVIIINVLLCVGSLNLTDIVLAQENLWFIVPLFPMFIIFFISALAETNRPPFDLPEAEAELVAGYQTEYSGMMYAMFWLGEYANILLMCSMGSILFLGGWLSPIDLYPFTIVPAPLWLILKILLLFILFSLVKAIVPRYRYDQLMKLGWKIFLPLSLTWVVLTATYLFYFNLLPVN

SEQ ID NO: 80253 - protein, 46 aa, Unknown
  Bacterial polypetide isolated from the Sargasso Sea
VRGTFPRYRYDQLMRLGWKIFLPLSLLWVVLTAGFLIVFDMVPNSL

SEQ ID NO: 80254 - protein, 315 aa, Unknown
  Bacterial polypetide isolated from the Sargasso Sea
MIPVLVSVAMIVWLDRRVWAFVQKRRGPNVVGPFGLFQTLADALKYIFKEIIIPASSNKVIFILAPIVTMTLALIAWAVIPFSETFVLADINVGILYLFAVSSLGVYGIIMGGWASNSKYPFLGAIRSAAQMVSYEVSIGVIIINVLLCVGSLNLSDIVLAQKDLWFVIPLFPMFIIFFISALAETNRPPFDLPEAEAELVAGYQTEYSGMMYAMFWLGEYANILLMCAMGSILFLGGWLSPIDLFPFNVIPAPIWLILKILFLFILFALIKAIVPRYRYDQLMKLGWKIFLPFSLIYVVLTASFLMYFDLLPGN

SEQ ID NO: 80255 - protein, 94 aa, Unknown
  Bacterial polypetide isolated from the Sargasso Sea
MFNFKNKKNEIPSEFKEIAKDFSEKGFVTTSSHNLINWARTGSLHWMTFGLACCAVEMMHTSMPRYDLERFGAAPRASPRQSDVMIVAGTLQIK

SEQ ID NO: 80256 - protein, 223 aa, Unknown
  Bacterial polypetide isolated from the Sargasso Sea
VGILYLFAVSSLGVYGIIMGGWASNSKYPFLGAIRSAAQMVSYEVSIGVIIINVLLCVGSLNLSEIVMAQQNLWFVIPLFPMFVIFFISALAETNRPPFDLPEAEAELVAGYQTEYSGMMYAMFWLGEYANILLMCAMGSVLFLGGWLSPIDIFPFNAIPGPFWLIFKILFLFILFALVKATVPRYRYDQLMKLGWKIFLPFSLFYVVLTSSFLLYFDLLPGK

SEQ ID NO: 80257 - protein, 42 aa, Unknown
  Bacterial polypetide isolated from the Sargasso Sea
PRYRYDQLMRLGWKVFLPFSLFYVVLTASFLFYFELLPTKGY

SEQ ID NO: 80258 - protein, 70 aa, Unknown
  Bacterial polypetide isolated from the Sargasso Sea
SMPEPRYVISMGSCANGGGYYHYSYSVVRGCDRIVPVDVYVPGCPPTAEALLYGILALQKKIRRTGTIKR

SEQ ID NO: 80259 - protein, 484 aa, Unknown
  Bacterial polypetide isolated from the Sargasso Sea
MSFPILSLLILTPIIGALTLSLSSSSQLKNKTIFLSGLWITTGEFLLSLLLPIFYDKTKNGYQFTEYHTWFDKFDINYYVGVDGVSIPLILLTTFLVPICLLCSLNSIQNRAKEFVIYFLLLESFIIGVFVSIDLVIFYVFFEAVLIPMFLIIGIWGGENRLYATFKFFLYTLAGSVLMLLAIIFIISKVKSGNIELISDFTFDQQIELILFLCFFASFAVKVPMFPFHTWLPDAHVQAPTSGSVILAGVLLKLGAYGFIRLSLPFFEYASIYFQPMIFALSCVAIVYTSIVALRQLDMKKMIAYSSVAHMGFVTIGIFTLTQDGINGAYFQMISHGIVSAALFLIVGVVYERHHTRMISDYSGVTNVMPKYSFFFMIFMLSSVGLPGTSGFVGEFLVIMSTISVSVYLTFFTAIGVILGASYMLLLYKNVNFGDLKTDIKQLADLTNIEIFYFSCLAFLTMLLGVYPKLLFEMINKSISMSIL

SEQ ID NO: 80260 - protein, 194 aa, Unknown
  Bacterial polypetide isolated from the Sargasso Sea
FLGSIRSAAQMVSYEVSIGVIIINVLLCVGSLNLSDIVLAQEKIWFVIPLFPMFVIFFISALAETNRPPFDLPEAEAELVAGYQTEYSGMMYAMFWLGEYANILLMCALGSILFLGGWLSPINMYPFDIVPSPLWLILKILFLFILFALVKAIVPRYRYDQLMKLGWKIFLPFSLIWVVLTAGYLMYFDLLPTV

SEQ ID NO: 80261 - protein, 432 aa, Unknown
  Bacterial polypetide isolated from the Sargasso Sea
TPVSALMHAATMVAAGVYLTVRLFPIFTPDALLVIAYVGGFTAIFAATIAITQNDIKKVLAYSTVSQLGYMILAVGVGNYVAAFFHLLTHAMFKACLFYGSGSVIHAMHHSLHELHDEETDPQDMRNMGGFKNKMPITSLTMTIATLAIAGVPLFSGFLSKDAILAGTLYFVDRHPEHLVLALFGFGAAAITAFYMFRLIFLTFYGEPKIPKVFEGIHESPKVMTYPLIILAALSFFIFYTLPYFNPFADYGWFTKLIKATNSAVPGNPTAKEIYDGVHYAHYTAMTLSIIVASVGIGLSFLMYYKKKLSPEIWTKRFGILHKLSLNKYYFDENYNRFLYQPFLKLCNAVAYVDWDLYDKYFINGFGHITKLLSKITGRLDYEGLDQTLVDGIGKTANNAGKNLKTVQTGKLQNYMLFALVGVIIILVFQIT

SEQ ID NO: 80262 - protein, 71 aa, Unknown
  Bacterial polypetide isolated from the Sargasso Sea
DQMPEPRWVISMGSCANGGGYYHYSYSVVRGCDRIVPVDVYVPGCPPTAEALVYGILQLQKKIRRENKFKR

SEQ ID NO: 80263 - protein, 84 aa, Unknown
  Bacterial polypetide isolated from the Sargasso Sea
CILLFGGAMGKSAQMPLHVWLPDSMEGPTPISALIHAATMVTAGVFLIARMSPLFELSTTALSFVLIIGATTALFTGILRFDSK

SEQ ID NO: 80264 - protein, 118 aa, Unknown
  Bacterial polypetide isolated from the Sargasso Sea
MDLKKGLAYSTVSQLGYMMLAMGCGAPVAGIFHLITHACFKAMLFLGSGSVIHAMEEVVGHQPVLAQDMRLMGGLRKKMPFTSITFLIGCVAISGIPPLAGFWSKDEILGNAFISFPA

SEQ ID NO: 80265 - protein, 126 aa, Unknown
  Bacterial polypetide isolated from the Sargasso Sea
DLPEAEAELVAGYQTEYSGMMYAMFWLGEYANILLMCAMGSILFLGGWLPPLDIYPFNIVPAPFWMIFKILLLFFLFAIIKAIVPRYRYDQLMRLGWKVFLPFSLIYVVLTASFLLYFDKLPKGSF

SEQ ID NO: 80266 - protein, 84 aa, Unknown
  Bacterial polypetide isolated from the Sargasso Sea
LGSILFLGGWLSPLDFYPFDLIPGAIWLILKILLLFILFALVKAIVPRYRYDQLMRLGWKIFLPFSLIYVVITSSYLFYFNLLP

SEQ ID NO: 80267 - protein, 100 aa, Unknown
  Bacterial polypetide isolated from the Sargasso Sea
FWLGEYANILLMCSLGSILFLGGWLSPINIYPFDLIPSPIWLTIKILLLFILFSLVKAIVPRYRYDQLMRLGWKIFLPFSLFWVILTASYLLYFNLLPVI

SEQ ID NO: 80268 - protein, 334 aa, Unknown
  Bacterial polypetide isolated from the Sargasso Sea
MIEYFQILGQEVYKILFLLIPILVSVAMIVWLDRRVWGLVQKRKGPNVVGPFGLFQTLADALKYIFKEIIIPASANKVVFILAPIVTMTLALIAWAVIPMSESFVLSDINVGILYLFAVSSLGVYGIIMGGWASNSKYPFLGAIRSAAQMVSYEVSIGIIIINVLLCVGSLNLNKIVLAQSEIWFIFPLFPMFVIFFISALAETNRPPFDLPEAESELVAGYQTEYSGMMYAMFWLGEYANILLLCSLGSILFLGGWLSPINIYPINLLPGAFWMIFKIISLFVLFSLVKAIVPRYRFDQLMRLGWKIFLPLSLTWLILTASFLFFLDMLPKVN

SEQ ID NO: 80269 - protein, 315 aa, Unknown
  Bacterial polypetide isolated from the Sargasso Sea
MFIAIGAGAYVAAIFHLVTHAFFKALLFLGAGAVIHEMHHEQNIYKMGGLRKKMPVTAAMMGIGTLAISGIPPLAGFWSKDEILASVFSKGGIYYGFWALSLLAALMTAFYMGRHWLLIFVKEPSNELDSVNEAPKNMTRPLILLGLFSIFIGFINTPFFHGLEKVLHETLYNVEVTHLPKGITLAVLAFLSIGAGFTGLALAYLIYIFDIFGYFKIKIPFLKQIKKLSKDVLNLNKIGNLIFVKGMKSLSRKVAVSVDGMTIDGFINGVARSFLKSSQQISYSQTGLVRSYVVYFGLFMLALILVFLFSPGVLL

SEQ ID NO: 80270 - protein, 345 aa, Unknown
  Bacterial polypetide isolated from the Sargasso Sea
RIPWIKQSNIEYFLGLDGLNLFFLLIINFITPLALLGSWNLEKSNWQFQIQMLLLQIGMLGCFAAMDVVLFYVFFELMLIPMYLLIGIWGGSNRLYATIKFFLYTFLGSLLMLVALLYTATLYMDLHGVWSFSVLDWYGMDIPVDTQYWLFLGFAAAFAVKIPIFPLHTWLPDAHYEAPTAGSVQLAAVLLKFGPYGFLRFAMPIFPAAVYELSTFFLVLALIGIIYGGMVAMVQPQIKRLIAYSSVAHMGYIVLGLFALNIQGLYGSWIQMINHAIVTGALFLIVGMIYERTHTQEISDYGGVAHTMPKFSIFLIFFSMASIGLPGLNGFVGEVLAMIVPQRST

SEQ ID NO: 80271 - protein, 103 aa, Unknown
  Bacterial polypetide isolated from the Sargasso Sea
MYKLIKSFTLFELFQGLFLTFKYIFKSKVTINYPHEKGPLSPRFRGEHALRRYPSGEERCIACKLCEAVCPAQAITIEAEPREDGSRRTTRYDIDMTKCIYCG

SEQ ID NO: 80272 - protein, 324 aa, Unknown
  Bacterial polypetide isolated from the Sargasso Sea
MINAIYFLIPEIFLSLSVFVFIIFGVFKKNSFDLIYKATIIIIPIVIFLILNNNFENIKIFNNSFALDEFSSFMKILILVSSFFVLIMSKKYIQDIKNNKFEYPVIMLIAILGMFFMVSSNDLILFYLGLELQSLSLYILASIDRDNLRSSEAGIKYFVLSALSSGLLLYGCSLLYGFTGSTNFQVISNNVGDINIGTIFAMIFILVGLAFKVSAVPFHMWTPDVYEGSPTSVTSFFAIVPKIAGIAVFIRFMYSPFQNILDQWQYILVFISIASMILGAVAAINQKNIKRLIAYSSISHMGYAIAGISTGTESGFKSTIIYIL

SEQ ID NO: 80273 - protein, 126 aa, Unknown
  Bacterial polypetide isolated from the Sargasso Sea
PFDLPEAEAELVAGYQTEYSGMMYAMFWLGEYANILLMCAMGSILFLGGWLSPTDTYPLNLIPAPMWMVLKILFLFILFALVKAIVPRYRYDQLMKLGWKIFLPLSLIWVVITSSYLYYFDLLPTN

SEQ ID NO: 80274 - protein, 62 aa, Unknown
  Bacterial polypetide isolated from the Sargasso Sea
AFWLIFKIIFLFILFALVKAIVPRYRYDQLMRLGWKIFLPFSLTWVVLTASYLFYFNLLPTN

SEQ ID NO: 80275 - protein, 333 aa, Unknown
  Bacterial polypetide isolated from the Sargasso Sea
MFENLTILFNEVYKVLFLLIPLLTAVAMIVWLDRRVWAFVQKRRGPNVVGPFGLFQSLADALKYIFKEIIIPASANKIIFILAPIVTMTLALISWAVIPFSEEYVLANINVGILYLFAISSLGVYGIIMGGWASNSKYPFLGAIRSAAQMVSYEVSIGVIIINVLLCVGSLNLTDIVMAQENLWFILPLLPMFVIFFISALAETNRPPFDLPEAEAELVAGYQTEYSGMMYAMFWLGEYANILLMCAMGSILFLGGWLPPIDIYPFTLIPSPLWLIFKILLLFILFSLVKAVVPRYRYDQLMKLGWKIFLPLSLLWVVITASYLYYFNLLPVN

SEQ ID NO: 80276 - protein, 116 aa, Unknown
  Bacterial polypetide isolated from the Sargasso Sea
MFGLNKNSDQIPSEFKKIAKDFSEKGFITTSSENLINWARTGSLHWMTFGLACCAVEMMQTSMPRYDLERFGAAPRASPRQSDVMIVAGTLTNKMAAPLRKVYDQNARAKICYING

SEQ ID NO: 80277 - protein, 332 aa, Unknown
  Bacterial polypetide isolated from the Sargasso Sea
MDYFYTLILETYKILFLLLPLLTAVAMIVWLDRRVWAFVQKRKGPNVVGPFGLFQSLADALKYIFKEIIIPASSNKIVFILAPITTMTLALISWAVIPFSEDFVLANINVGILYLFAISSLGVYGIIMGGWASNSKYPFLGAIRSAAQMVSYEVSIGVIIINVLLCVGSLNLTDIVLAQDKVWFVIPLFPMFVIFFISALAETNRPPFDLPEAEAELVAGYQTEYSGMMYAMFWLGEYANILLMCAMGSILFLGGWLSPISIYPFNLVPPALWFIIKILFLFILFALVKAIVPRYRYDQLMKLGWKIFLPFSLIWVVLTAGFLLYFDLLPKV

SEQ ID NO: 80278 - protein, 429 aa, Unknown
  Bacterial polypetide isolated from the Sargasso Sea
CKKAFIMTRLGDFGFLFSIIYLFNLNSNYLEIPILYEAILNEEISSGVATILAAGFLIGGIGKSAQFPLHNWLPDAMEGPTSVSALIHSATMVTAGVFLIARLFPLFQISELMPLIAIVGALTAFISATMALTTTDIKRVLAYSTISQLGYMFMALGLGAYTAAIFHLFTHAFFKAGLFLSSGSVHHAAGTFNMKYMGGLKKNMKFTYYSMLICSLSLAGLFPLSGFWSKDEIILSAYLYGGFLGNICLIIGLFVAFLTAFYMFRAVTLTFMGEFRGGGDKESEDLKKNNLPVPATVEHVHLGESPKNMVYPILLLSFFAIFIGYLVNPVFSNIIFIDKHLFGVFLEKSLEIFHFHGHHSFNFSIALVSSFVAILGILFGINTYRNKIEISKNKFFLSINNFLDKKYFMDHLYEKIVVENIFYEIILLG

SEQ ID NO: 80279 - protein, 75 aa, Unknown
  Bacterial polypetide isolated from the Sargasso Sea
IDIYPLNVVPSPIWMILKILFLFFLFALIKAIVPRYRYDQLMRLGWKIFLPFSLVYLVLTASFLFYFDKLPKGNF

SEQ ID NO: 80280 - protein, 336 aa, Unknown
  Bacterial polypetide isolated from the Sargasso Sea
MYQEVKLELIFLLPIFLPFLTAVFLFINKKLFNELITNFFTLNSALLSFAIAAYSFIALGLDKFKPVNVELFQWISNPDISIGFTLDGLSGIMLILVTGLSFVIQLFSTSYMEKDENHCNYFVYFNFFVFSMLLLVMSSNFLVMFFGWELVGLSSYLLISFWSKKPAAAKAGNKAFVINRVGDFGFLIGLMIILDTFNTFDFYKILQNTSGIAESTITAISLFLLLGAFGKSAQFPLFSWLPDAMEGPTPASALIHAATMVTAGVFMLVRISPLLQHSKIASLLIIIFGLITALLAAFSAINQFDIKKVLAYSTISQLGFMFIAIGAGAYVAAIFH

SEQ ID NO: 80281 - protein, 87 aa, Unknown
  Bacterial polypetide isolated from the Sargasso Sea
MNNFFDKEKKIPEEFREIAKDFSEKGFITTSTDNLINWARTGSLHWMTFGLACCAVEMMQTSMPRYDLERFGAAPRASPRQSDVMIV

SEQ ID NO: 80282 - protein, 297 aa, Unknown
  Bacterial polypetide isolated from the Sargasso Sea
MGFTGSTNFDVIASQLNSNEYALTFGIVFILVGLAFKISAVPFHMWAPDVYEGSPTSVTLFFTMVPKIAALSVFIRFLYVPFLNLIEQWQMILIFLSIASMLFGAVAAIGQTNLKRLAAYSSISHVGYALAGLATGTNDGIQSSVIYITIYILMNLGLFSCLLMMKRNDKYYENIDDLSGLSKNHPMLSLSLLIILFSLAGIPPLAGFFAKFYVFKSVIEQSMYFLAVVGLLSTVVAAFYYLRLIKIMYFDEEKEKYDKDHSVWLKFSLTASTLLILIYFIFPSQLIEVVSRINIIQ

SEQ ID NO: 80283 - protein, 161 aa, Unknown
  Bacterial polypetide isolated from the Sargasso Sea
MKFSRLLKTILMLDFIKGLLIAIKEIFKQKKTINYPFEKGKIGTRFRGEHALRRYPNGEERCIACKLCEAICPAQAITIESTEREDGSRKTTRYDIDMLKCIYCGLCEESCPVDAIVQGPNFEFATETREELYYNKEKLLDNGDRWESILAANIKANKPYR

SEQ ID NO: 80284 - protein, 73 aa, Unknown
  Bacterial polypetide isolated from the Sargasso Sea
IDLYPFTIIPAPLWFIFKILILFILFALVKAIVPRYRYDQLMRLGWKIFLPFSLLWVVITASYLFYFDLLPGN

SEQ ID NO: 80285 - protein, 183 aa, Unknown
  Bacterial polypetide isolated from the Sargasso Sea
VSYEVSIGVIIINVLLCVGSLNLSDIVMAQQNLWFVIPLFPMFVIFFISALAETNRPPFDLPEAEAELVAGYQTEYSGMMYAMFWLGEYANILLMCAMGAVLFLGGWLSPIDIFPFNAIPGPFWLIFKILFLFILFALVKATVPRYRYDQLMKLGWKIFLPFSLFYVVLTSSFLLYFDLLPGK

SEQ ID NO: 80286 - protein, 326 aa, Unknown
  Bacterial polypetide isolated from the Sargasso Sea
MFDQIYKILFLLVPVLVSVAMVVWLDRRVWAFVQKRQGPNVVGPFGLLQTIADALKYIFKEIIIPSSSNKVIFILAPIVTMTLALIAWAVIPFSATQVLADINVGILYLFAVSSLGVYGIIMGGWASNSKYPFLGAIRSAAQMVSYEVSIGVIIINVLLCVGSLNLNDIVIAQQNLWFVIPLFPMFVIFFISALAETNRPPFDLPEAEAELVAGYQTEYSGMMYAMFWLGEYANILLMCAMGAILFLGGWLSPLEIYPFTLVPGPIWLVLKILLLFLLFALVKATVPRYRYDQLMKLGWKVFLPLSLIWVVLTASYLFYFNLLPVN

SEQ ID NO: 80287 - protein, 316 aa, Unknown
  Bacterial polypetide isolated from the Sargasso Sea
MLVPVLVSVAMVVWLDRRVWAFVQKRQGPNVVGPFGLLQSLADALKYIFKEIIIPSSSNKVIFILAPIVTMTLALISWAVIPFSATQVLADINVGILYLFAVSSLGVYGIIMGGWASNSKYPFLGAIRSAAQMVSYEVSIGVIIINVLLCVGSLNLNDIVIAQQNLWFVIPLFPMFVIFFISALAETNRPPFDLPEAEAELVAGYQTEYSGMMYAMFWLGEYANILLMCAMGAILFLGGWLSPIEIYPFTLVPGAVWLILKILLLFFLFALVKAIVPRYRYDQLMKLGWKVFLPMSLIWVVLTASFLFYFNLLPVN

SEQ ID NO: 80288 - protein, 159 aa, Unknown
  Bacterial polypetide isolated from the Sargasso Sea
MYKIIKSFTLFELLQGLFLTFKYIFKSKVTINYPHEKGPLSPRFRGEHALRRYPSGEERCIACKLCEAVCPAQAITIESEPREDGSRRTTRYDIDMTKCIYCGLCEESCPVDAIVEGPNFEFATETREELIYNKDKLLENGDRWEQEISQNIYLDRNYR

SEQ ID NO: 80289 - protein, 73 aa, Unknown
  Bacterial polypetide isolated from the Sargasso Sea
PFDIYPLNAIPGVIWFTVKIIFILFLFIWVRGTFPRYRYDQLMRLGWKVFLPFSLFWVVVTSSFLVYFDMLSN

SEQ ID NO: 80290 - protein, 162 aa, Unknown; identical to SEQ ID NO: 80233
  Bacterial polypetide isolated from the Sargasso Sea

SEQ ID NO: 80291 - protein, 472 aa, Unknown
  Bacterial polypetide isolated from the Sargasso Sea
MINNINFIFPEILISIFLMMLLILGVFKKNSSSLIYNLSISSLVVILVLVLTFPQGTTVKLFSNGYIIDDLSIYMKSITIISGIFVMLTSSKYLKIIKIYQIEYPILLLSSILGMIIMISSNDLIVFYMGLELQSLALYVLASFNRTNILSSESGLKYFVLSALSSGILLYGCSLIYGFSGSTNFYLISENIKNLEYSGVFGIVFILVGLAFKISAVPFHMWAPDVYEGSPTSVTLFFSILPKIAALSVFIRILYVPFFELINHWQMIIIFLSVASMIFGGVAAIGQKNLKRLVAYSSISHMGYALAGLSTGTNYGIQSSITYISIYLVMNLALFSCLFMMKIQNKYFENIEDLSGISKNHPLLSFAFLIILFSLAGIPPLAGFFAKFYIFMAVIEQSMYFLAITGLLATVVSAFYYLRIIKVIYFDPEKIKYDKDHNLGLKLTLIVSTFFLMIYFVYPSVLTELVNNINLI

SEQ ID NO: 80292 - protein, 167 aa, Unknown
  Bacterial polypetide isolated from the Sargasso Sea
MCWSLNLSDIVKAQENLWFIIPLFPMFIIFFISALAETNRPPFDLPEAEAELVAGYQTEYSGMMYAMFWLGEYANILLMCSLGSILFLGGWLSPIDMFPFNTIPGPLWMISKMLFLFILFSLVKATVPRYRYDQLMKLGWKIFLPLSLSWVVLTASYLLYFDLLPVN

SEQ ID NO: 80293 - protein, 395 aa, Unknown
  Bacterial polypetide isolated from the Sargasso Sea
VARLQPLYSLFPSIQFIIALVGTITCFLGASIALTQMDLKKGLAYSTVSQLGYMMLAMGCGAPVAGIFHLITHACFKAMLFLGSGSVIHAMEEVVGHQPVLAQDMRLMGGLRKKMPFTSTTFLIGCVAISGIPPLAGFWSKDEILGNAFISFPAFWFVGFLTAGMTAFYMFRLYFLTFEGDFRGEDKDLQKELLLASKINIEEEDHQEEHGSLHESPWSMTFPLVFLAVPSVIIGFMGFPWDSKFANLLDPEEALIAIESFELKEFLPLAIASVFIASIGITIAYQAYFAKKINLSILFAQRFPSVNKFLSNKWYLDDINEKLFVKGSRKLAKEVLEVDSKVVDGVVNLTGLVTLGSGEGLKYFETGRAQFYALIVFGGVILLVAIFGFQSPQVT

SEQ ID NO: 80294 - protein, 309 aa, Unknown
  Bacterial polypetide isolated from the Sargasso Sea
GVGAYHVAIFHLFTHAFFKALLFLGSGCVIHSFHDEQDIRSMGGVWKKIPYTYVLMLIGTLALTGFPFLSGYYSKDAIIEFAYLKGTYIGYSAAAVGIFTALLTALYSWRLIFKTFHGKFNNKENNLTSIHESPLTMLIPSCLLAVGAILTGVLFKEMFIGHGSLEFWSTSILFLNPVQHIHPPTWLLVFTPTLVVAAIPVAYYLFIENDKILKNLVFKNQSLYNFLINKWYFDELYNFIFVEPLKKIGLFLWKKGDVSTIDRYGPDGLSRLVKIISDKSVRFQSGFLYHYAFVMLIGFSILLTYLILY

SEQ ID NO: 80295 - protein, 52 aa, Unknown
  Bacterial polypetide isolated from the Sargasso Sea
MFVLFALIKAIVPRYRYDQLMRLGWKVFLPFSLIWVVLTSGYLLYFDLLPVY

SEQ ID NO: 80296 - protein, 460 aa, Unknown
  Bacterial polypetide isolated from the Sargasso Sea
MDYFLLSIVTFIPAISALILLVVARGNDAAAALVAKRFALFATGVTFFVSLFIIAQFDPENTGFQMVEEAEWIMGLKYKLGIDGISVLFVILTTFMMPIVMWASWGIEVRVKEYMIAFLLLETLMLGVFMALDLVLFYLFFEAGLIPMFLIIGIWGGANRVYASFKFFLYTLLGSVLMLIAMVVMYAEAGTTDIESLMLHQFAFDDFNLFGFQILGGTQTLLFLAFFASFAVKMPMWPVHTWLPDAHVQAPTAGSVVLAAILLKMGGYGFLRFSLPMFPVGSYIMTDFILWLSVIAIVYTSLVALVQSDMKKLIAYSSVAHMGYVTIGIFAANQQGIDGAIFQMLSHGFISGALFLCVGVIYDRMHTREIEAYGGLVNRMPAYALIFMFFTMANVGLPGTSGFVGEFLTLVGIFKVNTWIALLATSGVVLSAAYALWLYRRVMMGDLIKEALRKIQDMSL

SEQ ID NO: 80297 - protein, 163 aa, Unknown
  Bacterial polypetide isolated from the Sargasso Sea
MKIIYIFKNLIQLDFIKAFFTAMKYFIFRKRVTINYPSEKGKLSPRFRGQHALRRYPNGEERCIACKLCEAICPAQAITIDASPRNEDGIRKAIRYDIDMVKCIYCGLCQEACPVDAIVEGPNFEFATETREELLYTKEKLLDNGDRWEVSLVRNIERDAPFR

SEQ ID NO: 80298 - protein, 270 aa, Unknown
  Bacterial polypetide isolated from the Sargasso Sea
MEYILLVVVFIPLLVSIFLNSISTLLNERLTTFITINGALLSFTVSLFMFGVLLLDKFKPISLKLYTWFPEPEIRFEFLLDGLSGTMMLLVTGLGLVIQIFSTSYMSGDPRYVKYFVYFNFFVFSMLLLVMSANFLVMFFGWELVGLSSYLLISFWSEKKEAAKAGNKAFVLNRIGDFGFLIALMMILNTYDTFSFKTVFATTLINQPQNLDLIVVFLMIGAFGKSAQFPLFSWLPDAMEGPTPASALIHAATMVTARCFYASSNFSAYY

SEQ ID NO: 80299 - protein, 287 aa, Unknown
  Bacterial polypetide isolated from the Sargasso Sea
MFLLIPVLVTVAMIVWLDRRVWAFVQKRRGPNVVGPFGLLQSLADALKYIFKEIIIPASSNKVIFVIAPIITMTLALISWAVIPFSESLVLADINVGILYLFAVSSLGVYGIIMGGWASNSKYPFLGAIRSAAQMVSYEVSIGVIIINVLLCVGSLNLNDIVLAQQNMWFIVPLFPMFVIFFISALAETNRPPFDLPEAEAELVAGYQTEYSGMMYAMFWLGEYANILLMCAMGSILFLGGWLPPLEIDALSFIPTPFWLIFKILFLFILFALIKAIVPRYRYDQLM

SEQ ID NO: 80300 - protein, 162 aa, Unknown
  Bacterial polypetide isolated from the Sargasso Sea
MTTLIKYIKSFTLFELMKGLKLTITYFFKPKVTLNYPNQKGPISPRFRGEHALRRYPNGEERCIACKLCEAVCPAQAITIEAEPKPDGSRRTTRYDIDMTKCIYCGLCEEACPVDAIVEGPNFEYATETREELLYDKEKLLRNGDIWEKQISENLKRDSKYR

SEQ ID NO: 80301 - protein, 107 aa, Unknown
  Bacterial polypetide isolated from the Sargasso Sea
MLENYLPIAVFIIIAGVLGLLMLCLGFLFGKGAKTKAKLSPYECGFEEFEDARIPFDVRYYLVAILFIIFDLEIAFLFPWGIALDEIGHVGLISMIIFLFVFVIGFV

SEQ ID NO: 80302 - protein, 119 aa, Unknown
  Bacterial polypetide isolated from the Sargasso Sea
MNLAAYYPVLLFLLVGTGLGIALVSIGKLLGPNKPDVEKNAPYECGFEAFEDARMKFDVRYYLVAILFIIFDLETAFLFPWGVALRDIGWPGFIAMMIFLLEFLLGFAYIWKKGGLDWE

SEQ ID NO: 80303 - protein, 90 aa, Unknown
  Bacterial polypetide isolated from the Sargasso Sea
MIVAGTLTNKMAPALRRVYDQMAEPRWVVSMGSCANGGGYYHYSYSVVRGCDRIVPVDVYVPGCPPTAEALIYGLLQLQKKIRRTATIAR

SEQ ID NO: 80304 - protein, 242 aa, Unknown
  Bacterial polypetide isolated from the Sargasso Sea
LISWAVIPFSENFVLADINVGILYLFAVSSLGVYGIIMGGWASNSKYPFLGAIRSAAQMVSYEVSIGVIIINVLLCVGSLNLSDIVLAQKNLWFVIPLFPMFIIFFISALAETNRPPFDLPEAEAELVAGYQTEYSGMMYAMFWLGEYANILLMCAMGSILFLGGWLSPIDIFPFNIIPGPLWLIFKILLLFILFALVKAIVPRYRYDQLMKLGWKIFLPFSLIYVVLTASFLLYFDLLPGN

SEQ ID NO: 80305 - protein, 316 aa, Unknown
  Bacterial polypetide isolated from the Sargasso Sea
LLVPVLVSVAMIVWLDRRVWAFVQKRRGPNVVGPFGLFQSLADALKYIFKEIIIPASSNKIVFVLAPVVTMTLALISWAVIPFDEDFVLADINVGILYLFAVSSLGVYGIIMGGWASNSKYPFLGAIRSAAQMVSYEVSIGVIIINVLLCVGSLNLSDIVMAQQNLWFVIPLFPMFVIFFISALAETNRPPFDLPEAEAELVAGYQTEYSGMMYAMFWLGEYANILLMCAMGSVLFLGGWLSPVDIFPFNVIPGPFWLIFKILFLFILFALVKATVPRYRYDQLMKLGWKIFLPFSLFYVVLTSSFLLYFDLLPGK

SEQ ID NO: 80306 - protein, 327 aa, Unknown
  Bacterial polypetide isolated from the Sargasso Sea
MDYLSTLISETYKILFLLIPVLVSVAMVVWLDRRVWAFVQKRKGPNVVGPFGLLQSLADALKYLFKEIIIPASSNKVIFILAPIITMTLALISWAVIPFGADQVLSDINVGILYLFAISSLGVYGIIMGGWASNSKYPFLGSIRSAAQMVSYEVSIGVIIINVLLCVGSLNLNDIIIAQEKVWFIIPLFPMFVIFFISALAETNRPPFDLPEAEAELVAGYQTEYSGMMYAMFWLGEYANILLMCALGSILFLGGWLSPIEIFPFNLLPSAFWLILKILLLFLLFALVKAIVPRYRYDQLMKLGWKIFLPFSLIWVVLTASYLFFFD

SEQ ID NO: 80307 - protein, 304 aa, Unknown
  Bacterial polypetide isolated from the Sargasso Sea
TGIGGAAVDAAMLQTALLMLFIGAVGKSAQFPLHVWLPDAMEGPTPVSALIHAATMVNAGLYLVARMVPFVDVHHHGVAGMEDLGLIVAWVGGITAFMAAAIAFVQNDIKKVLAYSTMSQLAYIFTGLGAALWFFNNDKHHAGALIFGGALFHLFNHAMAKGMLFMASGSVIHEVHHAHDHLHHGNHGDHDFDPQDMRNMGGLASKLPVTATAMMFGSMSIIGIPLIGGFWSKEIIVGKTWYAYFNGADALLGPAILILATAGMTGFYMSRMWFMTFAGEPKNELVDHVHEETPWVKTPLVFSQ

SEQ ID NO: 80308 - protein, 90 aa, Unknown
  Bacterial polypetide isolated from the Sargasso Sea
VAPKNPDPEKLSAYECGFEPFNDSRMEFDVRFYLVAILFIIFDLEIAFLFPWAISLGKIGVFGFVSMMIFLFILTVGFIYEWKKGALDWE

SEQ ID NO: 80309 - protein, 326 aa, Unknown
  Bacterial polypetide isolated from the Sargasso Sea
FWALDTVICILLFVGAMGKSAQIPLHVWLPESMEGPTPISALIHAATMVTAGVFMVARMSPLFEHSTVALSTVLTFGATGALFLGLLAFVEFDIKRVIAYSTMSQLGYMMAANGVSAYSAGIFHLTTHACFKALLFLSAGSVIVAMHHIQDMRKMGGLKRHLPVTYVCFFIGACALAAIPPFAGFFSKDVIIEAVHRSVLPGSQYAYVCLLIGAFVTAYYIFRAFFMTFHGEDRIPDSARGHLKERTSMIIPLIVLAIPSVLLGGMLIRSFVFGQPGILAGSTQVLIKHDVLKSMLVNFHGPLAMILHGFVTLPFWFTVFGVFFAW

SEQ ID NO: 80310 - protein, 122 aa, Unknown
  Bacterial polypetide isolated from the Sargasso Sea
MIYNFLTDYLSIVIFLFIALFLSIGFIVANYLASPSNPDPEKLSAYECGFEAFDDSRMEFDVRFYLVAILFIIFDLEIAFLFPWAISLGSLGALGYWSMMIFLAILTVGFIYEWKKGALEWE

SEQ ID NO: 80311 - protein, 122 aa, Unknown
  Bacterial polypetide isolated from the Sargasso Sea
MLPEFLIEYLPIILFLVVALGLSGAFVVVNFILSPKNPDPEKLSAYECGFEPFQDSRMEFDVRFYLVAILFIIFDLEIAFLFPWAISLGNIGLLGFTSMMIFLFILTVGFIYEWKKGALDWE

SEQ ID NO: 80312 - protein, 109 aa, Unknown
  Bacterial polypetide isolated from the Sargasso Sea
IFLFIALFLSIGFIVVNFLSSPSNPDPEKLSAYECGFDAFDDSRMEFDVRFYLVAILFIIFDLEIAFLFPWAISLGAIGHLGFWSMMIFLGVLTIGFIYEWKKGALEWE

SEQ ID NO: 80313 - protein, 205 aa, Unknown
  Bacterial polypetide isolated from the Sargasso Sea
MGGWASNSKYPFLGAIRSAAQMVSYEVSIGVIIINVLLCVGSLNLNDIVIAQQNMWFVIPLFPMFVIFFISALAETNRPPFDLPEAEAELVAGYQTEYSGMMYAMFWLGEYANILLMCAMGAILFLGGWMSPIDVYPFTLVPGAIWLILKILLLFILFALVKAIVPRYRYDQLMRLGWKVFLPLSLTWVVLTASYLFYFNLLPVN

SEQ ID NO: 80314 - protein, 319 aa, Unknown
  Bacterial polypetide isolated from the Sargasso Sea
PTPVSALIHAATMVTAGVFLVVRCSPIYEYSPLILNFITIVGMTTAFFAASVALVQTDIKKIIAYSTCSQLGYMFFAAGVGAYNVAMFHLFTHAFFKALLFLGSGSVIHAFKDEQNINNMGGVWKKLPYTYTLMILGTLALTGFPFLSGFYSKDAIIEFAYLKGNTTGYYAAGIGIITAFLTSIYSWRLIFKTFHGEYNNKEIKIEETHESPLVMLVPLFILSIGAVFAGFLFKGLFIGHGENLFWAESIKFLEPLSTEHPPLWFLLLTPCLVILSIPIAYYLFVKNKELPESIVSINKPLYNFLVNKWYFDELYDVLF

SEQ ID NO: 80315 - protein, 315 aa, Unknown
  Bacterial polypetide isolated from the Sargasso Sea
DFVFILGIIATYSVFGSFYFDEIFSDVEGLHKLSIMILRFKINVIELIAILFFIGAMGKSAQIGLHTWLPDAMEGPTPVSALIHAATMVTAGVFLVCRMSPLLEFAPFALNVITIVGALTAIFAATIGLTQFDIKRVIAYSTCSQLGYMFFAAGVSAYPASMFHLTTHAFFKALLFLGAGSVIHAMSDEQDMRKMGGIWKKVPYTYSLMWIGSLALAGIPFFAGYYSKDLILEAAWAASSNSGYFAFWLGCLAAFLTAFYSWRLLLLTFHGDFNSSKEVLKHVHESPIVMLIPLFVLAVGAIFSGWYFYNDFVGY

SEQ ID NO: 80316 - protein, 184 aa, Unknown
  Bacterial polypetide isolated from the Sargasso Sea
MEKGRLGMGVDINENILSSDQDTLLNAAASDIRNKGFIIASADKIFNWARSGSLWPMSFGLACCAVEMMHAAASRYDMDRYGMLFRPSPRQADVMIVAGTLTNKMAPALRRVYDQMAEPRWVVSMGSCANGGGYYHYSYSVVRGCDRIVPVDVYVPGCPPTAEALIYGLLQLQKKIRRTATIAR

SEQ ID NO: 80317 - protein, 100 aa, Unknown
  Bacterial polypetide isolated from the Sargasso Sea
ASLIMIASWIVAKQNPDDEKLSPYECGFDAFEDTRSQFDVRFYLVAILFIIFDLEVAFLFPWAVSLGSIGLLGFWSMMVFLGVLTIGFIYEWKKGALEWE

SEQ ID NO: 80318 - protein, 118 aa, Unknown
  Bacterial polypetide isolated from the Sargasso Sea
MLENYLPIAVFIIIAGVLGLLMLGLGFLFGKGAKTKAKLSPYECGFEEFEDARIPFDVRYYLVAILFIIFDLEIAFLFPWAIALDEIGHVGLISMIIFLFVLVIGFVYEWNKGALDWD

SEQ ID NO: 80319 - protein, 348 aa, Unknown
  Bacterial polypetide isolated from the Sargasso Sea
HKAAIKAFVVNRVGDFGFALGIFLIFYIFGTVNYDEVFSQVPSILKDELFFLGINFNAVDLICLLLFIGAMGKSAQFLLHTWLPDAMEGPTPVSALIHAATMVTAGVFLVVRCSPIYEYSELALFVITLVGMITAFFAATVALVQTDIKKIIAYSTCSQLGYMFFAAGVGAYNVAIFHLFTHAFFKALLFLGSGAVIHSFNDEQNINKMGGVRNKLPYTYALMIIGTLALTGFPFLSGFYSKDAIIEFAYLKGSTSGILAAYVGVFTALLTSIYSWRLIFKTFHGNYNNSDIALDKMHESPLIMIIPLIILATGAIFAGLLFKDLFIGHEISYEFWGSSIKFLEPLSK

SEQ ID NO: 80320 - protein, 165 aa, Unknown
  Bacterial polypetide isolated from the Sargasso Sea
MGLETDNNLIDQQGPGFIITSVDKLVNWARTGSMWPVTFGLACCAVEMMHAGASRYDTDRFGVFFRPSPRQSDVMIVAGTLVNKMAPALRKVYDQMAEPKWVISMGSCANGGGYYHHSYSVVRGCDQIIPVDIYVPGCPPTSEALINGIIELQEKIKKEESIANG

SEQ ID NO: 80321 - protein, 234 aa, Unknown
  Bacterial polypetide isolated from the Sargasso Sea
NYDEVFLKIPEIIDQKINFLSFKFNTIDLICLLLFIGAMGKSAQFLLHTWLPDAMEGPTPVSALIHAATMVTAGVFLVVRCSPIYEYSELALSVITLVGMTTAFFAATVALVQTDIKKIIAYSTCSQLGYMFFAAGVGAYNVAMFHLFTHAFFKALLFLGSGSVIHSFKDEQDVTKMGGVFRKLPYTYALMVVGTLALTGFPFLSGFYSKDAIIEFAYISDTKFGIYAAGIGVL

SEQ ID NO: 80322 - protein, 300 aa, Unknown
  Bacterial polypetide isolated from the Sargasso Sea
TTAFFAATVALVQTDIKKIIAYSTCSQLGYMFFAAGVGAYNVAMFHLFTHAFFKALLFLGSGSVIHAFKDEQNINNMGGVWKKLPYTYALMIIGTLALTGFPFLSGFYSKDAIIEFAYLKGNTTGYYAAGIGIITAFLTSIYSWRLIFKTFHGDYNNKEIKIEETHESPLIMLVPLFILSIGAVFAGFLFKGLFIGYGDNLFWAESIKFLEPLSTEHPPLWFLLLTPCLVLLSIPIAYYLFVKNKELPNSIVSMNKPLYNFLVNKWYFDELYDVLFIKSSKKLGLFLWKFCDGTIIDGFG

SEQ ID NO: 80323 - protein, 269 aa, Unknown
  Bacterial polypetide isolated from the Sargasso Sea
TVALVQTDIKKIIAYSTCSQLGYMFFAAGVGAYNVAMFHLFTHAFFKALLFLGSGSVIHAFKDEQNINKMGAVWKKLPFTYTLMIIGTLALTGFPFLSGFYSKDAIIEFAFLSGSSIGYYAAGIGVITAFLTSVYSWRLIFKTFHGEYNNENIKIEDTHESPLVMLIPLIFLSIGAIFAGYTFKELFIGYNGINNFWQESIFFLEPLSNDHPPFWFLILTPSLVIFSIPIAYYLFVKNKKLSEQIANVNKPLYQFLINKWYFDELYEVL

SEQ ID NO: 80324 - protein, 122 aa, Unknown
  Bacterial polypetide isolated from the Sargasso Sea
MLSNYFPILIFGVMVLLMGTFLVAIGLILGKIMGHARPDKAKQSPYECGFEAFEDARIKFDVRYYLVAILFIIFDLEIAFLFPWAVALKEIGMAGFWAMMIFLGVLVIGFIYEWKKGALDWE

SEQ ID NO: 80325 - protein, 319 aa, Unknown
  Bacterial polypetide isolated from the Sargasso Sea
VRCSPIYEYSELALNVITIVGMSTAFFAATVALVQTDIKKIIAYSTCSQLGYMFFAAGVGAYNVAMFHLFTHAFFKALLFLGSGSVIHAFKDEQNINKMGGVWKKLPYTYTLMIIGTLALTGFPFFSGFYSKDAIIEFAYLRGNTTGYYAAGIGIITAFLTSIYSWRLIFKTFHGDYNNKDIKIEETHESPLVMIIPLIFLSIGAIFAGYVFKELFLGYGGINNFWQESIFFLEPLSTDHPPFWFLVLTPILVILSIPVAYYLFVKNKNLSDQIVNVNKPLYQFLINKWYFDELYDVIFVIPSKKIGLFLWKFFDIKNN

SEQ ID NO: 80326 - protein, 118 aa, Unknown
  Bacterial polypetide isolated from the Sargasso Sea
MILEYLPILIFSVFALIFAGVMLSVGFTFGDNNPNAEKNSPYECGFEAFEDSRMKFDIRYYLVAILFIIFDLEIAFLFPWAVVIHEIGTTGLIAMAIFLTILIVGFIYEWKKGALEWD

SEQ ID NO: 80327 - protein, 110 aa, Unknown
  Bacterial polypetide isolated from the Sargasso Sea
MIAEFLKDYFSIIIFLIIALGLSCFFILLNFLVSPKNPDPEKLSAYECGFEPFNDSRMEFDVRFYLVAILFIIFDLEIAFLFPWAITLGSIGFLGFISMMIFLFILTVGL

SEQ ID NO: 80328 - protein, 186 aa, Unknown
  Bacterial polypetide isolated from the Sargasso Sea
AQWYLMKFQLGVIIINVLLCVGSLNLNDIVIAQQNMWFVIPLFPMFVIFFISALAETNRPPFDLPEAEAELVAGYQTEYSGMMYAMFWLGEYANILLMCAMGAILFLGGWMSPIDVYPFTLVPGAIWLILKILLLFILFALVKAIVPRYRYDQLMRLGWKVFLPLSLIWVVFTASYLFYFNLLPVN

SEQ ID NO: 80329 - protein, 122 aa, Unknown
  Bacterial polypetide isolated from the Sargasso Sea
MIYNFLTDYLSIVIFLFIALFLSIGFIIANYLASPSNPDPEKLSAYECGFEAFDDSRMEFDVRFYLVAILFIIFDLEIAFLFPWAISLGSLGALGFWSMMIFLAILTVGFIYEWKKGALEWE

SEQ ID NO: 80330 - protein, 313 aa, Unknown
  Bacterial polypetide isolated from the Sargasso Sea
RSDGKICKIFLHTWLPDAMEGPTPVSALIHAATMVTAGVFLLVRCSPIYEYSELALNVITIIGMTTAIFAATIALVQTDIKKIIAYSTCSQLGYMFFAAGVGAYNVAMFHLFTHAFFKALLFLGSGSVIHAFKNEQDINQMGGVWKNLPYTYVLMIIGTLALTGFPLLSGFYSKDAIIEFAYLKGNTLGYYAAGIGIFTAFLTSIYSWRLIFKTFHGNYNNKNIKIEETHESPLIMLIPLILLSIGAIFSGFIFKDLFIGSHGANEFWSKSIFFLKPLSSEHPPYWVIYLTPLLVIFSIPISYYLFVKIKIYK

SEQ ID NO: 80331 - protein, 105 aa, Unknown
  Bacterial polypetide isolated from the Sargasso Sea
MLNNYFPILLFIIVSIIIGALPIIASRIINKGEKNKAKSSAYECGFENFSDARMKFDIRFYLVAILFIIFDLEIAFLFPWAVALDSLGFNGLIAMSIFLIVLVIG

SEQ ID NO: 80332 - protein, 103 aa, Unknown
  Bacterial polypetide isolated from the Sargasso Sea
MIYNFLSEYLSIIIFLFIALFLSIGFIVANFLAAPSNPDTEKLSAYECGFEAFDDSRMEFDVRFYLVAILFIIFDLEIAFLFPWAISLGSIGALGFWSMMVFL

SEQ ID NO: 80333 - protein, 108 aa, Unknown
  Bacterial polypetide isolated from the Sargasso Sea
MLTDFLRDYLSIVIFLFVALGLSIGFIVLNFLLSPKKPDPEKLSAYECGFEAFSDSRMEFDVRFYLVAILFIIFDLEIAFLFPWAVTLGSIGALGFWSMMIFLFILTI

SEQ ID NO: 80334 - protein, 234 aa, Unknown
  Bacterial polypetide isolated from the Sargasso Sea
MLLLVMSANFLVMFFGWELVGLSSYLLISFWSEKKEAAKAGNKAFVLNRIGDFGFLIALMMILNTYDTFSFKTVFATTLINQPQNLDLIVVFLMIGAFGKSAQFPLFSWLPDAMEGPTPASALIHAATMVTAGVFMLVRISPLLQFSELSSILIISIGLLTALISAFAAINQNDIKKVLAYSTISQLGFMFIAIGAGAYVAAIFHLVTHAFFKALLFLGAGAVIHEMHHEQNIQ

SEQ ID NO: 80335 - protein, 273 aa, Unknown
  Bacterial polypetide isolated from the Sargasso Sea
MAGVFLLARMSPLFEYATYTNIFIIFIGATTAIFAATIALTQNDIKRVIAYSTCSQLGYMFFAAGLGAYNASIFHLMTHGFFKALLFLSAGSVIHAMHHEQDMRKMGGLFSKIPFTGSMMWIGSLAIIGFPYFSGYYSKESILENAYFSSQGMAQYAYIVGILTALLTAFYSWRLLFMTFHGSSVHVDDTNHQIKESPFVMTLPLAILAIGSIFSGLFLSEYFIGSYKEMFWNSSIVLTQEKNHYMPFVQVFIIKSSVAIGIILAALIYYYYK

SEQ ID NO: 80336 - protein, 122 aa, Unknown
  Bacterial polypetide isolated from the Sargasso Sea
MLLEFLKDYFSIILFLVISLSLSVGFILMNFLLSPRKPDPEKLSAYECGFEPFEDSRMEFDVRFYLVAILFIIFDLEIAFLFPWAISLGNIGIIGFSSMMIFLFILTVGFVYEWKKGALDWE

SEQ ID NO: 80337 - protein, 245 aa, Unknown
  Bacterial polypetide isolated from the Sargasso Sea
IFKEIIIPASANKTIFILAPIITMTLALVAWAVIPLSETLVLSDINVGILYLFAISSLGVYGIIMGGWASNSKYPFLGAIRSAAQMVSYEVSIGIIIINVLLCVGSLNLNDIVLAQKNLWYVIPLFPMFVVFFISALAETNRPPFDLPEAEAELVAGYQTEYSGMMYAMFWLGEYANILLMCAMGSILFLGGWLPPLDIYPFNVVPAPFWMIFKILFLFFLFAIIKAIVPRYRYDQLMRLGWKVF

SEQ ID NO: 80338 - protein, 122 aa, Unknown
  Bacterial polypetide isolated from the Sargasso Sea
MIYNFLTDYLSIIIFLFIALLISIGFILINFISSPSNPDPEKLSAYECGFDAFDDSRMEFDVRFYLVAILFIIFDLEIAFLFPWAITLGEIGVFGFWSMMIFLAVLTIGFIYEWKKGALEWE

SEQ ID NO: 80339 - protein, 289 aa, Unknown
  Bacterial polypetide isolated from the Sargasso Sea
PNVVGPLGLLQTIADALKYIFKEIIIPASANKIMFILAPIITLTLSLIAWAVIPFGKEMVLSNINVGILYIFAVSSLGVYGIIIGGWASNSKYPFLGAIRSAAQMVSYEVSIGIIIINVLLCVGSLNLNKIVLAQQNVWFIFPLFPMFVIFFISALAETNRPPFDLPEAESELVAGYQTEYSGMMYAMFWLGEYANILLLCALGSILFLGGWLSPIDIYPFTIIPTPLWMIFKILILFILFSLVKAIVPRYRFDQLMRLGWKIFLPLSLIWVVLTASFLFFTNTLPNVQ

SEQ ID NO: 80340 - protein, 62 aa, Unknown
  Bacterial polypetide isolated from the Sargasso Sea
DVRFYLVAILFIIFDLEIAFLFPWAVSLGSIGLLGFISMMIFLFILTVGFIYEWKKGALDWE

SEQ ID NO: 80341 - protein, 122 aa, Unknown
  Bacterial polypetide isolated from the Sargasso Sea
MLAEFLKDYLPIILFLVIALGLSLAFVAINYLASPKNPDPEKLSPYECGFEPFNDSRMEFDVRFYLVAILFIIFDLEIAFLFPWAISLGKIGIFGFVSMMIFLFMLTVGFIYEWKKRSHLIG

SEQ ID NO: 80342 - protein, 117 aa, Unknown
  Bacterial polypetide isolated from the Sargasso Sea
MLEYLPILIFLVFALIFACIMLGIGFTFGPNNPDTEKNSPYECGFEAFEDSRMKFDIRYYLVAILFIIFDLEIAFLFPWAIVIHEIGLTGLIAMAIFLTILIVGFIYEWKKGALEWD

SEQ ID NO: 80343 - protein, 122 aa, Unknown
  Bacterial polypetide isolated from the Sargasso Sea
MIFDFLSEYLSIIIFLFITLFLSIGFIAINYLASPKNPDPEKLSAYECGFEAFDNARIEFDVRFYLVAILFIIFDLEIAFLFPWAISLGSIGLLGFYSMMAFLFILTVGFVYEWKKGALEWE

SEQ ID NO: 80344 - protein, 122 aa, Unknown
  Bacterial polypetide isolated from the Sargasso Sea
MASDFLKDYLPIILFLIIALGLSVGFVVLNFILSPKKPDPEKLSAYECGFEPFDDSRMEFDIRFYLVAILFIIFDLEIAFLFPWAISLGKIGLFGFVSMMIFLFILTVGFIYEWKKGALDWE

SEQ ID NO: 80345 - protein, 107 aa, Unknown
  Bacterial polypetide isolated from the Sargasso Sea
MTLVDKKQKKIPDEFKKLAKDFAEKGFITTSFDNLVNWARTGSLHWMTFGLACCAVEMMQTSMPRYDLERFGAAPRASPRQSDVMIVAGTLTNKMAPALRKVYDQMP

SEQ ID NO: 80346 - protein, 122 aa, Unknown
  Bacterial polypetide isolated from the Sargasso Sea
MLSDFLKDYLSIIIFFIISLGISVVFIVLNYALSPKKPDPEKLSAYECGFEAFNDSRMEFDVRFYLVAILFIIFDLEIAFLFPWAISLGNIGILGFISMMIFLFILTVGFIYEWKKGALDWE

SEQ ID NO: 80347 - protein, 214 aa, Unknown
  Bacterial polypetide isolated from the Sargasso Sea
LPDAMEGPTPVSALIHAATMVTAGVFLVVRCSPIYEYSELALSVITLVGMTTAFFAATVALVQTDIKKIIAYSTCSQLGYMFFAAGVGAYNVAMFHLFTHAFFKALLFLGSGSVIHSFKDEQDVTKMGGVFKKLPYTYALMVVGTLALTGFPFLSGFYSKDAIIEFAYISDTKFGIYAAGIGVLTAVMTSIYSWRLIFKTFHGDYKNKDLSIDT

SEQ ID NO: 80348 - protein, 191 aa, Unknown
  Bacterial polypetide isolated from the Sargasso Sea
RSAAQMVSYEVSIGIIIINVLLCTGSLNLKEIVLAQQNLWFVVPLFPMFVIFFISALAETNRPPFDLPEAEAELVAGYQTEYSGMMYAMFWLGEYANILLMCALGSILFLGGWLSPIDVYPLNLIPGAVWMIIKILILFFMFAIIKAIVPRYRYDQLMRLGWKVFLPFSLIYVVLTASFLIYFDLLPNTGN

SEQ ID NO: 80349 - protein, 195 aa, Unknown
  Bacterial polypetide isolated from the Sargasso Sea
PFLGALRSAAQMVSYEVSIGFVIVTVLLCVGSLNLIDIVVAQKQIWFAIPLFPMFVIFFISALAETNRPPFDLPEAEAELVAGYQTEYSGMMYALFWLGEYANILLMCAMGSVLFLGGWLPPIDIYPLNAIPAPIWLIIKIFLLFFTFALIKAIVPRYRYDQLMRLGWKVFLPISLVWVVIVSGFLVYFKMVPIN

SEQ ID NO: 80350 - protein, 296 aa, Unknown
  Bacterial polypetide isolated from the Sargasso Sea
LLGILGLFWATNSFDFNEIATGISQSIADNSIPIWAALLLCFLVFLGPMAKSAQFPLHVWLPDAMEGPTPISALIHAATMVAAGIFLVARLQPLYSIFPSIQFIIALVGTITCFLGASIALTQMDLKKGLAYSTVSQLGYMMLAMGCGAPVAGIFHLVTHACFKAMLFLGSGSVIHAMEEVVGHQPVLAQDMRLMGGLRKKMPYTATTFLIGCVAISGIPPLAGFWSKDEILGNAFISFPAFWFVGLLTAGMTAFYMFRLYFLTFEGDFRGENKELQKELLIASKTNLDEKKKKSR

SEQ ID NO: 80351 - protein, 111 aa, Unknown
  Bacterial polypetide isolated from the Sargasso Sea
MILDFLKDYFSIILFLGIAIILSFGFILINYIFSPKNPDPEKLSAYECGFLPFSDSRMEFDIRFYLVAILFIIFDLEIAFLFPWAITLGKIGFLGFVSMIIFLFILTSWFY

SEQ ID NO: 80352 - protein, 226 aa, Unknown
  Bacterial polypetide isolated from the Sargasso Sea
YKCWKFFTYLQCPLLGVYGIIMGGWASNSKYPFLGAIRSAAQMVSYEVSIGVIIINVLLCVGSLNLNDIVIAQQNLWFVIPLFPMFVIFFISALAETNRPPFDLPEAEAELVAGYQTEYSGMMYAMFWLGEYANILLMCAIGAILFLGGWLSPIEIYPFTLVPGALWLILKILLLFFLFALVKAIVPRYRYDQLMRLGWKVFLPFSLIWVVLTASYLFYFNLLPVN

SEQ ID NO: 80353 - protein, 122 aa, Unknown
  Bacterial polypetide isolated from the Sargasso Sea
MYGDFLNNYLTIIIFFGVALLLSIGFIFLNFVFAPKNPDPEKLSAYECGFEPFSDSRMEFDVRFYLVAILFIIFDLEIAFLFPWAISLGKIGIFGFISMMIFLFILTVGFIYEWKKGALDWE

SEQ ID NO: 80354 - protein, 122 aa, Unknown
  Bacterial polypetide isolated from the Sargasso Sea
MLAEFLKDYLPIILFLIIALGLSLAFVAINYIAAPSKPDPEKLSAYECGFEPFNDSRMEFDVRFYLVAILFIIFDLEIAFLFPWAISLGEIGLYGFCSMMLFLFILTVGFIYEWKKGALDWE

SEQ ID NO: 80355 - protein, 311 aa, Unknown
  Bacterial polypetide isolated from the Sargasso Sea
GFWVCFWATKSFDFQEIAIGVSQSISDNSLPIWAALLLCFLVFLGPMAKSAQFPLHVWLPDAMEGPTPISALIHAATMVAAGIFLVARLDPLYSLFPAIQFIIALVGTITCFLGASIALTQMDLKKGLAYSTVSQLGYMMLAMGCGAPVAGIFHLITHACFKAMLFLGSGSVIHAMEEVVGHQPVLAQDMRLMGGLRKKMPYTSTTFLIGCFAISGIPPLAGFWSKDEILGNAFISFPAFWFVGFLTAGMTAFYMFRLYFLTFEGEFRGENKDLQAKLLSESNIILDEEHEEEHGSLHESPWSMTFPLIFL

SEQ ID NO: 80356 - protein, 269 aa, Unknown
  Bacterial polypetide isolated from the Sargasso Sea
FTNLFIVFIGASTAIFAASIALTQNDIKRVIAYSTCSQLGYMFFAAGLGAYNASIFHLMTHGFFKALLFLSAGSVIHAMHHEQDMRKMGGLFKKIPFTGTMMWIGSLAIIGFPYFSGYYSKESILENAYYSSSSMATFAYTIGILTALLTAFYSWRLLFMTFHGQTRSDKKTFDHAHESPLVMTLPLLLLAFGSIFAGLLFSNFYIGKMQYSFWGNSIILHEGKHLYLPFIQTLIVKSSVAIGVMLAALIYFYKNNLYKNLAHNLDPLY

SEQ ID NO: 80357 - protein, 119 aa, Unknown
  Bacterial polypetide isolated from the Sargasso Sea
MNYSEYLPIFIFVLIALSMSLGFAALSGIVGPNNPDKEKLSAYECGFAPFEDARVRFDVRFYLVAILFIIFDLEVAFLFPWAITLSSIGLAGYFSMMFFLFILTVGFVYEWKKGALDWE

SEQ ID NO: 80358 - protein, 288 aa, Unknown
  Bacterial polypetide isolated from the Sargasso Sea
GVFLIFYYFGTVNFDVVFEQIPQIDKTSINFLGVNFNAVDLICLLLFIGAMGKSAQIFLHTWLPDAMEGPTPVSALIHAATMVTAGVFLVVRCSPIYEYSELILAFITIIGMTTAIFAASIALVQDDIKKIIAYSTCSQLGYMFFAAGVGAYNVAMFHLFTHAFFKALLFLGSGSVIHSFKDEQNINLMGGVWKKLPVTYSLMIVGTLALTGFPFLSGFYSKDAIIEFAYLSGSNVGYYAASIGILTALLTSIYSWRLIFKTFHGNYENKDIKIDEMHESPLVMIVPL

SEQ ID NO: 80359 - protein, 122 aa, Unknown
  Bacterial polypetide isolated from the Sargasso Sea
MLVEFLKDYLPIILFLIIALGLSLAFVAINYIAAPSKPDPEKLSAYECGFEPFNDSRMEFDVRFYLVAILFIIFDLEIAFLFPWAISLGEIGLYGFYSMMLFLFILTVGFIYEWKKGALDWE

SEQ ID NO: 80360 - protein, 184 aa, Unknown
  Bacterial polypetide isolated from the Sargasso Sea
MEKGCLGMGVDINENILSSDQDTLLNAAASDIRNKGFIIASADKIFNWARSGSLWPMSFGLACCAVEMMHAAASRYDMDRYGMLFRPSPRQADVMIVAGTLTNKMAPALRRVYDQMAEPRWVVSMGSCANGGGYYHYSYSVVRGCDRIVPVDVYVPGCPPTAEALIYGLLQLQKKIRRTATIAR

SEQ ID NO: 80361 - protein, 62 aa, Unknown
  Bacterial polypetide isolated from the Sargasso Sea
MFRFYLVAILFIIFDLEVAFLFPWAVSLGSIGLLGFWSMMIFLGVLTIGFIYEWKKGALEWE

SEQ ID NO: 80362 - protein, 122 aa, Unknown
  Bacterial polypetide isolated from the Sargasso Sea
MLTDFLKDYFPIILFLIISFGLSLGFIMMNFLFSPKNPDPEKLSAYECGFEPFNDSRMEFDVRFYLVAILFIIFDLEIAFLFPWAISLGNIGLLGFTSMMIFLFILTVGFIYEWKKGALDWE

SEQ ID NO: 80363 - protein, 111 aa, Unknown
  Bacterial polypetide isolated from the Sargasso Sea
MLAEFLKDYLPIILFLIIALGLSLAFVAINYIAAPNNPDPEKLSAYECGFEPFNDSRMEFDVRFYLVAILFIIFDLEIAFLFPWAISLGEIGLYGFCSMMLFLFILTVGFI

SEQ ID NO: 80364 - protein, 192 aa, Unknown
  Bacterial polypetide isolated from the Sargasso Sea
GWEGVGLCSYFLIGFWFKKESANAAAIKAFVVNRVGDFGFALGIFLIFYLFGTVNYAEVFELIPQSLDINLSFLGINFNAINLICILLFIGAMGKSAQIFLHTWLPDAMEGPTPVSALIHAATMVTAGVFLVVRCSPIYEYSPLALNIITIVGMSTAFFAATVALAQDDIKKIIAYSTCSQLGYMFFAAGVG

SEQ ID NO: 80365 - protein, 312 aa, Unknown
  Bacterial polypetide isolated from the Sargasso Sea
MAYLSLFTFAMLMLVTSDNFIQLFFGWEGVGLCSYFLIGFWFKKDTANSAAIKAFLVNRVGDFGFALGIFLIFYLFGTVNYSEVFELIPTIADKNLLFLGFNINAIDLICLLLFVGAMGKSAQIFLHTWLPDAMEGPTPVSALIHAATMVTAGVFLVVRCSPIYEYSELALNVITIVGMSTAFFAATVALVQTDIKKIIAYSTCSQLGYMFFAAGVGAYNVAMFHLFTHAFFKALLFLGSGSVIHAFKDEQNINKMGGVWKKLPYTYTLMIIGTLALTGFPFLSGFYSKDAIIEFAYLRGNTTGYYAAGIGI

SEQ ID NO: 80366 - protein, 122 aa, Unknown
  Bacterial polypetide isolated from the Sargasso Sea
MIAEFLKDYFPIIIFLIIALGLSCVFIILNFLLSPKNPDPEKLSAYECGFEPFNDSRMEFDVRFYLVAILFIIFDLEIAFLFPWAISLGNIGLLGFISMMIFLFILTVGFVYEWKKGALDWE

SEQ ID NO: 80367 - protein, 122 aa, Unknown
  Bacterial polypetide isolated from the Sargasso Sea
MLAEFLKDYLPIILFLIIALGLSFAFVAINYIAAPSKPDPEKLSAYECGFEPFNDSRMEFDVRFYLVAILFIIFDLEIAFLFPWAISLGEIGLYGFCSMMLFLFILTVGFIYEWKKGALDWE

SEQ ID NO: 80368 - protein, 119 aa, Unknown
  Bacterial polypetide isolated from the Sargasso Sea
MFLSEYLPIAVFFAIAIGLSLAFVVSAFIFGNQRPDSEKMAAYECGFDAFDDSRRQFDVRFYLVAILFIIFDLEIAFLFPWAVALGGIGLYGFWSMMLFLAVLTIGFIYEWKKGALEWE

SEQ ID NO: 80369 - protein, 94 aa, Unknown
  Bacterial polypetide isolated from the Sargasso Sea
MLAEFLKDYLPIIVFLLVALVLSVAFVAVNYLASPKNPDPEKLSAYECGFEPFNDSRMEFDVRFYLVAILFIIFDLEIAFLFPWAISLGKNWYI

SEQ ID NO: 80370 - protein, 273 aa, Unknown
  Bacterial polypetide isolated from the Sargasso Sea
YFLGFNFSTINLLCFLLFIGAMGKSAQLGLHTWLPDAMEGPTPVSALIHAATMVTAGVFMVARLSPLFTLADTVNIFITFIGASTAVFAATIALTQNDIKRVIAYSTCSQLGYMFFAAGLGAYNASIFHLTTHGFFKALLFLSAGSVIHAMHHEQDMRKMGGLFYKVPLTATMMWIGSLAIIGFPYLSGYYSKDIILETAFFSSSNIGSYAYFIGIFTALLTAFYSWRLLFLTFHGETRVSKENFVKIHESPLVMLIPLFLLSIGSIFSGVFL

SEQ ID NO: 80371 - protein, 118 aa, Unknown
  Bacterial polypetide isolated from the Sargasso Sea
MLLEYLPIFIFLVFAVIFASIMLGIGFTFGSSNPDPEKNSPYECGFEAFEDSRMKFDIRYYLVAILFIIFDLEIAFLFPWAIVIHEVGLIGLFSMAIFLLILVVGFIYEWKKGALEWD

SEQ ID NO: 80372 - protein, 284 aa, Unknown
  Bacterial polypetide isolated from the Sargasso Sea
EYSELALSIITIIGMVTALFAASVALVQTDIKKIIAYSTCSQLGYMFFAAGVGAYSVAIFHLFTHAFFKALLFLGSGSVIHSFKDEQDINQMGGVWKKLPYTYVLMIIGTLALTGFPFLSGFYSKDAIIEFAFLRGNSLGFYASSIGVFTALLTSIYSWRLIFKTFHGSYNNSKLKINSMHEAPITMLAPLIILALGAIFAGILFKDLFIGHETSYQFWSSSIKFLEPLSKDHPPIWFIYLTPILVIISIPLAYYLFIKNKKIVDSIVKSNKPFYLFLKNKMVL

SEQ ID NO: 80373 - protein, 266 aa, Unknown
  Bacterial polypetide isolated from the Sargasso Sea
MLLKLTCLVPLFPLIGSIINGFFGLRIGKNAVGIIAAGSMALSFLTSILVYVGYLMLPEGQHVFEQVVWAWFGAGDFSVDFGFQVDPLTLVMMFVVTGVGFIIHVYAIGYMHEEYSFYRFFAYFNLFASAMLLLIMGNNFLLMFIGWEGVGCCSYFLIGYYFEKKSACDAGTKAFIVNRVGDFAFLLAVMYIFNIFGTIDFSEVMHAAPEKLIYAGEAVTIITLLLFIGATGKSAQIPLYTWLPDAMEGPTPVSALIHAATMVTAG

SEQ ID NO: 80374 - protein, 173 aa, Unknown
  Bacterial polypetide isolated from the Sargasso Sea
MNLEERKKNIPDEFKQLAQDFSDNGFITTSLDNLVNWARTGSLHWMTFGLACCAVEMMQTSMPRYDLERFGAAPRASPRQSDVMIVAGTLTNKMAPALRKVYDQMPDPRYVISMGSCANGGGYYHYSYSVVRGCDRIVPVDVYVPGCPPSAEALLYGIMQLQKKIRNKGSLER

SEQ ID NO: 80375 - protein, 270 aa, Unknown
  Bacterial polypetide isolated from the Sargasso Sea
LADALKYIFKEIIIPASANKIIFILAPIVTMTLALVAWAVIPMSESLILADINVGILYLFAVSSLGVYGIIMGGWASNSKYPFLGAIRSAAQMVSYEVSIGIIIINVLLCVGSLNLKDIVLAQKDLWYVVPLFPMFVIFFISALAETNRPPFDLPEAEAELVAGYQTEYSGMMYAMFWLGEYANILLMCAMGSILFLGGWLPLIDIYPLNIIPAPIWMVLKILFLFFLFSLIKAIVPRYRYDQLMRLGWKIFLPFSLIYDCINSKLFILF

SEQ ID NO: 80376 - protein, 330 aa, Unknown
  Bacterial polypetide isolated from the Sargasso Sea
ITIVGALTAIFAATIGLTQFDIKRVIAYSTCSQLGYMFFAAGVSAYPASMFHLTTHAFFKALLFLGAGSVIHAMSNEQDMRKMGGIWKKIPITYALMWIGSLALAGIPFFSGYYSKDLILEAAWAASTNSGYFAFWLGVLAAFLTAFYSWRVIIMTFHGVSNADKDVLSHVHESPLVMLIPLIVLAFGAILSGWFFYENFVGHHWHDFWGHSIFIADTNKAMKLAHYVPKWVKYLPVLLAVLGIVCAYIFYLLIPSLPKKISITFKPIYKLFFNKWYFDEIYDHLFVKSFIKIGNIFWKKGDENTIDRYGPNGISKLVKNISSKSNIIQS

SEQ ID NO: 80377 - protein, 87 aa, Unknown
  Bacterial polypetide isolated from the Sargasso Sea
LNPDPEKLSAYECGFEPFDDSRMEFDVRFYLVAILFIIFDLEIAFLFPWAISLGGIGALGFWSMMFFLGVLTIGFIYEWKKGALEWE

SEQ ID NO: 80378 - protein, 80 aa, Unknown
  Bacterial polypetide isolated from the Sargasso Sea
LSAYECGFEPFNDSRMEFDVRFYLVAILFIIFDLEIAFLFPWAISLGSIGFLGFISMMIFLFILTVGFIYEWKKGALDWE

SEQ ID NO: 80379 - protein, 298 aa, Unknown
  Bacterial polypetide isolated from the Sargasso Sea
EIVSVGLISFVGISAVISYKALIEQVNGYPPVEKLFVWANAGDFTIPMGFVLDPLGSVMLALVTTITLLVMIYSHGYMSHDKGYVRFFTYLALFSSSMMGLIVSPNLLEIYVFWELVGMCSYLLVGFWYDRDGAAHAAQKAFVVNRVGDFGLLLGILGLFWATNSFDFNEIATGISQSISDNSIPIWAALLLCFLVFLGPMAKSAQFPLHVWLPDAMEGPTPISALIHAATMVAAGIFLVARLQPLYSIFPSIQFIIALVGTITCFLGASIALTQMDLKKGLAYSTVSQLGYMMLAMG

SEQ ID NO: 80380 - protein, 317 aa, Unknown
  Bacterial polypetide isolated from the Sargasso Sea
IGAMEKSAQIFLHTWLPDAMEGPTPVSALIHAATMVTAGVFLTCRFSPLFEAAPQVSTLVLIVGVLTAFFAATTALVQNDIKRIIAYSTCSQLGYMFAAVGAGFYQAAMFHLFTHAFFKALLFLGAGSVIHSMHHEQDIRRLGGLRTKLPITFFTMTIGTLAITGVGIPLSYYVLGFNFGLSGFVSKDIVIEGVFASKSSYAFHAFVLLTFSALLTSFYSWRLVFLTFFGSFRGKIDDFNHCHEPERTMLIPLVLLSLGAVFFGSLFEFDFTSAKYQMFSESILLSKENTILKDFHYVPVMVKLAPFFAMLIGLSIA

SEQ ID NO: 80381 - protein, 285 aa, Unknown
  Bacterial polypetide isolated from the Sargasso Sea
FFGKIIGDKSSQIITSLFISISAILSFIVLYKVISQGYENNLIIATWINSGSLNVNWSIKIDALSSLMLVIVNLVSALVHVYSIGYMSDDPHKPRFMSYLSLFTFAMLTLVSSDNFIQLFFGWEAVGLCSYFLIGFWFKKESANAAAIKAFVVNRVGDFGFALGIFLIFYIFGTVNYDEVFEQIPTVIDKKLVFLGLSTNTIDLICILLFIGAMGKSAQFLLHTWLPDAMEGPTPVSALIHAATMVTAGVFLVVRCSPIYEYSQLALTIITIVGMVTAFFAATIA

SEQ ID NO: 80382 - protein, 188 aa, Unknown
  Bacterial polypetide isolated from the Sargasso Sea
KGSFGMGVEKLPSDSPRAIAPGADQDSILMAVGDEIREKGFIVAKADKLFNWARTGSLWPMTFGLACCAVEMMHSAASRYDLDRFGMVFRPSPRQSDVMIVAGTLTNKMAPALRKVYDQMAEPRWVVSMGSCANGGGYYHYSYSVVRGCDRIVPVDVYVPGCPPTAEALIYGLMQLQRKIRRTGSISR

SEQ ID NO: 80383 - protein, 253 aa, Unknown
  Bacterial polypetide isolated from the Sargasso Sea
NSAAEACKKAFLFNRVGDFGVLSAVLLIFLSIGSLEFNTVNVQAAAQFEYGGVLVTVITLLLFLGATGKSAQIPLYVWLPDAMEGPTPVSALIHAATMVTAGLYMVARLSHLFMLAPVTMNVIAVVGTVTALLAATIAITQTDIKRVLAYSTVSQLGYMFLAMGVGAFTAGIFHVMTHAFFKALLFLGSGSVIHAMHHEQDMMRMGALRKKLPITYLTMMAGTLAIAGIPFFSGFFSKDEILWKAFSSPLGGG

SEQ ID NO: 80384 - protein, 310 aa, Unknown
  Bacterial polypetide isolated from the Sargasso Sea
SAYSVAIFHLATHAFFKALLFLAAGSVIIAMHHEQDMRRMGGLRKAMPLTYVTCVIGSLALAGIPPFAGFFSKDAIIEAVHYSTTPGAEFAYAAVLIGVVLTAFYSFRLVFMAFHGEGRMDSKTREHLHESPKVVTIPLIALAVPSVLAGLLLVNATMDGSLFGSSVVPGGVPEELDMTASGMLAHVPFAVPFWLAVAGIAGAWVCYLWKPDLPDKFAKRWSGIYRVLDKKYGFDEFYQRVFADGARGLGHALSEWGDRRVIDGWLVNGAARVVARTAGLVRHVQSGLVYHYAFAMIIGLVALMSWFLFR

SEQ ID NO: 80385 - protein, 56 aa, Unknown
  Bacterial polypetide isolated from the Sargasso Sea
LNIIDTLCFLLFIGAMGKSAQLGLHTWLPDAKEGPTPVSALIHAATMVNAGVFMVA

SEQ ID NO: 80386 - protein, 191 aa, Unknown
  Bacterial polypetide isolated from the Sargasso Sea
MEERSTGVGVAKKVLEEDRSPLSPGKTQDLILETVTETLVDKGFVVANMDKLVNWARTGSLWPMTFGLACCAVEMMHAYVSRYDLDRFGVVPRPSPRQSDVIIVAGTLTNKMAPAFRKVYDQMAEPRYVISMGSCANGGGYYHYSYSVVRGCDRVVPVDIYVPGCPPTAEALVYGILQLQKKIRRTGTLMR

SEQ ID NO: 80387 - protein, 306 aa, Unknown
  Bacterial polypetide isolated from the Sargasso Sea
QLGYMFFAAGVGAYNVAIFHLFTHAFFKALLFLGSGCVIHSFNEEQDIRSMGGVWKKIPYTYALMIIGTLALTGFPFLSGFYSKDAIIEFAYLKGSTVGYFAAAIGIITALLTSIYSWRLIFKTFHGKYNNKNNKLSAIQESPLSMLIPSCLLAIGAIFTGILFKEIFIGENSSTFWGSSILFLKSISNEHAPLWLIIATPILVTLSIPLVYYFIIKNENILKNLVSKNYRIYNFLLNKWYFDELYNVVFVEPLKKIGLFLWKKGDINIIDKYGPDGLSRLIKIISNKAVNFQSGYLYHYAFVMLY

SEQ ID NO: 80388 - protein, 119 aa, Unknown
  Bacterial polypetide isolated from the Sargasso Sea
MDYSEYLPIFVFSVIALGMSLGFAFLSGIVGPSKPDKEKLSAYECGFTPFEDARVQFDVRFYLVAILFIIFDLEVAFLFPWAISLPLIGLYGYLSMMVFLLILTVGFIYEWKKGALEWE

SEQ ID NO: 80389 - protein, 261 aa, Unknown
  Bacterial polypetide isolated from the Sargasso Sea
IDFACLFLFFGAMAKSAQIPLHVWLPDSMEGPTPISALIHAATMVTAGIFMVARLSPLYELALFTNDFILLIGASTALFIGVIAIFENDIKKVIAFSTISQLGYMVAALGINAYSTSFFHLYTHAFFKALLFLCAGSVIMSLHHNQDIRKMGGLKSKLPITYISFLIGTLCIIGFPFTSGFFSKDLILEVMLYKDNTISFIAYLMLLFGALVTTIYSLRLLFFVFYNEYRGNDLHNIKEQSKIITFPINSTFYSIYFIWLF

SEQ ID NO: 80390 - protein, 283 aa, Unknown
  Bacterial polypetide isolated from the Sargasso Sea
TQFDIKRVIAYSTCSQLGYMFFAAGVSAYPAAMFHLTTHAFFKALLFLGAGSVIHAMSDEQDMRKMGGIWKKIPVTYALMWVGSLALAGIPFFAGYYSKDLILEAAWAASSNSGYFAFWLGCLAAFFTAFYSWRLLLLTFHGDFNSSKEVLDYVHESPIVMLIPLFVLAIGAIFSGWYFYNDFVGYNWKEFWGDSILISEKNKAFKLAHYVPLWVKYLPIFLAILGIFCAYLFYKLNPNLPKILSKKLTPIYNLFYNKWYFDELYDYFFVKSFIKFGNFFGKR

SEQ ID NO: 80391 - protein, 273 aa, Unknown
  Bacterial polypetide isolated from the Sargasso Sea
AGVFLVCRMSPLMEYAPTALSFITILGAFTAFIAATIGLVQNDIKRVIAYSTMSQLGYMFVAAGVGAYSVAMYHLFTHAFFKAMLFLGAGSVIHAMHHEQDMRNYGGLRKKIPYTFWAMMIGTLAITGVGVPLTHFGFAGFLSKDAVIESAWAGTNAGFPFWTLVVAALLTSFYSWRLMLLTFFGEPKGDSHAYSHAKESPMVMLIPLGILGIGAILSGMIWYSSFFGKDYQVAKFFGMESEYHQKSPEGSDDNANKNNIVGNEEKIPPAGAI

SEQ ID NO: 80392 - protein, 279 aa, Unknown
  Bacterial polypetide isolated from the Sargasso Sea
KAFVVNRIGDFGFALGIVGIFLIFGSINFDSIFSSLDNSNYYQERINFVGFNFPAIDILCFLLFIGAMGKSAQLGLHTWLPDAMEGPTPVSALIHAATMVTAGVFMVARMSPLFEFANYTNVFMTFIGASTAIFAASIALTQNDIKRVIAYSTCSQLGYMFFAAGLGAYNASIFHLMTHGFFKALLFLSAGSVIHALHHEQDMRKMGGLFKKLPFTGLMMWIGSLAIIGFPYFSGYYSKESILENAYFSTSYMANFAYFVGILTALLTAFYSWRLLFLT

SEQ ID NO: 80393 - protein, 109 aa, Unknown
  Bacterial polypetide isolated from the Sargasso Sea
MITDILKDYLPIILFLLIALGLSCAFIVVNFILSPKHPDPEKLSAYECGFEPFQDSRMEFDVRFYLVAILFIIFDLEIAFLFPWAISLGNIGILGFTSMMIFLFILTIG

SEQ ID NO: 80394 - protein, 85 aa, Unknown
  Bacterial polypetide isolated from the Sargasso Sea
MIAEFLKDYFPIIIFLIIALGLSCVFIILNFLLSPKNPDPEKLSAYECGFEPFNDSRMEFDVRFYLVAILFIIFDLEIAFLFPWA

SEQ ID NO: 80395 - protein, 302 aa, Unknown
  Bacterial polypetide isolated from the Sargasso Sea
FFAAGVGAYNVAMFHLFTHAFFKALLFLGAGAVIHSFHDEQDINKMGGVIKKLPYTYVLMLIGTLALTGFPFLSGFYSKDAIIEFAYLRGNGVGMLAAFVGIVTALLTSIYSWRLIFKTFHGNFNNKELSIDKVHESPFVMIAPLIILAIGAIFAGMAFKGLFIGHEIAYEFWAQSIKFLEPLSTDHPPTWFLFLTPILVTSAIPFSYYLYLKNTKIVNGLKEMNEPIYQFLVKKWYFDEMYDYLFVNPSKKIGKFLWKKVDGSIIDKFGPDGISSVIKNLSIKAVKFQSGFIYQYAFVMLI

SEQ ID NO: 80396 - protein, 162 aa, Unknown
  Bacterial polypetide isolated from the Sargasso Sea
TDIVLAQKDVWFVIPLFPMFVIFFISALAETNRPPFDLPEAEAELVAGYQTEYSGMMYAMFWLGEYANILLMCAMGSILFLGGWLSPLEIYPLNIIPAPFWMILKILFLFFLFSIVKAIVPRYRYDQLMRLGWKIFLPFSLIYVILTASFLFYFDMLPKKDF

SEQ ID NO: 80397 - protein, 330 aa, Unknown
  Bacterial polypetide isolated from the Sargasso Sea
MSTAFFAATVPLVQTDIKKIIAYSTCSQLGYMFFATGVGAYNVAMFHLFTHAFFKALLFLGSGSVIHAFKDEQNINNMGGVWRKLPYTYALMIIGTLALTGFPLLSGFYSKDAIIEFAYLSGTTTGYYAAGIGIFTAFLTSIYSWRLMFKTFHGQYNNKELNIEETHESPLVMLIPLIILSIGAIFAGFIFKDLFIGNEGINNFWNKSIFFLEPLSNDHPPLWFLVLTPTLVTLSIPLAYYLFVKNKNFSAQLVSINEPLYKFLLNKWYFDEIYETLFVKSSKKFGLFLWKFFDVKVIDGFGPDGISGIIKNFLSKLINSRVVIFINMHL

SEQ ID NO: 80398 - protein, 192 aa, Unknown
  Bacterial polypetide isolated from the Sargasso Sea
MFTSDNFLQLFFGWEGVGLCSYFLIGFWFKKESANAAAIKAFVVNRVGDFGFALGIFLIFYLFGTVNYVEVFELVPKSLDVNLNFLGLNFNAINLICILLFIGAMGKSAQIFLHTWLPDAMEGPTPVSALIHAATMVTAGVFLVVRCSPIYEYSPLALNIITIVGMSTAFFAATIALAQDDIKKIIAYSTCS

SEQ ID NO: 80399 - protein, 119 aa, Unknown
  Bacterial polypetide isolated from the Sargasso Sea
MHNLDYIFILIFIVIGAGMAIAMYLLSKILSPSSPDTEKLSAYECGFEAFDDARSKFDVKFYLVSILFIIFDLEIAFLFPWAVSLSNIGALGFYSMMFFLFILTVGFIYEWKNGALDWE

SEQ ID NO: 80400 - protein, 120 aa, Unknown
  Bacterial polypetide isolated from the Sargasso Sea
MSPRFRGEHALRRYPTGEERCIACKLCEAICPAQAITIEAEEREDGSRRTTRYDIDMTKCIYCGFCQEACPVDAIVEGPNFEYATYTHEELLYDKEKLLANGDKWELEIQKNLASESLYR

SEQ ID NO: 80401 - protein, 282 aa, Unknown
  Bacterial polypetide isolated from the Sargasso Sea
ILNFITIVGMTTAFFAATVALVQTDIKKIIAYSTCSQLGYMFFAAGVGAYNVAMFHLFTHAFFKALLFLGSGSVIHAFKDEQNINNMGGVWKKLPYTYALMIIGTLALTGFPFLSGFYSKDAIIEFAYLKGNTTGYYAAGIGIITAFLTSIYSWRLIFKTFHGQYNNNEIKIEETHESPLVMLVPLFILSIGAVFAGFLFKGLFIGHGENLFWAESIKFLEPLSTEHPPLWFLLLTPCLVLLSIPVAYYLFVKNKELPNSIALMNKPLYNFLVNKWYFDAII

SEQ ID NO: 80402 - protein, 259 aa, Unknown
  Bacterial polypetide isolated from the Sargasso Sea
SNKVIFILAPIVTMTLALIAWAVIPFSATQVLADINVGILYLFAVSSLGVYGIIMGGWASNSKYPFLGAIRSAAQMVSYEVSIGVIIINVLLCVGSLNLNDIVIAQQNMWFVIPLFPMFVIFFISALAETNRPPFDLPEAEAELVAGYQTEYSGMMYAMFWLGEYANILLMCAMGAILFLGGWMSPIDVYPFTLVPSAIWLILKILLLFILFALVKAIVPRYRYDQLMRLGWKVFLPLSLIWVVLTASYLFYFNLLPVN

SEQ ID NO: 80403 - protein, 122 aa, Unknown
  Bacterial polypetide isolated from the Sargasso Sea
MIIEFLKEYFPILLFLFIALGLSLAFIVLNFLLSPNNPDPEKLSAYECGFEPFEDSRMEFDVRFYLVAILFIIFDLEIAFLFPWAISLGKIGLLGFVSMMIFLFILTVGFIYEWKKGALDWE

SEQ ID NO: 80404 - protein, 122 aa, Unknown
  Bacterial polypetide isolated from the Sargasso Sea
MIYNFLTDYLSIIIFLFIALLISSGFILINFISSPSNPDPEKLSAYECGFDAFDDSRMEFDVRFYLVAILFIIFDLEIAFLFPWAITLGKIGIFGFWSMMFFLAVLTIGFIYEWKKGALEWE

SEQ ID NO: 80405 - protein, 116 aa, Unknown
  Bacterial polypetide isolated from the Sargasso Sea
MKLPTIAVFIIIAGVLGVLMLGLGFLFGKGAKTKAKLSPYECGFEEFEDARIPFDVRYYLVAILFIIFDLEIAFLFPWAIALDEIGHVGLISMIIFLFVLVIGFVYEWNKGALDWD

SEQ ID NO: 80406 - protein, 186 aa, Unknown
  Bacterial polypetide isolated from the Sargasso Sea
AQMVSYEVSIGIIIINVLVCVGSLNLSDIVLAQDKIWFVVPLFPMFVIFFISSLAETNRPPFDLPEAEAELVAGYQTEYSGMMYAMFWLGEYANILLMCAMGSILFLGGWLSPIETYPFDLIPGALWLIFKILFLFIIFALVKAIVPRYRYDQLMRLGWKIFLPFSLFWLVLTSSYLYYFNLLPGN

SEQ ID NO: 80407 - protein, 275 aa, Unknown
  Bacterial polypetide isolated from the Sargasso Sea
LVARCSPIYEYSELALNIITVIGMSTAFFAATIALVQTDIKKIIAYSTCSQLGYMFFATGVGAYNVAMFHLFTHAFFKALLFLGAGSVIHSFKDEQDIEKMGGVYKKIPYTYVLMLVGTLALTGFPFLSGFYSKDAIIEFAYLRGNVTGIYAAVIGVVTAMLTAIYSWRLFFKTFHGNYNNQEVKYEKIHESPAVMILPLIVLGLGSIFAGFFFKDLLIGNQSSFNFWGESIKFLEPLSEDHPPLWFILLTPTIVTLSIPISYYLFLKDKSVLKN

SEQ ID NO: 80408 - protein, 120 aa, Unknown
  Bacterial polypetide isolated from the Sargasso Sea
MVFLEDYLSILIFLFIALGLSVGFVLLNYLFSPKNPDPEKLSAYECGFEAFTDSRMKFDVRFYLVAILFIIFDLEIAFLFPWAISLGNIGSLGFWSMMIFLAVLTIGFIYEWKKGALDWD

SEQ ID NO: 80409 - protein, 245 aa, Unknown
  Bacterial polypetide isolated from the Sargasso Sea
TFVLSLIAWAVIPFGEGLVVSDINVGIMYIFAISSLGVYGIVMAGWASNSRYAFLGALRSAAQMVSYEVSMGFIIITVLLCVGSLNMSEIVQAQEKVWYFIPLFPMFVIFFVSALAETNRHPFDLPEAEAELVAGYQVEYSSMTFALFFLGEYANMILMSALTAILFLGGWLPPFDIAPFNWVPGPIWFALKITLLLFVFVWVRATFPRYRYDQLMRLGWKVFLPLSLFWVVLTAGVLLVFDWLP

SEQ ID NO: 80410 - protein, 274 aa, Unknown
  Bacterial polypetide isolated from the Sargasso Sea
GLLGLVQNDIKRVVAYSTLSQLGYMTVALGVSAYSAAIFHLFTHAFFKALLFLAAGSVIMGMHHEQDMRKMGGLKNRMPVTYWTLLLGSLALIGFPGFSGFFSKDAIIEAVHLSSLPGAGVAYVAIIGGVFVTALYSFRLVFMVFHGEPRMDSKTLGHIEESPKVVTVPLIVLAVPSVMIGALFVSSMLFGEFFGDSIVVAIEHDVLKELGQSYNGAFAMVLHGLLMPPFWLATGGVLVAWYLYLKRPDLPKVCADKLSIVRKVLEEKYGFDRF

SEQ ID NO: 80411 - protein, 122 aa, Unknown
  Bacterial polypetide isolated from the Sargasso Sea
MLHDFLKDYLPIILFLIIALTLSLAFIMINFILSPKNPDPEKLSAYECGFEPFEDSRMEFDVRFYLVAILFIIFDLEIAFLFPWAISLGNIGLFGFCSMMIFLFILTVGFVYEWKKGALDWE

SEQ ID NO: 80412 - protein, 277 aa, Unknown
  Bacterial polypetide isolated from the Sargasso Sea
MLTAFFAASVAVVQNDIKRIIAYSTCSQLGYMFFAAGVGAYHVAIFHLFTHAFFKALLFLGSGSVIHSLKDEQDIRNMGGIWRQMPFTWLSMIIGTLALTGFPFLAGYYSKDAIIEFAYLRGTNIGYFAAYVGVITAFLTAIYSWRLIFKTFHGKYNNKILTKSDIHDSGIIIISPLVILVLGSIFSGFLFKNFLIGDQYSDFWKNSILILNIFDHSKIPIWILFITPILVTLAIPLSYYLYVQNNSILEFLKNKNKLIYNFLLNKWYFDELYDLIF

SEQ ID NO: 80413 - protein, 286 aa, Unknown
  Bacterial polypetide isolated from the Sargasso Sea
CVLLFIGAMGKSAQIFLHTWLPDAMEGPTPVSALIHAATMVTAGVFLVVRCSPIFEYSPLALSLVTIIGMSTAFFAATIALVQDDIKKIIAYSTCSQLGYMFFAAGVGAYNVAMFHLFTHAFFKALLFLGSGSVIHSFKNEQNINAMGGVWKKLPYTWALMVIGTLALTGFPFLSGFYSKDAIIEFAYLSGSSTGYFAAGIGIFTAFLTSIYSWRLLFKTFHGNYNNKSIAISSMHESPLIMTIPLIILAIGAIFSGILFKDLFIGVEASENFWKDSIFFLEPLSN

SEQ ID NO: 80414 - protein, 313 aa, Unknown
  Bacterial polypetide isolated from the Sargasso Sea
YSTGSQLGYMFFAAGVGAYNVALFHLFTHAFFKALLFLGAGAVIHSFHEEQDINKMGGVIKKLPYTYVLMLIGTLALTGFPFLSGFYSKDAIIEFAYLRGNGVGILAAFVGIVTALLTSIYSWRLIFKTFHGNFNNKELSIDKIHESPLVMIAPLVILAIGAIFAGMAFKGLFIGHEIAYEFWGQSIKFLEPLSTDHPPTWFLFLTPILVTAAIPFSYYLYLKNKNIVTGLKEMNEPIYQFLVKKWYFDEIYDYLFVNPSKRIGKFLWKKVDGSIIDKFGPDGISSVIKNLSIKAVKFQSGFIYQYAFVMLIG

SEQ ID NO: 80415 - protein, 122 aa, Unknown
  Bacterial polypetide isolated from the Sargasso Sea
MLAEFLKDYLPIILFLIIALGLSFAFVAINYIAAPSKPDPEKLSAYECGFEPFNDSRMEFDVRFYLVAILFIIFDLEIAFLFPWAISLGEIGIYGFCSMMLFLFILTVGFIYEWKKGALDWE

SEQ ID NO: 80416 - protein, 101 aa, Unknown
  Bacterial polypetide isolated from the Sargasso Sea
MNLQDRKKDIPDEFKQLAQDFSDNGFITTSLDNLVNWARTGSLHWMTFGLACCAVEMMQTSMPRYDLERFGAAPRASPRQSDVMIVAGTLTNKMAPALRKV

SEQ ID NO: 80417 - protein, 289 aa, Unknown
  Bacterial polypetide isolated from the Sargasso Sea
WYDRDGAAHAAQKAFVVNRVGDFGLLLGILGLFWATGTFDFEGMATGLSTAMADGQVAGWAAVALCLFVFMGPMAKSAQFPLHVWLPDAMEGPTPISALIHAATMVAAGVFLVARLEPLYNLFPQVLTVIAVVGTITCFLGASIALTQMDLKKGLAYSTVSQLGYMMLAMGCGAPVAGMFHLVTHAFFKAMLFLDSGSVIHAMEEVVGHEPVLAQDMRLMGGLRKKMPITASTFFIGCVAISGIPPLAGFWSKDEILGQAFGSFPLLWAVGFLTAGMTAFYMFRLYSSP

SEQ ID NO: 80418 - protein, 288 aa, Unknown
  Bacterial polypetide isolated from the Sargasso Sea
FAAGVGAYNAAMFHLFTHAFFKALLFLGSGSVIHSFKDEQDIRNMGGVWKKLPYTWALMIVGTLALTGFPFLSGYYSKDAIIEFAYMRGNSIGYWASLVGIFTAFLTAIYSWRLIFKTFHGRYENKNLKLESVHESHYVMIIPLIILGIGSIFAGFFFKELFIGTNIDSDFWQNSIKFLNPLSTEHPPLSIVYSTPVLVVLSIPISYYLFVKNKNITSWLAHENKPIYNFLINKWYFDELYDYLFVKPSKRVGNFFWKSIDLKTIDRLGPDGISNLINKLSNNAVKFQ

SEQ ID NO: 80419 - protein, 311 aa, Unknown
  Bacterial polypetide isolated from the Sargasso Sea
FAAGVCAYHIAMFHLFTHAFFKALLFLGAGSVIHSFKEEQDITKMGGVWKKIPYTMVLMLIGTLALTGFPFLSGFYSKDAIIEFAYLKGTSVGYYASAIGIFTAFLTAIYSWRLFFKTFFGSYNNKSISLEKTHESPLVMIAPLIVLAIGAIFAGYFFKDLFLGNDTTYWGDSILFLNYIKLENIPFWLILITPIIITIAIPISYYLYIKEKTILNGIKNSNIPLYNFLVNKWYIDEIYDFIFINPLKRIGMFFWKKGDQDTIDRFGPDGISKVIKHVSNKAVKFQSGYIYDYAFVMLIGLSALITFLILN

SEQ ID NO: 80420 - protein, 94 aa, Unknown
  Bacterial polypetide isolated from the Sargasso Sea
MTAEFLKDYLPIILFLIIALGLSCAFIVINFILSPKNPDPEKLSAYECGFEPFQDSRMEFDVRFYLVAILFIIFDLEIAFLFPWAISLGNIGIL

SEQ ID NO: 80421 - protein, 121 aa, Unknown
  Bacterial polypetide isolated from the Sargasso Sea
MQEMLSEYLPILIFLGIAAGIAVAALVASYIVARQRPDPEKISAYECGFDAFDDARGQFDVRFYLVAILFIIFDLEIAFLFPWAISLSEIGLFGFWSMMAFLGVLTIGFIYEWKKGALEWE

SEQ ID NO: 80422 - protein, 122 aa, Unknown
  Bacterial polypetide isolated from the Sargasso Sea
MLAEFLKDYLPIMLFLIIALGLSLAFVAINYIAAPKNPDPEKLSAYECGFEPFNDSRMEFDVRFYLVAILFIIFDLEIAFLFPWAISLGEIGLFGFFSMMLFLFILTVGFIYEWKKGALDWE

SEQ ID NO: 80423 - protein, 262 aa, Unknown
  Bacterial polypetide isolated from the Sargasso Sea
QILLHTWLPDAMEGPTPVSALIHAATMVTAGVFLVVRCSPIYEYSELALNIVTIVGMSTAFFAATIALVQTDIKKIIAYSTCSQLGYMFFAAGVGAYNVAMFHLFTHAFFKALLFLGSGSVIHAFRDEQNINNMGGVWKKLPYTYCLMIIGTLALTGFPFLSGFYSKDAIIEFAYLRGNITGLYAAGIGIITAFLTSIYSWRLIFKTFHGEYNNKDIKIEETHESPLGMLIPLILLSVGAIFAGYTFKELFIGQSAENNFWA

SEQ ID NO: 80424 - protein, 154 aa, Unknown
  Bacterial polypetide isolated from the Sargasso Sea
DIRNKGFIIASADKLFNWARSGSLWPMSFGLACCAVEMMHAAASRYDMDRYGMLFRPSPRQADVMIVAGTLTNKMAPALRRVYDQMAEPRWVVSMGSCANGGGYYHYSYSVVRGCDRVVPVDVYVPGCPPTAEALIYGLLQLQKKIRRTATIAR

SEQ ID NO: 80425 - protein, 283 aa, Unknown
  Bacterial polypetide isolated from the Sargasso Sea
CRWSFWTFSTLADALKYIFKEIIIPASANKVVFILAPIVTMTLALVAWAVIPMSEELVLSDINVGILYLFAVSSLGVYGIIMGGWASNSKYPFLGAIRSAAQMVSYEVSIGIIIINVLLCVGSLNLNDIVIAQKNLWYVIPLFPMFVIFFISALAETNRPPFDLPEAEAELVAGYQTEYSGMMYAMFWLGEYANILLMCAMGSILFLGGWLPIMDVYPLNIIPAPFWMISKILFLFLLFALIKAVVPRYRYDQLMRLGWKIFLPFSLIYLVFTASFLFYFDKL

SEQ ID NO: 80426 - protein, 315 aa, Unknown
  Bacterial polypetide isolated from the Sargasso Sea
ARPPVSPLIHAATMVTAGVFLVCRMSPLMEYAPEAMAFVTFIGATTAFFAATVGLVQNDIKRVIAYSTCSQLGYMFVAAGVGVYSVAMFHLFTHAFFKAMLFLGAGSVIHGMHHEQDMRNYGGLRKKLPITFWAMLIGTLAITGVGIPLTHFGFAGFLSKDAVIESAYASTSGGYAFWMLVIAALFTSFYSWRLMFLTFWGEPRGDKHTHEHAHESPKVMLIPLGVLALGAVFAGMIWYNSFFGHTDQVARFFNVPYAEAGAHDEAAEGDGHGEANADAGHGDEATAAEDQGAAAEHHYVFTGQPGEGAIHIGPD

SEQ ID NO: 80427 - protein, 257 aa, Unknown
  Bacterial polypetide isolated from the Sargasso Sea
MSQIWLVPAFPLLGFILNGILGKLFGTRFVSIVGPLAIGLAFAQSVVLFFQMLNTDGNVLSEHLYTWIKSGNFEAGINFQVDQLSGLFLLIITGVGFLIHVYSIGYMKGEPGYYRFFAYLNLFVFFMLILVLGDGFLLMFVGWEGVGLCSYLLIGYYFEKDSAGAAAKKAFLFNRIGDFGVLSAVLLIFLNFGSIDFNTVNSEAAARLEHGGILVTIITLLLFLGATGKSAQIPLFVWLPDAMEGPTPVSALIHAAT

SEQ ID NO: 80428 - protein, 64 aa, Unknown
  Bacterial polypetide isolated from the Sargasso Sea
EFDIRFYLVAILFIIFDLEIAFLFPWAISLGKIGLFGFFSMMIFLGILTVGFIYEWKKGALDWE

SEQ ID NO: 80429 - protein, 317 aa, Unknown
  Bacterial polypetide isolated from the Sargasso Sea
RFFAYLNLFVFFMLILVLGDGFLLMFVGWEGVGLCSYLLIGYYFEKDSAAAAAKKAFLFNRVGDFGVLSAVLLIFLTFGSIDFNTINTEATARLEHDGILVTIITLLLFLGATGKSAQIPLFVWLPDAMEGPTPVSALIHAATMVTAGLYIVARLSHLFVLAPLTMNIIAYIGALTALLAATIAITQTDIKRVLAYSTVSQLGYMFLAMGVGAFTTGVFHVMTHAFFKALLFLGSGSVILAVHHEQDMRKMGALKNKLPITYITMLIGTMAISGIPLFSGFFSKDEILWYAFSSPFGSPWFWGIGFLTAGLTAFYMF

SEQ ID NO: 80430 - protein, 122 aa, Unknown
  Bacterial polypetide isolated from the Sargasso Sea
MLYDFLKDYATILIFLFISIGIGVGFIFLNLLFSPNNPDSEKLSAYECGFEAFGDARMKFDVRFYLVAILFIIFDLEVAFLFPWAVSLGNIGLLGFWSMMFFLLILTVGFVYEWKKGALDWE

SEQ ID NO: 80431 - protein, 93 aa, Unknown
  Bacterial polypetide isolated from the Sargasso Sea
MLSDFLKDYLPIIIFLIIALGLSCAFVVINFILSPKKPDPEKLSAYECGFEPFEDSRLEFDVRFYLVAILFIIFDLEIAFLFPWAISLGTSDY

SEQ ID NO: 80432 - protein, 301 aa, Unknown
  Bacterial polypetide isolated from the Sargasso Sea
GWAAVALCLFVFMGPMAKSAQFPLHVWLPDAMEGPTPISALIHAATMVAAGVFLVARLEPLYNLFPQVLTIIAVVGTITCFLGASIALTQMDLKKGLAYSTVSQLGYMMLAMGCGAPVAGMFHLVTHAFFKAMLFLDSGSVIHAMEEVVGHEPVLAQDMRLMGGLRKKMPITASTFFIGCVAISGIPPLAGFWSKDEILGQAFGSFPLLWAVGFLTAGMTAFYMFRLYFLTFEGEFRGTDSAVQQQLLAAAGKGDETVHGHASSPHESAWPMTVPLMVLAVPSVLIGLLGTPWNKRFAGLL

SEQ ID NO: 80433 - protein, 85 aa, Unknown
  Bacterial polypetide isolated from the Sargasso Sea
MIYNFLSEYLSIILFLFIAIVLSIGFIAINYLSAPNNPDPEKLSAYECGFEAFGDSRMEFDVRFYLVAILFIIFDLEIAFLFPWA

SEQ ID NO: 80434 - protein, 263 aa, Unknown
  Bacterial polypetide isolated from the Sargasso Sea
TGIGAYHVAMFHLFTHAFFKALLFLGSGSVIHAFKDEQDIRHMGGIRKQLPYTYVFMLIGTLALTGFPFLSGFYSKDAIIEFAFLSNSVLGNYAVVIGIFTALLTSIYSWRLFFKTFHGPYNNKTIQLKDTHESPLVMLIPLLLLSIGAVLAGFIFKEILIGHHSNKFWQSSIFFLEEIKHEYIPIWFLLLTPFLVVLAIPISFYYFIYNTKILEDFKNTNLPLYNFLLNKWYIDELYEFLFVKSSKKIGSLLWKKGDLGTID

SEQ ID NO: 80435 - protein, 170 aa, Unknown
  Bacterial polypetide isolated from the Sargasso Sea
VLLCVGSLNLSDIVLAQQNMWFIIPLFPMFVVFFISALAETNRPPFDLPEAEAELVAGYQTEYSGMMYAMFWLGEYANILLMCALGSILFLGGWLSPIDFYPFNIIPGALWLIFKILLLFILFALVKAIVPRYRYDQLMRLGWKIFLPLSLIYVVLTASYLFYFNLLPTN

SEQ ID NO: 80436 - protein, 112 aa, Unknown
  Bacterial polypetide isolated from the Sargasso Sea
MNYLEYLPIFVFILIAVGLSAGFAVLSGFVGPNNPDKEKLSAYECGFAPFDDARGRFDVRFYLVAILFIIFDLEVAFLFPWAISLSTIGIAGYISMMLFLFILTVGFIYEWK

SEQ ID NO: 80437 - protein, 122 aa, Unknown
  Bacterial polypetide isolated from the Sargasso Sea
MIYNFLSEYLSIIIFLFIAIFLSIGFVVANFLAAPSNPDPEKLSAYECGFEAFDDSRMEFDVRFYLVAILFIIFDLEIAFLFPWAISLGGIGALGFWSMMFFLGVLTIGFIYEWKKGALEWE

SEQ ID NO: 80438 - protein, 288 aa, Unknown
  Bacterial polypetide isolated from the Sargasso Sea
INLICILLFIGAMGKSAQLFLHTWLPDAMEGPTPVSALIHAATMVTAGVFLVVRCSPIYEYSPLALNLITIVGMSTAFFAATVALTQDDIKKIIAYSTCSQLGYMFFAAGVGAYNVAMFHLFTHAFFKALLFLGSGSVIHSFKDEQDINSMGGVWKKLPYTWILMIIGTLALTGFPFLSGFYSKDAIIEFAYLKGNTVGYFAAGIGVFTALLTSIYSWRLIFKTFHGNYNNKKLNISSMHESPMVMIIPLIILAIGSIFSGFLFKDLFIGIESSSNFWKNSIFFLEPL

SEQ ID NO: 80439 - protein, 122 aa, Unknown
  Bacterial polypetide isolated from the Sargasso Sea
MLADFLKDYLSIIIFIFIALGLSVGFIVLNFIFSPKNPDPEKLSAYECGFEAFDDSRMEFDVRFYLVAILFIIFDLEIAFLFPWAVSLGNIGALGFWSMMLFLFILTVGFVYEWKKGALDWD

SEQ ID NO: 80440 - protein, 115 aa, Unknown
  Bacterial polypetide isolated from the Sargasso Sea
MLSDFLKDYLSIIIFLIIALGISVAFIAVNYALSPKKPDPEKLSAYECGFEPFDDSRMEFDVRFYLVAILFIIFDLEIAFLFPWAISLGNIGILGFVSMMIFLFILTVGFIYEWK

SEQ ID NO: 80441 - protein, 99 aa, Unknown
  Bacterial polypetide isolated from the Sargasso Sea
MITNFLSEYLSIIIFLFISLLLSIGFIVINYIASPSNPDPEKLSAYECGFEAFDNARIEFDVRFYLVAILFIIFDLEIAFLFPWAISLGNIGLLGFYSN

SEQ ID NO: 80442 - protein, 101 aa, Unknown
  Bacterial polypetide isolated from the Sargasso Sea
MTAEFLKDYLPIILFLIIALGLSSAFIVINFILSPKNPDPEKLSAYECGFEPFQDSRMEFDVRFYLVAILFIIFDLEIAFLFPWAISLGNIGILGFSSMMI

SEQ ID NO: 80443 - protein, 122 aa, Unknown
  Bacterial polypetide isolated from the Sargasso Sea
MLFDFLNEYLSIIIFLAIALILSIGFIFINFVFSPKNPDPEKLSTYECGFEAFDDSRMEFDVRFYLVAILFIIFDLEIAFLFPWAISLGTIGLFGFISMMIFLFILTVGFIYEWKKGALDWE

SEQ ID NO: 80444 - protein, 282 aa, Unknown
  Bacterial polypetide isolated from the Sargasso Sea
MFFAAGVGAYNVAMFHLFTHAFFKALLFLGAGAVIHSFHDEQDINKMGGVIKKLPYTYVLMLIGTLALTGFPFLSGFYSKDAIIEFAYLRGNGVGMLAAFVGIVTALLTSIYSWRLIFKTFHGNFNNKELSIDKVHESPFVMIAPLIILAIGAIFAGMAFKGLFIGHEIAYEFWAQSIKFLEPLSTDHPPTWFLFLTPILVTSAIPFSYYLYLKNTNIVNGLKEMNEPFYQFLVKKWYFDEIYDYLFVNPSKKIGKFLWKKVDGSIIDKFGPDGISSVIKNL

SEQ ID NO: 80445 - protein, 288 aa, Unknown
  Bacterial polypetide isolated from the Sargasso Sea
ITIVGMTTAFFAVSVALVQTDIKKIIAYSTCSQLGYMFFAAGVGAYSVAMFHLFTHAFFKALLFLGSGAVIHSFKDEQDINKMGGVWKKLPFTYTLMIIGTLALTGFPFLSGFYSKDAIIEFAFLRGNNLGFYASSVGVFTALLTSIYSWRLIFKTFHGKYNNSSVKIESMHESPMVMLLPLIILAIGAIFAGIIFKDLFIGHETSYEFWSSSILFLEPLSKDHPPSWFLFLTPILVIISIPLSYYLFLKNTKIVDSIANSNKSFYLFLKNKWYFDEIYEYIFVQPSK

SEQ ID NO: 80446 - protein, 111 aa, Unknown
  Bacterial polypetide isolated from the Sargasso Sea
IIVFLLVALVLSVAFVAVNYLASPKNPDPEKLSAYECGFEPFNDSRMEFDVRFYLVAILFIIFDLEIAFLFPWAISLGKIGIFGFTSMMIFLFILTVGFIYEWKKGALDWE

SEQ ID NO: 80447 - protein, 314 aa, Unknown
  Bacterial polypetide isolated from the Sargasso Sea
LHVFAAGVGAYNVAMFHLFTHAFFKALLFLGSGSVIHAFNNEQNINKMGSVWRKIPYTWVMMIIGTLALTGFPFLSGFYSKDAIIEFAYLKGNTTGILASYIGILTAFLTSVYSWRLIFKTFHGKYNNEEIKIGKIHESPVVMIVPLVLLSIGSIFAGFIFKDLFIGIDNYNFWNNSIFFLKLLSNDHPPFFIIIITPILVILSIPISYYFFIKNKKLTDLIITSNKPLYNFLLKKWYFDELYNFIFVNPAKKIGLFFWKSIDIKIIDRFGPDGFSEIIKILSLKTKKFQSGYIYQYAFVMLLGFSAILTYLIL

SEQ ID NO: 80448 - protein, 102 aa, Unknown
  Bacterial polypetide isolated from the Sargasso Sea
MENLLLQYFPILIFIGIAIGLASVIVLASLIIARQKPDTAKLSAYECGFEPFEDARIKFDVRFYLVAILFIIFDLEVAFLFPWAVSLGEIGVFGFWSMFVFL

SEQ ID NO: 80449 - protein, 251 aa, Unknown
  Bacterial polypetide isolated from the Sargasso Sea
NFPAIDLLCFLLFIGAMGKSAQLGLHTWLPDAMEGPTPVSALIHAATMVTAGVFMVARMSPLFEFADYTNVFITFIGASTAIFAASIALTQNDIKRVIAYSTCSQLGYMFFAAGLGAYNASIFHLMTHGFFKALLFLSAGSVIHALHHEQDMRKMGGLFKKLPFTGLMMWIGSLAIIGFPYFSGYYSKESILENAYFSTSYMANFAYFVGILTALLTAFYSWRLLFLTFHGENRSEISIYEHANESSWVMK

SEQ ID NO: 80450 - protein, 95 aa, Unknown
  Bacterial polypetide isolated from the Sargasso Sea
MLADFLKDYLPIILFLIIALGLSFAFVAINYIAAPSRPDPEKLSAYECGFEPFNDSRMEFDVRFYLVAILFIIFDLEIAFLFPWAISLGEIGLYG

SEQ ID NO: 80451 - protein, 297 aa, Unknown
  Bacterial polypetide isolated from the Sargasso Sea
CNRVGDFGFALGIFLIFYLFGTVNYSEVFQQIPTVVDKNLSFLGFEVKAIDLVCLLLFIGAMGKSAQILLHTWLPDAMEGPTPVSALIHAATMVTAGVFLVVRCSPIYEYSPLILNFITIVGMTTAFFAATVALVQTDIKKIIAYSTCSQLGYMFFAAGVGAYNVAMFHLFTHAFFKALLFLGSGSVIHAFKDEQNINNMGGVWKKLPYTYALMIIGTLALTGFPFLSGFYSKDAIIEFAYLKGNTTGYYAAGIGIITAFLTSIYSWRLIFKTFHGEYNNKEIKIEETHESPLVMLV

SEQ ID NO: 80452 - protein, 250 aa, Unknown
  Bacterial polypetide isolated from the Sargasso Sea
LALVAWAVIPFDAGWVLADINVGILYLFAISSLGVYGIIMAGWASNSKYAFLGALRSAAQMVSYEVAIGFVIITVLMCVGSLNLTDIVMAQQGEGFWSWYWLPLFPMFIIFFISALAETNRHPFDLPEAEAELVAGYNVEYSAMTFALFFLGEYANMILMSGMTAILFLGGWLPPFDIEPFTWVPGIIWFAAKIALCLFVFLWVRATFPRYRYDQLMRLGWKVFLPFSLLWVAVTAGALIAFDWLPKTAG

SEQ ID NO: 80453 - protein, 282 aa, Unknown
  Bacterial polypetide isolated from the Sargasso Sea
KKESANAAAIKAFVVNRVGDFGFALGIFLIFYLFGTVNYSEVFQQIPTVVDKNLSFLGFEVKAIDLVCLLLFIGAMGKSAQILLHTWLPDAMEGPTPVSALIHAATMVTAGVFLVVRCSPIYEYSPLILNFITIVGMTTAFFAATVALVQTDIKKIIAYSTCSQLGYMFFAAGVGAYNVAMFHLFTHAFFKALLFLGSGSVIHAFKDEQNINNMGGVWKKLPYTYALMIIGTLALTGFPFLSGFYSKDAIIEFAYLKGNTTGYYAAGIGIITAFLTSIYSWR

SEQ ID NO: 80454 - protein, 164 aa, Unknown
  Bacterial polypetide isolated from the Sargasso Sea
NLNDIVIAQKELWYVIPLFPMFVIFFISALAETNRPPFDLPEAEAELVAGYQTEYSGMMYAMFWLGEYANILLMCAMGSILFLGGWLPLMDIYPLNLIPPPVWMISKILFLFLLFALIKAIVPRYRYDQLMRLGWKIFLPFSLIYLVFTASFLFYFDKLPKVNF

SEQ ID NO: 80455 - protein, 308 aa, Unknown
  Bacterial polypetide isolated from the Sargasso Sea
LFIGAMGKSAQFFLHTWLPDAMEGPTPVSALIHAATMVTAGVFLVVRCSPIYEYSSLALSLVTIIGMTTAIFAASVALVQDDIKKIIAYSTCSQLGYMFFAAGVGAYNVAMFHLFTHAFFKALLFLGAGSVIHAFKDEQNINKMGGVRNKLPITYVLMLVGTLALTGFPLLSGFYSKDAIIEFAYLKGNTLGYYAASIGIFTALLTSIYSWRLFFKTFHGDFNNQTISIDKIHESPMVMTIPLVILAVGSIFTGYFFKDLFISHEESYQFWKSSIFFLEQLSKDHPPKWFLFLTPSIGSAFYTCGLFL

SEQ ID NO: 80456 - protein, 235 aa, Unknown
  Bacterial polypetide isolated from the Sargasso Sea
ESANAAAIKAFVVNRVGDFGFALGIFLVFYLFGTVNYSEVFQQIPTIIDKKLFFLGFEVKAIDLICLLLFVGAMGKSAQILLHTWLPDAMEGPTPVSALIHAATMVTAGVFLVVRCSPIYEYSPLILNFITIIGMTTAFFAATVALVQTDIKKIIAYSTCSQLGYMFFAAGVGAYNVAMFHLFTHAFFKALLFLGSGSVIHAFKDEQNINNMGGVWKKLPYTYALMIIGTLALTG

SEQ ID NO: 80457 - protein, 118 aa, Unknown; identical to SEQ ID NO: 80371
  Bacterial polypetide isolated from the Sargasso Sea

SEQ ID NO: 80458 - protein, 282 aa, Unknown
  Bacterial polypetide isolated from the Sargasso Sea
FGLFQSLADALKYVFKEIIIPASSNKIIFILAPIVTMTLALVAWAVIPFSETFVIADINVGILYLFAVSSLGVYGIIMGGWASNSKYPFLGSIRSAAQMVSYEVSIGIIIINVLLCVGSLNLSDIVKAQQNLWFIIPLFPMFIIFFISALAETNRPPFDLPEAEAELVAGYQTEYSGMMYAMFWLGEYANILLMCAIGSILFLGGWLSPIDLFPFNLVPGPIWMIFKILFLFILFALVKAIVPRYRYDQLMRLGWKIFLPFSLTWVVLTSGYLLYFDLLPVN

SEQ ID NO: 80459 - protein, 254 aa, Unknown
  Bacterial polypetide isolated from the Sargasso Sea
FILAPIVTMTLALIAWAVIPFSATQVLADINVGILYLFAVSSLGVYGIIMGGWASNSKYPFLGAIRSAAQMVSYEVSIGVIIINVLLCVGSLNLNDIVIAQQNMWFVIPLFPMFVIFFISALAETNRPPFDLPEAEAELVAGYQTEYSGMMYAMFWLGEYANILLMCAMGAILFLGGWMTPIDVYPFTLVPSAIWLILKILLLFILFALVKAIVPRYRYDQLMRLGWKVFLPLSLIWVVLTASYLFYFNLLPVN

SEQ ID NO: 80460 - protein, 148 aa, Unknown
  Bacterial polypetide isolated from the Sargasso Sea
MGLENIHKDGFVLAKSTNLFDWARTGSMWPMTFGLACCAVEMMHAGASRYDIDRFGMLFRPSPRQSDVMIVAGTLVNKMAPALRKVYDQMADPKWVISMGSCANGGGYYHYSYAVVRGCDRIVPVDIYVPRLSAYSGSFVIWNFTVTK

SEQ ID NO: 80461 - protein, 66 aa, Unknown
  Bacterial polypetide isolated from the Sargasso Sea
RMKFDIRYYLVAILFIIFDLEIAFLFPWAIVIHEVGLIGLFSMAIFLLILVVGFIYEWKKGALEWD

SEQ ID NO: 80462 - protein, 142 aa, Unknown
  Bacterial polypetide isolated from the Sargasso Sea
FLVVRCSPIYEYSELALNIITVIGMSTAFFAATIALVQTDIKKIIAYSTCSQLGYMFFATGVGAYNVAMFHLFTHAFFKALLFLGAGSVIHSFKDEQDIEKMGGVCKKIPYTYALMLVGTLALTGFPFLSGFYSKDAIIEFA

SEQ ID NO: 80463 - protein, 122 aa, Unknown
  Bacterial polypetide isolated from the Sargasso Sea
MIAEFLKDYFSIIIFLIIALGLSCFFILLNFLVSPKNPDPEKLSAYECGFEPFNDSRMEFDVRFYLVAILFIIFDLEIAFLFPWAITLGSIGFLGFISMMIFLFILTVGFVYEWKKGALDWE

SEQ ID NO: 80464 - protein, 316 aa, Unknown
  Bacterial polypetide isolated from the Sargasso Sea
MPWEGPTPVSALIHAATMVTAGVFLVARMSPLYEFATFTNLFITFIGAATAIFAASIALTQNDIKRVIAYSTCSQLGYMFFAAGVGAYNASIFHLTTHAFFKALLFLSAGSVIHAMHHEQDMRKMGGLFKKIPFTASMMWIGSLAIIGFPYLSGYYSKESILENAFYASNGIAYFAYLVGILTALLTAFYSWRLLFLTFHGENRSNNKTYDHAHESPLVMTAPLFILAIGSIFSGIFFADYFIGYYKKEFWDNAILLTESSHKYLPLTQSLISKSAVAVGILVCVLIYSNNLNRAKNLSYNLDPLYSLSKINGMWM

SEQ ID NO: 80465 - protein, 118 aa, Unknown
  Bacterial polypetide isolated from the Sargasso Sea
FLGEYLPIAVFFAIAIGLSLAFVLSAFIFGNQRPDSEKMTAYECGFDAFDDSRRQFDVRFYLVAILFIIFDLEIAFLFPWAVALGGIGLFGFWSMMLFLAVLTIGFIYEWKKGALEWE

SEQ ID NO: 80466 - protein, 142 aa, Unknown
  Bacterial polypetide isolated from the Sargasso Sea
MFVIFFISALAETNRPPFDLPEAEAELVAGYQTEYSGMMYAMFWLGEYANILLMCALGSILFLGGWLSPIDLYPFNLIPGAIWLILKILLLFVLFALVKAVVPRYRYDQLMRLGWKIFLPLSLTYVVLTASYLFYFNLLPTI

SEQ ID NO: 80467 - protein, 123 aa, Unknown
  Bacterial polypetide isolated from the Sargasso Sea
MIVADFLKNYFPIILFLIIALGLSCAFIFLNFVLSPKNPDPEKLSAYECGFEPFNDSRMEFDVRFYLVAILFIIFDLEIAFLFPWAISLGTIGVFGFTSMMIFLLILTVGFIYEWKKGALDWE

SEQ ID NO: 80468 - protein, 107 aa, Unknown
  Bacterial polypetide isolated from the Sargasso Sea
FDIALGLSLAFVAINYIAAPSKPDPEKLSAYECGFEPFNDSRMEFDVRFYLVAILFIIFDLEIAFLFPWAISLSEIGLYGFCSMMLFLFILTVGFIYEWKKGALDWE

SEQ ID NO: 80469 - protein, 124 aa, Unknown
  Bacterial polypetide isolated from the Sargasso Sea
MGLETDNNLIDQQGPGFIITSVDKLVNWARTGSMWPVTFGLACCAVEMMHAGASRYDTDRFGVFFRPSPRQSDVMIVAGTLVNKMAPALRKVYDQMAEPKWVISMGSCANGGGYYHHSYSVVRG

SEQ ID NO: 80470 - protein, 118 aa, Unknown
  Bacterial polypetide isolated from the Sargasso Sea
MLENYLPIAIFIIIAGVLGLLMLGLGFLFGKGAKTKAKLSPYECGFEEFEDARIPFDVRYYLVAILFIIFDLEIAFLFPWAIALDEIGHVGLISMVIFLLVLVIGFVYEWNKGALDWD

SEQ ID NO: 80471 - protein, 110 aa, Unknown
  Bacterial polypetide isolated from the Sargasso Sea
MIYNFLSDYLSIIIFLFIALFLSIGFILVNFLASPSNPDPEKLSAYECGFEAFDDSRMEFDVRFYLVAILFIIFDLEIAFLFPWAISLGNLGALGYWSMMVFLGTLTIGF

SEQ ID NO: 80472 - protein, 295 aa, Unknown
  Bacterial polypetide isolated from the Sargasso Sea
FWELVGMCSYLLVGFWYDRDGAAHAAQKAFVVNRVGDFGLLLGILGLFWATNSFDFNEIATGISQSVSDNSLPIWAALLLCFLVFLGPMAKSAQFPLHVWLPDAMEGPTPISALIHAATMVAAGIFLVARLQPLYSIFPSIQFIIALVGTITCFLGASIALTQMDLKKGLAYSTVSQLGYMMLAMGCGAPIAGIFHLVTHACFKAMLFLGSGSVIHAMEEVVGHQPVLAQDMRLMGGLRKKMPYTSATFLIGCVAISGIPPLAGFWSKDEILGNAFISFPAFWFVGLLTAGMTAF

SEQ ID NO: 80473 - protein, 86 aa, Unknown
  Bacterial polypetide isolated from the Sargasso Sea
MTAEFLKDYLPIILFLIIAFGLSCAFIVINFILSPKNPDPEKLSAYECGFEPFQDSRMEFDVRFYLVAILFIIFDLEIAFLFPWAI

SEQ ID NO: 80474 - protein, 297 aa, Unknown
  Bacterial polypetide isolated from the Sargasso Sea
LFAASVALVQNDIKRIIAYSTCSQLGYMFVAAGVGFYQAAMFHLFTHAFFKALLFLCAGSVIHSMHHEQDIRKFGGLRKKLPATFFAMLIGTLAITGFGLPLSYDIFHFYIGLSGFISKDAIIEGVFAAQRSSSMFAFWSLVLSALFTSFYSWRLIFLTFFGEYKGEADLLQHAHEPAKTMLIPLFCLSIGAIFTGMIFSGIFVGKASSEFFSSAIFNNDANTILYDFHFVPFWVKLMPFISMLVGFFLAFTFYISNKTLSSRLSNQHLALYRFLYNKWYFDEFFNFIIVKPDIEFR

SEQ ID NO: 80475 - protein, 122 aa, Unknown
  Bacterial polypetide isolated from the Sargasso Sea
MLAEFLKDYLPIILFLIIALGLSLAFVAINYIAAPKNPDPEKLSAYECGFEPFNDSRMEFDVRFYLVAILFIIFDLEIAFLFPWAISLGQIGLFGFCSMMLFLFILTVGFIYEWKKGALDWE

SEQ ID NO: 80476 - protein, 171 aa, Unknown
  Bacterial polypetide isolated from the Sargasso Sea
NVLLCVGSLNLSDIVLAQKNLWFVIPLFPMFVIFFISALAETNRPPFDLPEAEAELVAGYQTEYSGMMYAMFWLGEYANILLMCAMGSILFLGGWLPLVDFFPFNIIPGPLWLIFKILFLFVLFALVKATVPRYRYDQLMRLGWKIFLPFSLLYVVLTASFLLYFNLLPTN

SEQ ID NO: 80477 - protein, 238 aa, Unknown
  Bacterial polypetide isolated from the Sargasso Sea
MFFAAGVGAYNASIFHLTTHAFFKALLFLSAGSVIHAMHHEQDMRKMGGLFKKIPFTATMMWIGSLAIIGFPYLSGYYSKESILENAFYASNGIAYFAYLVGILTALLTAFYSWRLLFLTFHGENRSNNKTYDHAHESPLVMTAPLFILAIGSIFSGIFFADYFIGYYKKEFWDNAILLTESSHKYLPLTQSLISKSAVAVGILVCVLIYSNNLNRAKNLSYNLDPLYSLSKNKWYVD

SEQ ID NO: 80478 - protein, 240 aa, Unknown
  Bacterial polypetide isolated from the Sargasso Sea
AVIPLSEKMVIADINVEILYIFAISSLGVYGILMGGWASNSKYPFLGAVRSAAQMVSYEVSIGIIIINVLLCTGSLNLSEIVLAQQNLWFVIPLFPMFVIFFISALAETNRPPFDLPEAEAELVAGYQTEYSGMMYAMFWLGEYANILLMCALGSILFLGGWLSPIDIYPLNLIPGAVWMIIKILILFFMFAIIKAIVPRYRYDQLMRLGWKVFLPFSLIYVVLTASFLIYFDLLPNTGN

SEQ ID NO: 80479 - protein, 122 aa, Unknown
  Bacterial polypetide isolated from the Sargasso Sea
MIYNFLSDYLSIIIFLFIALFLSVGFILANFLASPSNPDPEKLSAYECGFEAFDDSRMEFDVRFYLVAILFIIFDLEIAFLFPWAISLGNLGALGFWSMMIFLGVLTIGFIYEWKKGALEWE

SEQ ID NO: 80480 - protein, 268 aa, Unknown
  Bacterial polypetide isolated from the Sargasso Sea
GYYFEKHSAAEACKKAFLFNRVGDFGVLSAVLLIFLSIGSLEFNTVNAQAADQFEYGGVLVTVITLLLFLGATGKSAQIPLYVWLPDAMEGPTPVSALIHAATMVTAGLYMVARLSHLFMLAPVTMNVIAVVGTVTALMAATIAITQTDIKRVLAYSTVSQLGYMFLAMGVGAFTAGIFHVMTHAFFKALLFLGSGSVIHAMHHEQDMMRMGALRKKLPITYLTMMAGTLAIAGIPFFSGFFSKDEILWKAFSSPLGGGVFWALGFLT

SEQ ID NO: 80481 - protein, 121 aa, Unknown
  Bacterial polypetide isolated from the Sargasso Sea
MSDNLIEYLPIFIFIIFSIIISIGFVFSAFVVGNQNPDPEKNSPFECGFDEFEDTRVEFDVRFYLVAILFIIFDLEIAFLFPWAVSLGNIGLFGFWSMMLFLLVLTIGFIYEWKKGALEWE

SEQ ID NO: 80482 - protein, 126 aa, Unknown
  Bacterial polypetide isolated from the Sargasso Sea
MRETQLPEFLSEYLPIAIFFAIAVGLSAAFVATAFIFGNQRPDEEKMAAYECGFDAFEDSRRQFDVRFYLVAILFIIFDLEVAFLFPWAVSLGGIGVFGFWSMMVFLAVLTIGFIYEWKKGALEWE

SEQ ID NO: 80483 - protein, 158 aa, Unknown
  Bacterial polypetide isolated from the Sargasso Sea
MHKKKLWYVIPLFPMFVIFFISALAETNRPPFDLPEAEAELVAGYQTEYSGMMYAMFWLGEYANILLMCAMGSILFLGGWLPIMDIYPLNLIPAPLWMILKILFLFLLFALIKAIVPRYRYDQLMRLGWKIFLPFSLIYLVMTASFLFYFDKLPKVNI

SEQ ID NO: 80484 - protein, 316 aa, Unknown
  Bacterial polypetide isolated from the Sargasso Sea
MVTSDNFLQLFFGWEGVGLCSYFLIGFWFKKKAANAAAIKAFVVNRVGDFGFALGIFLIFYYFGTVNYDEVFNQIQTLNAKNINFLGFELKSIDLICILLFIGAMGKSAQIFLHTWLPDAMEGPTPVSALIHAATMVTAGVFLIVRCSPIYEYSELALNIITIIGMSTAFFAATIALVQTDIKKIIAYSTCSQLGYMFFATGVGAYNVAMFHLFTHAFFKALLFLGAGSVIHSFKDEQDIEKMGGVFKKIPYTYTLMLVGTLALTGFPFLSGFYSKDAIIEFAYLRGNVTGIYAAGIGICTAMLTAIYSWRLFFKT

SEQ ID NO: 80485 - protein, 277 aa, Unknown
  Bacterial polypetide isolated from the Sargasso Sea
LVVRCSPIYEYSPLILDLITIVGMTTALFAATVALVQTDIKKIIAYSTCSQLGYMFFAAGVGAYNVAMFHLFTHAFFKALLFLGSGSVIHAFKDEQNINNMGGVWRKLPYTYALMIIGTLALTGFPFLSGFYSKDAIIEFAYLKGNTTGFYAAGIGIITAFLTSIYSWRLIFKTFHGEYNNKKIDISETHESPLVMLFPLIILSIGAIFAGFLFKDLFIGHGDNLFWAESIKFLKPLSTEHPPTWFLLLTPCLVILSIPISYYLFVKNKDLPKAIAS

SEQ ID NO: 80486 - protein, 297 aa, Unknown
  Bacterial polypetide isolated from the Sargasso Sea
SDNFIQLFFGWEGVGLCSYFLIGFWFKKETANFAAIKAFLVNRVGDFGFALGIFLIFYLFGTVNYSEVFELIPTIENKELSFLGFEVNAIDLICLLLFIGAMGKSAQILLHTWLPDAMEGPTPVSALIHAATMVTAGVFLVVRCSPIYEYSDLALNVITIVGMTTAFFAASVALVQTDIKKIIAYSTCSQLGYMFFAAGVGAYNVAMFHLFTHAFFKALLFLGSGSVIHAFKNEQNINKMGGVWKKLPYTYVLMIIGTLALTGFPLLSGFYSKDAIIEFAYLKGSTAGYYAAGIGIF

SEQ ID NO: 80487 - protein, 254 aa, Unknown
  Bacterial polypetide isolated from the Sargasso Sea
IGINVNAVDLICLLLFIGAMGKSAQIFLHTWLPDAMEGPTPVSALIHAATMVTAGVFLVVRCSPIYEYSELALSIITIVGMVTALFAASVALVQTDIKKIIAYSTCSQLGYMFFAAGVGAYSVAIFHLFTHAFFKALLFLGSGSVIHSFKDEQDINEMGGVWKKLPYTYALMIIGTLALTGFPFLSGFYSKDAIIEFAFLRGNSLGIYASSMGVFTALLTSIYSWRLIFKTFHGRYNNSKIKIDAMHEAPMTML

SEQ ID NO: 80488 - protein, 69 aa, Unknown
  Bacterial polypetide isolated from the Sargasso Sea
SDSRMEFDVRFYLVAILFIIFDLEIAFLFPWAISLGKIGLLGFVSMMIFLFILTVGFIYEWKKGALDWE

SEQ ID NO: 80489 - protein, 303 aa, Unknown
  Bacterial polypetide isolated from the Sargasso Sea
CFLVFLGPMAKSAQFPLHVWLPDAMEGPTPISALIHAATMVAAGIFLVARLQPLYSIFPSIQFIIALVGTITCFLGASIALTQMDLKKGLAYSTVSQLGYMMLAMGCGAPVAGIFHLVTHACFKAMLFLGSGSVIHAMEEVVGHQPVLAQDMRLMGGLRKKMPYTSTTFLIGCVAISGIPPLAGFWSKDEILGNAFISFPAFWFVGLLTAGMTAFYMFRLYFLTFEGDFRGENKELQKQLLTASETNLDDENEEEHEEHGSIHESPWSMTFPLVFLAVPSVIIGFMGLPWDSKIANLLDPEEA

SEQ ID NO: 80490 - protein, 122 aa, Unknown
  Bacterial polypetide isolated from the Sargasso Sea
MIYNFLTDYLSIIIFLFIALFLSIGFILANYLASPSNPDPEKLSAYECGFEAFDDSRMEFDVRFYLVAILFIIFDLEIAFLFPWAISLGSLGALGFWSMMIFLGVLTIGFIYEWKKGALEWE

SEQ ID NO: 80491 - protein, 122 aa, Unknown
  Bacterial polypetide isolated from the Sargasso Sea
MLAEFLKDYLPIILFLIIALGLSLAFVAINYIAAPKNPDPEKLSAYECGFEPFNDSRMEFDVRFYLVAILFIIFDLEIAFLFPWAISLGQIGLYGFCSMMLFLFILTVGFIYEWKKGALDWE

SEQ ID NO: 80492 - protein, 258 aa, Unknown
  Bacterial polypetide isolated from the Sargasso Sea
DKNLSFLGFEVIAIDLICLLLFIGAMGKSAQILLHTWLPDAMEGPTPVSALIHAATMVTAGVFLVVRCSPIYEYSPLILNFITIVGMTTAFFAATVALVQTDIKKIIAYSTCSQLGYMFFAAGLGAYNVAMFHLFTHAFFKALLFLGSGSVIHAFKDEQNINNMGGVWKKLPYTYALMIIGTLALTGFPFLSGFYSKDAIIEFAYLKGNTTGYYAAGIGIITAFLTSIYSWRLIFKTFHGEYNNKEIKIEETHESPSV

SEQ ID NO: 80493 - protein, 122 aa, Unknown
  Bacterial polypetide isolated from the Sargasso Sea
MLTEFLKDYLPIILFLIIALGLSLAFVAINYIAAPSKPDPEKLSAYECGFEPFNDSRMEFDVRFYLVAILFIIFDLEIAFLFPWAISLGEIGLYGFCSMMLFLFILTVGFIYEWKKGALDWE

SEQ ID NO: 80494 - protein, 122 aa, Unknown
  Bacterial polypetide isolated from the Sargasso Sea
MVAEFLKDYFPIILFLIIALGLSFAFIILNYLLSPKKPDPEKLSSYECGFEPFNDSRMEFDIRFYLVAILFIIFDLEIAFLFPWAISLGNIGLLGFISMMVFLIILTVGFIYEWKKGALDWE

SEQ ID NO: 80495 - protein, 295 aa, Unknown
  Bacterial polypetide isolated from the Sargasso Sea
AGKKAFIVNRIGDVGFLVAMFLLFKNFGSVDFISIFQDADTLIYGGGLVTAITLFFFIGAIGKSAQIPLYVWLPDAMAGPTPVSALIHAATMVTAGVYLVARSSVLFALAPFSSAIVAGVGVLTALFAATIALKQNDIKKVLAYSTVSQLGYMFLGVGVGAYAAGVFHLMTHAFFKALLFLGSGAVIHSMHEAYHATHSHEDAQDMRNMGGLHRPMRITCITMWIATLAIAGIWPFAGFFSKDEIIWYAGAWAGAEGAPYPQLYTVYWILALVAALLTAFYMTRMMVMTFHGKNR

SEQ ID NO: 80496 - protein, 270 aa, Unknown
  Bacterial polypetide isolated from the Sargasso Sea
AAKAGNKAFVLNRIGDFGFLIALMMILNTYDTFSFKTVFATTLINQPQNLDLIVVFLMIGAFGKSAQFPLFSWLPDAMEGPTPASALIHAATMVTAGVFMLVRISPLLQFSELSSILIIGIGLLTALISAFAAINQNDIKKVLAYSTISQLGFMFIAIGAGAYVAAIFHLVTHAFFKALLFLGAGAVIHEMHHEQNIQKMGGLKKKMPMTAAMMGIGTLAISGIPPLAGFWSKDEILASTFANGGIYYGFWGLSLLAAIMTAFYMGRHWL

SEQ ID NO: 80497 - protein, 216 aa, Unknown
  Bacterial polypetide isolated from the Sargasso Sea
SSLGVYGIIMGGWASNSKYPFLGAIRSAAQMVSYEVSIGIIIINVLLCVGSLNLKDIVLAQKELWYVIPLFPMFVIFFISALAETNRPPFDLPEAEAELVAGYQTEYSGMMYAMFWLGEYANILLMCAMGAILFLGGWLPIMDIYPLNLIPAPIWMILKILFLFLLFALIKAIVPRYRYDQLMRLGWKIFLPFSLIYLVFTASFLFYFDKLPKGNF

SEQ ID NO: 80498 - protein, 122 aa, Unknown
  Bacterial polypetide isolated from the Sargasso Sea
MIYNFLTDYLSIIIFLFIALFISIGFILINFISSPSNPDPEKLSAYECGFDAFDDSRMEFDVRFYLVAILFIIFDLEIAFLFPWAITLGKIGIFGFWSMMIFLAVLTIGFIYEWKKGALEWE

SEQ ID NO: 80499 - protein, 189 aa, Unknown
  Bacterial polypetide isolated from the Sargasso Sea
RSAAQMVSYEVSIGVIIINVLLCVGSLNLNDIVLAQQSMWFVIPLFPMFVIFFISALAETNRPPFDLPEAEAELVAGYQTEYSGMMYAMFWLGEYANILLMCAMGAILFLGGWLSPLTVYPFTFIPGAIWLILKILLLFFLFALVKAIVPRYRYDQLMRLGWKVFLPFSLIWVVLTASYLFYFNLLPVN

SEQ ID NO: 80500 - protein, 61 aa, Unknown
  Bacterial polypetide isolated from the Sargasso Sea
VRFYLVAILFIIFDLEIAFLFPWAISLGNIGLLGFSSMMIFLFILTVGFIYEWKKGALDWE

SEQ ID NO: 80501 - protein, 319 aa, Unknown
  Bacterial polypetide isolated from the Sargasso Sea
MLILVLGDGFLLMFVGWEGVGLCSYLLIGYYFEKDSAAVAAKKAFLFNRVGDFGVLSAVLLIFLIFGSIDFNTVNTEAAARLEHGGFLVTVITLLLFLGATGKSAQIPLFVWLPDAMEGPTPVSALIHAATMVTAGLYMVARLSHLFVLAPLTMNIIAVIGALTALLAASIAITQTDIKRVLAYSTVSQLGYMFLAMGVGAFTTGVFHVMTHAFFKALLFLGSGSVILAVHHEQDMRKMGGLKSKLPITYITMLLGTMAISGIPFFAGFFSKDEILWYAFSSPYGSAWFWGVGFLTAGLTAFYMFRMIYLTFHGESRVD

SEQ ID NO: 80502 - protein, 109 aa, Unknown
  Bacterial polypetide isolated from the Sargasso Sea
MIYNFLTDYLSIIIFLFVALFISIGFILINFVSSPSNPDPEKLSAYECGFDAFDDSRMEFDVRFYLVAILFIIFDLEIAFLFPWAITLGKTGLFGFWSMMIFLAVLTIG

SEQ ID NO: 80503 - protein, 289 aa, Unknown
  Bacterial polypetide isolated from the Sargasso Sea
ITQNDIKRVIAYSTCSQLGYMFFAAGIGAYNSSIFHLMTHGFFKALLFLSAGSVIHAMNHEQDMRKMGGLSAKIPFTTIMMWIGSLAIIGFPYFSGYYSKESILENTYFSNNDMANFAYVVGILTALLTAFYSWRLLFLTFHGENRSEQKIFANAHESPLVMQLPLIFLSIGTVFSGIFFSKYYIGDLKELFWNNAIILSHSSHKYLPFFQTLLIKASVALGLIISAYFYFYNKNLPKKLSTKFNFFYLISFNKWYVDEIYNKIIIKPYFILANFFWTRGDEKNIDAYG

SEQ ID NO: 80504 - protein, 269 aa, Unknown
  Bacterial polypetide isolated from the Sargasso Sea
MDGFPILTIMMLVPLAGAVLCLFTGGGASRGIALAATLVTFALGVLLWANYQIGGDQWQFTERYELFAGFNYALGIDGIALMLIMLSVFLMPICVLASWEAIQKRVGEYMAAFLFMEVLMIGTFAAQDLFLFYIFFEAGLIPMYLIIGVWGGDNRIYASYKFFLYTLIGSVLMLIAMFWMVAIAGTSDIPTLMQYPFPAGAQTWLWLAFFASFAVKVPMWPFHTWLPDAHVQAPTAGSVILAGVLLKLGGYGFIRFSLPMFPDASADFA

SEQ ID NO: 80505 - protein, 238 aa, Unknown
  Bacterial polypetide isolated from the Sargasso Sea
PDAMEGPTPVSALIHAATMVTAGVFLVVRCSPIYEYSPLILDLITIVGMTTAFFAATVALVQTDIKKIIAYSTCSQLGYMFFAAGVGAYNVAMFHLFTHAFFKALLFLGSGSVIHAFKDEQDINKMGGVWKKLPYTYALMIIGTLALTGFPFLSGFYSKDAIIEFAYLKGNTTGYYAAGIGILTAFLTSIYSWRLIFKTFHGEYKNKEIKIEETHESPLVMLIPLFILSIGAIFAGVL

SEQ ID NO: 80506 - protein, 276 aa, Unknown
  Bacterial polypetide isolated from the Sargasso Sea
NKDLASAAYTYFNLTIVDVICFFLFLGAMGKSAQIFLHTWLPDAMEGPTPVSALIHAATMVTAGVFLCCRFSPLFEYSSNISNLILVIGSVTALFASTIALVQNDIKRIIAYSTCSQLGYMFAAVGAGFYQAAMFHLFTHAFFKALLFLGAGSVIHAMHHEQDIRHFGGLRKKLPVTFITMLVGTVAITGVGIPLSYDMFNINIGFSGFVSKDIVIEGVFSSSKSFSYFGFLLLVFSALLTSFYSWRLIFLTFFGSFRGNQKYYEQCHEPEFSMII

SEQ ID NO: 80507 - protein, 152 aa, Unknown
  Bacterial polypetide isolated from the Sargasso Sea
QNLWFVVPLFPMFVVFFISALAETNRPPFDLPEAEAELVAGYQTEYSGMMYAMFWLGEYANILLLCALGSILFLGGWLSPVDIYPLNAIPGIFWMIFKILILFFMFALIKAIVPRYRYDQLMRLGWKIFLPFSLIYVVLTSSFLVYFDLLPK

SEQ ID NO: 80508 - protein, 291 aa, Unknown
  Bacterial polypetide isolated from the Sargasso Sea
CSPIFEYSQLSLNIITIIGSATAFFAATIALVQTDIKKIIAYSTCSQLGYMFFAAGVGAYNVAMFHLFTHAFFKALLFLGSGSVIHSFKDEQDINQMGAVYRKLPYTWILMIIGTLALTGFPFLSGFYSKDAIIEFAYLRGNSVGYYAAWIGVITAFLTSIYSWRLIFKTFHGSFNNKQMQIENIHESPMVMVIPLIILSIGAIFAGYLFKDLFITHGEDSYFWAESIKFLKPLSTDHPPLWFILTTPTLVLISIPLAYYLFVKNKDLSEALVESNRPLYNFLINKWYFDE

SEQ ID NO: 80509 - protein, 122 aa, Unknown
  Bacterial polypetide isolated from the Sargasso Sea
MIYNFLLDYFSIIIFLFIALFLSIGFIVINFLASPSNPDPEKLSAYECGFEPFDDSRMEFDVRFYLVAILFIIFDLEIAFLFPWAISLGSIGALGYWSMMFFLGVLTIGFIYEWKKGALEWE

SEQ ID NO: 80510 - protein, 263 aa, Unknown
  Bacterial polypetide isolated from the Sargasso Sea
WLPDAMEGPTPVSALIHAATMVTAGVFMVCRLSPMLEYAPFALDVITIIGALTAIFAATIGMTQFDIKRVIAYSTCSQLGYMFFAAGVSAYPAAMFHLTTHAFFKALLFLGAGSVIHALSNEQDLRKMGGIWKKVPVTYVMIWIGSLALAGFPFFAGYYSKDMILEAAYAAHSVPGLIAFWLGCIAAFLTAFYSWRLLIMAFHGEPRASAETMAHVHESPRVMTLPLLVLAAGAVFAGWLGYELFVGTDMKRFWGESIFILPT

SEQ ID NO: 80511 - protein, 301 aa, Unknown
  Bacterial polypetide isolated from the Sargasso Sea
MAAGSFQVNISFQVDELSGLYLLIITGVGFLIHVYSIGYMKGESGYYRFFAYLNLFVFFMLILVLGDSFLLMFVGWEGVGLCSYLLIGYYFEKHSAAEACKKAFLFNRVGDFGVLSAVLLIFLSIGSLEFNTVNAQAASQFEYGGVLVTVITLLLFLGATGKSAQIPLYVWLPDAMEGPTPVSALIHAATMVTAGLYMVARLSHLFMLAPVTMNVIAVVGTVTALLAATIAITQTDIKRVLAYSTVSQLGYMFLAMGVGAFTAGIFHVMTHAFFKALLFLGSGSVIHAMHHEQDMMRMGLK

SEQ ID NO: 80512 - protein, 122 aa, Unknown
  Bacterial polypetide isolated from the Sargasso Sea
MYGEFLNNYLTIIIFFGVALILSIGFIFLNFVFAPKNPDPEKLSAYECGFEPFNDSRMEFDIRFYLVAILFIIFDLEIAFLFPWAISLGKIGIFGFISMMIFLFILTVGFIYEWKKGALDWE

SEQ ID NO: 80513 - protein, 293 aa, Unknown
  Bacterial polypetide isolated from the Sargasso Sea
FEFLLDGLSGTMMLLVTGLGLVIQIFSTSYMSGDPRYVKYFVYFNFFVFSMLLLVMSANFLVMFFGWELVGLSSYLLISFWSEKKEAAKAGNKAFVLNRIGDFGFLIALMMILNTYDTFSFKTVFATTLINQPQNLDLIVVFLMIGAFGKSAQFPLFSWLPDAMEGPTPASALIHAATMVTAGVFMLVRISPLLQFSELSSILIISIGLLTALISAFAAINQNDIKKVLAYSTISQLGFMFIAIGAGAYVAAIFHLVTHAFFKALLFLGAGAVIHEMHHEQNIQKNGWFKEKN

SEQ ID NO: 80514 - protein, 81 aa, Unknown
  Bacterial polypetide isolated from the Sargasso Sea
KLSAYECGFEAFDYSRMEFDVRFYLVAILFIIFDLEIAFLFPWAISLGGIGALGFWSMMIFLGVLTIGFIYEWKKGALEWE

SEQ ID NO: 80515 - protein, 301 aa, Unknown
  Bacterial polypetide isolated from the Sargasso Sea
FGSVEFSVIFDNAESFKDHSIQFIGLNFSTIDLLCFLLFIGAMGKSAQLGLHTWLPDAMEGPTPVSALIHAATMVTAGVFLVARMSPLFEYALFTNLFIIFIGASTAIFAASIALTQNDIKRVIAYSTCSQLGYMFFAAGLGAYNASIFHLMTHGFFKALLFLSAGSVIHAMHHEQDMRKMGGLFKKIPFTGTMMWIGSLAIIGFPYFSGYYSKESILENAYYSSSSMATFAYTVGILTALLTAFYSWRLLFMTFHGQSRSDKKTFDHAHESPIVMTLPLILLAFGSIFAGLLFFNFYIGK

SEQ ID NO: 80516 - protein, 318 aa, Unknown
  Bacterial polypetide isolated from the Sargasso Sea
PWARWLATGAVAGSFLVTVGVFLDLVGRDARDRRSVTTLFEWVPAGDLRVDVGFLVDPLSLTMCLFITGVGALIHLYSIGYMHGDGDFPRFFTYLNLFAFSMLMLVLGDNLLLTFLGWEGVGACSYLLISFWFTDEANATAGKKAFVTNRIGDWGFMVAIFLTFFTFGSVAYVDVLDTTAAGTVAQSTATFVAVMLFVGAIGKSAQFPLYLWLPDAMAGPTPVSALIHAATMVTSGVYLLTRINPVIADAADWVPTMIAWTGAGTALFAATIAVAQRDIKKVLAYSTVSQLGYMFLAVGCGAYVAAVFHMVTHAFFKA

SEQ ID NO: 80517 - protein, 278 aa, Unknown
  Bacterial polypetide isolated from the Sargasso Sea
LADALKFIFKEIIIPASANKVIFILAPIVTMTLALVAWAVIPMSENFVLADINVGILYLFAISSLGVYGIIMGGWASNSKYPFLGAIRSAAQMVSYEVSIGIIIINVLLCVGSLNLKDIVLAQTNIWFVFPLFPMFVIFFISALAETNRPPFDLPEAEAELVAGYQTEYSGMMYAMFWLGEYANILLMCALGSILFLGGWLPPLDIYPLNLVPAPIWMILKILFLFFLFAVIKAIVPRYRYDQLMRLGWKIFLPFSLLYVVLTASFLVYFDLLPTKGI

SEQ ID NO: 80518 - protein, 114 aa, Unknown
  Bacterial polypetide isolated from the Sargasso Sea
MLYEYLPILIFLALALIFASVMLTAGFIFGGSNPDDEKNSPYECGFEPFEDSRMKFDVRFYLVAILFIIFDLEIAFLFPWAVVLDHIGLEGYLAMAIFILILLVGFIYEWKKGA

SEQ ID NO: 80519 - protein, 287 aa, Unknown
  Bacterial polypetide isolated from the Sargasso Sea
MIYSHGYMEHDKGYVRFFTYLALFSSSMMGLIVSPNLLEIYVFWELVGMCSYLLVGFWYDRDGAAHAAQKAFVVNRVGDFGLLLGILGLFWATNSFDFSEIATGISQSVSDNSIPLWAALLLCFLVFLGPMAKSAQFPLHVWLPDAMEGPTPISALIHAATMVAAGIFLVARLQPLYSIFPSIQFTIALVGTITCFLGASIALTQMDLKKGLAYSTVSQLGYMMLAMGCGAPVAGIFHLVTHACFKAMLFLGSGSVIHAMEEVVGHKPILAQDMRLMGGLRKKMPYT

SEQ ID NO: 80520 - protein, 247 aa, Unknown
  Bacterial polypetide isolated from the Sargasso Sea
FWELVGMCSYLLVGFWYDRDGAAHAAQKAFVVNRVGDFGLLLGILGLFWATNSFDFNEIATGISQSISDNSIPIWAALLLCFLVFLGPMAKSAQFPLHVWLPDAMEGPTPISALIHAATMVAAGIFLVARLQPLYSIFPSIQFIIALVGTITCFLGASIALTQMDLKKGLAYSTVSQLGYMMLAMGCGAPIAGIFHLVTHACFKAMLFLGSGSVIHAMEEVVGHQPVLAQEKRLMGGLRKKMPYTST

SEQ ID NO: 80521 - protein, 251 aa, Unknown
  Bacterial polypetide isolated from the Sargasso Sea
SAQLGLHTWLPDAMEGPTPVSALIHAATMVTAGVFMVARMSPLFEFANFTNFFIIFIGSTTAIFAATIAITQNDIKRVIAYSTCSQLGYMFFAAGVGAYGASIFHLMTHGFFKALLFLSAGSVIHAMHHEQDMRKMGGLFSKIPLTGLMMWIGSLAIIGFPYFSGYYSKESILKNTFFSSSSISSYAYTVGILTALLTAFYSWRLLLMTFHGKSKVEKDLYKNMKDSPLVMTLPLILLAVGSIFSGMALTN

SEQ ID NO: 80522 - protein, 175 aa, Unknown
  Bacterial polypetide isolated from the Sargasso Sea
NMHTRDFSSIEKLLATSVKEKAEFVVEKLDDVVNWARRGSLWPMTFGLACCAVEMMQAAASRYDLDRFGIVFRASPRQSDVMIVAGTLTNKMAPALRRVYDQMAEPRYVISMGSCANGGGYYHYSYSVVRGCDRIVPVDIYVPGCPPTAEALLYGFLQLQKKIRGNKGMLLKLRK

SEQ ID NO: 80523 - protein, 162 aa, Unknown
  Bacterial polypetide isolated from the Sargasso Sea
MEKGRLGMGVDINENILSSDQDTLLNAAASDIRNKGFIIASADKIFNWARSGSLWPMSFGLACCAVEMMHAAASRYDMDRYGMLFRPSPRQADVMIVAGTLTNKMAPALRRVYDQMAEPRWVVSMGSCANGGGYYHYSYSVVRGCDRIVPVDVYVPGCPPTA

SEQ ID NO: 80524 - protein, 121 aa, Unknown
  Bacterial polypetide isolated from the Sargasso Sea
MNTFLLDYIPIIIFLGIAIGMASLIMIASWIVAKQNPDEEKLSPYECGFDAFEDTRSQFDVRFYLVAILFIIFDLEVAFLFPWAVSLGSIGLLGFWSMMVFLGVLTIGFIYEWKKGALEWE

SEQ ID NO: 80525 - protein, 83 aa, Unknown
  Bacterial polypetide isolated from the Sargasso Sea
MSLDFLNNYLTILIFLAIALLLSLGFLILNFAFSPKNPDPEKLSAYECGFEPFNDSRMEFDIRFYLVAILFIIFDLEIAFLFP

SEQ ID NO: 80526 - protein, 282 aa, Unknown
  Bacterial polypetide isolated from the Sargasso Sea
GLHTWLPRCNGKVQPPVSALIHAATMVTAGVFLVARMSPLFEYALVTNLFITFIGASTAIFAASIALTQNDIKRVIAYSTCSQLGYMFFAAGLGAYNASIFHLMTHGFFKALLFLSAGSVIHAMHHEQDMRKMGGLFKKIPFTGSMMWIGSLAIIGFPYFSGYYSKESILENAYYSSSSMATFAYIIGILTALLTAFYSWRLLFMTFHGETRSDLKTYDHAHESPLVMTIPLILLAFGSIFAGILFSNFYIGKLQYSFWGDSIILHDGKHHYLPFIQTLIVK

SEQ ID NO: 80527 - protein, 159 aa, Unknown
  Bacterial polypetide isolated from the Sargasso Sea
MEKRSFRVGLENIKRDGFVLADSDSLFDWARTGSLWPMTFGLACCSIEMMHAGASRYDLDRFGMLFRPSPRQSDVMIVAGTLVNKMAPALRKVYDQMADPKWVISMGSCANGGGYYHYSYSVVRGCDRIVPVDVYVPGCPPTAEALLYGILQLQNKIRN

SEQ ID NO: 80528 - protein, 107 aa, Unknown
  Bacterial polypetide isolated from the Sargasso Sea
MIYNFLSDYFSIILFVFIALGLSIGFIVVNYLSSPKNPDPEKLSAYECGFEAFDDSRMRFDVRFYLVAILFIIFDLEIAFLFPWAISLGNIGALGFWSMMIFIGILT

SEQ ID NO: 80529 - protein, 259 aa, Unknown
  Bacterial polypetide isolated from the Sargasso Sea
SNKIIFILAPIITMTLALISWAVIPFSEDFVLADINVGILYLFAVSSLGVYGIIMGGWASNSKYPFLGAIRSAAQMVSYEVSIGIIIINVLLCVGSLNLSDIVMAQEKIWYVIPLFPMFVIFFISALAETNRPPFDLPEAEAELVAGYQTEYSGMMYAMFWLGEYANILLMCALGSILFLGGWLSPINIFPFNVIPSPIWLILKILLLFILFALVKAIVPRYRYDQLMRLGWKVFLPLSLTWVVLTAGYLMYFDLLPGN

SEQ ID NO: 80530 - protein, 121 aa, Unknown
  Bacterial polypetide isolated from the Sargasso Sea
MTSLYIEYLPIAIFIAFAGGLSVMFALSSWLIGKQLPDSEKLSPYECGFEPFEDARIQFDVRFYLVAILFIIFDLEVAFLFPWAVALSDIGLFGFLSMMIFLFLLTIGFIYEWKKGALEWD

SEQ ID NO: 80531 - protein, 287 aa, Unknown
  Bacterial polypetide isolated from the Sargasso Sea
PTPISALIHAATMVTAGIFMIARLSPLYDVSLYVLDIILYIGLATAFFMGLVALVQNDIKRIIAYSTISQLGYMTVALGASFYSFAIFHLLTHAFFKALLFLCAGSIILKCHHEQDITKMGGLRKAMPYTYYTFLISALALIGFPLTSGFYSKDLIIDIFKYNPNPFVYYVLVLGIFITTLYTAKIFFNVFFGENKLNIKEDKKLEHHDVILIPLVSLAVPSLFIGLALFDGVLFSGFFSQPLTDNLRLNDMYNNFIFHSLSFTWNSIFSFNFLSLLLGLFFSYFIF

SEQ ID NO: 80532 - protein, 300 aa, Unknown
  Bacterial polypetide isolated from the Sargasso Sea
SLLLLGGAVGKSAQLPLQTWLPDAMAGPTPISALIHAATMVTAGVYLIARTHILFELAPTVQLLVAWIGLITLLMAGFTALTQSDIKRILAFSTVSQIGYMFLGLGVGAWSAAIFHLMTHAFFKALLFLASGTVILSVHHEQSIFKMGGLRKALPVSFASFLIGSLALTAFPYTSGYFSKDEILLAAFELEGVGTYLWLGGVIGAFFTGIYTFRLFFIVFFGENKGHLPEKEVGGWHMNGPLILLMILSLVGGFITVPVEAVFSHGAAHGEHHVSALVHGFMITMPLVGIFISYMFSMQR

SEQ ID NO: 80533 - protein, 312 aa, Unknown
  Bacterial polypetide isolated from the Sargasso Sea
LLIGFWYHKPSANNAAIKAFLVNRVGDFGYALGIAGVFFIFGSIEFDVIFTNAENFKDHSIPFLGLSFSTIDLLCFLLFIGAMGKSAQLGLHTWLPDAMEGPTPVSALIHAATMVTAGVFLVARMSPLFEYATVTNLFITFIGAATAIFAATIALTQNDIKRVIAYSTCSQLGYMFFAAGLGAYNASIFHLMTHGFFKALLFLSAGSVIHAMHHEQDMRKMGGLFKKIPFTGTMMWIGSLAIIGFPYFSGYYSKESILENAYYSDSSMATFAYTIGILTALLTAFYSWRLLFMTFHGETRSDKKTFDHAHES

SEQ ID NO: 80534 - protein, 108 aa, Unknown
  Bacterial polypetide isolated from the Sargasso Sea
FLIIAFGLSVAFVVLNFLLSPKKPDPEKLSAYECGFEPFQDSRMEFDVRFYLVAILFIIFDLEIAFLFPWAISLGNIGLLGFSSMMIFLFILTVGFIYEWKKGALDWE

SEQ ID NO: 80535 - protein, 122 aa, Unknown
  Bacterial polypetide isolated from the Sargasso Sea
MLAEFLKDYLSIILFLIIALGLSMAFVAINYLASPKKPDPEKLSAYECGFEPFNDSRMEFDVRFYLVAILFIIFDLEIAFLFPWAISLGQIGLFGYISMMIFLFILTVGFIYEWKKGALDWE

SEQ ID NO: 80536 - protein, 107 aa, Unknown
  Bacterial polypetide isolated from the Sargasso Sea
MTSLYLEYLPIAIFIAFAGGLSVLFALSSWIIGKQLPDSEKLSPYECGFEPFEDARIQFDVRFYLVAILFIIFDLEVAFLFPWAVALSDIGLFGFISMMIFLFLLTI

SEQ ID NO: 80537 - protein, 202 aa, Unknown
  Bacterial polypetide isolated from the Sargasso Sea
GWASNSKYPFLGCIRSAAQMVSYEVSIGIIIINVLLCVGSLNLKDIVLAQEKVWFVVPLFPMFVIFFISALAETNRPPFDLPEAEAELVAGYQTEYSGMMYAMFWLGEYANILLLCALGSILFLGGWLSPIDIYPFNEIPGVFWMIFKILILFFMFSIIKAIVPRYRYDQLMRLGWKVFLPFSLLYVILTASFLVYFDLLPK

SEQ ID NO: 80538 - protein, 95 aa, Unknown
  Bacterial polypetide isolated from the Sargasso Sea
MLSDFLKDYLPIIIFLIIALGLSCAFVVINFILSPKKPDPEKLSAYECGFEPFEDSRLEFDVRFYLVAILFIIFDLEIAFLFPWAISLGKIGLLG

SEQ ID NO: 80539 - protein, 122 aa, Unknown
  Bacterial polypetide isolated from the Sargasso Sea
MLADFLKDYLAIIIFLIVALGLSVAFVAINYLAAPKNPDPEKLSPYECGFEPFNDSRMEFDVRFYLVAILFIIFDLEIAFLFPWAISLGKIGLFGFISMMIFLFILTVGFIYEWKKGALDWE

SEQ ID NO: 80540 - protein, 293 aa, Unknown
  Bacterial polypetide isolated from the Sargasso Sea
PVAVLLMTCVGAAAVLSYAILAGQLAGEPAVEHLFVWASAGTFILPMGYVVDPLAAVMLSLVTTIALLVMVYSHGYMAHDKGYVRFFTYLALFSSSMLGLIISPNLLEIYVFWELVGMCSYLLVGFWYDRDGAAHAAQKAFVVNRVGDFGLLLGILGLFWATGSFDFQGIADGLQQGLANGSVAPWAALLLCLLVFLGPMAKSAQFPLHVWLPDAMEGPTPISALIHAATMVAAGVFLVARLDPLFSQFPVVQTVIAVVGTITCFLGASIALTQMDLKKGLAYSTVSQLGYMM

SEQ ID NO: 80541 - protein, 303 aa, Unknown
  Bacterial polypetide isolated from the Sargasso Sea
MLCFIYLLTRFFKALLFLGSGSVIHAFKDEQNINYMGGVWKKLPYTYSLMIIGTLALTGFPFLSGFYSKDAIIEFAYLRGNTTGYYAAGIGIFTAFLTSIYSWRLIFKTFHGEYNNKKIKIDETHESPIVMLIPLVLLSLGALFAGFLFKELFIGYDEPNNFWRNSIFFLKPLSADHPPLWFLLLTPILVILSIPLAYYLFLKNKNLTEQIANINKPLYHFLLNKWYFDELYNVLFVKSSKKFGLFLWKFFDLKIIDGFGPDGISSMIKKFSVKANKFQSGYIYQYAFVMLLGFSALLTFLIV

SEQ ID NO: 80542 - protein, 282 aa, Unknown
  Bacterial polypetide isolated from the Sargasso Sea
VDLICILLFIGAMGKSAQIFLHTWLPDAMEGPTPVSALIHAATMVTAGVFLVVRCSPIYEYSELALNIVTIVGMSTAFFAASVALVQTDIKKIIAYSTCSQLGYMFFAAGVGAYNVAMFHLFTHAFFKALLFLGSGSVIHAFKDEQNINNMGGVWRKLPYTYALMIIGTLALTGFPLLSGFYSKDAIIEFAYLSGSTTGFYAAGIGIITAFLTSIYSWRLMFKTFHGQYNNRELNIEETHESPLVMLIPLIILSIGAIFAGFIFKDLFIGYEGIDNFWNKSI

SEQ ID NO: 80543 - protein, 265 aa, Unknown
  Bacterial polypetide isolated from the Sargasso Sea
MLPLLGFLILLITGHLLGEPRAGWVATAFAGASFIATLIVLVGLLGKDSHAGGRSYEFVLFEWLPAGSLKVEAGFLLDPLSITMALFVTGVGALIHLYSIGYMHGDEKYSKFFLYLNLFLFSMLMLVFGNNLVVTFLGWEGVGACSYFLISFWHRRESAATAGKKAFVTNRVGDWGFMIATFAIWSALGTVTYTEIANSPAMSAATGTAVSLLLFVAAAGKSAQLPLYVWLPDAMEGPTPVSAMVHAATMVTSGVYLLVRMNNVL

SEQ ID NO: 80544 - protein, 119 aa, Unknown
  Bacterial polypetide isolated from the Sargasso Sea
MYNLDYIFILIFILIGAGMAIAMYLLSKILSPSSPDSEKLSAYECGFEAFDDARSKFDVKFYLVSILFIIFDLEIAFLFPWAVSLSNIGALGFYSMMFFLFILTVGFIYEWKNGALDWE

SEQ ID NO: 80545 - protein, 107 aa, Unknown
  Bacterial polypetide isolated from the Sargasso Sea
FIIGIGIAVAMTATSFIIGPNRPDKEKLSAYECGFEAFDDARGRFDVRFYLVAILFIIFDLEVAFLFPWAISLGKIGIFGFGSMIFFLVVLTIGFIYEWKKGALEWE

SEQ ID NO: 80546 - protein, 122 aa, Unknown
  Bacterial polypetide isolated from the Sargasso Sea
MLAEFLKDYLPIILFLIIALGISLAFVAINYIAAPSKPDPEKLSAYECGFEPFNDSRMEFDVRFYLVAILFIIFDLEIAFLFPWAISLGEIGLYGFCSMMLFLFILTVGFVYEWKKGALDWE

SEQ ID NO: 80547 - protein, 293 aa, Unknown
  Bacterial polypetide isolated from the Sargasso Sea
SIEFDVIFNDAGLLSKTNISFLGYTLPALEVAGILLFIGAMGKSAQLGLHTWLPDAMEGPTPVSALIHAATMVTAGVFMVCRLSPMLEFAPVSLAVITIIGGTTAIFAATVGMTQFDIKRVIAYSTCSQLGYMFFAAGVSAYPAAMFHLTTHAFFKALLFLGAGSVIHALSDEQDLRRMGGIWKKIPVTYTMMWIGSLALAGFPFFAGFYSKDMILEAAYAAHSGVGNYAFWMGCAAAFLTAFYSWRLLIMAFHGKPRASAEAMAHIHESPQGDDHPAVRSGAWRDFLRLAWL

SEQ ID NO: 80548 - protein, 122 aa, Unknown
  Bacterial polypetide isolated from the Sargasso Sea
MLAEFLKDYLPIILFLIIALGLSLAFVAINYIAAPNKPDPEKLSAYECGFEPFNDSRMEFDVRFYLVAILFIIFDLEIAFLFPWAISLGEIGLYGFCSMMLFLFILTVGFIYEWKKGALDWE

SEQ ID NO: 80549 - protein, 290 aa, Unknown
  Bacterial polypetide isolated from the Sargasso Sea
KSAQIFLHTWLPDAMEGPTPVSALIHAATMVTAGVFLTCRFSPLFEMAPLVSSFIVIIGSFTALFAASVALVQTDIKRIIAYSTCSQLGYMFVAAGAGFYHAAIFHLFTHAFFKALLFLGAGSVIHSMHHEQDIRRFGGLRSKLPWTFLGMLVGTLAITGAGIPLSYYLFGFNFGLSGFVSKDIIIEGVFASKNAGTIFAFYVLVFSAFLTSFYSWRLIFLTFFGQFRGSKDDYEHSHEPSWNMLVPLVFLSLGSIFFGSLFEYSFTNEKYQIFSDSIILSVNNTIMHDF

SEQ ID NO: 80550 - protein, 243 aa, Unknown
  Bacterial polypetide isolated from the Sargasso Sea
TWLPDAMEGPTPVSALIHAATMVTAGVFLVARMSPLYEFATFTNLFITFIGAATAIFAASIALTQNDIKRVIAYSTCSQLGYMFFAAGVGAYNASIFHLTTHAFFKALLFLSAGSVIHAMHHEQDMRKMGGLFKKIPFTATMMWIGSLAIIGFPYLSGYYSKESILENAYYTSNGIAYFAYIVGILTALLTAFYSWRLLFLTFHGENRSEIKTFEHAHESPYVMTIPFIILAIGFSFSGIFFA

SEQ ID NO: 80551 - protein, 86 aa, Unknown
  Bacterial polypetide isolated from the Sargasso Sea
MDGLLREYLPILIFLGLAIVLGIFLMLSAMIIAVRNPDSEKTSAYECGFNAFDDARMKFDVRFYLVAILFIIFDLEVAFLFPWAAG

SEQ ID NO: 80552 - protein, 122 aa, Unknown
  Bacterial polypetide isolated from the Sargasso Sea
MLAEFLKDYLSIILFLIVALGLSVIFVAINYLASPKKPDPEKLSAYECGFEPFNDSRMEFDVRFYLVAILFIIFDLEIAFLFPWAISLGQIGLFGYISMMIFLFILTVGFIYEWKKGALDWE

SEQ ID NO: 80553 - protein, 121 aa, Unknown
  Bacterial polypetide isolated from the Sargasso Sea
MNYALSEYMPILIFIFVALAISCLFVLANYLAAVSNPDSEKNSAYECGFEQFGDSRMKFDVRFYLVTLLFIIFDLEVAFLFPWAVTFGTLGLFGFISMMIFLGVLTIGFIYEWKKGALEWQ

SEQ ID NO: 80554 - protein, 85 aa, Unknown
  Bacterial polypetide isolated from the Sargasso Sea
MSADLLKDYLPIILFLIVALGLSCAFIVINFILSPKHPDPEKLSAYECGFEPFEDSRMEFDVRFYLVAILFIIFDLEIAFLFPWA

SEQ ID NO: 80555 - protein, 122 aa, Unknown
  Bacterial polypetide isolated from the Sargasso Sea
MLADFLKDYLSIIIFTFCALSLSIGFIALNYIFAPKNPDPEKLSAYECGFEAFGDSRMEFDVRFYLVAILFIIFDLEIAFLFPWAISLGSIGSLGFWSMMIFLFVLTIGFIYEWKKGALDGD

SEQ ID NO: 80556 - protein, 104 aa, Unknown
  Bacterial polypetide isolated from the Sargasso Sea
MNLEEKKKQIPDEFKQLAQDFSDNGFITTSLDNLVTWARTGSLHWMTFGLACCAVEMMQTSMPRYDLERFGAAPRASPRQSDVMIVAGTLTNKMAPALRKVYDQ

SEQ ID NO: 80557 - protein, 122 aa, Unknown
  Bacterial polypetide isolated from the Sargasso Sea
MTADFLKDYLPIILFLILALGLSCAFIVINFILSPKNPDPEKLSAYECGFEPFQDSRMEFDVRFYLVAILFIIFDLEIAFLFPWAISLGNIGFLGFISMMIFLFILTVGFIYEWKKGALDWE

SEQ ID NO: 80558 - protein, 122 aa, Unknown
  Bacterial polypetide isolated from the Sargasso Sea
MLADFLKDYFSIIIFLIIALGMSCVFILLNYLLSPKNPDPEKLSAYECGFEPFNDSRMEFDVRFYLVAILFIIFDLEIAFLFPWAISLGKIGFLGFISMMIFLFILTVGFIYEWKKGALDWE

SEQ ID NO: 80559 - protein, 118 aa, Unknown
  Bacterial polypetide isolated from the Sargasso Sea
MLLEYLPIFIFLVFALIFATIMLGIGFTFGANNPDSEKNSPYECGFEAFEDSRMKFDIRYYLVAILFIIFDLEIAFLFPWAIVIHEVGHIGLISMAIFLIILIVGFIYEWKKGALEWD

SEQ ID NO: 80560 - protein, 112 aa, Unknown
  Bacterial polypetide isolated from the Sargasso Sea
MLAEFLKDYLPIILFLIIALGVSLAFVAINYIAAPKNPDPEKLSAYECGFEPFNDSRMEFDVRFYLVAILFIIFDLEIAFLFPWAISLGQIGLFGFYSMMLFLFILTVGFIY

SEQ ID NO: 80561 - protein, 116 aa, Unknown
  Bacterial polypetide isolated from the Sargasso Sea
MEGPTPVSALIHAATMVTAGIFLLIRCSPLIEYSGLTLTAVTIFGSLTAFFAATVGLVQNDIKKVIAYSTCSQLGYMCFACGISNYNTSLFHLVNHGFFKALLFLSAGCVIHAMAD

SEQ ID NO: 80562 - protein, 277 aa, Unknown
  Bacterial polypetide isolated from the Sargasso Sea
MSQIWLVPAFPLLGFLLNGILGKRFGTRFVSIVGPLAIGLAFTQSVVLFFQMLFTDGNILSEHLYTWIKSGNFEVGINFQVDQLSGLYLLVITGVGFLIHVYSLGYMKGETGYYRFFAYLNLFVFFMLILVLGDGFLLMFVGWEGVGLCSYLLIGYYFEKDTAANAAKKAFLFNRVGDFGVLSAVLLIFLTFGSIDFNTVNVEAAEKLEHGGILVTIITLLLFLGATGKSAQIPLFVWLPDAMEGPTPVSALIHAATMVTAGLYMVARLSHLFILAP

SEQ ID NO: 80563 - protein, 159 aa, Unknown
  Bacterial polypetide isolated from the Sargasso Sea
MSIEGVLKEGFVTTTADKLINWTRTGSLWPMTFGLACCAVEMMHAGAARYDLDRFGVVFRPSPRQSDVMIVAGTLCNKMAPALRKVYDQMAEPRWVISMGSCANGGGYYHYSYSVVRGCDRIVPVDVYVPGCPPTAEALVYGVIQLQAKIRRTNTIARQ

SEQ ID NO: 80564 - protein, 356 aa, Unknown
  Bacterial polypetide isolated from the Sargasso Sea
LALSVITLVGMTTAFFAATVALVQTDIKKIIAYSTCSQLGYMFFAAGVGAYNVAMFHLFTHAFFKALLFLGSGSVIHSFKDEQDVTKMGGVFKKLPYTYALMVVGTLALTGFPFLSGFYSKDAIIEFAYISETKFGIYAASIGVLTAVMTSIYSWRLIFKTFHGDYKNKDLSIDTMHESPLSMMLPLVLLAVGAVFSGFLFKELFIGHDTMYNFWGESIKFLEPLGKEHPPTWFLFLTPTLVVLTIPLSYYLFVKNTKIVNEIVSINMPVYIFLQKKWYFDELYDQIFIKPSKSFGIFLWKKIDGLIIDKFGPDGISNLIKLFSFKAVKFQSGYIYQYAFIMLLGFSILLTLLIVK

SEQ ID NO: 80565 - protein, 351 aa, Unknown
  Bacterial polypetide isolated from the Sargasso Sea
GFWYHKNSANKAAIKAFIVNRVGDFGLAIGIFIIYKYLGTLNYEEVFDRLITLNDKTISILGIEGSIISFIAFFLFIGAMGKSAQIFLHTWLPDAMEGPTPVSALIHAATMVTAGVFLVVKCSPIFENSIFVLNLILVIGASTALFAATIALVQNDIKKVIAYSTCSQLGYMFVATGLGAYHIAMFHLFTHAFFKALLFLGAGSVIHSMKNEQDMRRMGGLWNKIPITYVFMIIGTLAITGFPFLSGFFSKDAIIEATYYSQSKFAGYAMVLCIFTALLTAMYSWRLIIKTFHGNFNNIDLDLKDVKDSGLIIILPLLLLSIGAVSSGFAFKELLIGIDFIKFWDNSIYFK

SEQ ID NO: 80566 - protein, 335 aa, Unknown
  Bacterial polypetide isolated from the Sargasso Sea
MIEYLQILGQEIYKIIFLLVPILVSVAMIVWLDRRVWGLVQKRRGPNVVGPFGLFQTLADALKYIFKEIIIPASANKVVFILAPIVTMTLALVAWAVIPMSENLVLADINVGILYLFAVSSLGVYGIIMGGWASNSKYPFLGAIRSAAQMVSYEVSIGIIIINVLLCVGSLNLNEIVIAQKELWYVIPLFPMFVIFFISALAETNRPPFDLPEAEAELVAGYQTEYSGMMYAMFWLGEYANILLMCAMGSILFLGGWLPIMDVYPLNVIPAPLWMILKILFLFLLFALIKAIVPRYRYDQLMRLGWKIFLPFSLIHLVLTASFLFFFDKLPKVSI

SEQ ID NO: 80567 - protein, 333 aa, Unknown
  Bacterial polypetide isolated from the Sargasso Sea
MQEYFYILLSEIYKILFLLVPVLVSVAMIVWLDRRVWAFVQKRRGPNVVGPFGLFQSLADALKYLFKEIIIPASSNKIIFILAPIVTMTLALVAWAVIPFSEDFVLANINVGILYIFAVSSLGVYGIIMGGWASNSKYPFLGSIRSAAQMVSYEVSIGIIIINVLLCVGSLNLTDIVLAQEKIWFIVPLFPMFIIFFISALAETNRPPFDLPEAEAELVAGYQTEYSGMMYAMFWLGEYANILLMCSLGSILFLGGWLSPINIYPFDLIPSPIWLIFKILLLFILFSLVKAIVPRYRYDQLMRLGWKIFLPFSLFWVVLTASYLLYFNLLPVI

SEQ ID NO: 80568 - protein, 335 aa, Unknown
  Bacterial polypetide isolated from the Sargasso Sea
MIEYLQILAQEVYKIIFLLVPILVSVAMIVWLDRRVWGLVQKRRGPNVVGPFGLFQTLADALKYIFKEIIIPASANKVVFILAPIVTMTLALVAWAVIPMSEDLVLANINVGILYLFAISSLGVYGIIMGGWASNSKYPFLGAIRSAAQMVSYEVSIGIIIINVLLCVGSLNLNDIVITQKELWYVIPLFPMFVIFFISSLAETNRPPFDLPEAEAELVAGYQTEYSGMMYAMFWLGEYANILLMCAMGSILFLGGWLPLMDIYPLNIIPAPIWMILKILFLFLLFALIKAIVPRYRYDQLMRLGWKIFLPFSLIYLVLTASFLFYFDKLPKVNI

SEQ ID NO: 80569 - protein, 329 aa, Unknown
  Bacterial polypetide isolated from the Sargasso Sea
MSIVFQEVYKILFLLVPVLVSVAMIVWLDRRVWAFVQKRQGPNVVGPFGLLQSLADALKYIFKEIIIPSSSNKVIFILAPIVTMTLALIAWAVIPFSATQVLADINVGILYLFAVSSLGVYGIIMGGWASNSKYPFLGAIRSAAQMVSYEVSIGVIIINVLLCVGSLNLNDIVIAQQNMWFVIPLFPMFVIFFISALAETNRPPFDLPEAEAELVAGYQTEYSGMMYAMFWLGEYANILLMCAMGAILFLGGWMSPIDVYPFTLVPGAIWLILKILLLFILFALVKAIVPRYRYDQLMRLGWKVFLPLSLIWVVLTASYLFYFNLLPVN

SEQ ID NO: 80570 - protein, 328 aa, Unknown
  Bacterial polypetide isolated from the Sargasso Sea
MGNEVYKILFLLLPILVSVAMIVWLDRRVWGLVQKRKGPNVVGPFGLLQTLADALKYIFKEIIIPASANKTVFILAPIVTMTLALVAWAVIPMSEELVLSDINVGILYLFAVSSLGVYGIIMGGWASNSKYPFLGAIRSAAQMVSYEVSIGIIIINVLLCVGSLNLKDIVLAQKELWYVIPLFPMFVIFFISALAETNRPPFDLPEAEAELVAGYQTEYSGMMYAMFWLGEYANILLMCAMGSILFLGGWLPIIDIYPINVIPAPVWMILKILFLFFLFALIKAIVPRYRYDQLMRLGWKIFLPFSLVYLVLTASFLFYFDKLPKGNF

SEQ ID NO: 80571 - protein, 268 aa, Unknown
  Bacterial polypetide isolated from the Sargasso Sea
KENIVPANSNKIVFLLAPIITMVLSLAGWAVIPFAPNLVIADINVGIMYLFAVSSLGVYGIIMAGWASNSQYPFLGALRSAAQMVSYEVSIGFVIITVLLCVGSLNLTKIVEAQETVWFAIPLLPMFVVFFISALAETNRLPFDLPEDESTLVAGFFTEYSSASFVLFFLGEYASMILMSSMTVILFMGGWLPPFDIYPLNAIPGVIWFVIKIIFILFLFIWVRGTFPRYRYDQLMRLGWKIFLPLSLLWVVLTAGFLIAFDMVPNSL

SEQ ID NO: 80572 - protein, 332 aa, Unknown
  Bacterial polypetide isolated from the Sargasso Sea
MEYLNIVFQEVYKILFLLVPVLVSVAMVVWLDRRVWAFVQKRQGPNVVGPFGLLQSLADALKYIFKEIIIPASSNKVIFILAPIVTMTLALIAWAVIPFSATQVLADINVGILYLFAVSSLGVYGIIMGGWASNSKYPFLGAIRSAAQMVSYEVSIGVIIINVLLCVGSLNLNDIVIAQQNMWFVIPLFPMFVIFFISALAETNRPPFDLPEAEAELVAGYQTEYSGMMYAMFWLGEYANILLMCAMGAILFLGGWMSPIDVYPFTLVPGAIWLIFKILLLFVLFALVKAIVPRYRYDQLMRLGWKVFLPLSLIWVVLTASYLFYFNLLPVN

SEQ ID NO: 80573 - protein, 417 aa, Unknown
  Bacterial polypetide isolated from the Sargasso Sea
MEILILGVLLIPFLTSLLLKVAGKYMNELLTNFVTLNASLLSVAVSFFLFGYIFLDKFKPLKFELFEWFPDPQIVFEFYLDGLSGVMMVLISTLSLIIQLFSTSYMSKDEKYTKYFEYFNFFVFSMLLLVMSGNFLVMFFGWELVGLSSYLLISFWSEKKSASKAGNKAFILNRIGDFGFLIGLMMILNYFETFNFLSIFENTLKTRPENLDLMILFLLLGAFGKSAQFPLFSWLPDAMEGPTPASALIHAATMVTAGVFMLVRISPLLQFSEIGSITIISLGLLTALISAFAAINQDDIKKVLAYSTISQLGFMFIAIGAGAYVAAIFHLVTHAFFKALLFLGAGAVIHEMHHEQNIYKMGGLRKKMPVTAAMMGIGTLAISGIPPLAGFWSKDEILASVFSRGGIYYGLWALSLL

SEQ ID NO: 80574 - protein, 427 aa, Unknown
  Bacterial polypetide isolated from the Sargasso Sea
QFPLHVWLPDAMEGPTPISALIHAATMVAAGVFLVARLDPLYSQFPIVQTVIAVVGTITCFLGASIALTQMDLKKGLAYSTVSQLGYMMLAMGCGAPVAGLFHLVTHAFFKAMLFLGSGSVIHAMEEVVGHEPVLAQDMRLMGGLRQKMPVTAITFFIGCIAISGIPPLAGFWSKDEILGQAFNSFPVLWLVGFLTAGMTAFYMFRLYFLTFEGEFRGNDTAMQAQLLTAAGKDPGDHHAHGGSVHESAWPMAAPLAVLAVPSVLVGLLGTPWNSRFAGLLNPEEAMEMAEHFSWNEFLPLAGASVAISVVGITLAVLAYALHRIDLGVLVAGRFPSINAFLTNKWYLDAINEKLFVRGSRKLAREVLEVDAKVVDGVVNLTGLLTLGSGEGLKYLETGRAQFYALIVFAGVIGLVVLFGVIGGPTA

SEQ ID NO: 80575 - protein, 332 aa, Unknown
  Bacterial polypetide isolated from the Sargasso Sea
MEYVNLVFEEVYKILFLLVPVLVSVAMIVWLDRRVWAFVQKRQGPNVVGPFGLLQSLADALKYIFKEIIIPASSNKIIFILAPIITMTLALIAWAVIPFGEDQVLANINVGILYIFAISSLGVYGIIMGGWASNSKYPFLGSIRSAAQMVSYEVSIGIIIINVLLCVGSLNLSDIVLAQQNIWFIIPLFPMFVIFFISALAETNRPPFDLPEAEAELVAGYQTEYSGMMYAMFWLGEYANILLMCALGSILFLGGWLSPIDLYPFNLIPGAIWLILKILLLFVLFALVKAVVPRYRYDQLMRLGWKIFLPLSLTYVVLTASYLFYFNLLPTI

SEQ ID NO: 80576 - protein, 164 aa, Unknown
  Bacterial polypetide isolated from the Sargasso Sea
MSKIDYTRAAKYFLLMDIWTGFKLGFKYFFSRKTTLNYPHEKGELSPRFRGEHALRRYPNGEERCIACKLCEAICPAQAITIDAEPRDDGSRRTTRYDIDMTKCIYCGFCQEACPVDAIVEGPNFEFSTETREELFYDKEKLLANGDRWESEIAKNLEMDAPYR

SEQ ID NO: 80577 - protein, 345 aa, Unknown
  Bacterial polypetide isolated from the Sargasso Sea
MSQIWLVPAFPLLGFILNGILGKLFGTRFVSIVGPLAIGLAFAQSVVLFFQMLNTDGNVLSEHLYTWIKSGNFEAGINFQVDQLSGLFLLIITGIGFLIHVYSLGYMKGEPGYYRFFAYLNLFVFFMLILVLGDGFLLMFVGWEGVGLCSYLLIGYYFEKDSAGAAAKKAFLFNRIGDFGVLSAVLLIFLNFGSIDFNTVNSEATARLEHGGILVTIITLLLFLGATGKSAQIPLFVWLPDAMEGPTPVSALIHAATMVTAGLYMVARLSHLFVLAPLTMNIIAVVGALTALLAASIAITQTDIKRVLAYSTVSQLGYMFLAMGVGAFTTGVFHVMTHAFFKALL

SEQ ID NO: 80578 - protein, 318 aa, Unknown
  Bacterial polypetide isolated from the Sargasso Sea
MLVPILVSVAMIVWLDRRVWGLVQKRRGPNVVGPFGLFQTIADALKYIFKEIIIPASANKVVFILAPIITMTLALVAWAVIPMSEELVLSDINVGILYLFAVSSLGVYGIIMGGWASNSKYPFLGAIRSAAQMVSYEVSIGIIIINVLLCVGSLNLNDIVIAQKNLWYVIPLFPMFVIFFISALAETNRPPFDLPEAEAELVAGYQTEYSGMMYAMFWLGEYANILLMCAMGSILFLGGWLPIMDVYPLNMIPAPIWMISKILFLFLLFALIKAIVPRYRYDQLMRLGWKIFLPFSLIYLVFTASFLFYFDKLPKVNF

SEQ ID NO: 80579 - protein, 122 aa, Unknown; identical to SEQ ID NO: 80354
  Bacterial polypetide isolated from the Sargasso Sea

SEQ ID NO: 80580 - protein, 122 aa, Unknown; identical to SEQ ID NO: 80354
  Bacterial polypetide isolated from the Sargasso Sea

SEQ ID NO: 80581 - protein, 412 aa, Unknown
  Bacterial polypetide isolated from the Sargasso Sea
MEYILLVVVFIPLMVSIFLNSISTLLNERLTTFITINGALLSFTVSLFMFAVLLLDKFKPISLKLYTWFPHPEIRFEFLLDGLSGTMMLLVTGLGLVIQIFSTSYMSGDPRYVKYFVYFNFFVFSMLLLVMSANFLVMFFGWELVGLSSYLLISFWSEKKEAAKAGNKAFVLNRIGDFGFLIALMMILNTYDTFSFKTVFATTLTNQPQNLDLIVVFLMIGAFGKSAQFPLFSWLPDAMEGPTPASALIHAATMVTAGVFMLVRISPLLQFSELSSILIISIGLLTALISAFAAINQNDIKKVLAYSTISQLGFMFIAIGAGAYVAAIFHLVTHAFFKALLFLGAGAVIHEMHHEQNIQKMGGLKKKMPLTAAMMGIGTLAISGIPPLAGFWSKDEILASTFANGGIYYGFW

SEQ ID NO: 80582 - protein, 295 aa, Unknown
  Bacterial polypetide isolated from the Sargasso Sea
MFKKTRSKWVVGPFGLLQSLADALKYIFKEIIIPASSNKVIFILAPIITMTLALIAWAVIPFGVEQVLADINVGILYIFAVSSLGVYGIIMGGWASNSKYPFLGAIRSAAQMVSYEVSIGIIIINVLLCVGSLNLNDIVVAQKEMWFVIPLFPMFVIFFISALAETNRPPFDLPEAEAELVAGYQTEYSGMMYAMFWLGEYANILLMCALGSILFLGGWLSPIDLYPFNLIPGALWLIFKILFLFILFALVKAIVPRYRYDQLMRLGWKIFLPLSLTYVVLTASYLFYFNLLPTI

SEQ ID NO: 80583 - protein, 673 aa, Unknown
  Bacterial polypetide isolated from the Sargasso Sea
MPQASEIAWLIPVFPLIGAVLSGLGLISINKKINNSREIVSVGLISFVGISAVISYKALIEQVNGYQSVEKLFVWANAGDFTIPMGFVLDPLGSVMLALVTTITLLVMIYSHGYMAHDKGYVRFFTYLALFSSSMMGLIVSPNLLEIYVFWELVGMCSYLLVGFWYDRDGAAHAAQKAFVVNRVGDFGLLLGILGLFWATNSFDFNEIATGISQSISDHSIPIWAALLLCFLVFLGPMAKSAQFPLHVWLPDAMEGPTPISALIHAATMVAAGIFLVARLQPLYSIFPSIQFIIALVGTITCFLGASIALTQMDLKKGLAYSTVSQLGYMMLAMGCGAPVAGIFHLVTHACFKAMLFLGSGSVIHAMEEVVGHQPVLAQDMRLMGGLRKKMPYTSTTFLIGCVAISGIPPLAGFWSKDEILGNAFISFPAFWFVGLLTAGMTAFYMFRLYFLTFEGDFRGENKELQKQLLIASQTTLDEENEEEHEEHGSIHESPWSMTFPLVFLAVPSVIIGFMGFPWDSKIANLLDPEEAETAAKAFELKEFLPLALASVVIASAGIIIAYQAYFVKKINLSVLFAEKFPSINRFLSNKWYLDDINEKLFVKGSRKLAKEVLEVDSKVVDGVVNLTGLVTLGSGEGLKYFETGRAQFYALIVFGGVILLVAIFGFQSPQVS

SEQ ID NO: 80584 - protein, 438 aa, Unknown
  Bacterial polypetide isolated from the Sargasso Sea
KIPEIVDKELFFIGININAVDLICLLLFIGAMGKSAQIFLHTWLPDAMEGPTPVSALIHAATMVTAGVFLVVRCSPIYEYSELALSIITIVGMVTAFFAASVALVQTDIKKIIAYSTCSQLGYMFFAAGVGAYSVAMFHLFTHAFFKALLFLGSGSVIHSFKDEQDINQMGGVWKKLPYTYVLMIIGTLALTGFPFLSGFYSKDAIIEFAFLRGNSLGFYASSIGVFTALLTSIYSWRLIFKTFHGSYNNSKLKIDTMHESPKTMLVPLIILALGAIFAGILFKDLFIGHETSYEFWSSSIKFLEPLSKEHPPIWFIYLTPLLVIISIPLAYYLFIKNKKIVDSIVKSNKPFYLFLINKWYFDELYDFIFIKPSKKIGHFLWKKIDVSLIDKFGPDGISQLIKYFSLKAVKFQSGYIYQYAFVMLIGFSILLTLLLVK

SEQ ID NO: 80585 - protein, 122 aa, Unknown
  Bacterial polypetide isolated from the Sargasso Sea
MLAEFLKDYFTIILFLIIALGLSCGFIILNYFFSPNNPDPEKLSAYECGFDAFDDSRMQFDVRFYLVAILFIIFDLEIAFLFPWAISLGNIGLYGFVSMMIFLMILTVGFIYEWKKGALDWE

SEQ ID NO: 80586 - protein, 503 aa, Unknown
  Bacterial polypetide isolated from the Sargasso Sea
MLGDFTIPMGFVLDPLGSVMLALVTTITLLVMIYSHGYMAHDKGYVRFFTYLALFSSSMMGLIISPNLLEIYVFWELVGMCSYLLVGFWYDRDGAAHAAQKAFVVNRVGDFGLLLGILGLFWATNSFDFNEIATVISQSVSDNSLPIWAALILCFLVFLGPMAKSAQFPLHVWLPDAMEGPTPISALIHAATMVAAGIFLVARLQPLYSIFPSIQFIIALVGTITCFLGASIALTQMDLKKGLAYSTVSQLGYMMLAMGCGAPIAGIFHLVTHACFKAMLFLGSGSVIHAMEEVVGHQPVLAQDMRLMGGLRKKMPYTSVTFLIGCVAISGIPPLAGFWSKDEILGNAFISFPVFWFVGLLTAGMTAFYMFRLYFLTFEGDFRGDNKELQKELLMASKVNLDEENDEEHEEHEEHGYIHESPWSMTFPLVFLAVPSVIIGFMGLPWDSKFANLLDPEEADIAAKAFELKEFLPLAIASVVIASTGIIIAYQAYFVKKINLSIL

SEQ ID NO: 80587 - protein, 121 aa, Unknown
  Bacterial polypetide isolated from the Sargasso Sea
MHSILNDYLPILIFMSLAAFVVMALTLPPILFAPKNPDKEKLSQYECGFEPFDDARTKFDIRFYLVAILFIIFDLEVAFLFPWAVVFGDIGIFGFVSMMVFLGVLTIGFIYEWKKGALEWD

SEQ ID NO: 80588 - protein, 122 aa, Unknown
  Bacterial polypetide isolated from the Sargasso Sea
MLADFLKDYFSIIIFLIIAFGLSCVFILLNFLLSPKNPDPEKLSSYECGFEPFNDSRMEFDVRFYLVAILFIIFDLEIAFLFPWAISLGNIGFLGFISMMIFLFILTVGFIYEWKKGALDWE

SEQ ID NO: 80589 - protein, 439 aa, Unknown
  Bacterial polypetide isolated from the Sargasso Sea
MQVILDNAYLYKEKSFYFIGFNLNIIDTLCFLLFIGAMGKSAQLGLHTWLPDAMEGPTPVSALIHAATMVTAGVFMVARMSPMFEFAEFTNLFIIFIGSTTAIFAASIALTQNDIKKVIAYSTCSQLGYMFFAAGLGAYNASIFHLMTHGFFKALLFLSAGSVIHAMHHEQDMRKMGGLFFKIPFTGVMMWIGSLAIIGFPFFSGYYSKESILENAFFASSNMANYAYIVGIITALLTAFYSWRLLFMTFHGDFKSSKTILLNVKESPKVMTLPLFLLAIGSIFSGIFLTDFFIGKNSDVFWYNSIILAHEHHHYMPFFQTLLIKSSVAIGISAASLLYFYNKNLSLILSKKLPFFYLLSLNKWYVDELYRKIFVKPIFYLATFFWKKGDINTIDTYGPNGASKLINIFSKNLSIFQSGYLYHYAFAMLGGLVIILSWF

SEQ ID NO: 80590 - protein, 118 aa, Unknown; identical to SEQ ID NO: 80318
  Bacterial polypetide isolated from the Sargasso Sea

SEQ ID NO: 80591 - protein, 121 aa, Unknown; identical to SEQ ID NO: 80524
  Bacterial polypetide isolated from the Sargasso Sea

SEQ ID NO: 80592 - protein, 162 aa, Unknown
  Bacterial polypetide isolated from the Sargasso Sea
MGLENIKKDGFVLAKSSNLFDWARTGSLWPMTFGLACCAVEMMHAGASRYDLDRFGMLFRPSPRQSDVMIVAGTLVNKMAPALRKVYDQMADPKWVISMGSCANGGGYYHYSYSVVRGCDRIVPVDIYVPGCPPTAEALLYGILQLQNKIRKSNTIHAESIT

SEQ ID NO: 80593 - protein, 118 aa, Unknown
  Bacterial polypetide isolated from the Sargasso Sea
MILEYLPILIFTIFALIFAGIMLSVGFTFGDNNPSAEKNSPYECGFEAFEDSRMKFDIRYYLVAILFIIFDLEIAFLFPWAVVIHEIGVVGLISMAIFLTILIVGFIYEWKKGALEWD

SEQ ID NO: 80594 - protein, 119 aa, Unknown
  Bacterial polypetide isolated from the Sargasso Sea
MLEGYFSILVFLVISTVICTFPILISLIVNKSKKIEESKKSPYECGFEHFSDARMNFDVRYYLVAILFIIFDLEIAFLFPWAVAIDQIGISGLLSMVFFLFVLIIGFIYEWKKGALDWD

SEQ ID NO: 80595 - protein, 329 aa, Unknown
  Bacterial polypetide isolated from the Sargasso Sea
MNIVFDEVYKVLFLLVPVLVSVAMIVWLDRRIWAFVQKRQGPNVVGPFGLLQSLADALKYIFKEMIIPSSSNKVIFILAPIVTMTLALIAWAVIPFSATQVLADINVGILYLFAVSSLGVYGIIMGGWASNSKYPFLGAIRSAAQMVSYEVSIGVIIINVLLCVGSLNLNDIVIAQQNVWFVIPLFPMFVIFFISALAETNRPPFDLPEAEAELVAGYQTEYSGMMYAMFWLGEYANILLMCAMGAILFLGGWLSPIELYPFTLVPGAIWLILKILLLFFLFALVKAIVPRYRYDQLMRLGWKVFLPFSLIWVVLTASYLFYFNLLPVS

SEQ ID NO: 80596 - protein, 122 aa, Unknown
  Bacterial polypetide isolated from the Sargasso Sea
MTAEFLKDYLSIILFLFVALGLSCAFIVINFILSPKHPDPEKLSAYECGFEPFQDSRMEFDVRFYLVAILFIIFDLEIAFLFPWAISLGNIGILGFTSMMIFLFILTVGFIYEWKKGALDWE

SEQ ID NO: 80597 - protein, 93 aa, Unknown
  Bacterial polypetide isolated from the Sargasso Sea
LFCIFTNNPDPEKLSSYECGFEPFNDSRMEFDIRFYLVAILFIIFDLEIAFLFPWAISLGKIGIFGFISMMIFLGILTVGFIYEWKKGALDWE

SEQ ID NO: 80598 - protein, 122 aa, Unknown; identical to SEQ ID NO: 80430
  Bacterial polypetide isolated from the Sargasso Sea

SEQ ID NO: 80599 - protein, 121 aa, Unknown
  Bacterial polypetide isolated from the Sargasso Sea
MTDMLQQYLPILVFMAVATAIGLVLLGLGFLLGRGNKDDEKLSPYECGFEPFEDSRMKFDVRYYLVAILFIIFDLEIAFLFPWAVSLDVIGGFGLVAMAIFLTVLVVGFIYEWKKGALEWD

SEQ ID NO: 80600 - protein, 87 aa, Unknown
  Bacterial polypetide isolated from the Sargasso Sea
MLAEFLKDYLPIIVFLLVALVLSVAFVAVNYLASPKNPDPEKLSAYECGFEPFNDSRMEFDVRFYLVAILFIIFDLEIAFLFPWAIS

SEQ ID NO: 80601 - protein, 414 aa, Unknown
  Bacterial polypetide isolated from the Sargasso Sea
MLFFVMAQNIVQLIVGWELVGVCSFALIGHWWEEKPNTDAALKAFLTNRVGDVGLLVGMIILWGTFNTFDIDAINTLISSDPGAHHLALLVAACCLMAAVASKSGQFPLHTWLPDAMAGPTPVSALIHAATMVVAGVYMIARLYPVFYEGFSIGTSSINLMAFIGGFTALIGAGLAFAQWDIKKVLAYSTVSQLGYMVMALGVGAWTAAIFHLFTHAFFKACLFLGAGSVSHAAHHTFDMRKMGGLRKDMPHTYKTFVISSLALAGIFPFAGFWSKDEILLGSLAGQENGYPLMLIFGCAVALMTAAYMTRVIWYTFHGEFRGHGHPHESPRVMTVPLWILAGMAVAAGAFNLPTPVLEPFGLEGLAHRIQTYAEPSIYLQGMGLSHPDPSLNMALVGLVLALSGIAITYLYYW

SEQ ID NO: 80602 - protein, 329 aa, Unknown; identical to SEQ ID NO: 80569
  Bacterial polypetide isolated from the Sargasso Sea

SEQ ID NO: 80603 - protein, 122 aa, Unknown
  Bacterial polypetide isolated from the Sargasso Sea
MIYNFLADYFSIIVFLFIALFLSFGFILVNFFASPSNPDPEKLSAYECGFEAFGDSRMEFDVRFYLVAILFIIFDLEIAFLFPWAISLGNIGLLGFWSMMIFLLILTVGFIYEWKKGALEWE

SEQ ID NO: 80604 - protein, 111 aa, Unknown
  Bacterial polypetide isolated from the Sargasso Sea
MNTFEEKQNQIPDEFKKLAKDFAEKGFITTSTNNLINWARTGSLHWMTFGLACCAVEMMQTSMPRYDLERFGAAPRASPRQSDVMIVAGTLTNKMAPALRKFMIQCRNLVM

SEQ ID NO: 80605 - protein, 165 aa, Unknown; identical to SEQ ID NO: 80320
  Bacterial polypetide isolated from the Sargasso Sea

SEQ ID NO: 80606 - protein, 118 aa, Unknown
  Bacterial polypetide isolated from the Sargasso Sea
MLENYLPIAIFIIIAGVLGLLMLGLGFLFGKGVKTKAKLSPYECGFEEFEDARIPFDVRYYLVAILFIIFDLEIAFLFPWAIALDEIGHVGLISMVIFLLVLVIGFVYEWNKGALDWD

SEQ ID NO: 80607 - protein, 121 aa, Unknown
  Bacterial polypetide isolated from the Sargasso Sea
MRNFLKDYLPIILFLIIALGLSLAFVAINYIAAPSKPDPEKLSAYECGFEPFNDSRMEFDVRFYLVAILFIIFDLEIAFLFPWAISLGEIGLYGFCSMMLFLFILTVGFIYEWKKGALDWE

SEQ ID NO: 80608 - protein, 477 aa, Unknown
  Bacterial polypetide isolated from the Sargasso Sea
FGQPNSFDFKEIASGISQSVSDNSIPIWAALLLCFLVFLGPMAKSAQFPLHVWLPDAMEGPTPISALIHAATMVAAGIFLVARLQPLYSIFPSIQFIIALVGTITCFLGASIALTQMDLKKGLAYSTVSQLGYMMLAMGCGAPIAGIFHLVTHACFKAMLFLGSGSVIHAMEEVVGHQPVLAQDMRLMGGLRKKMPYTSATFLIGCVAISGIPPLAGFWSKDEILGNAFISFPAFWFIGLLTAGMTAFYMFRLYFLTFEGDFRGENKELQKELLISSKVNLDEEIEEEDEEHGYIHESPWSMTFPLVFLAVPSVIIGFMGLPWDSKFAKLLDPEEAEIAAKAFELKEFLPLAIASVVIASVGIIIAYQAYFVKKINLAILFAEKFASINQFLSNKWYLDDINEKLFVKGIRKLAKEVLEVDSKVVDGVVNLTGLVTLGSGEGLKYFETGRAQFYALIVFGGVILLVAIFGFQSPQVT

SEQ ID NO: 80609 - protein, 122 aa, Unknown
  Bacterial polypetide isolated from the Sargasso Sea
MLAEFLKEYLPIILFLIIALGLSFAFVAMNYFASPKKPDPEKLSAYECGFEPFNDSRMEFDVRFYLVAILFIIFDLEIAFLFPWAISLGEIGVFGFISMMIFLFILTVGFIYEWKKGALDWE

SEQ ID NO: 80610 - protein, 119 aa, Unknown
  Bacterial polypetide isolated from the Sargasso Sea
MYNLDYIFILIFILIGAGMAIVMYLLSKILSPSSPDSEKLSAYECGFEAFDDARSKFDVKFYLVSILFIIFDLEIAFLFPWAVSLSNIGALGFYSMMFFLFILTVGFIYEWKNGALDWE

SEQ ID NO: 80611 - protein, 122 aa, Unknown
  Bacterial polypetide isolated from the Sargasso Sea
MLAEFLKDYLPIILFLIIALGLSLAFVAINYIAAPSKPDPEKLSAYECGFEPFSDSRMEFDVRFYLVAILFIIFDLEIAFLFPWAISLGEIGLYGFCSMMLFLFILTVGFIYEWKKGALDWE

SEQ ID NO: 80612 - protein, 122 aa, Unknown
  Bacterial polypetide isolated from the Sargasso Sea
MLADFLKDYFPIILFLVISLGLSIGFVVLNFILSPKKPDPEKLSAYECGFEAFDDSRMEFDVRFYLVAILFIIFDLEIAFLFPWSISLGKIGFLGFFSMMIFLFILTVGFVYEWKKGALDWE

SEQ ID NO: 80613 - protein, 122 aa, Unknown
  Bacterial polypetide isolated from the Sargasso Sea
MLAEFLKDYLSIILFLVIALGLSMAFVAINYLASPKKPDPEKLSAYECGFEPFNDSRMEFDVRFYLVAILFIIFDLEIAFLFPWAISLGKIGLFGFVSMMIFLFILTVGFIYEWKKGALDWE

SEQ ID NO: 80614 - protein, 122 aa, Unknown
  Bacterial polypetide isolated from the Sargasso Sea
MLVDFLKDYLSIIIFIFVALSLSVGFILLNFLFSPKNPDPEKLSAYECGFEAFGDSRMEFDVRFYLVAILFIIFDLEIAFLFPWAISLGSLGSLGFWSMMLFLFVLTVGFIYEWKKGALDWD

SEQ ID NO: 80615 - protein, 316 aa, Unknown
  Bacterial polypetide isolated from the Sargasso Sea
MLVPVLVSVAMIVWLDRRVWAFVQKRQGPNVVGPFGLLQSLADALKYIFKEIIIPSSSNKIIFILAPIVTMTLALISWAVIPFSATQVLADINVGILYLFAVSSLGVYGIIMGGWASNSKYPFLGAIRSAAQMVSYEVSIGVIIINVLLCVGSLNLNDIVEAQKNLWFVIPLFPMFVIFFISALAETNRPPFDLPEAEAELVAGYQTEYSGMMYAMFWLGEYANILLMCAMGAILFLGGWMSPVEIYPFTLVPGAIWLILKILLLFILFALVKAIVPRYRYDQLMRLGWKVFLPLSLIWVVLTASYLFYFNLLPTN

SEQ ID NO: 80616 - protein, 449 aa, Unknown
  Bacterial polypetide isolated from the Sargasso Sea
LQEFFTIFGTISFDSIFEQVDQFSEHQIQFLSFSFPTLDFLCFLLFIGAMGKSAQLGLHTWLPDAMEGPTPVSALIHAATMVTAGVFLVARMSPLYEFAAFTNLFITFVGAATAIFAASIALTQNDIKRVIAYSTCSQLGYMFFAAGVGAYNASIFHLTTHAFFKALLFLSAGSVIHAMHHEQDMRKMGGLFKKIPFTATMMWIGSLAIIGFPYLSGYYSKESILENAFYASNGIAYFAYLVGILTALLTAFYSWRLLFLTFHGENRSENKTYDQAHESPLVMTAPLFILAIGSIFSGIFFADYFIGYYKKEFWDNAVLLTESSHKYLPLSQSLLSKSAVAIGILVCVLIYSNNLNRAKNLSHNLDPLYSLSKNKWYVDELYHKVFVLTFFKLANFFWKRGDEKTIDGLGPNGVSWIISKSSSYVSLFQSGYLFHYAFAMLGGLVIILT

SEQ ID NO: 80617 - protein, 122 aa, Unknown
  Bacterial polypetide isolated from the Sargasso Sea
MLSEFLKDYLPIILFLIIALGLSVAFVVLNFLLSPKKPDPEKLSAYECGFEPFQDSRMEFDVRFYLVAILFIIFDLEIAFLFPWAISLGNIGLLGFSSMMIFLFILTVGFIYEWKKGALDWE

SEQ ID NO: 80618 - protein, 92 aa, Unknown
  Bacterial polypetide isolated from the Sargasso Sea
MIYNFLTDYLSIIIFLFIALFLSIGFIIINFLASPNNPDPEKLSAYECGFDAFDDSRMEFDVRFYLVAILFIIFDLEIAFLFPWAITLGITG

SEQ ID NO: 80619 - protein, 295 aa, Unknown
  Bacterial polypetide isolated from the Sargasso Sea
QKRRGPNVVGPLGLFQTLADALKYIFKEIIIPASANKIVFILAPIITMTLALSAWAVIPISDKLFIADINVGILYIFAISSLGVYGIIMGGWASNSKYPFLGAIRSAAQMVSYEVSIGIIIINVLLCVGSLNLKDIVLAQKNLWFIVPLFPMFVIFFISALAETNRPPFDLPEAEAELVAGYQTEYSGMMYAMFWLGEYANILLMCALGSILFLGGWLSPVDLYPFNIIPGSIWMIFKILLLFFMFAIIKAIVPRYRYDQLMRLGWKIFLPFSLIYVVLTSSFLVYFDLLPNGGF

SEQ ID NO: 80620 - protein, 173 aa, Unknown
  Bacterial polypetide isolated from the Sargasso Sea
NYSEVFQQIPTVVDKNLLFLGFEIKAIDLICLLLFIGAMGKSAQILLHTWLPDAMEGPTPVSALIHAATMVTAGVFLVVRCSPIYEYSPFILNIITIVGMTTAFFAATVALVQTDIKKIIAYSTCSQLGYMFFAAGVGAYNVAMFHLFTHAFFKALLFLVLALLFMLLKTSKI

SEQ ID NO: 80621 - protein, 546 aa, Unknown
  Bacterial polypetide isolated from the Sargasso Sea
PAWSGVPAAELAWLIPVLPLLGAVITGLGLISFNRTINRLRKPVALLLISCVGAAAVLSYAVLSDQLAGAAPVEHLFIWASAGSFSLPMGYVVDSLGAVMLALVTTIALLVMVYSHGYMAHDKGYVRFFTYLALFSSSMLGLIISPNLLEIYVFWELVGMCSYLLVGFWYDRDGAAHAAQKAFVVNRVGDFGLLLGILGLFWATGSFDFQGIADGLQQGLANGSVAPWAALLLCLLVFMGPMAKSAQFPLHVWLPDAMEGPTPISALIHAATMVAAGVFLVARLEPLYIQFPSVQLVVAVVGTITCFLGASIALTQMDLKKGLAYSTVSQLGYMMLAMGCGAPVAGMFHLVTHAFFKAMLFLGSGSVIHAMEDVVGHEPILAQDMRLMGGLRRKMPITAITFLIGCIAISGIPPLAGFWSKDEILGQAFNSYPVLWLVGFLTAGMTAFYMFRLYFLTFEGEFRGEDQQLQAELMAAAGQSLDTDHAHHAGSLHESPWSMTLPLAVLAVPSVLIGLVGTPWNSRFAGLLNPEEAAEMTEQFSWEEFL

SEQ ID NO: 80622 - protein, 297 aa, Unknown
  Bacterial polypetide isolated from the Sargasso Sea
MGLCSKRQGPNVVGPFGLFQSIADALKYIFKEIIIPSSSNKVIFILAPIVTMTLALVAWAVIPFSETQVLANINVGILYLFAVSSLGVYGIIMGGWASNSKYPFLGAIRSAAQMVSYEVSIGIIIINVLLCVGSLNLNDIVIAQQNIWFIIPLFPMFIIFFISALAETNRPPFDLPEAEAELVAGYQTEYSGMMYAMFWLGEYANILLMCAMGAILFLGGWLSPIEIYPFNLIPGAIWLILKILLLFILFALVKAIVPRYRYDQLMRLGWKVFLPLSLTWVVLTASYLFYFNLLPIN

SEQ ID NO: 80623 - protein, 122 aa, Unknown
  Bacterial polypetide isolated from the Sargasso Sea
MLADFLKDYLPIILFLIIALGLSCLFIILNYILSPKNPDPEKLSAYECGFEPFNDSRMEFDVRFYLVAILFIIFDLEIAFLFPWAISLGKIGVFGFVSMMIFLFILTVGFVYEWKKGALDWE

SEQ ID NO: 80624 - protein, 332 aa, Unknown
  Bacterial polypetide isolated from the Sargasso Sea
MEYIILLFSEIYKILYVLIPVLVSVAMIVWLDRRIWAFVQKRRGPNVVGPFGLFQTLADALKYIFKEIIIPASSNKIIFILAPIVTMTLALIAWAVIPFSEDYVLADINVGILYIFAISSLGVYGIIMGGWASNSKYPFLGSIRSAAQMVSYEVSIGVIIINVLLCVGSLNLSDIVLAQEKIWFVIPLFPMFVIFFISSLAETNRPPFDLPEAEAELVAGYQTEYSGMMYAMFWLGEYANILLMCALGSILFLGGWLAPIDTPLFEMVPPPVWLILKILFLFVLFALIKAIVPRYRYDQLMRLGWKVFLPFSLIWVVLTSGYLLYFDLLPVY

SEQ ID NO: 80625 - protein, 301 aa, Unknown
  Bacterial polypetide isolated from the Sargasso Sea
FHLFTHAFFKALLFLGSGSVIHAFKDEQNINNMGGVWKKLPYTYSLMIIGTLALTGFPFLSGFYSKDAIIEFAYLRGNTTGYYAAGIGIFTAFLTSIYSWRLIFKTFHGEYNNKEIKIDETHESPVVMLIPLVLLSIGAIFAGFLFKELFIGYEGINNFWRDSIFFLKPLSTDHPPLWFLLLTPTLVILSIPLAYYLFLKNRNLPERLASINKPLYQFLLNKWYFDELYDVLFVKPSKKLGLFLWKFFDLKIIDGFGPDGISSMIKKFSLKANKFQSGYIYQYAFVMLLGFSALLTFLIVK

SEQ ID NO: 80626 - protein, 122 aa, Unknown
  Bacterial polypetide isolated from the Sargasso Sea
MLADFLKDYLSIILFLIIALGLSIIFIAINYLASPKNPDPEKLSAYECGFEPFNDSRMEFDVRFYLVAILFIIFDLEIAFLFPWAISLGQIGLFGFVSMMIFLFILTVGFIYEWKKGALDWE

SEQ ID NO: 80627 - protein, 148 aa, Unknown
  Bacterial polypetide isolated from the Sargasso Sea
SSFPMFVIFFISALAETNRPPFDLPEAEAELVAGYQTEYSGMMYAMFWLGEYANILLMCALGSILFLGGWLSPIDIYPFNLIPGAVWMIIKILILFFMFAIIKAIVPRYRYDQLMRLGWKVFLPFSLIYVVFTASFLIYFDLLPNTGN

SEQ ID NO: 80628 - protein, 122 aa, Unknown
  Bacterial polypetide isolated from the Sargasso Sea
MLADFLNEYFSIIVFLIIALGLSFLFIIINFALAPKNPDPEKLSSYECGFEPFNDSRMEFDVRFYLVAILFIIFDLEIAFLFPWAISLGKIGFLGFVSMMIFLFILTVGFVYEWKKGALDWE

SEQ ID NO: 80629 - protein, 122 aa, Unknown
  Bacterial polypetide isolated from the Sargasso Sea
MLINYFPILIFGAIVLLMGTFLVALGLILGKVMGHARPDKEKQSPYECGFDAFEDARMKFDVRYYLVAILFIIFDLEIAFLFPWAVVLEDIGMAGFWAMMIFLGVLVVGFIYEWKKGALDWE

SEQ ID NO: 80630 - protein, 416 aa, Unknown
  Bacterial polypetide isolated from the Sargasso Sea
MILFLLLGAFGKSAHFPLFSWLPDAMEGPTPASALIHAATMVTAGVFMLVRISPLLQFSEIGSITIISLGLLTALISAFAAINQDDIKKVLAYSTISQLGFMFIAIGAGAYVAAIFHLVTHAFFKALLFLGAGAVIHEMHHEQNIYKMGGLRKKMPVTAAMMGIGTLAISGIPPLAGFWSKDEILASVFARGGIYYGFWALSLLAALMTAFYMGRHWLLIFVKEPSNELDSINEAPKNMTRPLILLGLFSIFIGFINTPFFHGLEKVLHETLYNVEVTHLPKGITLAVLAFLSIGAGFTGLALAYLIYIFDIFSYFKIKIPFLKQFKKLSKDVLYLNKIGNLIFVKGMKSLSRKVAVSVDGMTIDGFINGVARSFLKSSKQISYSQTGLVRSYVVYFGLFMLALILVFLFSPGVLL

SEQ ID NO: 80631 - protein, 93 aa, Unknown
  Bacterial polypetide isolated from the Sargasso Sea
MLADFLKDYLSIIIFLIIALGLSMAFIAINYLASPKNPDPEKLSAYECGFEPFNDSRMEFDVRFYLVAILFIIFDLEIAFLFPWAISLGQIGW

SEQ ID NO: 80632 - protein, 474 aa, Unknown
  Bacterial polypetide isolated from the Sargasso Sea
AIKAFLVNRVGDFGFALGIFLIFYIFGTVNYNEVFDKIPLILNKEIIFLGITINAVDLICLLLFIGAMGKSAQIFLHTWLPDAMEGPTPVSALIHAATMVTAGVFLVVRCSPIYEYSELALTIVTLVGLTTALFAASVALVQTDIKKIIAYSTCSQLGYMFFAAGVGAYNVAMFHLFTHAFFKALLFLGSGSVIHSFDDEQDINYMGGVWKKLPYTYTLMIIGTLALTGFPFLSGFYSKDAIIEFAYLSGNNLGYFAAYTGVFVALLTSIYSWRLIFKTFHGSYNNSKIKFDSMHESPMVMLIPLIILAIGAIFAGILFKNLFIGHETSYEFWSSSIKFIEPLSKDHPPTWFLFITPVLVTLSIPLAFYLFVKNKIIVEQIAKANKPFYLFLKNKWYFDELYDYIFVIPSKKIGYFFWKRIDVSIIDKFGPDGISKLIKYFSFKAVKFQSGYIYQYAFIMLIGFSILLTLLMVN

SEQ ID NO: 80633 - protein, 122 aa, Unknown
  Bacterial polypetide isolated from the Sargasso Sea
MLAEFLKDYLPIILFLIIALGLSIAFVAINYIAAPSKPDPEKLSAYECGFEPFNDSRMEFDVRFYLVAILFIIFDLEIAFLFPWAISLGEIGLYGFFSMMLFLFILTVGFIYEWKKGALDWE

SEQ ID NO: 80634 - protein, 166 aa, Unknown
  Bacterial polypetide isolated from the Sargasso Sea
MEKRGFRVGLENIKRDGFVLADSDSLFDWARTGSLWPMTFGLACCSIEMMHAGASRYDLDRFGMLFRPSPRQSDVMIVAGTLVNKMAPALRKVYDQMADPKWVISMGSCANGGGYYHYSYSVVRGCDRIVPVDVYVPGCPPTAEALLYGILQLQNKIRNKNRIKIK

SEQ ID NO: 80635 - protein, 137 aa, Unknown
  Bacterial polypetide isolated from the Sargasso Sea
SSLPLAETNRHPFDLPEAEAELVAGYNVEYSAMTFALFFLGEYANMILMSAMTAMLFLGGWLPPIASYPFDAVPGPIWLALKIAFCLFIFLWVRATFPRYRYDQLMRLGWKVFLPISLAAVAIVAGILVAFDWLPKG

SEQ ID NO: 80636 - protein, 314 aa, Unknown
  Bacterial polypetide isolated from the Sargasso Sea
FFAAGVGAYNVAMFHLFTHAFFKALLFLGSGSVIHSFKDEQDVTKMGGVFRKLPYTYALMVIGTLALTGFPFLSGFYSKDAIIEFAYISDTKFGIYAAGIGVLTAVMTSIYSWRLIFKTFHGDYKNKDLSIDTMHESPLSMMLPLVLLSVGAIFSGFLFKELFIGHETMYNFWGESIKFLEPLGKEHPPTWFLFLTPTLVVLTIPLSYYLFVKNTKIVDEIVSINMPVYIFLQKKWYFDELYDQIFIKPSKSFGIFLWKKIDGLIIDKFGPDGISNLVKLFSFKAVKFQSGYIYQYAFIMLLGFSILLTLLIVK

SEQ ID NO: 80637 - protein, 122 aa, Unknown
  Bacterial polypetide isolated from the Sargasso Sea
MYGDFLNNYLTIILFFGVALFLSIGFIFLNFVFAPKNPDPEKLSAYECGFEPFNDSRMEFDVRFYLVAILFIIFDLEIAFLFPWAISLGKIGIFGFVSMMIFLFILTVGFIYEWKKGALDWE

SEQ ID NO: 80638 - protein, 335 aa, Unknown
  Bacterial polypetide isolated from the Sargasso Sea
MEYFDIIFQEVYKILFLLVPVLVSVAMIVWLDRRVWAFVQKRQGPNVVGPFGLLQSLADALKYIFKEIIIPASSNKVIFILAPIITMTLALIAWAVIPFNEGQVLANINVGILYIFAVSSLGVYGIIMGGWASNSKYPFLGAIRSAAQMVSYEVSIGIIIINVLLCVGSLNLSDIVLAQQEMWFIIPLFPMFVIFFISSLAETNRPPFDLPEAEAELVAGYQTEYSGMMYAMFWLGEYANILLMCALGSILFLGGWLSPVDIYPLNIIPGIFWMMIKILIMFFMFALIKAIVPRYRYDQLMRLGWKVFLPFSLIYVVLTASFLIYFDLLPKGGLQ

SEQ ID NO: 80639 - protein, 118 aa, Unknown
  Bacterial polypetide isolated from the Sargasso Sea
MLYEYLPILIFLALALLFASVMLSAGFIFGGSNPDDEKNSPYECGFEPFEDSRMKFDVRFYLVAILFIIFDLEIAFLFPWAVVLDHIGLEGYLAMAIFILILLVGFIYEWKKGALEWD

SEQ ID NO: 80640 - protein, 446 aa, Unknown
  Bacterial polypetide isolated from the Sargasso Sea
MAGPTPVSALIHAATMVVAGVFMIARLYGVFFEGFSIGGSSINLMALIGGFTTLVGACLAFVQRDIKKVLAYSTISQLGYMVMALGVGAWTAAMFHLFTHAFFKACLFLGSGSVAHSVHSFDMKSDMGGLRKVMPQTFRTFIIGSIALAGLPPFAGFWSKDEILAGTGGWGILGGTNGNGSYTFMLIMGMITAALTAAYMTRCVYLTFFGEFRGHGHPHESGPRITIPLWILAVLAIFAGFLNLPKGFQLVPKSLQERFGHYVEPVAGYFPEIAHATPSWSLAIVSTIVVIAGISLAWNYYFVKVEKASKESGKSLTELPDGLTTRLTLARMGHTLLVNKYYLDHLYTGIITRAVKEPIAELAYRSNQEILDRTVDTFGRTAVKIGQLNYEKIDQNLVDGFVNASGRISSDSGEELRKIQSGKVQSYAAILFAAATILAGLLIVIV

SEQ ID NO: 80641 - protein, 122 aa, Unknown
  Bacterial polypetide isolated from the Sargasso Sea
MIYNFLSDYLSILIFLFIALFLSVGFILANYLASPSNPDPEKLSAYECGFEAFDDSRMEFDVRFYLVAILFIIFDLEIAFLFPWAISLGSLGALGFWSMMVFLGVLTIGFIYEWKKGALEWE

SEQ ID NO: 80642 - protein, 122 aa, Unknown
  Bacterial polypetide isolated from the Sargasso Sea
MTAEFLKDYLPIILFLVLALGLSCAFIVINFILSPKNPDPEKLSAYECGFEPFEDSRMEFDVRFYLVAILFIIFDLEIAFLFPWAITLGNIGTLGFSSMMIFLFILTVGFIYEWKKGALDWE

SEQ ID NO: 80643 - protein, 122 aa, Unknown; identical to SEQ ID NO: 80354
  Bacterial polypetide isolated from the Sargasso Sea

SEQ ID NO: 80644 - protein, 138 aa, Unknown
  Bacterial polypetide isolated from the Sargasso Sea
ISSLAETNRPPFDLPEAEAELVAGYQTEYSGMMYAMFWLGEYANILLMCAMGSILFLGGWLPPADVYFLNIIPGPIWMILKILILFIVFALVKAIVPRYRYDQLMRLGWKVFLPFSLIWLVLTSSFLFFTDKLPVKGL

SEQ ID NO: 80645 - protein, 122 aa, Unknown
  Bacterial polypetide isolated from the Sargasso Sea
MIFDFLADYLSIIIFVIISLFLSLGFILLNYLASPKNPDPEKLSAYECGFEAFSDSRVQFDVRFYLVAILFIIFDLEIAFLFPWAISLGNIGLLGFYSMMFFLFTLTVGFIYEWKKGALEWD

SEQ ID NO: 80646 - protein, 333 aa, Unknown
  Bacterial polypetide isolated from the Sargasso Sea
MFEYIQILGQEVYKILFVLVPILVSVAMIVWLDRRVWGLVQKRKGPNVVGPFGLLQTLADALKYIFKEIIIPASANKAVFVLAPIVTMTLALVAWAVIPMSEEFVLADINVGVLYLFAVSSLGVYGIIMGGWASNSKYPFLGAIRSAAQMVSYEVSIGIIIINVLLCVGSLNLKEIVLAQKDLWYVIPLFPMFVIFFISALAETNRPPFDLPEAEAELVAGYQTEYSGMMYAMFWLGEYANILLMCAMGSILFLGGWLPIIDLYPINLIPAPIWMIIKILFLFFLFALIKAIVPRYRYDQLMRLGWKIFLPFSLLYLVLTASFLFYFDKLPKG

SEQ ID NO: 80647 - protein, 122 aa, Unknown
  Bacterial polypetide isolated from the Sargasso Sea
MYGDFLNNYLTIIIFFGIALLLSIGFIFLNFVFAPKNPDPEKLSAYECGFEPFNDSRMEFDVRFYLVAILFIIFDLEIAFLFPWAISLGKIGIFGFVSMMIFLFILTVGFIYEWKKGALDWE

SEQ ID NO: 80648 - protein, 121 aa, Unknown
  Bacterial polypetide isolated from the Sargasso Sea
MNTFLLDYIPIIIFLGIAIGMASLIMIASWIVAKQNPDEEKLSPYECGFDAFEDTRSQFDVRFYLVAILFIIFDLEVAFLFPWAVSLGSIGLFGFWSMIVFLGVLTIGFIYEWKKGALEWE

SEQ ID NO: 80649 - protein, 171 aa, Unknown
  Bacterial polypetide isolated from the Sargasso Sea
MGVAVPGQEQILRRVNDEIADKGFVVAQMDKLVSWAQSGSLWPMTFGLACCAVEMMHSAASRYDLDRFGVIFRPSPRQSDVMIVAGTLTNKMAPALRKVYDQMAEPRWVISMGSCANGGGPYHYSYAVVRGCDRIIPVDVYVPGCPPTAEALLYGVLQLQKKVRRTSTISR

SEQ ID NO: 80650 - protein, 121 aa, Unknown
  Bacterial polypetide isolated from the Sargasso Sea
MDELLREYLPILVFMGIAAGLAAIIILASFIVARQKPNSEKVSPYECGFAPFNDARRQFDVRFYLVAILFIIFDLEVAFLFPWAISLESIGLLGFWSMIVFLGVLTVGFIYEWRKGALEWE

SEQ ID NO: 80651 - protein, 334 aa, Unknown
  Bacterial polypetide isolated from the Sargasso Sea
MEYLVVLYNEVYKILFLLIPILVSVAMIVWFDRRVWGFVQKRRGPNVVGPFGLFQTLADALKYIFKEIIVPASSNKVIFILAPIVTMTLALSAWAVIPLSEKMVIADINVGILYIFAISSLGVYGILMGGWASNSKYPFLGAVRSAAQMVSYEVSIGIIIINVLLCTGSLNLKEIVLAQQNLWFVIPLFPMFVIFFISALAETNRPPFDLPEAEAELVAGYQTEYSGMMYAMFWLGEYANILLMCALGSILFLGGWLSPIDIYPLNLIPGAVWMIIKILILFFMFAIIKAIVPRYRYDQLMRLGWKVFLPFSLIYVVLTASFLIYFDLLPNKAF

SEQ ID NO: 80652 - protein, 393 aa, Unknown
  Bacterial polypetide isolated from the Sargasso Sea
SRCYEGPTPVSALIHAATMVTAGVFLVVRCSPIFEYSQVALNFVAIIGMITAFFAASVAVVQNDIKRIIAYSTCSQLGYMFFATGVGAYHVAIFHLFTHAFFKALLFLGSGSVIHALKDEQDIRNMGGIWKKMPLTWISMIIGTLALTGFPFLSGYYSKDAIIEFAYLKGTNIGYFAAGIGIITAVLTAIYSWRLIFKTFHGNFNNKSLSKIEVHESGMIIISPLALLVLGAVFSGFLFKDFLIGHHYEDFWKNSILIIQNIDHSNVPIWILVTTPFLVTVSIPIAYYLYIKNNNLLENIKLKNRPIYNFLLNKWYFDEIYDFILVKPTKFIGSFFWKSGDIKTIDRYGPDGVSKIVKSISNKSSKFQSGYIYDYAFVMLIGLSLLLTFFIFY

SEQ ID NO: 80653 - protein, 360 aa, Unknown
  Bacterial polypetide isolated from the Sargasso Sea
MTEIFSQLFFTIGGVLSDLMSSNFGFVLILIGQGLLMAVFLLLSAYFLIYADRKVWAAVQLRRGPNVVGAFGLLQSGADMLKLVFKEIVVPAGSDKFVFFLAPVISFVMAILAWAVVPLNEGWQLSNINVAILYVFAISSLEVYGVIMGGWASNSKYPFLGSLRSAAQMISYEVSIGLVIIGVIISTGSMNFGAIVAAQDTDYGIFGWYWLPHLPMLFLFFISALAETNRPPFDLPEAESELVAGFQVEYSSTPFLLFMAGELIAVFLMCALTSLLFFGGWLSPIPALPDGVFWMILKMGLFFFIFAMIKAITPRYRYDQLMRLGWKVFLPFSLAWVVFVAFLAKFEVFGSFYARYLVGG

SEQ ID NO: 80654 - protein, 164 aa, Unknown
  Bacterial polypetide isolated from the Sargasso Sea
MSKFDYTRAVKYFFLADVWQGMRLGLKYFFKPKATINYPYEKGPLSPRFRGEHALRRYPNGEERCIACKLCEAICPAQAITIDAEPREDGSRRTTRYDIDMTKCIYCGFCQEACPVDAIVEGPNFEFATETREELFYDKEKLLENGERWEAQIARNLELDAPYR

SEQ ID NO: 80655 - protein, 122 aa, Unknown
  Bacterial polypetide isolated from the Sargasso Sea
MIYNFLTDYLSIIIFLFIALFLSIGFILINFLASPSNPDPEKLSAYECGFEAFDDSRMEFDVRFYLVAILFIIFDLEIAFLFPWAISLGSIGAVGFWSMMIFLGVLTIGFIYEWKKGALEWE

SEQ ID NO: 80656 - protein, 112 aa, Unknown
  Bacterial polypetide isolated from the Sargasso Sea
PFLIFLFIALIFASVMMTAGFFFGGSNPDSEKNSPYECGFEAFEDSRMKFDVRFYLVAILFIIFDLEIAFLFPWAVVLDHIGHEGFLAMAVFLFILLIGFIYEWKKGALEWD

SEQ ID NO: 80657 - protein, 122 aa, Unknown
  Bacterial polypetide isolated from the Sargasso Sea
MIYNFLSDYLSIIIFLFIALFLSIGFIVINFLSSPSNPDPEKLSAYECGFDAFDDSRMEFDVRFYLVAILFIIFDLEIAFLFPWAISLGAIGSLGFWSMMIFLGVLTIGFIYEWKKGALEWE

SEQ ID NO: 80658 - protein, 121 aa, Unknown
  Bacterial polypetide isolated from the Sargasso Sea
MGSILNDYLPILIFMSLSAFVVMALTLPPILFAPKHPDKEKLSQYECGFEPFDDARTKFDIRFYLVAILFIIFDLEVAFLFPWAVVFGDIGLFGFVSMMVFLGVLTIGFIYEWKKGALEWD

SEQ ID NO: 80659 - protein, 122 aa, Unknown
  Bacterial polypetide isolated from the Sargasso Sea
MLFEFLTDYLSIIIFVFIALALSIGFIAINYAASPKNPDPEKLSAYECGFSPFSDSRIKFDVRFYLVAILFIIFDLEIAFLFPWAVSLGNIGLLGFYSMMAFLFILTVGFIYEWKKGALEWE

SEQ ID NO: 80660 - protein, 373 aa, Unknown
  Bacterial polypetide isolated from the Sargasso Sea
AGVFLVVRCSPIYEYSELALSIITIIGMLTAIFAASVAIVQTDIKKIIAYSTCSQLGYMFFAAGVGAYNVAMFHLFTHAFFKALLFLGSGAVIHSFKNEQDINKMGGVRKKLPYTYILMLIGTLALTGFPFLSGFYSKDAIIEFAYLKGNSVGISAAFVGVITALITSIYSWRLIFKTFHGNYNNRKINFDQIHESPLIMIIPLFVLAIGAIFSGIIFKELFIGHETSYEFWNKSILFLEPLSQKHPPNWFLFLTPILVIIAIPFSFYIFVINKKIVDTIVDMNRPIYQFLINKWYFDDIYEYLFVNPSKMIGLFFWKKIDGSVIDKFGPDGISALIKNFSIKAVKFQSGYIYQYAFIMLLGISLLLTLLILQ

SEQ ID NO: 80661 - protein, 307 aa, Unknown
  Bacterial polypetide isolated from the Sargasso Sea
NAALLSVGVSFLMFGYLFLDKFKPIKFELFEWYPSPQIIFEFYLDGLSGVMMILISGLSLVIQLFSTSYMSKDEKYTKYFEYFNFFVFSMLLLVLSGNFLVMFFGWELVGLSSYLLISFWYEKNSAAKAGNKAFILNRIGDFGFLIGLMMILNYFETFNFVDIFDSVLIKQPSNLDLIILFLLLGAFGKSAQFPLFSWLPDAMEGPTPASALIHAATMVTAGVFMLVRVSPMLQFSELASLTIIGFGLLTALIAAFAAINQDDIKKVLAYSTISQLGFMFIAIGAGAYVAAIFHLVTHAFFKALLFH

SEQ ID NO: 80662 - protein, 395 aa, Unknown
  Bacterial polypetide isolated from the Sargasso Sea
FVLNRIGDFGFLIALMMILNTYDTFSFKTVFATTLINQPQNLDLIVVFLMIGAFGKSAQFPLFSWLPDAMEGPTPASALIHAATMVTAGVFMLVRISPLLQFSELSSILIISIGLLTALISAFAAINQNDIKKVLAYSTISQLGFMFIAIGAGAYVAAIFHLVTHAFFKALLFLGAGAVIHEMHHEQNIQKMGGLKKKMPVTAAMMGIGTLAISGIPPLAGFWSKDEILASTFANGGIYYGFWALSLLAAFMTAFYMGRHWLLIFHKEPTNNIDDVHEAPKMMTRPLLLLGIFSIFIGFINTPFFHGLEKVLHYTLIDVEVTHLPEGIAVVILALISIGAGFTGLGLAYLIYIVDIFSYFKFEIPFLKEVKGLSSNVLYLNKVGHTLFVQIPKSL

SEQ ID NO: 80663 - protein, 108 aa, Unknown
  Bacterial polypetide isolated from the Sargasso Sea
MSQWKNICKIDDILPATGVCALLGNEQVAIFRPYHSDQVFAISNIDPFFESSVLSRGLIAEHQGELWVASPLKKQRFRLSDGLCMEDEQFSVKHYEARVKDGTVQLRG

SEQ ID NO: 80664 - protein, 289 aa, Unknown
  Bacterial polypetide isolated from the Sargasso Sea
YVEEPDVYELIQSIVAIQRDYGDRKSRKNSRMKYLLHRKGIKWFKKILIDKYFKKEIKKIRKEPDKVLIDYLGWHKQNKTSYFVGLPLLSGRLSGEKKNTITSIVKKYKLDLRLTPNQDILLCNIANKNKGEIQKSLSKIGYGNLENINEIQRHALACPALPLCGLAMTEAERILPDVLIRIENLLLDLNIQKTILFRMTGCPNGCTRPYMAELALVGSGQNKYQLWLGGSKNLQRLAKPFLQRMELNDLEKTLQPLFDNWKSNLDLDFGDFIYTQDENYILNLLNKNQ

SEQ ID NO: 80665 - protein, 295 aa, Unknown
  Bacterial polypetide isolated from the Sargasso Sea
IADPLGYVEEPDVYELIQSIVAVQRDYGDRKSRKNSRMKYLLHRKGIKWFKKILSDKYFKKDIKKIRKEPDKVLIDYLGWHKQNKTSYFVGLPLLSGRLSGEKKNTITSIVKKYNLDLRLTPNQDILLCNIANKNQGEIQKSLSKIGYENLENINEIQRHALACPALPLCGLAMTEAERILPDVLKRIENLLLDLEIQKTILFRMTGCPNGCTRPYMAELALVGSGQNKYQLWLGGSKNLQRLAKPFLQRMELNDLEKTLQPLFDNWKSNLDSDFGDFINTQDENYILNLLNKNQ

SEQ ID NO: 80666 - protein, 185 aa, Unknown
  Bacterial polypetide isolated from the Sargasso Sea
VRKYNLDLRLTPNQDILLCNIANKNKREIQKSLSKIGYENLENINEIQRHALACPALPLCGLAMTEAERILPDVLKRIENLLLDLKIQKTILFRMTGCPNGCTRPYMAELALVGSGQNKYQLWLGGSKNLQRLAKPFLQRMELNDLEKTLQPLFDNWKSNLDLDFGDFINTQDENYILNLLNKNQ

SEQ ID NO: 80667 - protein, 180 aa, Unknown
  Bacterial polypetide isolated from the Sargasso Sea
LDLRLTPNQDILLCNIANKNKSAIKKALSKIGYDNLEDINEIQRHALACPALPLCGLAMTEAERILPDVLKRIEKLLLDLKIEKTILFRMTGCPNGCTRPYMAELALVGSGQNKYQLWLGGSKNLQRLAKPFLQRMELNDLEKTLQPLFDHWKSSSDLDFGDFINMQDESSILNLLNEIQ

SEQ ID NO: 80668 - protein, 192 aa, Unknown
  Bacterial polypetide isolated from the Sargasso Sea
KNTITSIVKKYNLDLRLTPNQDILLCNISNKNKSQIKKALSNIGYENLDDINKIQRHALACPALPLCGLAMTEAERILPDVLKRIEKLLLDLKIKKTILFRMTGCPNGCTRPYMAELALIGSGQNKYQLWLGGSKNLQRLAKPFLQRMELKDLEKTLKPLFDYWESSSDLDFGDFINTQDESSILNLLNDTN

SEQ ID NO: 80669 - protein, 169 aa, Unknown
  Bacterial polypetide isolated from the Sargasso Sea
LCNIPNKNKSKIKKALKKIGYDNLNDINEIQRHALACPALPLCGLAMTEAERILPEVLTRIENLLTDMNIEKTILFRMTGCPNGCTRPYMAELALVGSGQNKYQLWLGGSKNLQRLAKPYLQRMELDDLEKTIQPLLKFWKKSSAEKDFGDFINNQKESFITKLLSEIN

SEQ ID NO: 80670 - protein, 306 aa, Unknown
  Bacterial polypetide isolated from the Sargasso Sea
RTHNNEETFARIADPLGYVEEPDVYELIQSIVAIQRDYGDRKSRKNSRMKYLLHRKGIKWFKKILIDKYFKKEIKKIRKEPDKVLIDYLGWHKQNKTTYFVGLPLLSGRLSGEKKKTITSIVKKYKLDLRLTPNQDILLCNIANKNKGEIQKSLSKIGYENLENINEIQRHALACPALPLCGLAMTEAERILPDVLIRIENLLLDLNIQKTILFRMTGCPNGCTRPYMAELALVGSGQNKYQLWLGGSKNLQRLAKPFLQRMELNDLEKTLQPLFDNWKSNLDLDFGDFIYTQDENYILNLLNKNQ

SEQ ID NO: 80671 - protein, 227 aa, Unknown
  Bacterial polypetide isolated from the Sargasso Sea
EPDKVLIDYLGWHKQNKTTHFVGLPLLSGRLSGEKKNTITSIVKKYNLDLRLTPNQDILLCNIPNKNKGEIQKSLSKIGYENLENINEIQRHALACPALPLCGLAMTEAERILPDVLKRIENLLLDLKIQKTVLFRMTGCPNGCTRPYMAELALVGSGQNKYQLWLGGSKNLQRLAKPFLQRMELNDLEKTLQPLFDNWKSNLDLDFGDFINTQDENYILNLLNENQ

SEQ ID NO: 80672 - protein, 202 aa, Unknown
  Bacterial polypetide isolated from the Sargasso Sea
MLSGRLSGEKKNTITSIVKKYNLDLRLTPNQDILLCNIPNKNKGEIQKSLSKIGYENLENINEIQRHALACPALPLCGLAMTEAERILPDVLKRIETLLLDLKIQKTILFRMTGCPNGCTRPYMAELALVGSGQNKYQLWLGGSKNLQRLAKPFLQRMELNDLEKTLQPLFDNWKSNLDLDFGDFINTQNENYILNLLNENQ

SEQ ID NO: 80673 - protein, 104 aa, Unknown
  Bacterial polypetide isolated from the Sargasso Sea
RRLEIDKSVLIRMTGCPNGCARPYMAELALVGSGVNQYQLWLGGSANLQRLAQPFLQRMPLEELEQTIEPLLISWKQAGGRRSLGDHVEKLGDQAVSELLGAAA

SEQ ID NO: 80674 - protein, 296 aa, Unknown
  Bacterial polypetide isolated from the Sargasso Sea
RIADPPGYVEEPDVYELIQSIVAIQRDYGDRKSRKNSRMKYLLHRKGIQWFKKILSDKYFKKEIKKIRKEPDKVLIDYLGWHKQNKTSHFVGLPLLSGRLSGERKNTITSIVKKYNLDLRLTPNQDILLCNIPNKNKGEIQKSLSKIGYENLENINKIQRHALACPALPLCGLAMTEAERILPDVLKRIENLLLDLKIQKTILFRMTGCPNGCTRPYMAELALVGSGQNKYQLWLGGSKNLQRLAKPFLQRMELNDLEKTLLPLFDNWKSNLDLDFGDFINTQDENYILNLLNENQ

SEQ ID NO: 80675 - protein, 188 aa, Unknown
  Bacterial polypetide isolated from the Sargasso Sea
MVQKELFDKYFKKEIKKIRKEPDKVLIDYLGWHKQNKTSYFVGLPLLSGRLSGEKKNTITSIVRKYNLDLRLTPNQDILLCNISNKNKSEIQKSLSKIGYENLEDINEIQRHALACPALPLCGLAMTEAERILPDVLKRIENLLLDLKIQKTILFRMTGCPNGCTRPYMAELALVGSGQNKYQLWVGG

SEQ ID NO: 80676 - protein, 527 aa, Unknown
  Bacterial polypetide isolated from the Sargasso Sea
MIKVEKVKKKKDSAKEETVCLANGLEVSKFENFKKSSQFLKEPLATELVNESDHFTNDAVQLLKFHGSYQQDNRENRRPGKSKDWQMMLRLRNPGGEVPGKLFLALDELSDKLGNGTLRATTRQAFQMHGIRKENLKEVIQTIVNSMGSTLAACGDINRNVMAPAAPFDSPDYNIARALAKKVADLLTPMAGQGTFLELWADGDLEYTIKPDEDIEAIRKLQFKDNVFSGIKDEPLYGSTYLPRKFKCAVTVPGDNSVDLLTNDIGIVAFTSKDGNLEGCNFYVGGGMGRTHNNEETFARIADPLGYVEEPYVYELIQSIVAIQRDYGDRKSRKNSRMKYLLHRKGIKWFKKILSDKYFKKEIKKIRKEPDKVLIDYLGWHKQNKTTHFVGLPLLSGRLSGEKKNTITSIVKKYNLDLRLTPNQDILLCNIPNKNKGEIQKSLSKIGYENLENINEIQRHALACPALPLCGLAMTEAERILPDVLKRIENLLLDLKIQKTVLFRMTGCPNGCTRPYMAELALVGSGQ

SEQ ID NO: 80677 - protein, 476 aa, Unknown
  Bacterial polypetide isolated from the Sargasso Sea
GHYKTGLSMHGIRKENLKEVIQTIVNSMGSTLAACGDINRNVMAPAAPFDSPDYNIARALAKKVADLLTPIAGQGTFLELWADGDLEYTIKPDKDIEAIRKLQFKDNVFSGIKDEPLYGSTYLPRKFKCAVTVPGDNSVDLLTNDIGIVAFSSKDGKLEGCNFYVGGGMGRTHNNEETFARIADPLGYVEEPDVYELIQSIVAIQRDYGDRKSRKNSRMKYLLHRKGIKWFKKILTDKYFKKEIKKLRKEPYKVLIDYLGWHKQNKTSHFVGLPLLSGRLSGDKKDTITSIVRKYNLDLRLTPNQDILLCNIANKNKSEIQKSLSKIGYENLENINEIQRHALACPALPLCGLAMTEAERILPDVLKRIENLLLDLKIQKTILFRMTGCPNGCTRPYMAELALVGSGQNKYQLWLGGSKNLQRLAKPFLQRMELNDLEKTLQPLFDNWKSNLDLDFGDFINTQDENYILNLLNKNQ

SEQ ID NO: 80678 - protein, 279 aa, Unknown
  Bacterial polypetide isolated from the Sargasso Sea
MGWNEQGDGKLWYGVHVQNGRLRGEMKKALRAVIERYELPVRLTAQQDMLLTDVDPAWKADIMATLQAAGVKDASEVDSLERLSMACPALPLCGLAITEAERGLPEINARLRKVMTKVGLAPSDDLVIRMTGCPNGCARPYMAELGFVGDGPASYQIWLGGTRAMTGVSNAYADRVKVDDIETFFEPIFAMWAQQRQSGEFFGNFINRVGFDALRAYAESYTPLPDAPAFGAVETGGRLPRVMIDRDVFEQLQAYAEKKNTTLTRATTDAIRKMIAEDK

SEQ ID NO: 80679 - protein, 132 aa, Unknown
  Bacterial polypetide isolated from the Sargasso Sea
CPALPLCGLAMTEAERILPDVLKRIENLLLELKIQKTILFRMTGCPNGCTRPYMAELALVGSGQNKYQLWLGGSKNLQRLAKPFLQRMELNDLEKTLQPLFDNWKSNLDLDFGDFINSQDENYILNLLNKNQ

SEQ ID NO: 80680 - protein, 156 aa, Unknown
  Bacterial polypetide isolated from the Sargasso Sea
AELAALGFDLPDALPPLARHAIACPALPTCGLAITESERILPSVLERLDAQLRRLEIDKSVLIRMTGCPNGCARPYMAELALVGSGVNQYQLWLGGSANLQRLAQPFLQRMPLDELEQTIEPLLISWKQAGGRRSLGDHVEKLGDQAVSELLGAAA

SEQ ID NO: 80681 - protein, 380 aa, Unknown
  Bacterial polypetide isolated from the Sargasso Sea
MQNYSEHIGIIGGGIAGLSLGCTLLKEGIPVVIFEKMSEETSHGAAISLSSNALRLLDRVDVYSDLKTKSFVHSEASIQGPQKKICAFKTPEVLTTRRQTLMSLLHLRFLNLGGDIYHDHALVSFDAKKCEATFSNKKKYNFKHLAACDGIRSSIRDTFFPANQKPKYSGYSAWRGIGKSALKSIHFALGPKGHVVSYPINNNGDVSFVAVRKEDFQFKESWKEQGSLNNLLDDFSMYDSSIFPELKDEVSLYKWGIYIRPPLQSMTSKNITLVGDAAHPMVPFLGQGACMAIEDAYTFAMLCKHKNRNFTDAQNIYDLIRSERTKKIQKASMLQGKIYHMKNPMLVFARNSVMKYTNIPGNDLKRIHDYDAHKEVLNFS

SEQ ID NO: 80682 - protein, 294 aa, Unknown
  Bacterial polypetide isolated from the Sargasso Sea
RSALDIVEEKNIYELIQSIVAIQRDYGDRKSRKNSRMKYLLHRKGIKWFKKLLLEKYFRKDIKKIRKEPNQVLIDYLGWHKQNKTSYFVGLPLLSGRLSGEKKKTITSIVKKYNLDLRLTPNQDILLCNIANKNKSEIQKALSTIGYENLDDINEIHRHALACPALPLCGLAMTEAERILPDVLKRIEKLLLDLKIEKTILFRMTGCPNGCTRPYMAELALVGSGQNKYQLWMGGSKNLQRLAKPFLQRMELNDLEKTLRPLFDHWISNSHLDFGDFINTQDESSILNLLNAID

SEQ ID NO: 80683 - protein, 134 aa, Unknown
  Bacterial polypetide isolated from the Sargasso Sea
MAIACPALPTCGLAVTESERVLPHVLGRLETLLDELNIATPILVRMTGCPNGCARPYMAELAMVGSGVEQYQLWLGGSPGLTRLARPVLQKMPLAEMESTLRPLLVQWQKQAPKQSFGDYCHGLGGQLEAVLQA

SEQ ID NO: 80684 - protein, 223 aa, Unknown
  Bacterial polypetide isolated from the Sargasso Sea
MIDKKIIIGTRGSKLALNYAERAKNEICSKFKIKEKNLEIKKIITEGDKIKDVRLSDTGGKGLFSKTIENELLDNKIDIAVHALKDMPSDGTSGLTTNCFLERNDPREVLISRDKKKFNDLNKGSIIGTSSFRREFQFKRIRNDLKYKLIRGNVDTRIKKLNEKNFDAIILSFAGLHSLKLDQNITQIFSTSEIIPSAGQGTVALQCRENDGEIIKILKKINH

SEQ ID NO: 80685 - protein, 317 aa, Unknown
  Bacterial polypetide isolated from the Sargasso Sea
ILGLVGESGSGKSTVGNAIINLIDEPGKVSSGSVILGDLNIHENSESIVKYRGNKIGLIFQDPQTSLNPILTVGEQLIETIQTHLKLSKEEAKNKSINLLKEVGIKDAEIRFDNYPHQFSGGMRQRVVISLALCCEPELLIADEPTTALDVSIQSQILELIKKLTKERNLAVILITHDMGVIAETADRVAVMKSGNLVEIGETKKILTNPQENYTKSLVSSVPPTNKKISRFVIVEKENNNKKKNNIKILNRWSKKKIIKQDLVEIKNLNKSFDDNFFTENSKNSVMAVNDVSFEIKEGESFGLVGESGSGKSTMLK

SEQ ID NO: 80686 - protein, 220 aa, Unknown
  Bacterial polypetide isolated from the Sargasso Sea
MPPLRRYTEMPVSTAIATILAALLLGAMSPGPSFVIVARNAIGLSRSDGLATAAGMGIGGVFFSAIALLGLYTLLATVEWLYVGLKVAGGLYLIYLASKIWRGAAKPLAFDTAQGANTNARKSFWIGLSTQLSNPKTAVYYGSIFAALLPQHPPLWCYFALPPAIFAIEAGWYTVVALCFSSKRPREMYLRWKAWIDRVAASAVAALGLRLILTAHKVGI

SEQ ID NO: 80687 - protein, 235 aa, Unknown
  Bacterial polypetide isolated from the Sargasso Sea
VALIDIDQRSIDKLSRSLAKKYNIKSKAYTCDVSNENSVKDTVIHIEKDIGKIDILLNNAATKTESLKEFFMPLEKYSLDTWKEIMDVNLTGMYIMAKEVGSRMAKRKKGSIIQMSSIYSSSMAADQRIYKDSKYLETTINTPTAYPVSKAGIVGLTLHLASYWGKNNVRVNTLSPGGVYSGQNKIFVKNYSRKVPLNRMADKKEIIGAMLYLASDASSYVTGQNIFVDGGISVW

SEQ ID NO: 80688 - protein, 174 aa, Unknown
  Bacterial polypetide isolated from the Sargasso Sea
KKILLMGKHKQIFESGAIMLYLAEKHNQLLGGKKTNKLSVIQWLMFQMANIGPMLGQAHHFRHYANENIQYAINRYTNEASKIYAVLDAQLGKSQYIAGEDYSIADIAIYPWLRPQKMQGQNISHHPNIQRWYNTMRARPAIKRGLLVMHDKVSNIRKKPVGDAWKTLFDRQSK

SEQ ID NO: 80689 - protein, 219 aa, Unknown
  Bacterial polypetide isolated from the Sargasso Sea
MRKKIIIGSRGSKLALLYAQQAKDKIIENTDLSNEDILIKSITTKGDEVQDIRLSELGGKGLFSSNIEKELQLKNIDIAVHALKDMPANETRGLTTDSFLERNDPREILITKNKKKLKDLDQKSIVGTSSYRREFQIKKIRQDLNCKLIRGNVDTRIRKLNEGMYDAIILSYAGIKFLKFENEISEIFSAEEIIPSAGQGVIALQCRENDNETISILNK

SEQ ID NO: 80690 - protein, 189 aa, Unknown
  Bacterial polypetide isolated from the Sargasso Sea
MHFLADVYVTCDVCHGSRYNDQTLEVKYKDKNISDVLSMTVEDALSFFDQIPAIKNKLKTLNDVGLGYITLGQSATTLSGGEAQRIKLAKELSKRSTGKTLFILDEPTTGLHFHDIELLLKVLHRLKEQGNTIIVIEHNLDVIKTADWIIDLGPEGGSQGGELVASGTPEKVSKDKKSFTGKYLKGMLS

SEQ ID NO: 80691 - protein, 191 aa, Unknown
  Bacterial polypetide isolated from the Sargasso Sea
MKRRKIIIGTRASKLALIYAEKAKNRILESSSELSVDNVEIKKITTEGDLNLTDRLSEIGGKGLFSKKIEKELLENKINIAVHALKDMPSDETPGLITSCFLKRSDPREVLITLNNKKFKNLDENSIIGTSSYRREFQLKYKRKDLKYKLIRGNVDTRINKLKQNSYNGIILSYAGIKNLNFEKYASEILN

SEQ ID NO: 80692 - protein, 291 aa, Unknown
  Bacterial polypetide isolated from the Sargasso Sea
MKNLDLTTKGGFYVSEASNDTDENGITSTFTVRLSSQPGDNDTSTADNVTITVSVSDSTEAELVSDSSLVFTESNWNAAQTVTVRGIADNLSDGDQSYTVILKDNVTSDARYRYVDPPDVSLKNLDLTTKGGFYVSEASNDTDENGITSTFTVRLSSQPGDNDTSTADNVTITVSVSDSTEAELVSDSSLVFTESNWNAAQTVTVRGIADNLSDGDQSYTVILKDNVTSDARYRYVDPPDVSLKNLDLTTKGGFYVSEASNDTDENGITSTFTVRLSSQPGDNDTSTADNV

SEQ ID NO: 80693 - protein, 320 aa, Unknown
  Bacterial polypetide isolated from the Sargasso Sea
NTFSNYNGEALYGDIAVICRGWGNVTAISDAMQKSAIPVDIHIEKFFDVPIVKDVLSWSHLILKNKKSDVALYRILKQYLGQEWTTSFFQSVERTSIDKKLIQLEKIKKDSNHILFVIESISNLQVAYQKTLKADEMVWEILKTLKHSPLVKNLRSHYRHSHRLNLANAGKILDIAEKFVNKNSNGNLNNWIRYMDIMALDKNQNAAQPDINNKNLAVQIMSIHQSKGLQFPIVMMPFLYSGSFPSNLKRPRIINRPPKSWTAWGKNTDEDIKELHLQEERRVFYVGITRAEKQLFLFGPTTKQSLFIKELESLNPQPRR

SEQ ID NO: 80694 - protein, 336 aa, Unknown
  Bacterial polypetide isolated from the Sargasso Sea
INAILKNKKSLTAKYLNGEKSIQIPSKRKKPSDKKIKVINASENNLQNISVNIPIGLFTCITGVSGSGKSSLINQTLMPISSFILNKSKLNKEIKCDKIEGLEHLDKVINIDQSPIGRTPRSNPATYTGLFSYIRELLSKTVEARARGYKPGRFSFNVKGGRCEACQGDGMIKVEMHFLADVYVKCDVCNGSRYNEQTLEIKYKGKNISDILNMTVEEGLEFFSAHPPIYKKLITLNDVGLGYITLGQSATTLSGGEAQRIKLSKELSKRSTGKTLFILDEPTTGLHFADIELLLNVLKRLKNQGNTVVVIEHNLDVIKTADWIIDLGPEGGADGG

SEQ ID NO: 80695 - protein, 200 aa, Unknown
  Bacterial polypetide isolated from the Sargasso Sea
NLKIITNCGFGNNISTKAELISRLTASQSTLTINDTSVTKFERNKLVNRVFGNSIKNSFKTKDLHVHDYKSLFGCTISHNGYENNFGCTHKRELYLDHNDNKLKGVDHILKKSDGIPVRYVFRFHLNPKLTAIKTMSGNSALIQISKNKSLIFTIKDESIQIEKSIYLGGRKILDNTCITISGNLVNKNKTFEWDIKKKI

SEQ ID NO: 80696 - protein, 72 aa, Unknown
  Bacterial polypetide isolated from the Sargasso Sea
MKAIILAAGRGSRMGNLTLNKPKCLLEVGGKTLLEWQLDAIKGAGISEIAIVTGYRRECLKEYGLVEFHNSH

SEQ ID NO: 80697 - protein, 217 aa, Unknown
  Bacterial polypetide isolated from the Sargasso Sea
MKREKIIIGTRGSKLAMIYAENVKDRLKEVFSRTLEIRKIVTSGDENQKDRLSDLGGKGLFSKKIENELLENKIDIAVHALKDMPSIETEGLETNYFLKRNSPNEILISNKKIKFNDLKPNSIVGTSSYRREYQLKNKRSDLNYKLIRGNVDTRIKKMERGDYDAILLSKAGIDSLKFNSKITQEFTTDDLIPCAGQGIIAIQCRNNDLEIKKLLKI

SEQ ID NO: 80698 - protein, 266 aa, Unknown
  Bacterial polypetide isolated from the Sargasso Sea
CVKIEITHLLKRNLPQLSGGELQRVAICATVLKEADVYLFDEPSSYLDIHERMRIVKLIQELSETKRVLVIEHDLAILDVLCDLVHIVYGDKGAFGIFTPPRTTRTAINAYLDGYLPEQNVRIRDKPIKFQTHTERNTERGIPYLEWGNLEKKLGNFSLKTGEGKIHRSEVVGVVGANGIGKSTLVKILAGEHEADNGWITEEAKISYKKQHVEADYEGTVREWLDIELGARWRQGDFNVNVVKALGVDKLLEQVTTTLSGGELQA

SEQ ID NO: 80699 - protein, 259 aa, Unknown
  Bacterial polypetide isolated from the Sargasso Sea
MAEFRPETSLVETTTFEINLVSNEPALGGKLDWTVGAFFMEHEIENHIRGYVDNDQNGVIRYVCGEAFADPNYCYEHDNSIPARFAVYDAEFDFVTDAFPSRESKSVFVETSYSFSDTFRLISGLRYSDDTFETDVTNFFYDNFVAEGGGDKVTGRITGEFDVADYTMVYASFTTGYKPGGTNLTYGYFDDNAPPMVYQKFEPETVDSMEFGLKTDFYDGKARANVAVFSYDYENLQFQATDPDVYRGGVANIPESEMS

SEQ ID NO: 80700 - protein, 217 aa, Unknown
  Bacterial polypetide isolated from the Sargasso Sea
IETEGLITNFYLKRNSPNEIFISNDNINFLDLKPNSIIGTSSYRREYQLKSIRSDLKYKLIRGNVDTRIKKLENGDYDAILVSKAGIEALGLTNKITHEFNTEELIPCAGQGIIAIQCRENDQEIINILEKINDDQSRIIANAERKILKILEGDCDTAVGVYAKIDKDLVNIKAELFSVDGKQRFFVEESENKTMVKDLSVKIGEKLKSESKGSYKR

SEQ ID NO: 80701 - protein, 233 aa, Unknown
  Bacterial polypetide isolated from the Sargasso Sea
VKSIAVTHTNNDYGKGLADVYVTAVKAHGIKVTAVTAHEEGKGDYGAEVATLASAGGDALAVLGYLDQAGGSIIAGSLDAGSFDRFVLSDGMIGDSLTDRFGKDLNKSFGSLPGSTGKGAGVFANVAKAAGIDSSGPYTGESYDAAALITLAMQAGGKADRAAIQANVMSVANAPGKKIYPGELKKALDLLAKGKAVNYEGATAVEFTDVGEAFGSFLEKEIKGGKFKTKKQR

SEQ ID NO: 80702 - protein, 153 aa, Unknown
  Bacterial polypetide isolated from the Sargasso Sea
NFDHPSSIDFSLMIKHLESLKNGIQTKIPIYDFATHTRKKSTKTIDKHRIILLEGIFSLFNDEIRDMMNIKIYIDTPNDLRIIRRIKRDIDERNRTFESIIKQYYENVRPMHIKFVKPTKQYADIIIPMVSKNKIAIDILSSKIFDLINNKNN

SEQ ID NO: 80703 - protein, 241 aa, Unknown
  Bacterial polypetide isolated from the Sargasso Sea
MKRANLVIGTRGSKLAMIYAENVKKELKKYYFKEIELKIIVTTGDQKQDERLSEIGGKGLFSKQIEKDLLNKNIDIAVHAFKDMPTEETRNLITNNFLKRNSPNEILISKNNIKFEDLEPNSIIGTSSYRREYQLKKKRPNLKYKLIRGNVDTRVQKLEKGEYDAIILSKAGLDALNLQHKISQEFSIDELIPCAGQGIIAIQCRENDNEIKKLLENINDEETRIVAKAEREVLKVLEGDC

SEQ ID NO: 80704 - protein, 291 aa, Unknown
  Bacterial polypetide isolated from the Sargasso Sea
MDGYQDISVWRGAADYLMGDIASASKNFDAGDPSLQNYPNPLKGKLLIPRLAVALENGQTKLAQKWRDKLADELDELGRKYKGRLSYFFGRLYRDELDFDNALGAYQVASNSGDVWSRVRTEYELVDLNLQQESIEVSEAIQRLERLRFAWRGDAFERKVLDRLAELYFTDSDYRNGLNTLKVIVSNFSKHPDAQAAARKMRDIFRRLYIEGEAENISPLRALALYDEFRELTPAGPEGNLMIQKLAEKLVNVDLLDKASDLLGHQVKFRLKGEEKAAVGTKLALIRLIAR

SEQ ID NO: 80705 - protein, 159 aa, Unknown
  Bacterial polypetide isolated from the Sargasso Sea
MNRKIIIGSRGSKLAMLYAEKAKDKIVKTTNFSDEDLFIKKITTKGDEFQDVRLSEVGGKGLFSSNIEKELQDKNIDVAVHALKDMPALETIGLKTDSFLERNDPREILITINKKKLSELKKNSIIGTSSFRREYQIKKIRSDLRCKLIRGNVDTRIKK

SEQ ID NO: 80706 - protein, 253 aa, Unknown
  Bacterial polypetide isolated from the Sargasso Sea
IILWYAILIQLPRIKQAPQIWDTFYISNRGLYGPRPIYEDGFFIVSIFILLSFFIAFFVRRWAKKRQDNTGQQFPTFTTNLGIIILLPLLIFFIMGSPMTLEYPVLKGFNFKGGMVIRPEFIAMFLALTIYTGAFISETVRSGILSVTKGQREASGALGLKQNWIMRLIIIPQALRVIVPPLTSQYLNLTKNSSLGIAVGYADLVHGFGGISLNQTGQAIECMAITMATYLVISLTISFFMNIYNKSIQFKEK

SEQ ID NO: 80707 - protein, 179 aa, Unknown
  Bacterial polypetide isolated from the Sargasso Sea
MNEIVEWRDDRTLTGHTDWVLAVALSGDGAVAVSGSRDNNCIVWDVGTGARKHTLTGHTMSVQAVALSGDGAVAVSGSRDKNCIVWDVRTGAQKHTLTGHTYAVNAVALSGDGAVAVSGSDDKNCIVWDVSTGTLTGILTGHTSSVLAVALSGDGAVAVSGSLDNVNNSCIVWDVGTGA

SEQ ID NO: 80708 - protein, 276 aa, Unknown
  Bacterial polypetide isolated from the Sargasso Sea
PIDYLSAGMRIPADEISLVSTLRGEPLPLVKSISNDIRVPADAEMIVEGYLDERGYIEPDGPYGEYVGFYGPMHQDPVFHVTAITMREDVLHQTLFHGAGLQIHRAESVHLMSVGLEAKALTILENENIDVRDVFVPPSSAEGQHLRVSIAQKHAGDVKKVISALINNMFVTKHVFVVDEDINIRDENHWEWALVSRLQADRDIFTFPERPGMPMDPSLDAGKAGTKAGFDLTLPIKRRGELMLTIATAPKIKSSNRFKSAREAISEGGAMFLSDI

SEQ ID NO: 80709 - protein, 317 aa, Unknown
  Bacterial polypetide isolated from the Sargasso Sea
PAAIKSLKKEKVKHVFGLIGSATMEIFDALYHEKSIKFIGVRDERTGTHMADGYARASNQPGVILAGQNGPGATNLVTGLAQAKAAFSPVISIAGSYSTKDKMEDAFQGLDQQSLFKPVTKKTWTVKNTKKIPKIFSDAFNLVMSPRRGPVCINLPRNILANKEKFKINEKNSSFVNQNSTKAKSNYIKKAVKIISNSNKIVIIAGGGIKYTSRYKNVLKLAELLNVPIVTAAGHGDAIPFNHKLNAGQMGPRGNPVASKLVKEASVIIALGTRLGFNSTFYSYENINKRAKIIQVELEKRMLGKILFCSSRNLWRR

SEQ ID NO: 80710 - protein, 126 aa, Unknown
  Bacterial polypetide isolated from the Sargasso Sea
SVINEKKIPVIAPLGIGKDKNTYNINGDTAASSIAKKLKSRRLLLMTNVEGVYDDRKTLISEIKPFDIENLIKLKIVQGGMIPKIKNCIDAVENGVRGVVILDGRKPHSILYEIFSDKGAGTLIRK

SEQ ID NO: 80711 - protein, 254 aa, Unknown
  Bacterial polypetide isolated from the Sargasso Sea
MRIFLTGATGFIGSRILNELLAAGHQVTGLARSEASALALQTAGADVQYGTLEEPRSLLEAVTRCDAVIHTAFDHDFSRFVENCEKDQRIILAIGAALQGSRRPLIITSGTAMGDIGNGLPASEMHFNPAHPNPRAASERAGNRLLDAGVDVRVVRLPQVHDTTRQGLLTYYIAHAAEKGVVVVVGDGNNCWSAAHISDVTALYLRVLEQGLAGRRYHAVAEEAIPSLRIAEVVAEKLHLPLQSLSADRAAAHL

SEQ ID NO: 80712 - protein, 171 aa, Unknown
  Bacterial polypetide isolated from the Sargasso Sea
MTKKITIGSRGSKLALLYAQKAKDTIIKNTNLSDVEVVIKTIITKGDQFHDKRLSEFGGKGLFSNNIEKELQNKNIDIAVHALKDLPAIETNGLIINSFLERNNPKEILISRDKKILKELNVKSIIGTSSYRREFQIKKIRPDVICKLIRGNVDTRLKKLKEGMYDAIILS

SEQ ID NO: 80713 - protein, 181 aa, Unknown
  Bacterial polypetide isolated from the Sargasso Sea
IIGTSSYRREYQLKSIRSDMNYKLIRGNVDTRIKKLENGDYDAILLSKAGIEALGLTNKITHEFNTEELIPCAGQGIIAIQCRENDQEIINILEKINDDQSRIIANAERKILKILEGDCDTAVGVFAKIDKDFVNIKAELFSVDGKQRFFVDESEDKKMIDDLSIKIGEKLKSESKGSYKR

SEQ ID NO: 80714 - protein, 199 aa, Unknown
  Bacterial polypetide isolated from the Sargasso Sea
ASALIENQFVEVLIAPSFSKDALNVLKEKKNVRVISKKNFKKIPMPFSIQAIDGGFLVQEDDWKTIDKDNLEYVTERKPTDHQIIDLIFAWKVCKYVKSNAIIFAKNQQTIGIGAGQMSRVNSAKIASLKATAADLDTKDSVMASDGFFPFSDSIKMASDNGISCIIQPGGSIKDNEVIEEANKQNIAMVMTRMRHFRH

SEQ ID NO: 80715 - protein, 271 aa, Unknown
  Bacterial polypetide isolated from the Sargasso Sea
NFTRDENARGHNFLKQLGMMYGEEFICIIVRDSKYKLKNQQWIKKDWSYHDYRDADIDTFKDAALLLADKGYKVFRMGKDVKKPFNVNHPNVLDYANSSYRNDFFDIWLMANCRFCITVGTGLDDVSVAFRRPLVEVNLLPVAGIRCNQAFTIGLFKKLKYKSTGQLLGLDEIIKTGAMTCFRSECYDDLGIEIINNTPEEIVNTVIEMEGRLNGTWNDVPKDIELQNIFWKKFNKSSYFNRRGLKTFGKIHPNSRISAHFLQENKNWFLV

SEQ ID NO: 80716 - protein, 259 aa, Unknown
  Bacterial polypetide isolated from the Sargasso Sea
VQNKRLSDVGGKGLFTKKIENELLNKKIDIAVHALKDIPSKENKNLFTNCFLKRNDVRDVLITRKKQKFKNLPKNSIVGTSSFRREFQLKKIRKDLIYKLIRGNVDTRISKLKNKIYDAIILSYAGLKSLKMENNISQVFSLSEIIPSAGQGTIALQCRKNDIRMVQLLKAINHIPTNICVNVERDVLKVLDGDCETPVGVNAKIQNNKLNIVIELFSLDGKKRFYLKSSKELKLAPLVGKELGEKIKKRSKNLYKKNK

SEQ ID NO: 80717 - protein, 133 aa, Unknown
  Bacterial polypetide isolated from the Sargasso Sea
MIKKRKKISGGQAAVQSLKKEKVKHVFGLIGSATMEMFDALYHEKSIKFIGVRDERTGTHMADGYARASNKPGVILAGQNGPGATNLVTGIAQAKAAFSPVVAIAGSFSTKDKMEDAFQGLDQQSLFTPITKK

SEQ ID NO: 80718 - protein, 182 aa, Unknown
  Bacterial polypetide isolated from the Sargasso Sea
MKSKKIIIGSRGSKLALIYAERAKKKILEVSSDFGIEEILIKKITTSGDLNQKDRLSDIGGKGLFSKQIENELIENKINIAVHALKDMPVKETDGLITNCFLERNDPREILISNEKKKLMDLNKNSVIGTSSYRREFQLKKLRKDLNYKLIRGNVDTRINKVKENLYDGIILSYAGIQSLNL

SEQ ID NO: 80719 - protein, 273 aa, Unknown
  Bacterial polypetide isolated from the Sargasso Sea
NLSNDDILIKSITTKGDQVNDMRLSEIGGKGLFSSNIEKELQLKNIDVAVHALKDMPANETEGLRTDTFLERNDPREILITKNKKKLKDLDKNSIVGTSSYRREFQIKKMRQDLNCKLIRGNVDTRIRKLNEGMYDAIILSYAGIKFLKFENEISEIFSAEEIIPSAGQGIIALQCRENDKETISILNKINHEETHKRAHLERNILKVLDGDCETAIGTHSVVDGDKIIVEAELFSLDGKQRFYEKKVGNLNEFKELGKKVGILLKNKSNNSY

SEQ ID NO: 80720 - protein, 167 aa, Unknown
  Bacterial polypetide isolated from the Sargasso Sea
MCIGCHACTVACKSEHDIPIGVNRTHVKYIEKGQFPNSTREFSVHRCNHCADAPCVEICPTTALYDRADGIVDFDSDRCIGCKSCMQACPYDALYIDPDTHTAAKCNYCAHKVDYGYEPACVVVCPVEAIISGDLEDPDSNISHLVKNEKTMTRKPEKLTVPNLYYI

SEQ ID NO: 80721 - protein, 208 aa, Unknown
  Bacterial polypetide isolated from the Sargasso Sea
MCGRFAQIREEEELMKSLSVHHCEVSVKTSYNIAPGADISIIHQQDSRRVLDSTRWGLIPFWAKEGGRGMINARSETVSEKPSFRHAFSKRRCLIPSSGFYEWEKTENGKQPWFISGKHQPFVFAGIWEQWKSPEGFLEKTCAILTCDANELMAPIHHRMPVILQEKERNIWLDPRPKLDLKSLLRPCSQELLQAWPVSSRVNRACIQ

SEQ ID NO: 80722 - protein, 228 aa, Unknown
  Bacterial polypetide isolated from the Sargasso Sea
MKIDIFDTTLRDGFQQEGISPSVKDKLAIAKLIDELGVDYIEGGWPGASPKEKEFFDKAKKDLKLENAKLVSFGSTRKLNVKVEDDPQVQALIDSETEYVCIVGKSSNLHITKALETDVDSAILMATDTVKYLKDNGRKVFFDAEHFFDGLKEDSETTLKILDAVVKEGVDCFIFCDTNGGTLPHEVTDLLTPIVEKYPNQSFGVHFQNDNGCAVTNSLAAVNLGGEH

SEQ ID NO: 80723 - protein, 206 aa, Unknown
  Bacterial polypetide isolated from the Sargasso Sea
MRKKIIIGSRGSKLALLYAQQAKDKIIENTDLGNEDILIKSITTKGDEVQDIRLSELGGKGLFSSNIEKELQLKNIDIAVHALKDMPANETKGLTTDSFLERNDPREILITKNKKKLKDLDQMSIVGTSSYRREFQIKKIRQDLNCKLIRGNVDTRIRKLNEGMYDAIILSYAGIKFLKFENEISEIFSAEEIIPSAGQGVIALQC

SEQ ID NO: 80724 - protein, 307 aa, Unknown
  Bacterial polypetide isolated from the Sargasso Sea
IVNKNKNNKAYILSPIVRDRKGEYRKEIEDLKKKGYQRLKIDGNVYEINEVPKLKKNFKHNIEVLIDRLVIKNNIKQRLAESVEVALSLSDGLVYLENLDTKKLTTYSSKFACPISGFSIEEIEPRLFSFNAPMGACDECDGIGVEKYFDDKKIVPDDSRSILKGAIKPWETKVFGYQKKFFVETISKILKEYKIDVKTPWYKIPKNIQNIILHGDENNKHDFISNFEGIINFIDRKYSETERWWVQYELEKYLSERDCEVCNGFRLNKKALAVKIAGNHIGEITKKSIDDCFDWFNKLNKNLSSNE

SEQ ID NO: 80725 - protein, 196 aa, Unknown
  Bacterial polypetide isolated from the Sargasso Sea
MKIDIFDTTLRDGFQQEGISPSVKDKLAIAKLIDELGVDYIEGGWPGASPKEKEFFDKAKKDLKLENAKLVSFGSTRKLNVKVEDDPQVQALIDSETEYVCIVGKSSNLHITKALETDVDSAILMATDTVKYLKDNGRKVFFDAEHFFDGLKEDSETTLKILDAVVKEGVDCFIFCDTNGGTLPHEVTDLLTPIVE

SEQ ID NO: 80726 - protein, 253 aa, Unknown
  Bacterial polypetide isolated from the Sargasso Sea
SADCRQQQQHRFHKQAPDLLSRVHGLDRLPEEPIQGVILANEVLDAMPVHKFRYTPNQLDEYHVTHQHQTLTWEILPCTNAALNRAITHLNIQSSQPYHSEINLALPSWIKQLNQCLSHGLILLIDYGFPRQEFYFPERHMGTLMCHYQHRAHDNPLVFPGIQDITAHVDFTAIAEAASNNGLTVAGYTHQAAFLGSCGIHDLIQQESSNNTSNIHTLLHPSEMGEHFKCIALTREIDHPLLGFQLLNQVERL

SEQ ID NO: 80727 - protein, 179 aa, Unknown
  Bacterial polypetide isolated from the Sargasso Sea
MLPAENLDNKIKEFWPKDGPPAQEVNKYVKKYSKEKIVIKCGGRVLLDPILFNNFIKDVVTLKKLGLTPLLVHGGGLGIKKKLDKSNIKSNFIMGLRVTDKKMIKIVEDVMVEFNKEIVKTLEKESCKAKSITIRENNAIYVRQKSKELGFVGSPNRIDDKLIKNFIDKDFIPVIAPMG

SEQ ID NO: 80728 - protein, 132 aa, Unknown
  Bacterial polypetide isolated from the Sargasso Sea
FGKKVIDKIDYAEQETDIKKSKLDLNIALGYGGKQDIVDITKKIASSVLAKQIKIEDINEKVIHDASSVPVENIDLLIRTGGDNRISNFLLYQIAYAEIMFVDKYWPDFNRKDFLKCIGNFKKINRRFGKRK

SEQ ID NO: 80729 - protein, 199 aa, Unknown
  Bacterial polypetide isolated from the Sargasso Sea
MNKYDISCIGIPKTVDNDLPFIDTCPGFGSVAKYVSTSILEAGLDVASMSETSTKVFVMEVMGRHAGWIAASAALAGSDRNLPPHIILFPEIEFNKKRFLQEVKKCVSKHGYCVIVASEGVKAKGKFLTESSSKDAFGHAQLGGLAPLIVEMIKSNLNYKCHWAVADYLQRSARHLSSKVDVDQAYKLGKFAVQQAVQG

SEQ ID NO: 80730 - protein, 195 aa, Unknown
  Bacterial polypetide isolated from the Sargasso Sea
MRKKIIIGSRGSKLALLYAQQAKDKIIENTDLGNEDILIKSFITKGDEVQDIRLSELGGKGLFSSNIEKELQLKNIDIAVHALKDMPAYETEGLRTDSFLKRNDPREILITKNKKKLKDLDQKSIVGTSSYRREFQIKKIRQDLNCKLIRGNVDTRIRKLNEGMYDAIILSYAGIKFLKFENEVSEIFSAEEIIP

SEQ ID NO: 80731 - protein, 280 aa, Unknown
  Bacterial polypetide isolated from the Sargasso Sea
IVKVSDLNDEDIVIKKITTKGDEIQDVKLSEVGGKGLFSSNIEKELQDKNIDIAVHALKDMPAFETQGLKTDVFLERNDPREILITKDKQKLNELKKNSIIGTSSFRREYQIKKIRSDLECKLIRGNVDTRIKKLKDGIYDAIILSYAGIKFLDFDSEISEIFSTEKIIPSAGQGIIALQRREGDEETISVLKKINHNETFMRAHVERNILKVLEGDCETAIGAHSVIAGDKITVEAELFSLDGSKRYYEKKTGKVEDFSQIGEEVGQILKTKSNNSKKR

SEQ ID NO: 80732 - protein, 311 aa, Unknown
  Bacterial polypetide isolated from the Sargasso Sea
MQDSYQPHADSVERALTNYQHLAEVLEKASTTHQRPEQLLDWLNKQIHKPESDEELTLRLESDSQLIRLITQHGSKGLEYPIVFVPFATGYRDAAKNGNTTSQIFTYYDEEKQDLQMQLGQTPQAIARVQSESEAEDMRLAYVAVTRAAHRCYMGVVPLTNNERSALARALGVGGDGSNNDWSSVLNRVAEEDASHASHIDGDEFEEVYTGFEQEDELPQLTALQFTGTASEEWRLYSFSAMSRLTTVGANQSVETDTAAESGATTEPLGQTLPSVPVLSTIRDEEVYASDTLVGEMGSIDADIISSAGIE

SEQ ID NO: 80733 - protein, 147 aa, Unknown
  Bacterial polypetide isolated from the Sargasso Sea
QQKVRLNFFGDYSSFGETVVNAIQDAEISTAFADPKLKLNIALGYGGRADIVHAIKLIANEIKLDKLTLEDVSDEIIFKYLKAPINDLDLLIRTGGDQRISNFLLYHLAYSEIQFTETLWPDFTEEEFLQCLEAFSNTERRFGKRTI

SEQ ID NO: 80734 - protein, 242 aa, Unknown
  Bacterial polypetide isolated from the Sargasso Sea
SKKIEIELINNNIDIAVHALKDMPSIETEGLITNFYLKRNSPNEIFISNNNINFLNLKPNSIIGTSSYRREYQLKSIRSDLKYKLIRGNVDTRIKKLENGDYDAILLSKAGIEALGLTNKITHEFNTEELIPCAGQGIIAIQCRENDQEIINILEKINDDQSRIIANAERKILKILEGDCDTAVGVYAKIDKDLVNIKAELFSVDGKQRFFVEESENKTMVKDLSIKIGEKLKSESKGSYKR

SEQ ID NO: 80735 - protein, 219 aa, Unknown
  Bacterial polypetide isolated from the Sargasso Sea
MNKKIIIGSRGSKLALLYAQSAKDTIIQNTELNDEDIIIKTITTKGDQVKDTRLSEFGGKGLFSSNIEKELKNKNIDIAVHALKDLPAIETKGLLTDTFLKRNNPKEILISRNKKKLNELEIKSIVGTSSYRREFQIKKLRPDLNCKLIRGNVDTRIKKLKEGLYDAIILSYAGIKYLQLENEISEIFTAEQIIPSAGQGIIALPCREDNQEIITLLKK

SEQ ID NO: 80736 - protein, 106 aa, Unknown
  Bacterial polypetide isolated from the Sargasso Sea
GDVKNKTCIIIDDIIDTAGTLCNAAYALKEQGAQKVYAYISHPVLSGSAIEKISKSKLDSLIVTDTIPLSKEAENCKKIKIVSMDSTLAGAITRVNREESISEMFL

SEQ ID NO: 80737 - protein, 227 aa, Unknown
  Bacterial polypetide isolated from the Sargasso Sea
MSKKIIIGSRGSKLALLYAQQVKDKIIENTNLGNNDILIKSITTKGDEVQDIRLSEVGGKGLFSSNIEKELQLKNIDVAVHALKDMPANETKGLITDSFLKRNDPREILITKDNKKLKDLDEKSIVGTSSYRREFQIKKIRKDLNCKLIRGNVDTRIRKLNEGMYDAIILSYAGIKFLKFENEISEIFSVEKIIPSAGQGIIAMQCRENDNETISILNKINHQETNK

SEQ ID NO: 80738 - protein, 164 aa, Unknown
  Bacterial polypetide isolated from the Sargasso Sea
MEKKNIIIGSRGSKLALIYANKVRSELQKDFTGKIEMKKIVTSGDENQKDRLSNLGGKGLFSKKIENELINNEIDIAVHALKDMPSIETEGLITNYFLKRNSPNEILISKGNIKFENLKSNSIIGTSSYRREFQLKKKRPDLNYKLIRGNVDTRIKKLESGNMM

SEQ ID NO: 80739 - protein, 89 aa, Unknown
  Bacterial polypetide isolated from the Sargasso Sea
TIKLPGLVNVSFPNFRSDILMAKLDRLNIAVSNGSACGSGNIKPSPILTAIGVGEVMNLSTLRFSFGSSNTSEDIDYLLVQLKSILSEK

SEQ ID NO: 80740 - protein, 154 aa, Unknown
  Bacterial polypetide isolated from the Sargasso Sea
MKKDKIIIGSRGSKLALIYAEKVKKELGKEFLKKIEIKKILTSGDENQKDRLSNLGGKGLFSKKIENELINNHIDIAVHALKDMPSIETEGLITNFFLKRNSPNEILISKSNIKFEDLKPNSIIGTSSYRREFQLKQKRTDLNYKLIRGNVDTR

SEQ ID NO: 80741 - protein, 283 aa, Unknown
  Bacterial polypetide isolated from the Sargasso Sea
RAKSELKKISSDFDIDIKKITTKGDIIQNVRLSDTGGKGLFCKLIEDDLINNKIDIAVHALKDLPTKETDGLATNCFLKRNDPRDILISKNNLDLKKLKKNSIVGTSSFRREFQLKKIRQDLNYKLIRGNVDTRIKKLKENQFDAIILSHAGVRSLKLDSNIAQIFSISEIIPSAGQGVIALQCRKQDERIIKILNKINHKETNYLVEAERNVLKVLEGDCETAIGIFAKIVDDKIILEAELFSLDGKQRFYVKSSKDLSLASELGKEVGEILKKKSKNSYKK

SEQ ID NO: 80742 - protein, 113 aa, Unknown
  Bacterial polypetide isolated from the Sargasso Sea
MESGVYIISVAARLLEVHPQTLRKYEKYGLVRPSRSVGMLRLYSEEDLIRLKIIKTLVDDYGVNLAGIAIIMDLIEGIDEISMISSTTNETNFNSRKTIINQKVKLLLENFVV

SEQ ID NO: 80743 - protein, 216 aa, Unknown
  Bacterial polypetide isolated from the Sargasso Sea
MEKVGEHITLDIVGTKKEYTPEFYEKLVYKIAKAAKVTVLKISKYKFEPQGFTLVALLAESHISFHTFPEKEIVSFDFFTCGKVSPKVSLDIIKDEMEHTNIIIKEFNRDTIDLYHDNYSSPGLKKSYVVNRVLENFKSKVGQYIEILDLEQFGKALFIDNEIQVAESDEHLYSSTFVNSGLNLNSNKEKAAIIGGGDGWCCKRMHFTKLWLYRLV

SEQ ID NO: 80744 - protein, 193 aa, Unknown
  Bacterial polypetide isolated from the Sargasso Sea
DNINFNDLKPNSIIGTSSYRREYQLKSIRSDLNYKLIRGNVDTRIKKLENGDYDAILLSKAGIEALGLTNKITHEFNTEELIPCAGQGIIAIQCRENDQEIINILEKINDDQSRIIANAERKILKILEGDCDTAVGVYAKIDKDHVNIKAELFSVDGKQRFFVEESENKTMVKDLSIKIGEKLKSVSKGSYKR

SEQ ID NO: 80745 - protein, 160 aa, Unknown
  Bacterial polypetide isolated from the Sargasso Sea
MLDLGCGDGSLTVEMGRFAERVIGVDYNPELLASARQRMDRLGLEHVTLLAEDVGSLSLEPQSVDVAVFSQSLHHLDEPFNGIRQAFRLLRPGGLLAVMELAAHDQLWVLEKLKHKWPGFEQEHLLKMMQEAGFSGLKEEILPQSRGELFQVILAMGVRD

SEQ ID NO: 80746 - protein, 207 aa, Unknown
  Bacterial polypetide isolated from the Sargasso Sea
MDFDPLNEEAKFETVLKIKEACISTGFFSISNHGMPIEILEDCWNSSLQFFRQSESEKMKVGMPFPGYPYGFVPMEQETLARSKGLTAPPDLKESFSVGPGLEPPPGLSAEEAQFVFSENQWPENPKYFKSSWKFCYKSLAECADRVMGLLALALDLPENWFDRFFLNPISAMRVNYYPELGKEPEENQLRASAHSDYGSLTLLLQD

SEQ ID NO: 80747 - protein, 296 aa, Unknown
  Bacterial polypetide isolated from the Sargasso Sea
IKSLKKEKVKHVFGLIGSATMEMFDALYHEKNIKFIGVRDERTGTHMADGYARASNQPGVILAGQNGPGATNLVTGLAQAKAAFSPVVSIAGSYSTKDKMEDAFQGLDQQFLFKPVTKKTWTVKNAKKIPKTFSNAFKLAMSPRRGPVCINLPRNILTDKKNFKINEKSQSFDNQNSTKAKYNNIKKAVKIISSSNKAVIIAGGGIKYTSKYKNVVKLAEFLNVPIVTAAGHGDAIPFSHKLNAGQMGPRGNPVASKLVKEASVIIALGTRLGFNSTFYSYENINKRAKIIQIELE

SEQ ID NO: 80748 - protein, 154 aa, Unknown
  Bacterial polypetide isolated from the Sargasso Sea
MTAIILAAGKGERLKPLTTLTPKPLIAVSGQTLLERNINCLAESGVKKIIVNGSRMGNQIESFLRNHYEQSNVSIDYISEGDEPLGTAGAIFNIIDEGLINDDLFWVVNADIITDFPFKRIQLNRETVGHIVLVPNPRHNSSGDFCLEGDRVTI

SEQ ID NO: 80749 - protein, 238 aa, Unknown
  Bacterial polypetide isolated from the Sargasso Sea
MSKIIKKRKLIVKKNEISIQLYTARKFEPLSEVIEFISNSGISNIELFGLESINVDSIRDLLVSNNLFCHSAHSSYESIHDYNEIIHRAKLLNIKHIIVPAPPKKNDGDFKSSFDINELDWMSFGKKLSSYVSIFEDNGLTLGYHNHSYEFISLPSGKLPIECVMDQNENLKFEIDLGWTTAGGADPNIWVEKYTNKIIACHLKDFYFKDKDMLDHNNQSAVGDGFINWKELINKLKK

SEQ ID NO: 80750 - protein, 151 aa, Unknown
  Bacterial polypetide isolated from the Sargasso Sea
MSNNPATTRWADLDGQLFFPRELSWLSFNARVLQEAQNPAVPLIERVRYLGIFSNNLDEFFRVRVAEVRRLISVSKGPQRQSAKDLLQSIQKEVVSLQKEFDAISAALMKELRQQKIYLINEGQLDKGQAAFVQQYFRETVLPELEPILLE

SEQ ID NO: 80751 - protein, 145 aa, Unknown
  Bacterial polypetide isolated from the Sargasso Sea
MTAIILAAGKGERLKPLTALTPKPLIAVSGQTLLERNINCLAESGVKKIIVNGSRMGNQIESFLRNHYEQSNVSIDYISEGDEPLGTAGAIFNIIDEGLLNDDLFWVVNADIITDFPFKRIQLNPETVGHIVLVPNPHHNSSGDF

SEQ ID NO: 80752 - protein, 319 aa, Unknown
  Bacterial polypetide isolated from the Sargasso Sea
RWRTRIGRRRPWLLIGLPVMMLGTYMLFIPPEDVGILYFLIWLTVFFLGSTMIALPHRAWGAELSPEYHQRSRVTAAREFYILAGLLVAAFVPMIIEITADGGVGVGQVVSTLWSDAIGAFSGDFRDKKIVDRATLTGPVLAGLAFVVMSLLPICAAIVFFFVREPDLDDVEKRPTFMDGLRLVIKNGPMKRVLFIALLVAFGESFRNAVSLFFIRDIVGVPTIGAAYFFYFVAGLAAIPFWLWLGRTIGKHKAFMCTLITVAAVSGANLLLDYGDYLPFFLLFVVKGFCFGGLQFLPVAMIADVVDVDAARSGAARAG

SEQ ID NO: 80753 - protein, 267 aa, Unknown
  Bacterial polypetide isolated from the Sargasso Sea
MKFLNIFEKYKEDLICLKYSGNVFLSREIFNNFIEDLSILNKLGIKICVIHGGGPRIQKELEKSNIQSKFIRGLRVTDEKIIDIVENVLIDFNYDIVSSLEKMGTKAIGIHTKKNNVIEVLRDAPELGFVGTPNKINNEIILNIIKDDKIPIISPLGLQENQTYNINGDVAAGKIAQSLKCRRLLLMTNVEGVLDKNKKLIEEISSSEILEMIKNETITGGMIPKINMGLESINNGVTAVGIIDARPKHSILFELFSDKGSGTLIRK

SEQ ID NO: 80754 - protein, 266 aa, Unknown
  Bacterial polypetide isolated from the Sargasso Sea
MKNKKIIIGTRGSKLALIYAEKAKERILKFSKEFEIESVEIKKITTTGDLNQKDRLSEIGGKGLFLKQIENELIENNIHIAVHALKDMPSDETEGLLTNCFLERNDPREVLISKDKIKFKDLNENSIIGTSSFRREFQLKNKRSNLNYKLIRGNVDTRINKLNQNLYDAVILSCAGINSLNLNEHISEIFSIDEIIPSVGQGVIALQCKSDDEYIKNVLKKINDDKTFKSVQAERNVLKVLEGDCETAVGAIAEINNENITLQGEL

SEQ ID NO: 80755 - protein, 182 aa, Unknown
  Bacterial polypetide isolated from the Sargasso Sea
MKKITIGARGSKLSQAYASKVKELILKKNESFSEESIIVKTIKTSGDIHNKVKLSDIGGKKLFCKEIEEDLLANNIDIAIHSLKDMESEEHPDLTIGAFIKRNDPREALISEKIVDLNKLKVNTKIGSSSRRRELQLKRINKNFLFVNMRGNIDSRINKFTDDNLDGILLAAAGVKSLNLEK

SEQ ID NO: 80756 - protein, 47 aa, Unknown
  Bacterial polypetide isolated from the Sargasso Sea
MTIGTGSQILRDLGVGKMRLLSHPARFNAISGFDLEVVDFVGFEKPH

SEQ ID NO: 80757 - protein, 202 aa, Unknown
  Bacterial polypetide isolated from the Sargasso Sea
MDFDPLIQESKFQTVQKIKDACTTTGFFSISNHGVPIEVLYSCLESSIKFFRQSESEKMKVGMPFPGYPYGFVPMEQETLARSKGKSAAPDLKESFSIGPGLKSPPWLSAEEAQFVFSENQWPENPKDFKNSWEICYKSLSECSDKVMKLLALALNLPENWFEGFFLNPISAMRVNYYPELVKEPQDNQLRASAHSDYGSLT

SEQ ID NO: 80758 - protein, 159 aa, Unknown
  Bacterial polypetide isolated from the Sargasso Sea
MPSKFINREVSWLSFNERVLQEAEDDSNPIIERMKFLGIFSNNRDEFFRVRVANIRRVAELPGTNFLSTGEDPKKVLGDILKQVLKQQTRFDRVFKRLMKDLQKENIYFLNETQIGEDHKDFVRDFFVDKVRTNIVPIIINKRKSFPFLKDASTYMFVK

SEQ ID NO: 80759 - protein, 271 aa, Unknown
  Bacterial polypetide isolated from the Sargasso Sea
RQIGLDEAPPGEFTKRAFLNNKLSLNEAEAVADLIDLTDERGVSILGSTVMGSLTSTVCEFADAIDKIRMGVEGEIDFNDEDENFINKHLFKDLEFLLDGFKSFTDSCINIKKGTHKNRVLFVGPVNSGKSSLFNLLVGYDRAIVSDSPGTTRDIIESEVFFNSNVFSVFDSAGIRETGEEIEKKGIELSFEEIKRADLVVGVFERKDFDRVSFFEDLVGSGCFVKIQNKIDIDGIDSNNFDCCVSAKTGEGLKNFKDLISSRVEGDIYKK

SEQ ID NO: 80760 - protein, 308 aa, Unknown
  Bacterial polypetide isolated from the Sargasso Sea
RTAEAAVRVQKAFRGREARRYLRSARKLARFIQVRARLKLRRRRRAALSIAGAVRVVGAARKFRASRRIARAAQTAGRGAQARRKLGWLRDAKAARKLQRVARRGEARGSFHRLRSACITLQCLARIQQAKQAKRHEHQLRRDASLVLVDLRKAEVRTDAVRAETAAAIASAKLAKQTHDEKIKMLDLELRRQATARVAARAEVAAVRAERDAALKALQAERDLRQAPNDPSLKTKARDASNAQRDARAIVDACAQDCRDAAARASMSQSAKSALDAEAGRAAVAATEAARRCTDIEKKANRAAARFA

SEQ ID NO: 80761 - protein, 271 aa, Unknown
  Bacterial polypetide isolated from the Sargasso Sea
MTAHAVKIVESANILLGPDSCSPLLSADIQGRLETVTSLEELVDRIEASGAQQQIVVLASGDPLFYGTARYVCAKLGKERFEVVPHVSSMQLAFARVKESWEDAYLASLSGLTVIDRVIEKIRTVDTAGLFTSEKWPPNAVAEVLLEQGVTGLQAYVCENLGSPDERVTQGSLQEISKESFGPLNVMILIRPSGLTEPPSKAGRRLFGNSDELFLQSRPKRGLLTPKEVRSLALAELSLCSTSTVWDVGAGSGSLAIEAARLAPNWFCFCY

SEQ ID NO: 80762 - protein, 113 aa, Unknown
  Bacterial polypetide isolated from the Sargasso Sea
KQNLYPDDIRETINALNEAEANDSIMIDVSHGNSQKVYKRQLENIGVISKQISDGMNEIRGIMIESHLREGNQKIGEDLQYGQSITDACIHFEDTKQCLSELSSAVQARRLKS

SEQ ID NO: 80763 - protein, 156 aa, Unknown
  Bacterial polypetide isolated from the Sargasso Sea
MRIDVLTLFPNIFDNLNSFSIIKKAIDSKKVKIKSHNLREFAENSRKVDDYPYGGAPGMVIKIEPIDNCIEFLKKKNNYDEIIYLTPDGDLLNQKTSNYLSTLKNIIIICGHYKGIDHRVREHLVSKEISIGDFVVSGGELPAAVLCDSIVRLLPG

SEQ ID NO: 80764 - protein, 152 aa, Unknown
  Bacterial polypetide isolated from the Sargasso Sea
MNSTTIKLHPNDNVAVAVKTLPAGSEAGTPGVTIEAPIPAGHKVAQARIDIDQPIRKYNQIIGFASQTILPGQHVHSHNVTLRDFERDYAFGKDVKIPEEVEQQATFEGFLRPDGRAGTRNYIGVLTSVNCSATVAKYIGAAFDKEGETDLG

SEQ ID NO: 80765 - protein, 325 aa, Unknown
  Bacterial polypetide isolated from the Sargasso Sea
SEASNDTDENGITSTFTVRLSSQPGDNDTSTADNVTITVSVSDSTEAELVSDSSLVFTESNWNAAQTVTVRGIADNLSDGDQSYTVILKDNVTSDARYRYVDPPDVSLKNLDLTTKGGFYVSEASNDTDENGITSTFTVRLSSQPGDNDTSTADNVTITVSVSDSTEAELVSDSSLVFTESNWNAAQTVTVRGIADNLSDGDQSYTVILKDNVTSDARYRYVDPPDVSLKNLDLTTKGGFYVSEASNDTDENGITSTFTVRLSSQPGDNDTSTADNVTITVSVSDSTEAELVSDSSLVFTESNWNAAQTVTVRGIADNLSDGDQS

SEQ ID NO: 80766 - protein, 231 aa, Unknown
  Bacterial polypetide isolated from the Sargasso Sea
KGHDIFFKGYGSYTDPNTNESTNNNTFLNQIFFSRIVEDNVMKNVTVIDFSVLGYKQILSAEKGIFDGQESAWIFTNGKLITLDESGKTTTIGFKKYLYPLGDGPLKVSKIPDDANKMTLNQALKAKKLYEETGDAREARKMSVRIQEKFTLPCACLVFGLIGSSLGAKQNLRTSKSQGFGLSVILILLYYVLSFLSSSLGVKGVLTPFISAWLPVLTSFSGGLYLLKKAS

SEQ ID NO: 80767 - protein, 319 aa, Unknown
  Bacterial polypetide isolated from the Sargasso Sea
EHDEDAMRQSDHIIDMGPGAGVHGGKVCAQGNLKDILKNKNSITAEYLSKKKEIKAPYKRSKHNNNFIKIRSAFENNLKKINVDIPIGLFTAVTGVSGSGKSTLINQTLLPMSTFLLNRSTLKKEIKCERIEGLEDLDKVINIDQSPIGRTPRSNPATYIGLFSNIRDLFAQTIDSRAKGYKPGRFSFNVKGGRCEACQGDGLIKVEMHFLADVYVTCDICKGSRYNEQTLEIKYKNKSISDVLEMTVEDALDFFDSIPSIKKKLSTLSSVGLNYIKLGQSATTLSGGEAQRIKLAKELSKRSTGKTLFILDEPTTGLH

SEQ ID NO: 80768 - protein, 256 aa, Unknown
  Bacterial polypetide isolated from the Sargasso Sea
MRNAFVSIVDQMAEQVRRTCYSFVVYNRDFSNSLLDAEGNTLAQGKQDLSAHVGTLHYKCKAVMKEFGEDIQPGDVFLINDPYAGGTHFSDNSILLPIFFDEELIAWSQANGHWADMGGSVPGSFDVSAADMFKEGLRVTPVKIWRRGEYCNDVAKLIANNTRDPNAILGDMEAQTQAARIAERELLRLCAKYSVSTVKRAFQEVQDYVERAIRHRLRELPNGSWSTTDYLDRDPSEKEGLIPIKIKLTIEDDRAI

SEQ ID NO: 80769 - protein, 288 aa, Unknown
  Bacterial polypetide isolated from the Sargasso Sea
CEGPEGIEASWRFASHALRNGAGVAIHLSDLRPKGTENGKGLVASGPVSFGQIYSTLNSVLRRGGVYKNGAVVLHIDLCHPDALEFIQAPRHELPWAKRCVNITDEWWETCSFKEELLNGIKSGDIWLNKVKYDKKGNRIRGNVCLEVYLPSRGTCLLQHVNLGACEFDDIPRAFVEGMSGLCALHGTTGVGESGEYLPPETDRQVGLGMLGLANLLRRVGVTYEQFGRALDQYNDGQIVQTPAYELVTQLGTGIHAAASVARGYDMDRAFAIAPTASCSYRSKDVDG

SEQ ID NO: 80770 - protein, 280 aa, Unknown
  Bacterial polypetide isolated from the Sargasso Sea
MFILDASGSMKTEWDNSNRFKIATRLLAKVVDSIEKVNRNVEFGLRVYGHQSPRQLKDCEDSNLEVPFSKYNSANVTSKLAELKPQGHTPIAYSIYQSLVDFPNDPYAKNAIVLITDGLENCDGDICALGLELEKKHITMKPFIIGMGLDSLEQTSFECIGTYLDAGNTESFSNALDIVISQATNNTSTHVNLIKQTGKPDETNVEMTFYNAHSNEIRYNLMHTLDKAGMPDTIYLNPLGKYDLRVHTIPPISKEDIELNPGKHNIIGLDAHMGTLKLGW

SEQ ID NO: 80771 - protein, 204 aa, Unknown
  Bacterial polypetide isolated from the Sargasso Sea
MRAIILAAGRGSRLKSLTKNKPKCFLKINNKKIITHQIDALKKNGIDNIAVVVGYKKNLFKKLNLKIIFNKNWNKTNMIYSLFKASYWLKNEDCIICYGDIIYDNSIIEKLKNSKKKILLPSNVNWKKNWSLRYQNPLTDLETFKVNKNGTLKEIGNKAQGYSEIQGQFMGLIKIDKRSIQKFIKIYKNLPLKKKLNLDFTSFL

SEQ ID NO: 80772 - protein, 260 aa, Unknown
  Bacterial polypetide isolated from the Sargasso Sea
MSKKIIIGSRGSKLALLYAQQAKDKIIENTNLGNDDILIKSITTKGDEAQDIRLSEVGGKGLFSSNIEKELQLKNIDIAVHALKDMPANETKGLITDSFLKRNDPREILITKDNKKLKDLDEKSIVGTSSYRREFQIKKIRKDLNCKLIRGNVDTRIRKLNEGMYDAIILSYAGIKFLKFENEISEIFSVEEIIPSAGQGIIALQCRENDNEIISILNKINHQETNKRAHLERNILKVLDGDCETAIGVHSIVHGDKITV

SEQ ID NO: 80773 - protein, 196 aa, Unknown
  Bacterial polypetide isolated from the Sargasso Sea
MTSKPKLSRREQILIVLATELEKKLGLPITTSSLANSVGVSEAALYRHFASKAKMFEALINYAEESIFGLVNKILEQETDPTIRCYKIINLILSFSEKNPGITRLLIGDILLGENERLHLRVTQFFERIEIQIRQVLREANLTNGPRPISNIDAAANQMLIYIEGKLSQFVISSFKNKPTEHLEIQWGVIKAGCFR

SEQ ID NO: 80774 - protein, 249 aa, Unknown
  Bacterial polypetide isolated from the Sargasso Sea
FGGKGLFSSNIEKELKDKKIDIGVHALKDLPANETDGLITDTFLERNDPKEILISKDKKKLKELVMNSVVGTSSFRREFQLKKIRPDLNYKLIRGNVDTRIKKLKDGLYDAIILSYVGIKYLKLENEISEIFKTEEIIPSAGQGIISLQCRENDQEMISLLKKINHDETYKRAHAERNILKVLEGDCETAIGAHSIIDGENIVVEAELFSLDGSKRFYEKKIEKIEKFREIGKEIGQILKIKSNNSYKR

SEQ ID NO: 80775 - protein, 164 aa, Unknown
  Bacterial polypetide isolated from the Sargasso Sea
MCIGCHACTVACKSEHDVPIGVNRTHVKYIEKGIFPNSSREFSVHRCNHCANAPCVEICPTTALFTRSDGIVDFDNDRCIGCKSCMQACPYDALYIDPDSHTAAKCNYCAHRLDGGYEPACVIVCPVEAIISGDMDDENSKISGLLANENVMARKPEKMTQPNL

SEQ ID NO: 80776 - protein, 217 aa, Unknown
  Bacterial polypetide isolated from the Sargasso Sea
MERKKIIIGSRGSKLALIYANKVKSKISEIFLNNIEIKTIKTSGDENQKDRLSDIGGKGLFSKKIEIELIDKNIDLAVHALKDMPSIETNGLITNCYLKRNCPEEILISKKNKKLNELKSKSVIGTSSFRREYQLKKIRNDLVYKVIRGNVDTRIKKINEGFYDAIILSKAGIDSLNLTQKISQEFSVDEIIPSVGQGVIAVQCRKDDLEMINLLKK

SEQ ID NO: 80777 - protein, 275 aa, Unknown
  Bacterial polypetide isolated from the Sargasso Sea
MKKNTLTIGTRGSKLALIYAEKVKKELNKFFPNEIKLKKILTTGDQKHDQRLSDIGGKGLFAEQIEKELLNEDIDIAVHALKDMPTIETESLLTNNFLKRNSPNEILISKNNTKFEDLAPNSVIGTSSFRREFQLKKKRSDLKYKLIRGNVDTRIQKLENGEFDAILLSKAGIDSLKLQNKITQEFSVDDLIPCAGQGIIAIQCKKNDNGIIDLLEKINDIDSRIEANAEREVLKVLEGDCDTAVGVFAKITGENVDLVTELFSVDGKMRYFIRE

SEQ ID NO: 80778 - protein, 260 aa, Unknown
  Bacterial polypetide isolated from the Sargasso Sea
MNKRIIIGSRGSKLALLYAQKAKNKIIENTNLSHNDILIKPITTLGDQEQNKRLSEFGGKGLFLSNIEKELQKKNIDIAVHALKDMPAIETKGLKTDTFLERNDPREILVTTNKKKLKELNLKSIIGTSSYRREFQIKKIRPDINCKTIRGNVDTRIKKLKDGIYDAIILSYAGVKYLNLESEISEIFSADKIIPSAGQGVIALQSREKDDKIISILEKVNHDETYKRAHSERNILKVLEGDCETAIGAHFSVDGDKITL

SEQ ID NO: 80779 - protein, 208 aa, Unknown
  Bacterial polypetide isolated from the Sargasso Sea
SSLVFTESNWNAAQTVTVRGIADNLSDGDQSYTVILKDNVTSDARYRYVDPPDVSLKNLDLTTKGGFYVSEASNDTDENGITSTFTVRLSSQPGDNDTSTADNVTITVSVSDSTEAELVSDSSLVFTESNWNAAQTVTVRGIADNLSDGDQSYTVILKDNVTSDARYRYVDPPDVSLKNLDLTTKGGFYVSEASNDTDENGITSTFTV

SEQ ID NO: 80780 - protein, 156 aa, Unknown
  Bacterial polypetide isolated from the Sargasso Sea
MNRKIIIGSRGSKLAMLYAQKAKDQIVKSTDLSDEDVVIKKITTKGDEIKDIRLSEVGGKGLFSSNIEKELQDNNIDIAVHALKDMPAFETQGLKTDVFLERNDPREILITKDKQKLNELKKNSIIGTSSFRREYQIKKIRSDLECKLIRGNVDTR

SEQ ID NO: 80781 - protein, 221 aa, Unknown
  Bacterial polypetide isolated from the Sargasso Sea
MESAEEQQLDEVPATEAGIEESGFAEKKKIGIGFWIAAFWLALITFLAVFAPVLPFKEPNQNFIAFEQKENPVTGKIQDRPVQPPYSPSGEHWLGTDQDARDILSRSIYGARVSLAVGALTALFGIIVGGALGMIAGYFKGILDKIISAIFLVSLSFPGLILAILVVALVDRSLITISITIGILAVAPIGRLARAQTLSFAEREFVLAAETLGAKKSRILV

SEQ ID NO: 80782 - protein, 173 aa, Unknown
  Bacterial polypetide isolated from the Sargasso Sea
VNKGEILGLVGESGSGKSTVGNAIINLIDEPGKVSSGSVILGDLNIHENSESVIKFRGNKIGLIFQDPQTSLNPILTVGEQLIETIQTHLKLSKEEAKNKSINLLKEVGIKDAEKRFENYPHQFSGGMRQRVVISLALCCEPELLIADEPTTALDVSIQSQILELIKKLTKER

SEQ ID NO: 80783 - protein, 279 aa, Unknown
  Bacterial polypetide isolated from the Sargasso Sea
NQTLLPISSFILNKFKLNKEIKCDKIEGLEHLDKVINIDQSPIGRTPRSNPATYTGLFSYIRELLSKTVEARARGYKPGRFSFNVKGGRCEACQGDGMIKVEMHFLADVYVKCDVCNGSRYNEQTLEIKYKDKNISDILNMTVEEGLEFFSAHPPIYKKLITLSDVGLGYITLGQSATTLSGGEAQRIKLSKELSKRSTGKTLFILDEPTTGLHFADIELLLNVLKRLKKQGNTVVVIEHNLDVIKTADWIVDLGPEGGADGGKIVSNGTPEHVAKKKS

SEQ ID NO: 80784 - protein, 266 aa, Unknown
  Bacterial polypetide isolated from the Sargasso Sea
GVEKYFDEYKIIPDDTRSISDGAIKPWETKVFGYQKKYFVETIDKILKQFKIKKNVPWSEIPKKVKNIILYGDENSELNFLYDFEGIINFIDRKYEETERWWLQYELEKYLSERDCEVCNGYRLNEKALAVRIDENHIGNITKKSISECLNWFSSLENKLDKNNKKIAEGVIKEIKDRLVFLNRVGLDYLSLARASKTLSGGESQRIRLASQIGSGLTGVLYVLDEPSIGLHQKDNQQLIETLFRLRDLGNTVIVVEHDEDAIRQS

SEQ ID NO: 80785 - protein, 274 aa, Unknown
  Bacterial polypetide isolated from the Sargasso Sea
PSSSQTLVQNQFQELFKSLLDDSDISYKDIITFSTSRRVTICVTNLSKSTKTKTIEIRGPQINANEKAIKGFLKSNNLNNIELLSKKEINKKVYYFHKKSSEAKRVVDLLKFEVPKILRSIKWNKSMRWGEHSDRWIRPIKNILCIFDKKVVKFEFAGHISNQFTYGNYHYSEKKIKCLDYINYKKKLNENYVILERSLRQNAILNKIKSFCKKNKLSHFVSQSLLKRTSDLVEFPTVFFGKFSSDFFKLPEFLLINIMTDKQDYFFFKDQKNK

SEQ ID NO: 80786 - protein, 189 aa, Unknown
  Bacterial polypetide isolated from the Sargasso Sea
MKSKKKIIGSRGSKLALIYAERARTKLLEFCSNVEIKKITTTGDKNQKDRLSEIGGKGLFSKQIENDLLDKKIDIAVHALKDMPSKETSGLLTNCFLERNDPREALISLNNNLIKDLKPNSTIGTSSYRREFQLKKIRSDINYKLIRGNVDTRLTKLNEKLYDAIILSYAGIKSLKLDQKVSQIFSTKE

SEQ ID NO: 80787 - protein, 192 aa, Unknown
  Bacterial polypetide isolated from the Sargasso Sea
MEMFDALYHEKNIKFIGVRDERTGTHMADGYARACNQPGLILAGQNGPGATNLVTGLAQAKAAFSPVVSIAGSYSTKDRMEDAFQGLDQQSLFKPVTKKTWTVKNTKKIPKTFSDAFKLAMSPRRGPVCINLPRNILSNKGIFKINEKSQSFDNQNSTKSKSNYIKKAVKIINSSNKTVIIAGGGIKYTSII

SEQ ID NO: 80788 - protein, 156 aa, Unknown
  Bacterial polypetide isolated from the Sargasso Sea
MGIRLIIMGPPGVGKGTQAKIIKEIYSIPHLSTGEILRNEIKLESEVGIIAKNFIDDGLFVADEILIKIIENNISNPICNNGYILDGYPRNIEQVRNLNKIITKMNHTIDYAINLIADEGELVKRLIKRSQDSGRRDDTVEIITKRQKIYGSKQLL

SEQ ID NO: 80789 - protein, 255 aa, Unknown
  Bacterial polypetide isolated from the Sargasso Sea
KPSEMDVYVPAGVIKKYRIRKGDSVEGPIRAPRAKEKYPALVEPTTVNGGDPELLARRVEFDKLTPLFPDERLKLEIDGEPDKIVGRIVDLIAPIGKGQRGLIVSPPKAGKTTILKELANSITANNPEVHLMVVLVDERPEEVTDMQRSVDGEVVFSTFDRPPEEHTQVSKLAIERAKRLVEEGKDVVILLDSITRLARAHNLATPASGRILSGGVDSTALTPPKQFFGAARNIEGGGSLTILGTALVETGSKMD

SEQ ID NO: 80790 - protein, 282 aa, Unknown
  Bacterial polypetide isolated from the Sargasso Sea
MMAAGTGGHVFPALAVAKQLQQEGCQVSWLATPSGMENRLLKDQNIPIYQIDIQGVRGNGLVRKLSAPFKILKATLSAMRYMKQLKVDAVAGFGGYVAGPGGLAARLLGIPVLIHEQNAIAGFTNTQLARIAKTVCQAFPNTFPNSDKVVTTGNPVRAEISSILNPSWRYQTREQEHQPISILIVGGSLGAQALNERLPAALKKINAPLNVFHQCGQNQQDVTLERYQDAPATLKVDVQPFIHDMAKAYSEADLIICRAGALTVTEVATAGVAAVFVPYRSL

SEQ ID NO: 80791 - protein, 284 aa, Unknown
  Bacterial polypetide isolated from the Sargasso Sea
IEPRLFSFNAPQGACSECDGLGVEKYFDEYKIVPDETRSISDGAIKPWETKVFGYQKKYFVETIDKILKQFKVKKNVPWSQIPKKVKNIILYGDENSELNFLYDFEGIINFIDRKYEETERWWLQYELEKYLSERDCEVCNGYRLNEKALAVRIDENHIGNITKKSISECLDWFSSLESKLDKNNKKIAEGVIKEIKDRLVFLNRVGLDYLSLARASKTLSGGESQRIRLASQIGSGLTGVLYVLDEPSIGLHQKDNQQLIETLFRLRDLGNTVIVVEHDEDAI

SEQ ID NO: 80792 - protein, 198 aa, Unknown
  Bacterial polypetide isolated from the Sargasso Sea
MSDNNFNFGENWQSYLSKIDNRNISFASSNIEEVLGKEFVKNKSFIDIGCGSGIHSLSALLLGAKFVKSFDIDTKNIENTKNLIKNFWKDHNYEVEQGNILNQSGQDEKFDIIYSWGVLHHTGNLELAIKNSLKYCKNGSVIFLALYEKTYYCEIWKKIKKFYNSSNFFIKQMILYFYIFLKIIGLIAILRNPYKHIK

SEQ ID NO: 80793 - protein, 236 aa, Unknown
  Bacterial polypetide isolated from the Sargasso Sea
MRKKIIIGSRGSKLALLYAQQAKDKIIENTDLGNEDILIKSFITKGDEVQDIRLSELGGKGLFSSNIEKELQLKNIDIAVHALKDMPAYETEGLRTDSFLKRNDPREILITKNKKKLKDLDQKSIVGTSSYRREFQIKKIRQDLNCKLIRGNVDTRIRKLNEGMYDAIILSYAGIKFLKFENEISEIFSAEEIIPSAGQGVIALQCRENDDETISILNKINHEETHKRAHLREIFK

SEQ ID NO: 80794 - protein, 141 aa, Unknown
  Bacterial polypetide isolated from the Sargasso Sea
MTIVLKNKETLYFNEFKFKCCAGKNGFTKNKTEGDKKTPKGTYSLGNLYYRRNRNTKPFTKLRCIPIRKEMGWCNDVRSGKYYNKLIRTYKNVRYEKLHRIDYKYDYFIPINYNTKKTISGKGSAIFIHLTKNYKPTAGCI

SEQ ID NO: 80795 - protein, 218 aa, Unknown
  Bacterial polypetide isolated from the Sargasso Sea
MSVVTYFVETSQGYLDSAAETQFGAVAATVGTMLVLGTTLVVILVCVNMIYQYRAMDGRTAFWLAVKVGLIGVFATNWVQFNAFSSAVLNGIDSIAGSLVASVGGGTPGPSGTFAEEFDRLIAELGEYLNAAGSELNWMAGALLDVLGVLLLSILGGLAAFILVASRLMIALLIGIAPVMIFLTLFEVTKDYFARWLSALVSFALYPIVVAGVFATIT

SEQ ID NO: 80796 - protein, 215 aa, Unknown
  Bacterial polypetide isolated from the Sargasso Sea
MTAIILAAGKGERLKPLTTQIPKPLITVAGKTLLQRNIDCLDQSGIKKIIVNGSRMGDQIESFLENHNQSNISFDYINEGEEPLGTAGAIFNIIDKGLINDDHFWVINADIMTNFSFSAIQLNSSLMGHIILVPNPEHNLSGDFCLEGDRVTISGNQRYTFSGISYFSIQCFIQSTQRYFTLADLLREHIEKEMITGQLFHGDWLDVGTADRLAE

SEQ ID NO: 80797 - protein, 238 aa, Unknown
  Bacterial polypetide isolated from the Sargasso Sea
EQQNLIQDNDGLLSINAEKEVTHQGAIQTLNDDLLPAMKIVGDKFGAGELILPFVLKSAECMKAAVKELEKYLLKEEGTSKGTLVLGTVYGDVHDIGKNLVKTIFENNGYTVHDLGKQVPLQKFVEKINEVKPDAVGLSALLVSTSKQMQFFVEHARKTDVNVPILCGGAAINTNYINRIAKQDGIYEPGMFYCGTMFDGLKTMDKLVSDEKDEFVNNWKEKLSNWKETSTSNVSNEE

SEQ ID NO: 80798 - protein, 267 aa, Unknown
  Bacterial polypetide isolated from the Sargasso Sea
GKELSYNNINDADAALQLIKEFDKDTPSVAIIKHANPCGVASGTSLCEAYMKAFSCDTTSAFGGIIALNQTIDKETASEIIKIFTEVIIAPDISDEAIEIFKSKNNLRVLTVSSLKKKNNTHNYKSIEGGILVQSNDEANTTKSDLKVVTAKKPSDDEIDDMLFAFKVCKHVKSNAIIYVKNKKTIGIGAGQMSRVDSAKIASQKNSEMEKSDENSLENSVVASDAFFPFADGLLVTISSGAKAVIQPGGSVKDDEVITAANEAGIS

SEQ ID NO: 80799 - protein, 183 aa, Unknown
  Bacterial polypetide isolated from the Sargasso Sea
MKKKIKIGSRGSKLALLYAQKVKEKIIEITDFIDQDINIEKISTKGDELQDTRLSDVGGKGLFSSSIEQELQNNNIDIAVHALKDMPAIETKGLLTDTFLERTDAREIIIINGKKKFKDLKQNAVIGTSSYRRQFQIKKIRPDVSCKLIRGNVDTRIKKLMDGEYDAIILSYAGVKYLKLEDK

SEQ ID NO: 80800 - protein, 297 aa, Unknown
  Bacterial polypetide isolated from the Sargasso Sea
YIGTRGSQLAQIYTEKVINHLKKVSSTHIETKKIVTSGDENQKDRLSNIGGKGLFSKKIEIELINNNIDIAVHALKDMPSVETEGLITNFYLKRNSPNEIFISNDNINFIDLKPNSIIGTSSYRREYQLKSIRSDLDYKLIRGNVDTRIKKLENGDFDAILLSKAGIEALGLTNKITHEFNTEELIPCAGQGIIAIQCRENDQEIINILEKINDDQSRIIANAERKILKILEGDCDTAVGVYAKIDKDIVNIKAELFSVDGKQRFFVEESENKKMVKDLSIKIGEKLKSESKGSYKR

SEQ ID NO: 80801 - protein, 119 aa, Unknown
  Bacterial polypetide isolated from the Sargasso Sea
MRDLIFAFKVVKHVKSNAIVYVRNMKTIGIGAGQTSRVDSSKIAIQKFYENINDKKQRTGCVIASDAFFPFSDGLDEAIKFGAVAVIQPGGSIRDKEVIETANNAGLSMVFTGYRHFKH

SEQ ID NO: 80802 - protein, 275 aa, Unknown
  Bacterial polypetide isolated from the Sargasso Sea
MKKKITIGTRGSKLALIYARIAEKNINKFKSRFAIKSVNIKKVTTKGDKIQSKRLSDIGGKGLFTKKIENELLNRKIDIAVHALKDIPSRENKKLFTNCFLKRNDPREVLITRKNKKFKSLPKNSIVGTSSFRREFQLKRMRKDLIYKLIRGNVDTRIKKLKNKFYDAIILSYAGLKSLKMQNNISQVFSLSEIIPSAGQGTIALQCRKDDLGIIQLLEAINHTPTNICVNAERDVLKVLDGDCETPVGVNAKIQNNKLNIVTELFSLDGKKSST

SEQ ID NO: 80803 - protein, 149 aa, Unknown
  Bacterial polypetide isolated from the Sargasso Sea
MKHTTEVMISAEEISQKLDQMAEQINAHYANSERLLMVGLLKGSVVFMADLCRRIKGHVEIDFMSVSSYGNAMTSSRDVKVLKDVQSDIAGRDVLIVEDLIDSGNTLNKVREMLLLREPKSLALCTLLDKPERREVDVKVDFIGFTIPD

SEQ ID NO: 80804 - protein, 134 aa, Unknown
  Bacterial polypetide isolated from the Sargasso Sea
MCGYILSTIKDKHKFLALKKDILHRGPDSQSFKKTSDCLMYHSRLKILDLTSKSNQPFTDNKKKYYLLFNGEIYNYIELKEKFKIKNNTTSDTEILFLLLKDFGIKKTLREIKGMFSFTFYDLKKRKIFCARDH

SEQ ID NO: 80805 - protein, 128 aa, Unknown
  Bacterial polypetide isolated from the Sargasso Sea
MTGGQAAVKSLKKEKVKHVFGLIGSATMEMFDALYHEKKIKFIGVRDERTGTHMADGYARASNQPGVIIAGQNGPGATNLVTGIAQAKAAFSPVVSIAGLYSTKDKMEDAFQGLDQQSLFNPITKKKL

SEQ ID NO: 80806 - protein, 162 aa, Unknown
  Bacterial polypetide isolated from the Sargasso Sea
LDYKLIRGNVDTRIKKLENGDYDAILLSKAGIEALGLTNKITHEFTTEELIPCAGQGIIAIQCRENDQEIINILEKINDDQSRIIANAERNILKILEGDCDTAVGVYAKIHKDLVNIKAELFSVDGKQRFFVEESENKTMVKDLSIKIGEKLKSESKGSYKR

SEQ ID NO: 80807 - protein, 296 aa, Unknown
  Bacterial polypetide isolated from the Sargasso Sea
SSKFACPVSGFSIEEIEPRLFSFNAPQGACSECDGLGVAKFFDEHKIVPDETRSISDGAIKPWETKVFGYQKKYFVETIDKILKQFKVKKNAPWSEIPKKVKNIILYGDENSELNFLYDFEGIINFIDRKYEETERWWLQYELEKYLSERDCEVCNGYRLNEKALAVRIDENHIGNITKKSISECLDWFSSLESKLDKNNKKIAEGIIKEIKDRLVFLNRVGLDYLSLARASKTLSGGESQRIRLASQIGSGLTGVLYVLDEPSIGLHQKDNQQLIETLFRLRDLGNTVIVLSMMR

SEQ ID NO: 80808 - protein, 187 aa, Unknown
  Bacterial polypetide isolated from the Sargasso Sea
LIAPDFSEDALNILKEKKNIRVISKKKSKKTPMPFSIQAIDGGFLVQEDDWKIIDKDNLEYVTDKKPTNDQIIDLIFAWKVCKYVKSNAIIFAKNQQTIGIGAGQMSRVNSAKIASLKAATANLDTKDSVMASDGFFPFSDSIEMASDNGISCIIQPGGSIKDDEVIEEANKNNIAMVMTRMRHFRH

SEQ ID NO: 80809 - protein, 131 aa, Unknown
  Bacterial polypetide isolated from the Sargasso Sea
ESFVSQLATAEFVQFCQPACYSRACQKQFCQQACRSRVREKQFGQPACRSGVSEKQFCQPACRSRVREKQFYQPACRSGVCEKQVCQPACLSRVRDKHFCQPACRSRVCDKQFCQPVCRSRVHDKQVFPAS

SEQ ID NO: 80810 - protein, 193 aa, Unknown
  Bacterial polypetide isolated from the Sargasso Sea
PKWKNRVVIRSSNNMYNQSLVASLISNLGESQTESWAKGLINNFARKPQGNDRSQIIAVANGEADLAVANSYYIGIMLSGSAGKEQLEAAQKVRMLFPNQTNRGVHINISGAGILKHSPNVENANLFLGFLLSERVQKYMVDKSYEYPILEGILPSKEIASFGLNFLEDQTSVRQFGELNPAAVRLMDRAGWK

SEQ ID NO: 80811 - protein, 186 aa, Unknown
  Bacterial polypetide isolated from the Sargasso Sea
MNSVNIIRAAEILFKHKLNKTGLIDLENKFKPLNIEDAYKIQEELKVLYLGLKNNESLGKKIGVTNKDAAKQVGINEPFYGNLFTKFSDINVNYLNSKNFYKPYIEPEIGFRIKNDININKAPFKKKDINELIDGVVCAIEIVDFRFNKPINEIGAFNLIATNGASDYWLRNKKIYPLDKVNLDNH

SEQ ID NO: 80812 - protein, 237 aa, Unknown
  Bacterial polypetide isolated from the Sargasso Sea
MTTKGGFYVSEASNDTDENGITSTFTVRLSSQPGDNDTSTADNVTITVSVSDSTEAELVSDSSLVFTESNWNAAQTVTVRGIADNLSDGDQSYTVILKDNVTSDARYRYVDPPDVSLKNLDLTTKGGFYVSEASNDTDENGITSTFTVRLSSQPGDNDTSTADNVTITVSVSDSTEAELVSDSSLVFTESNWNAAQTVTVRGIADNLSDGDQSYTVILKDNVTSDARYRYGIHRMSR

SEQ ID NO: 80813 - protein, 260 aa, Unknown
  Bacterial polypetide isolated from the Sargasso Sea
MKRANLVIGTRGSKLAMIYAENVKKELKKYFSKEIELKKIVTTGDQKQDERLSEIGGKGLFSKQIEKDLLNKNIDIAVHAFKDMPTEETENLLTNNFLKRNSPNEILISKNNIKFEDLEPNSIIGTSSYRREYQLKKKRPNLNYKLIRGNVDTRVQKLEKGEYDAIILSKAGVDALNLQHKISQEFSVDELIPCAGQGIIAIQCREDDNEIKKLLENINDQETRIVAKAEREVLKVLEGDCDTAVGVFAKSNGKKVDLLT

SEQ ID NO: 80814 - protein, 238 aa, Unknown
  Bacterial polypetide isolated from the Sargasso Sea
MYLGLDLGTSAVKALLVDAFGTAVASQSVPLQVIRRQAGWSEQDPHSWWDATNRAVRSLGAKYPEEMRKISGIGLSGQMHGLTALDANDAVLRPAILWNDTRSALQAKTLDTGHPAFRRIGGNAVMPGFTAPKAAWMAENEPELFQRLGTVLLPKDYLRLQMTGEKVSDMSDAAGTLWLDVARRDWSDVLLDICGLDRHLMPRLVEGSEVSGQLRAEIARTWGIDGRPVVAGGGGDNA

SEQ ID NO: 80815 - protein, 297 aa, Unknown
  Bacterial polypetide isolated from the Sargasso Sea
VPQARRVLNSVFLYHAVQNGLDSAIVNAREITPYTEIDEKEKKIVEDLIFNKHPNALSELITHFENKTQDSSTKTKKVDVDPSWAAGKRANFRIINRLKDGIENDVVSAIAEKLDQQNLLQNNDGILSISAEKEVTHQGAIQTLNDDLLPAMKIVGDKFGAGELILPFVLKSAECMKAAVKELEKYLLKEEGTSKGKLVLGTVYGDVHDIGKNLVKTIFENNGYTVHDLGKQVPLQKFVEKINEVKPDAVGLSALLVSTSKQMQFFVEHARKTDVNVPILCGGAAINTNYINRIAKQ

SEQ ID NO: 80816 - protein, 133 aa, Unknown
  Bacterial polypetide isolated from the Sargasso Sea
MTGGQAAVKSLKKEKVKHVFGLIGSATMEMFDALYHEKKIKFIGVRDERTGTHMADGYARASNQPGVIIAGQNGPGATNLVTGIAQAKAAFSPVISIAGLYSTKDKMEDAFQGLDQQSLFNPITKKTWTVKKA

SEQ ID NO: 80817 - protein, 160 aa, Unknown
  Bacterial polypetide isolated from the Sargasso Sea
MTGRSKPKIQSRCRCPDGNRPRVASRGQNNHLEQDMEYTQLGSAGVKVSRLCLGTAFRGQKDDAVCETVIRKGIDHGVNFFDCANFYGLGRSERFLGRAIKGHRDDLVITSKVWSRIGEGPNDAGLSRFAIIRECERSLVRLDTDRIDVYLLHNVDHETP

SEQ ID NO: 80818 - protein, 163 aa, Unknown
  Bacterial polypetide isolated from the Sargasso Sea
MKFLISAAGTGGHVFPALEFGKECIKNDHNVVWIGTKNGIENRVVPEEIKLLTIPMRGFRGKNFFLKIVSLFGLIASIFKSIYYIQKNNTDYIVCFGGYISLPVGLSAWICRKPLFLHEQNAIMGTSNKALKKFSKLIFLGFPINEPVTKKMKLVGNPIKKYK

SEQ ID NO: 80819 - protein, 297 aa, Unknown
  Bacterial polypetide isolated from the Sargasso Sea
KIVIGSRGSKLAMLYAQKAKDQIVKSTDLSDEDVVIKKITTKGDEIKDIRLSEVGGKGLFSSNIEKELQDKNIDIAVHALKDMPAFETQGLKTDVFLERNDPREILITKDKQKLNELKKNSIIGTSSFRREYQIKKIRSDLECKLIRGNVDTRIKKLKDGTYDAIILSYAGIKFLNFDNEISEIFSPEKIIPSAGQGIISLQCREGDEEIISVLKKINHEETFMRAHVERNILKVLEGDCETAVGAHSVIAGGKITVEAELFSLDGLKRYYEKKTGKVEDFSQIGEEVGQILKTKSN

SEQ ID NO: 80820 - protein, 279 aa, Unknown
  Bacterial polypetide isolated from the Sargasso Sea
YNFNMYVHGKKVFLDTENTITIYNKLANKFKDVSILESVIGGDNKGRYSIILFNILQNVEIFHNYALINNQKKKIKSPDSFIKDIYKNLKIKTIYDQNIPLPIFIGNVSFDLCKFTLPKLSYKPDKNEIGIPLAHFVKPRNLIIIDNVLNETHLIEVSNIKKNPVKSLKKLEKILKEPFSKNKKLNFSKPKKFKNHIKKEEFIKRVKEIKRDIKVGEIFQAVLSQRFSNDYLIDPFNFYRALRSINPSPYLVFLNLKNYQIICSSPETMIKVKNKEITL

SEQ ID NO: 80821 - protein, 166 aa, Unknown
  Bacterial polypetide isolated from the Sargasso Sea
LGTQAAMFHTKTDNVIEVEPEREELGFVGIPNKINDNLIQNALNEDKIPVIAPLGLGKNEQTYNINGDTAASAVAKKLKSRRLILMTNVEGVYDDQKKLITEIKPFDLENLIKGKVVQGGMIPKIENCVDAVQNGVRGVVILDGRKPHSILHEIFSDKGSGTLIRE

SEQ ID NO: 80822 - protein, 184 aa, Unknown
  Bacterial polypetide isolated from the Sargasso Sea
SNSTIGTSSYRREYQLKSIRSDLDYKLIRGNVDTRIKKLENGDYDAILLSKAGIEALGLTNKITHEFNTEELIPCAGQGIIAIQCRENDQEIINILEKINDDQSRIIANAERKILKILEGDCDTAVGVYAKINKDIINIKAELFSVDGKQRFFVEKSENKKMVKDLSIKIGEKLKSESKGSYKR

SEQ ID NO: 80823 - protein, 280 aa, Unknown
  Bacterial polypetide isolated from the Sargasso Sea
IYAQKAKDKIILNTNYQEEEIIIKAIKTKGDEIQDIRLSETGGKGLFLTNIEKELKEKKIDIAVHALKDMPILETAGLRTNTFLERNDPREILITKNKKKLKELKNNSTIGTSSYRREFQIKKIRNDVNCQLIRGNVDTRIKKLNDGLYDAIILSYAGMKSLRLDDKITEIFSTKEIIPSAGQGIIALQCRSDDKEVISILDKVNHIETHQRAHAERNVLKILEGDCETAVGVYSVIEGNELTLEAELFSLDGSQRFYQKKISKIENAKELGKELGEILK

SEQ ID NO: 80824 - protein, 192 aa, Unknown
  Bacterial polypetide isolated from the Sargasso Sea
FAAERSSIHFVEADAQTHAFEPERYDMVFSRFGVMFFEDPVAAFTNIRSALRASGRLAFCCWQPRAVNPFMTVPAMAALELLPAPPEMPPRTPGPFAFEEADYVTAVLTNAGFESVAVTPLQQPLTFGRGLSLTNIVERLVQIGPIAQMVRDAPEDLQQPVRDKVADAVKPFYSEDTGMTLDGQFWQVTARQ

SEQ ID NO: 80825 - protein, 247 aa, Unknown
  Bacterial polypetide isolated from the Sargasso Sea
IAELRFNILNEKVDYFVIVESTVNHQGQPKKLSFNINNYKKFKDKIKYIIVDDTPEKIKKSHEGGESLVEQHQRNSLMRVINDAHDNDLIILSDVDEIPDLSKLTLFNKKNIAVFVQKMFMYKLNLLNLNENNWHGSKICIKKNLISPQWLRNLKFKRYPFWRIDKPRNLQIIHNGGWHFAYLQSPENISKKIKSFAHGEFNKEHLSSEKNILKKIEQGRDIFDRGYKIKKIEIDNTYPEYIYNNQV

SEQ ID NO: 80826 - protein, 243 aa, Unknown
  Bacterial polypetide isolated from the Sargasso Sea
MTKKIILGSRGSKLALLYAQKAKEQIIKKTNLDTNDIEIKTISTKGDQVKDSRLSDIGGKGLFATEIEKELENKSIDIAVHALKDMPAKETSGLKTDCFLERNDPREILITNDKKKLNDLKLKSIIGTSSFRREFQIKKLRSDLTCKIIRGNVDTRIKKLKDGNYDAIILSYAGIKNLNLENEIAEIFSAQEIIPSAGQGIIALQCRDADKKIISILKKVNHEETYKRAHAERNVLKVLEGDC

SEQ ID NO: 80827 - protein, 302 aa, Unknown
  Bacterial polypetide isolated from the Sargasso Sea
GLLTCVTGVSGSGKSSLINQTLLPMSSFILNKAKLNKEVKCEKIEGLDFLDKVISIDQSPIGRTPRSNPATYTGLFTHIRDLLSQTVEAKSRGYKPGRFSFNVKGGRCEACQGDGVTKVEMHFLADVYVTCEFCKGHRYNEQTLEVKYKDKNISDILNMTVEEALDFFKAIPAIKKKLDTLNDVGLGYITLGQSAITLSGGEAQRIKLAKELSKRSTGKTLFILDEPTTGLHFADIELLLKVLERLKNQGNTVIVIEHNLDVIKTADWIIDLGPEGGTDGGDTVACGSPEEISKIKKSYTGQ

SEQ ID NO: 80828 - protein, 296 aa, Unknown
  Bacterial polypetide isolated from the Sargasso Sea
PNPDRLVQAYNQSAAKLNLLRAFAQGGFANLKRIHQWNLSFIGDSPASKKFKEIADRINECLDFMDACGINEKSVRQFKETSFYTSHEALLLPYEQSLTRIDSTTGKWYDVSAHMLWIGERTRQPDGAHVEFMKGISNPIGIKIGPTISKDELLKLLDILNPENNAGRITLICRMGADNIGKVLPSIIREVAKSGKQVVWSCDPMHGNIEKANNGYKTRSLKNIISEIKQFFQIHRSEGTYPGGVHLEMTGQNVTECIGGVQEITEKDLSSRYHTYCDPRLNASQSLELAFLLSDI

SEQ ID NO: 80829 - protein, 252 aa, Unknown
  Bacterial polypetide isolated from the Sargasso Sea
LSNIGGKGLFSKKIEIELINNNIDIAVHALKDMPSIETEGLITNFYLKRNSPNEIFISNNNINFQDLKPNSIIGTSSYRREYQLKSIRSDLDYKLIRGNVDTRIKKLENGDFDAILLSKAGIEALGLTNKITHEFNTEELIPCAGQGIIAIQCRENDQEIINILEKINDDQSRIIANAERKILKILEGDCDTAVGVYAKIDKDLVNIKAELFSVDGKQRFFVEESENKTMVKDLSIKIGEKLKSESKGSYKR

SEQ ID NO: 80830 - protein, 171 aa, Unknown
  Bacterial polypetide isolated from the Sargasso Sea
MSRKIIIGSRGSRLAMLYAQKAKDKITKSTDFSDEDIVIKKITTKGDEIQDIRLSEIGGKGLFSSNIEKELQDKNIDIAVHALKDMPALETKGLQTNSFLERNDPREILITNNKQKLIDLKKNSIIGTSSFRREYQIKKIRSDLECKIIRGNVDTRIKKLKDGEYDAIILS

SEQ ID NO: 80831 - protein, 305 aa, Unknown
  Bacterial polypetide isolated from the Sargasso Sea
MSKKITIGSRGSKLALLYAQKARDKIIKNTDFAEQDIAIKKITTKGDEFKDVRLSEFGGKGLFSTNIEKELKNKNIDIAVHALKDMPALETEGLTTDAFLERNDPREILITLNKKKLSELKINSIIGTSSFRREYQIKKIRSDIQCKLIRGNVDTRLKKLKDGLYDAIILSYAGIKFLNFDSEISEVFSPEKIIPSAGQGIIALQCREQDQKITSILKNINHDETFMRAHSERNVLKVLEGDCETAVGAYSKIEGSKITLEAELFSLDGSERFYEKKTGRLEDYSEIGKEVGEILKSKSNNSYKR

SEQ ID NO: 80832 - protein, 309 aa, Unknown
  Bacterial polypetide isolated from the Sargasso Sea
VTFPICIFLAVLFNLNRIRNDSELIILGTSGKSEKNILIKPIILFASLMFLIVFFFSLFLTPSSLKELRYKIIEIRTSGIHISLLKEKKFVSPTNNFTVFLQEKKDKEIFGLLIHDQSNINKPRTYIAEKGKFITSDNVSYLKLFNGFIQIYDSDVNRVSEIAFNTYNLDLTPFNKKESSHIYPDELSTSDIRNNLKNLSPSNFSKNEKEQFAELHKRYVNPIYIIFYALLPLLMINFSKRPDDSWRYPIIAVSAIAFAIQIFQITFLNLLIENSQLVTLYYTFPIILIFVTIMYLYKDFLYLLRNKNV

SEQ ID NO: 80833 - protein, 273 aa, Unknown
  Bacterial polypetide isolated from the Sargasso Sea
IIGTRGSKLAMIYAENVKKELKKYFSEEIELKKIATTGDQKQDERLSEIGGKGLFSKQIEKDLLNKNIDIAVHAFKDMPTEETENLLTNNFLKRNSPNEILISKNNIKFEDLEPNSIIGTSSYRREYQLKKKRPNLKYKLIRGNVDTRVQKLEKGEYDAIILSKAGVDSLNLQHKISQEFSVDELIPCAGQGIIAIQCREDDNEIKKLLENINDQETRTVAKAEREVLKVLEGDCDTAVGVFAKLNGKKIDLLTELFSVDGKNRLFHKKKSQK

SEQ ID NO: 80834 - protein, 261 aa, Unknown
  Bacterial polypetide isolated from the Sargasso Sea
QELNPNTIRDNFKLLLQMSVVLTFATNKPVVKIGRMGGQFAKPRSSDFEEKNGQKLPSYRGDIINSFEFNETSREPDPTRMVRAYNHSASTLNLLRAFAQGGFASLTQLNKWNLDFADNFDTTKKFKELSEKIAESIKFMNACGINENNTRELRETDFYTSHEALLLPYEQAFTRIDSTTGEWYNVNSHFLWVGDRTRDPNGAHIHYLSGIKNPLGLKVGPSTTVDDLKKNIEILNPENEGGRLTLIVRMGAEKIESKFPD

SEQ ID NO: 80835 - protein, 96 aa, Unknown
  Bacterial polypetide isolated from the Sargasso Sea
MNFEKIIPKDGPSIKEVEKYVKKYSNELIVIKCGGSVLLDENLFNQFIEDISVINKLGLSAIVVHGGGKNIKKKLDQFKIEAKFIDGLRVTDEKTI

SEQ ID NO: 80836 - protein, 216 aa, Unknown
  Bacterial polypetide isolated from the Sargasso Sea
MAQVINTNSLSLLTQNNLNKSQSSLSSAIERLSSGLRINSAKDDAAGQAIANRFTSNIKGLTQASRNANDGISIAQTTEGSLSEINNNLQRVRELAVQSSTGTNSQSDLDSIQAEITQRLNEIDRVSGQTQFNGVKVLAKDNTLTIQVGANDGETIDINLKEINSKTLGLDSLSVQDAYKTVATAVPGDGTYTDGADTLGVPDATAITNAAGGTGG

SEQ ID NO: 80837 - protein, 80 aa, Unknown
  Bacterial polypetide isolated from the Sargasso Sea
MSNVLIVEDDEQTFAELVEALTDHGCKVQGARTGRDGLMLAVANSYDAIVLDRMLPGGLEGLGMLAALRSAGVLTPVLIL

SEQ ID NO: 80838 - protein, 126 aa, Unknown
  Bacterial polypetide isolated from the Sargasso Sea
MINNVPKINNIDTGQFFLIAGPCSIEGEKMAYKIAEKIIKITDKLGIPYIFKGSFKKANRSRIDSFTGIGDKKALEILSKISKSFDVPTLTDIHSQEDAKNAAEYVDILQIPAFLSRQTDIIISAA

SEQ ID NO: 80839 - protein, 200 aa, Unknown
  Bacterial polypetide isolated from the Sargasso Sea
MIARNSCDHDRKAYIQQFKAFALFLDSLSKEERDNCHLIIHENYSYSLKGRIDLEKHAKQLNILDKITVTTHKTNSVEHIVELYKMSDVLLCASKSEGFGLPMVEAQIHGTPVITTNCTAMTTNTYYGICTEPEEVSVTEGGMNSWSNPSPKNVQDAITYIYNKKYNKDNSKYSFELKSIDKKRYTNNTILKHWISFLDL

SEQ ID NO: 80840 - protein, 264 aa, Unknown
  Bacterial polypetide isolated from the Sargasso Sea
ITTKGDIIQDIRLSEAGGKGLFSKTIEDELVNGKIDIAVHALKDMPSHETKGLITNCFLERNDPREILISKNNKKIKDLASNAIVGTSSFRREFQLKKIRQDLNYKLIRGNVDTRIKKLNDGSFDAIILSYAGIQSLNLEDKISQTFSTSEIIPSAGQGVVALQCRDNDKNMIKLLEKINHQPTHNCVLAERNVLKILDGDCETAVGAIAQINEENISLEAELFSLDGKERFYHKDSKEIKFAFELGKEVGLILKKESKNSYKK

SEQ ID NO: 80841 - protein, 184 aa, Unknown
  Bacterial polypetide isolated from the Sargasso Sea
LLIIGPPGVGKGTQAKRIREYLNIAHLSTGSILRAEIKAFSAVGKEAKKFIDKGKFVPDKYLTKIVRDEISSAKCKNGYLLDGYPRTITQANKFEIILNDVNHKLDAVIGLRAHEDELIRRLIDRGRDHNRSDDLPEIIRKRQNIYWERTAPLLDYYSSKGLLKSIDGLGDIDEITKRIINELK

SEQ ID NO: 80842 - protein, 254 aa, Unknown
  Bacterial polypetide isolated from the Sargasso Sea
LGLGIGIAGLVDINGQIRRAPNLADVDGLDIGPILEPKLGVPVYVDNDVNCAALAELSDGAAALVNNSLLVTLGTGIGGALIVDGDIHRGAFGMAAEPGHMVVNPHGFICACGKKGCWEAYASAAGLRNLAIDRAQNGQLEEINDKVQGDLNKIASEDITQAARRGDIQCLEVINEFAYWIALGLTNCAALLDPELIIIGGGLVAEWDLLGDRIRHSFDELLLASTQRNRIPIKPAENGKAAGAIGATLLGRQR

SEQ ID NO: 80843 - protein, 242 aa, Unknown
  Bacterial polypetide isolated from the Sargasso Sea
MNFEKNIKNTSETIARFINHTPLQYSPYLSKIIDGNVYLKLENIQKTGSFKFRGAMSKISSLAMSKNPKKVITASTGNHGAACSLAMSLKGVDGSIYVPKNAHQNKIDKIKLYGADVKYYGNDCVETEMHAKALSIEHGFSYISPYNDMDVIFGQGTVGYEIDQDLDIIDAIFISVGGGGLISGVGGYLKSLKREINIFGVSPINSCVMHESIKNGQITDLQSQPTLSDGKAGGVESGSITF

SEQ ID NO: 80844 - protein, 168 aa, Unknown
  Bacterial polypetide isolated from the Sargasso Sea
MKSKKIIIGSRGSKLALIYAEIAKNKIFKVKSDFKIENIDIKTITTKGDQVQNIRLSDIGGKGLFAKKIEEELLQKKIDIAVHALKDMPSNETEGLITNCFLERNDPREILISRENFFLKDLAKDSIIGTSSFRREFQLKKKRNDLNYKLIRGNVDTRIKKLNDKLYD

SEQ ID NO: 80845 - protein, 157 aa, Unknown
  Bacterial polypetide isolated from the Sargasso Sea
MELYESKILSLVEENKKIVILTAENRVSLRNVPEKLNQNFIDVGISEQNLIGIGAGLAKLGFLPIMHGMSTFLTMRAFEFIRTDLGYPRLPSVLVGTFNGLSATANGTANGPTHQAIEDIALMRLVPNMTVVTPSDRLETLKILDNISKLEGPLYMR

SEQ ID NO: 80846 - protein, 255 aa, Unknown
  Bacterial polypetide isolated from the Sargasso Sea
KSKKIIIGSRGSKLALIYAERAREKILKYCSNVEIKKIKTTGDINQKDRLSEIGGKGLFSKQIENELLQNKIDIAVHALKDMPSDETKGLLTNCFLERNDPREILISLNNNLIKDLKPNSIIGTSSYRREFQLKKIRSDIKYKLIRGNVDTRLNKLNNKLYDAIILSYAGIKALNLDQKISQIFSVKEIIPSVGQGVVALQCREKDFETIQILKKINHKITNICVNAERQLLKILEGDCDTAVGAIANIEDQNIT

SEQ ID NO: 80847 - protein, 280 aa, Unknown
  Bacterial polypetide isolated from the Sargasso Sea
MIGILGPSGCGKTTLLNAIAHNRLVKDGNITLNGERIGMQQVAFVEQSMDLISKLTVFETVSTQAKLKMPWFFSSKEVSDRSKGVLRDMGLEHVSDLRVMGSGLSGGELKRVQVASELVGGDAPLILLDEPASGLDAQTSWRLFSQLRALAADKEKTVIATVHQPSRRIVDLYHRIVVLTHDGRVMWSGPPKEIDSLLTQVGMEVPMGMSTAEWLLDIACDDAKQKKFTSGLKSVTETPVESNWTTHTPRLQLPEDRVAAHEFKSALSRISVLLWRAFTV

SEQ ID NO: 80848 - protein, 284 aa, Unknown
  Bacterial polypetide isolated from the Sargasso Sea
LKKRGYQRLKVDNVVYDIDEVPSLKKNFKHNIDVVIDRLVVKKNIQQRLSESIEVALTLSDGLLYLENLDTNKISVFSSKFACPISGFSIEEIEPRLFSFNAPQGACSECDGLGVEKYFDEYKIVPDETRSIADGAIKPWETKVFGYQKKYFVETIDKILKQFKIKKNVPWSEIPKKVKHLILYGDKNSELNILDDFEGIINFIDRKYEETERWWLQYELEKYLSERDCEVCNGYRLNEKALAVRIDENHIGDITKKSISECLNWFSLLESKLDKNNKKIAEGV

SEQ ID NO: 80849 - protein, 211 aa, Unknown
  Bacterial polypetide isolated from the Sargasso Sea
MTKKLKIKICGINDPYIMRTACSLNVDFVGLVFYKHSPRNISLDFAKSIIKHRMNQTKIVALTVDSDDNFLDLIFDFIKPDYIQLHGNEKVSRCVEIKNKYRTKVIKALEVKNVDILLNDINAYKDVVDILLLDSPKSFMPGGNGEPFDWHLLNENDLDANWLLAGGLNEKNVNEAVNLTNATGVDISSGVEVSKGKKSPQLIKNFVRMCR

SEQ ID NO: 80850 - protein, 280 aa, Unknown
  Bacterial polypetide isolated from the Sargasso Sea
PRQWQQQLIQLLRRRLERKQTSDQDVLVFAGPGAGKTLGALLAFKAMQQEGRLQRFVVFCHRTSILSQWQSAAGRLGLGLEEWPCSDQADGLLITYQGAGRQLEQLREDLRHWGLAGSLAIADEAHHLGLDPDEPDNTAWGGTFLELTQHCRLRLGLTGTPFRADNLAFCAARRIRLRQGHELIEQIVPDLAVEPRELIAAGDVRPLEFRFQDGWVEHSREGMPDRDVSPLSAETRESWRARNLRRAIELGDESGIGQQLLLRAQRKLKQVRLQHPNAAG

SEQ ID NO: 80851 - protein, 166 aa, Unknown
  Bacterial polypetide isolated from the Sargasso Sea
ADRFDVWVHIGALQVSNLVGHAIAPNARFVCASPAFVKRFGLPETPDDLAALPCIVLRENKEDVSLWHFSKGRTSRSVRVPRPLICNDGDVIRQWACEGRGVILRSEWDVADDLRAGRLLRLLPGWKAPDANVIALTHNRAGLPQRTRHFMQALQGRFKPQPPWRA

SEQ ID NO: 80852 - protein, 264 aa, Unknown
  Bacterial polypetide isolated from the Sargasso Sea
LINGVLQSLDPYSAYMSPELFKEMQTDTKGEFGGLGIEIGMESGVVKVISPIDDTPAAKAGIKAGDYIVKIGNEQVQGKSLLEAVKLMRGPVGTSIELTVRRKKVKKPLEFKIERKIIEVQSVSSKTIGEEKNLGYIRLKSFNENSDKQFLKSVKEFEKKSKIKGYVFDLRNNPGGLLTQAINITDFFLEDGEIVSTKGRKVSETRKFFARKGDEIKGKPIVVLINNGSASASEIFAGALKDHKRAIILGENSYGKGSVQSIIP

SEQ ID NO: 80853 - protein, 268 aa, Unknown
  Bacterial polypetide isolated from the Sargasso Sea
MEKIFNKLCEGLFSELESNEALTLSFSGENSQFIRINNASIRQTGLVDDATLGLKFVSNSRTCEGSMTVSGDYEVDLSRGMKELERMRFESNEILEDPFLVMPTNSGSSREIINANGLSFDDAIQALIPSMQGVDLVGIFANGKMYRGNANSHGQKHWFETESHCLDYSLVTPERQMVKGTYAGTDWDQNSYESYIHHSIEKLELMKRKPVRVDTGMYRTWFEPKAVADFIDMFSWNGISEASLQQGCSGFGKMRHNDVRLSPKIYNF

SEQ ID NO: 80854 - protein, 264 aa, Unknown
  Bacterial polypetide isolated from the Sargasso Sea
MNSKNSHVIAYNKHISSKIFDKYDVPVPKFIYFNRKQFPDFSNFKNILNNKKLGFPLVIKPTDASFGKGVSLDIQSYNDAFNKCNEILKGSKTKGIMIEEQVYGENYRILVYKDKIVSIVKREYPHIEGDGNNKINTLIEIKNKELEKENMKPMVSLNEYFIEKQGYTLDDVPMKKEKVYVSNICNYKNGGKVHYVDINELHSDNIKMFRLLNSIIGSKLIGVDYMTNNISDSYKNGNGYINEVNSRPGITIHEIAERDYITQP

SEQ ID NO: 80855 - protein, 210 aa, Unknown
  Bacterial polypetide isolated from the Sargasso Sea
MKSKKIIIGSRGSKLALIYAEKARQEILKFATEFNITEVEIKKIKTAGDKNQKVRLSEIGGKGLFSKQIEDELLNDKISIAIHALKDMPSQETKGLITNSFLKRNDAREVLISKDKMRFENLKPNSIIGTSSFRREFQLKQLRKDLSYKLIRGNVDTRINKVKEDLYDATVLASAGIFSLNLDNYVSHIFSVDEMLPSAGQGVIALQSKV

SEQ ID NO: 80856 - protein, 217 aa, Unknown
  Bacterial polypetide isolated from the Sargasso Sea
RLAGLEPSSVIVEILNPDGTMARRPQLEVFAKEHDIKMGTIADLIEYRNLNETTIEQVAKCKLPTQYGEFDLVTYKDTIDGQLHYAMIKGDISDPTLVRVHLQSTFNDILLSDRGADRSWTLSNAMAYIAEHDGVLVILGKQERSDDIEAMVKAFALEDAGESANHRKIQGTSRTVGIGSQILADLGITKMRLMSMPKKYHALSGFHLEVVDYVQPE

SEQ ID NO: 80857 - protein, 282 aa, Unknown
  Bacterial polypetide isolated from the Sargasso Sea
VVINFVLLCVLTQRDPEYSRPLESISKEVNILTINGAKEIVLLGQNVNAYASINNGVRVNISDLIEEISKTEKVKRIRYTTSHPVNMSDDLINLHATNDKLMPFIHLPVQSGSESILKKMNRKYDPNFYRRTIDRLKKVKPDIKISSDFIVGYPGETDQDFNDTLKLIDDIEFTQSYSFIYSSRPGTKSSTEVDDTPISVKKERLLVLQEKLKKIQYSFNKQFCNKTVKVLIENQSLSNPEYFFGRTPFMQSVYIKSNNLVPGHEKDIDITSCNHKSLYGIC

SEQ ID NO: 80858 - protein, 27 aa, Unknown
  Bacterial polypetide isolated from the Sargasso Sea
DLFAFRFEDFELQGYQAHPHIKAPVAV

SEQ ID NO: 80859 - protein, 139 aa, Unknown
  Bacterial polypetide isolated from the Sargasso Sea
MNLEKILPKNGPSINEVKKYIEKYLEEIIVIKCGGSVLLDENLFKQFIEDVSVIYKLGLSVIVVHGGGKNIKKKLDKLNIESKFIDGLRVTDRKTIKVVEEALLELNSEIINNLKNLQINVESVAPHNKNLIKIKPEKK

SEQ ID NO: 80860 - protein, 138 aa, Unknown
  Bacterial polypetide isolated from the Sargasso Sea
GGVYQAGTLSGNPVATACGLATLREIKKPGFFDALSARTRSLVDGLQAAADAEGVPFCGDCEGGMFGFFLLPELPQNYAQVLKTDSARFNQLFHGLLDRGIYIAPALYEAGFVSAAHTADDVAVTVTAAREVFKTLSK

SEQ ID NO: 80861 - protein, 144 aa, Unknown
  Bacterial polypetide isolated from the Sargasso Sea
MVRIIKKIIREIFRQRLTKRFINSKQYWENRYFFGGNSGRGSYKEEALIKADFVNNSISKYNINSIVDIGCGDGNNLMLFDQVDYIGIDPSETIINLNKKKFIRDNQKKFYLLNGNQIEIAKIANNFISNRNSITLKLDIIFFI

SEQ ID NO: 80862 - protein, 128 aa, Unknown
  Bacterial polypetide isolated from the Sargasso Sea
MNLENIIPKDGPSIEEVKKYIKKYSNELIVIKCGGSVLLDVVLFNQFIEDISAINHLGLSVIVVHGGGKNIKKELDKHKIESKFIDGLRVTDENTMTIVEKALLELNTEILNNLTNKEANAKSVTPKE

SEQ ID NO: 80863 - protein, 123 aa, Unknown
  Bacterial polypetide isolated from the Sargasso Sea
MNLENIIPKDGPSIKEVKKYIKKYSNELIVIKCGGSVLLDVVLFNQFIEDISAINHLGLSVIVVHGGGKNIKKELDKHKIESKFIDGLRVTDENTMTIVEKALLELNTEIFNILLIKKQMQNR

SEQ ID NO: 80864 - protein, 215 aa, Unknown
  Bacterial polypetide isolated from the Sargasso Sea
KPGRFSFNVKGGRCEACQGDGMIKVEMHFLADVYVKCDVCNGKRYNEQTLEIKYKEKNISDILDMTVEDALTFFDAHPSIKKKLITLNDVGLGYITLGQSALTLSGGEAQRIKLAKELSKRSTGKTLFILDEPTTGLHFADIELLLKVLDRLKQQGNTVVVIEHNLDVIKTADWIIDLGPEGGSDGGTIVAEGTPEDVAKNKGSYTGEFLKEVLN

SEQ ID NO: 80865 - protein, 217 aa, Unknown
  Bacterial polypetide isolated from the Sargasso Sea
MGGGPRIKRELDKSNIQTKFIKGLRVTDEKVINIVERVLIDFNKDIVDSLKKKGTEAISINTKENNIIEVIPESEELGFVGKPNKINNEILLNVIKEKKIPIVSPLGLQKSQPFNINGDWAAGAIAKSLKCRRLLLMTNVEGVLDKNKKLIDEISSSEILEMIKNETITGGMIPKINTCLDAINNGVAAVGIIDARPQHSILFELFSDKGSGTLIRK

SEQ ID NO: 80866 - protein, 291 aa, Unknown
  Bacterial polypetide isolated from the Sargasso Sea
MINKREELISRTRIKNLILKEKLKLNNKIITSPSKKVLMGDKLSLQIPEPEEAFLKPYNFKLEIIHEDEDLLVINKPAGIIMHPGAGNNDKTIVNALLNYNKNSLSTIGDELRPGIVHRIDKNTSGLVVIAKNNETHEKLSKQFNNHTISRVYQLLIWGKLRPSSGKIDTYITRSSKNRQLMEVSRSKGKRAITNYKTIETFENSKTPTLSLVECKLETGRTHQIRVHMTHLGNSIVGDDKYKKKYKKLKNIDLKLENLISKLNRQFLHAKNLGFIHPKTNKKMNFSSILP

SEQ ID NO: 80867 - protein, 233 aa, Unknown
  Bacterial polypetide isolated from the Sargasso Sea
MCDAYTKAYSCDTTSAFGGIVALNQTIDKESATEIIKIFTEVIIAPGITDEAKEIFKTKNNLRVLILSSLHEKNTSQNYKSIEGGILVQSNDNEETSKSDLKVVTQKKPSEDQIEDMLFAFKVCKHVKSNAIIYVKNKKTIGIGAGQMSRVDSAKIASQKNSEMEDIEKNSLKDSVVASDAFFPFPDGLLVTISSGATAVIQPGGSVKDNKVIEAADEAGISMIFTDIRHFRH

SEQ ID NO: 80868 - protein, 238 aa, Unknown
  Bacterial polypetide isolated from the Sargasso Sea
MIYAEKVKSELEKKFPNKIEIKKILTIGDENQIDRLSNIGGKGLFSKKIENELIGDEIDIAVHALKDMPTIETEGLNTNFFLERSSPNEILISKGNVKFQDLEPNSIIGTSSYRREFQLKRKRSDLNYKLIRGNVDTRIKKLENGEYDAILLAKAGIDALGFNDKVSEEFSTDELIPCAGQGMIAIQCRDSDHEMKNLLEKINNNEARILANTEREVLKILEGDCDTAVGVFAKIENE

SEQ ID NO: 80869 - protein, 269 aa, Unknown
  Bacterial polypetide isolated from the Sargasso Sea
IEIKTISTKGDQVKDTRLSDIGGKGLFSTEIEKELENKSIDIAVHALKDMPAKETSGLKTDCFLERNDPREILITNDKKKLNDLKLKSIIGTSSFRREFQIKKLRSDLTCKIIRGNVDTRIKKLKDGNYDAIILSYAGIKDLNLENEIAEIFSAQEIIPSAGQGIIALQCRDADKEIISILKKINHEETYKRAHAERNVLKVLEGDCETAIGVYSKIEGETIEVEAELFSIDGTQRFYEKKFDKIDKFKEIGKQIGQNLKRQSNNSYKK

SEQ ID NO: 80870 - protein, 265 aa, Unknown
  Bacterial polypetide isolated from the Sargasso Sea
SEHYDFGSHQDVYSQHDESGSHSDTYSEHYDFGSHVDVYSQHDESGSHSDTFSEHYDFGSHLDVYSQHDESGSHSDTYSEHYDFGSHLDVYSQHDESGSHSDTYSEHYDFGSHLDVYSQHDESGSHSDTYSEHYDFGSHLDVYSQHEESGSHSDTYSEHYDFGSHLDVYSQHDESGSHSDKFSEHWDQGSHLDVYSQHDESGSHSDKFSEHYDFGSHLDVYSQHDESGSHSDKFSEHYDFGSHQDIYSQHDESGSHTDKFSEHRE

SEQ ID NO: 80871 - protein, 77 aa, Unknown
  Bacterial polypetide isolated from the Sargasso Sea
MHKYSVKPLSNIAKIGLEKLEGTSCFLEENSEAPDGVLVRSTKMTSEDLTANLKAISRAGAGVNNIPIEKCTKEGIV

SEQ ID NO: 80872 - protein, 206 aa, Unknown
  Bacterial polypetide isolated from the Sargasso Sea
DVYRLQGVKINDKHFEVLVRQMMRKVQITHSGDTYFLEDTLVSKDAFQEQNDKLFGMKIVTDAGDSEELKSGQIVSLRELREENSRLKRKDVKEVEARDAIAAVASPVLQGITRASLQVDSWISAASFQQTTKVLNEAAINAKRDHLIGLKENVIIGKKIPAGTGLIHAAETIVGSQFEYDRLNQLKEEANNSDEVAVEATNAEEE

SEQ ID NO: 80873 - protein, 164 aa, Unknown
  Bacterial polypetide isolated from the Sargasso Sea
MTRKIIIGARGSKLAMLYAQKAKDKIIKSNDFSDEDIVIKKITTKGDEIQDVRLSEVGGKGLFSSNIEKELQDKNIDIAVHALKDMPALETKGLQTNSFLERNDPREILITTNKEKLSELKKNSIIGTSSFRREYQIKKIRSDLECKFIRGNVDTRIKKLKDGA

SEQ ID NO: 80874 - protein, 199 aa, Unknown
  Bacterial polypetide isolated from the Sargasso Sea
MPKISAIILAAGKSSRMKTPKPLLNLDKEALINFQIKSLKNSHIEEIIVVLGSNAEEIKKVILSNEVKVVENIDFELGKTTSIKKGLSEINDKNDILLIAVDQPRNKLLIEQISSFHINHPGEKKIVMPFSNGKSGHPIIFSNIFFNELAQINEETEGIREVIKNNQESMIKYKTKDESALVDLNTPEQYEKYLLNYFK

SEQ ID NO: 80875 - protein, 159 aa, Unknown
  Bacterial polypetide isolated from the Sargasso Sea
MLKLRLSRGGTKKRPVYKIVVADSKFPRDGRFIEKLGFFNPLLPKEKKERVGLENERIKYWLEQGAKPTIRVARLLGENKLMEMPKAGNNPLKAIPKKDRKKDSGEEKKVDAPKDAAPKAEEKKVDVPKDAAPKAEEKKVDVPKDAAPKAEEKKSEEKK

SEQ ID NO: 80876 - protein, 161 aa, Unknown
  Bacterial polypetide isolated from the Sargasso Sea
MKSKKIIIGSRGSKLALIYAEKAKEKILKVSKEFNIESVEIKKITTAGDLNQKDRLSEIGGKGLFSNKIEKELLENKIDIAVHALKDMPSDETDGLLTNCFLERNDPREVLISKNKIKFKDLNQNSIIGTSSFRREFQLKNKRSDLNYKLIRGNVDTRINS

SEQ ID NO: 80877 - protein, 254 aa, Unknown
  Bacterial polypetide isolated from the Sargasso Sea
MKFNVNQNDLQKSLGYCQGVIEKRSTLPILSNILLDAQASKLKIVATDLDLIFVNEIKNVEIIEEGKTTTTSSIMYDIIRKFDSGKKINFNQTSDNKIQLESEKSIFNLNCISASEFPVTDEVFKSNEFTVKSKELLKLLNKCKFSISNDETRHYLSGIYLHQTRMEEKIYLTAAATDSHRMSISKILLKDEIQFDPIILPKKTIFQLVNLLEDYEGDVKISNEKSKIKFEMENSILISKLIDGKFPNYIQVIP

SEQ ID NO: 80878 - protein, 253 aa, Unknown
  Bacterial polypetide isolated from the Sargasso Sea
EDSRNSDVSGVDIYAQHVSSSGSVTHSENGILISNADNLQFNPLVRDDGAGGSLIVWGDQRSGGSYGIYIQRLQNSGTSLTANGKESFFGISTDAANEPYEHGAVYLENNEALVYWQDNRFGESKIYGTKISSSFDGSGGDYFSNSSINGQPLTSLDLAQEIPKVILAGDKIFLSFKVEESPNENLYFQLLNLDLSAYGSAVAVADPSTSKQGFDMVYGEDGNIYYAYSEDYDITVKKISSSGSVDWTVQAVS

SEQ ID NO: 80879 - protein, 281 aa, Unknown
  Bacterial polypetide isolated from the Sargasso Sea
VEVQNELKIKAAYISAIENCDPLAFDTPGFVAGYVRSYARYLNLNPDDVFMKFCSESGFATVHGMSDKASSVKPNNNSVLLPADNFIDGEELFNKSPSAILDNSAKTFDKLEPGAIGSLVALICIVCGIGYGGLMIFNQIQTVKISPSNSTPIVLTEISSDFLGQQDVDNSVTGKLKNDQLDRLYRPQALEVPVFTARDGPISTLDPSFSKNFDMQQELIISEVATNALEGNLTEQVSTNNFHEAPIQVVQDLPPSIAVLVTENAWVQITGSDGTVIYENI

SEQ ID NO: 80880 - protein, 267 aa, Unknown
  Bacterial polypetide isolated from the Sargasso Sea
YSFPAGGENTDLQVEVMKDIGTTAYVGVPDFLKIILEKADEKKISLSKLTKAMVTGGPLFPAVAQNFRERSIHVRQCYGTADLGLVAYEAAENDGMVIDENVILEIVKPGTGKPLNDGEVGEVVVTVLNNYELPIIRFATGDLSAILEGNSSTGRTNKRIKGWMGRADQTTKVRGMFVQPSQVNKILETLKINGSARMIVSRSNDKDELLLKVEAEVTDTNQIESLEQKISDEIKNIINLRGTAKIVPIKSLPNDGKVIDDIRNFGE

SEQ ID NO: 80881 - protein, 267 aa, Unknown
  Bacterial polypetide isolated from the Sargasso Sea
DLTVSGSLHDSTAVSIASGADYNVNASDTVASIEGAGNIVLASSQTLTAGDGNNKTLSGVMSGAGNYIKAGGGTQTLSASNTYTGTTQVSAGTLTVSGSGRLSDSTAVTVDSGAVYNVAVSDTVASIAGAGSITLGSNTLTAGGSNANTTFSGVISGSNGNLIKAGSGALTLSGVNTYTGTTTINAGDLTVSGSLHDSTAVSIASGADYNVNASDTVASIEGAGNIVLASSQTLTAGDGNNKTLSGVMSGAGNYIKAGGGTQTLTGN

SEQ ID NO: 80882 - protein, 190 aa, Unknown
  Bacterial polypetide isolated from the Sargasso Sea
MSSVPPQQCLVALDVEGVLTPEIWIAVADEFGIEGLKRTTKDEPNYQLLMDSRIQLINSNGIALQDIQSVIASLSPLEGASDFLDELRSRVSVVLLSDTFEEFIQPLMDQLGNPLILCHRLIVDPNGVITGFVERIPNQKFHAVRSFQELNYRVLAAGDSYNDLSMIDQADAGLLFRAPDHVRSERSDLV

SEQ ID NO: 80883 - protein, 290 aa, Unknown
  Bacterial polypetide isolated from the Sargasso Sea
DAINNAQMIKGGFPARYGGRLSSVLDIHMKEGNMKKFKGEGSIGIISSKLTLEGPIIKDKTSFLVSGRRTYVDLWAIPLINSFNNSGGGKGEGGSSSSSNTGGYYFWDLNAKINHKFSDKSRLYVSGYFGKDRFYGDRNNSYPDGGNQINEQASNALEWGNAIAAIRWNKIITPKLFMNVTATYSQYQFGVGFTNQTSVTYTDSTQQSSLSSQYDSGIRDWAGKVDFTYYPNANHSIKFGLGNTYHTFIPGVNQFQVNQSGISSVDSTFGSTQQYGHEHWIYVEDDWEIS

SEQ ID NO: 80884 - protein, 244 aa, Unknown
  Bacterial polypetide isolated from the Sargasso Sea
RSNPATYTGLFSYIRDLLSQTVEARSRGYKPGRFSFNVKGGRCEACQGDGMIKVEMHFLADVYVKCDVCNGKRYNEQTLEIKFKDKNISDILDMTVEDALDFFEAHPSIKKKLNTLNDVGLGYITLGQSALTLSGGEAQRIKLAKELSKRSTGKTLFILDEPTTGLHFADIELLLNVLDRLKKQGNTVVVIEHNLDVIKTADWIIDLGPEGGSDGGMIVAEGTPEDIVKNKDSYTGQFLKQLLS

SEQ ID NO: 80885 - protein, 205 aa, Unknown
  Bacterial polypetide isolated from the Sargasso Sea
YKKTKKDVGLEDGDQKRTIELAEYASIDEIAKVLDVSTSEVIGKCLQMGILATVNQRLEWDVIELIAGEYDVELKKYEEVVDDLFVTSHSKEELSNALERAPVVTIMGHVDHGKTSILDYIRKTKVAASESGGITQRVGAYQVLHNDNKITFLDTPGHEAFTAMRARGAQSTDIVILVVAADDSVMPQTIEAINHAKAAEVPIVV

SEQ ID NO: 80886 - protein, 141 aa, Unknown
  Bacterial polypetide isolated from the Sargasso Sea
MREKSDFVGQGMSFPLAIDRAGSFLMVSGSESLESSITMILSTAPGERVHRPRFGCQIWELLFEPISPELLGRCEQAVETALEFWEPRIDVVNVEARATSAEGEVEILIDYVVKIENERRNLVFPFYVIPSDGESDGLSES

SEQ ID NO: 80887 - protein, 232 aa, Unknown
  Bacterial polypetide isolated from the Sargasso Sea
NNIDIAVHALKDMPSIETEGLITNFYLKRNSPNEIFISNDNINFLDLKPNSIIGTSSYRREYQLKSIRSDLDYKLIRGNVDTRIKKLENGDYDAILLSKAGIEALGLTNKITHEFNTEELIPCAGQGIIAIQCRENDQEIINILEKINDDQSRIIANAERKILKILEGDCDTAVGVFAKIDKDFVNIKAELFSVDGKQRFFVDESEDKKMIEDLSIKIGEKLKSESKGSYKR

SEQ ID NO: 80888 - protein, 226 aa, Unknown
  Bacterial polypetide isolated from the Sargasso Sea
MSKKIIIGSRGSKLALLYAQQAKDKIIENTNLKNDDILIKSITTKGDEVEDIRLSEVGGKGLFSSNIEKELQLKNIDIAVHALKDMPANETEGLMTNSFLERNDPREILISKDKKKLKDLDEKSIVGTSSYRREFQIKKIRKDLNCKLIRGNVDTRIRKLNEGMYDAIILSYAGIKLLKFENEISEIFSAKEIIPSAGQGIIALQCRENDDEAISILNKINHEETH

SEQ ID NO: 80889 - protein, 242 aa, Unknown
  Bacterial polypetide isolated from the Sargasso Sea
MSYYPDVVILAGGAGSRIKKLSKNKQKCLIKFNNKVFLQYIINQISAEEINKIYILTGLKYKNVHKMFHKKNQNFREITCIRENKPLGTGGALSQLKKFNINDFYLLNGDSIFDIKISSLKNFVNNKTIGSMALLQNNNYRSNKKLANLDLVKEKIKFTKNNKYMNGGIYFFKKKILKLIPNKNCSLEDDILPNQINKNRIEGIPFKKNFFIDIGTPKNFKIAEKQLEKNFKKPAVFLDRDG

SEQ ID NO: 80890 - protein, 282 aa, Unknown
  Bacterial polypetide isolated from the Sargasso Sea
IGDCAFQDCTSLTSITIPSSVTQITVMAFKGCSSLTSVTIPSSVNIIGDGAFHDCSKITGVTIPSSVTSIGRWAFYGCSSLTSVDIPEGVTKIGAYAFRGCSLTSVDIPSSVTEIGESAFFGCTSLQSVTIPSSVTEIDARVFIGCTSLTSVTIPSSVTKIGDGAFRYCSSLTSVDIPSSVRIIGDGAFHDCSLTSVTIPSSVTKIGSGAFRYCSSLTSVDIPSSVTEIGDGAFRNCTSLTSVTIPSSVTEVRMDHGMYVFPVNEITTGSETRLLCKAGIVV

SEQ ID NO: 80891 - protein, 97 aa, Unknown
  Bacterial polypetide isolated from the Sargasso Sea
MNLYRDLSKKIRVWDSSVGQFEELAAKQLQDVASLPVVEGVRAMPDSHWGLGACVGSVIALKKAVIPAAVGVDIGCGMLACKTSLNSHHLPENLKAL

SEQ ID NO: 80892 - protein, 126 aa, Unknown
  Bacterial polypetide isolated from the Sargasso Sea
MSFLKINNLSVDYQMRKETVYAAKNVNVEVNKGEILGLVGESGSGKSTVGNAIINLIDEPGKVSSGSVILGDINIHENSESIVKYRGNKIGLIFQDPQTSLNPILTVGEQLIETIQTHLKLSKEEA

SEQ ID NO: 80893 - protein, 229 aa, Unknown
  Bacterial polypetide isolated from the Sargasso Sea
SEVGGKGLFSSNIEKELQDKNIDIAVHALKDMPALETQGLKTDAFLERNDPREILITINKQKLSELKKNSIIGTSSFRREYQIKKIRPDLECKLIRGNVDTRIKKLKDGTYDAIMLSYAGIKFLNFDSEISEIFSPEKIIPSAGQGIIALQCREGDEEIISVLKKINHNETFMRAHIERNILKVLEGDCETAVGAHSKVEGGKITVEAELFSLDGLKRYYEKKTGKLED

SEQ ID NO: 80894 - protein, 62 aa, Unknown
  Bacterial polypetide isolated from the Sargasso Sea
NELDLLIRTGGDRRISNFLLYHLAYTEIQFSKTLWPDFTEEEFIKCLEVFSKTERRFGKRTL

SEQ ID NO: 80895 - protein, 206 aa, Unknown
  Bacterial polypetide isolated from the Sargasso Sea
MKTVHFIRHGETEQNALKVWQGHTDTPLNKKGLEQAKLLSERINSRVTKVFSSDLKRASQTASFLSSSSILRDNLREINVGDFTGKSVKDTYTSNHEIFQSLQNDSFQFPNGESVQEFKDRVRNELEYIFNQTEEDSETVVVTHGFFIGTAIGLTLGFNTYPFPIGDITNTSISTIVKRETVTQVNKFNDSIHLNKENIDFPAKSK

SEQ ID NO: 80896 - protein, 221 aa, Unknown
  Bacterial polypetide isolated from the Sargasso Sea
MFGGSTPNEAFRISDNGNATITGNLSIKGVVGGTGENGALELYEPSGTGANKITIKAPNSITSDTTLTLPDGAGSNTNVLQTDGSGNLTWVAKDSGPTGSQGPTGSGGSTGAQGPTGTTGSQGPTGSTGPTGSGGSTGAQGPTGSQGPTGSTGSQGPTGSGGSTGAQGPTGTTGAQGTTGTTGSGGSTGAQGPSGPAGLGGLGDTGPQGPTGETGSQGPTG

SEQ ID NO: 80897 - protein, 177 aa, Unknown
  Bacterial polypetide isolated from the Sargasso Sea
ERLMPHIHISWQSGDDLILKRMKRRHNRSQVIKFCEKAKRLRPNIVFGADIITGFPTETDDMFKNTSNLIKECDLIYLHVFRYSKRLGTPASKMPQVCEKIKKERSKILRTIGKNKLVEYKNTIIGTQKKILIEQNIKNHSIGRTQEYFKIKIDSNLVEGKIYNLLIGSNTDNMLIA

SEQ ID NO: 80898 - protein, 86 aa, Unknown
  Bacterial polypetide isolated from the Sargasso Sea
SRDVKVLKDVQSDIAGRDVLIVEDLIDSGNTLNKVREMLLLREPKSLSLCTLLDKPERREVDVKVDFIGFTIPDEFIVGYRIDYAE

SEQ ID NO: 80899 - protein, 173 aa, Unknown
  Bacterial polypetide isolated from the Sargasso Sea
MIIGSRGSKLALLYAQRAKDKIIENTDLGDEDILIKSIITKGDEVQNIRLSELGGKGLFSSNIEKELQLKNIDIAVHALKDMPANETKGLTTDSFLERNDPREILITNNKKKLKDLDQKSIVGTSSYRREFQIKKIRQDLNCKLIRGNVDTRIRKLNEGMYDAIILSYAGINF

SEQ ID NO: 80900 - protein, 268 aa, Unknown
  Bacterial polypetide isolated from the Sargasso Sea
MNRDKIVIGSRGSKLALIYAEKVKSKLIDNCPKKIEIKTIVTEGDVNQKDRLSEVGGKGLFSKNIESELLENKIDLAVHALKDMPGIETKGLVTNCFLERNYPNEILISKNNIKFNKLKSKSIIGTSSYRREYQLKHMRNDLNYKLIRGNVDTRIKKLNEGLYDAIILSKAGIDSLNLNNHITQEFSIEELIPSAGQGVIAVQCRNSDKDIKEILKKINHQETNTCCVAERELLKTLEGDCNTAIGAISTIDQNTITLNVELFSKDGK

SEQ ID NO: 80901 - protein, 255 aa, Unknown
  Bacterial polypetide isolated from the Sargasso Sea
MSHQSSLIASDIDEYLAQHEQKELLRFITCGSVDDGKSTLIGRLFYESKMIYEDQLAAIKKDTSRYGTTGEEVDLALFTDGLEDERQQGITIDVAYRYFSTDKRKFIIADTPGHEQYTRNMATGASTADLAIILIDARHGVLPQTKRHSFIVSLLGIKHIVVAVNKMDIVDYDQAVFEKIKSDYVDFAARLDLPDVHFMPISALKGDNVVSLSPNTPWYTGSPLMPLLETVYIGSDRNMEDFRFPVPYVLRPDPY

SEQ ID NO: 80902 - protein, 301 aa, Unknown
  Bacterial polypetide isolated from the Sargasso Sea
VTITVSVSDSTEAELVSDSSLVFTESNWNAAQTVTVRGIADNLSDGDQSYTVILKDNVTSDARYRYVDPPDVSLKNLDLTTKGGFYVSEASNDTDENGITSTFTVRLSSQPGDNDTSTADNVTITVSVSDSTEAELVSDSSLVFTESNWNAAQTVTVRGIADNLSDGDQSYTVILKDNVTSDARYRYVDPPDVSLKNLDLTTKGGFYVSEASNDTDENGITSTFTVRLSSQPGDNDTSTADNVTITVSVSDSTEAELVSDSSLVFTESNWNAAQTVTVRGIADNLSDGDQSYTVILKDNVT

SEQ ID NO: 80903 - protein, 110 aa, Unknown
  Bacterial polypetide isolated from the Sargasso Sea
MVIVFIGPPGCGKGTQANILKDSILPDLNILTVSSLLKEKSQDESILGKEIKHKMDNGDLIEDTVVISVLKEKVNSLSNEQILIDGFPRSSIQADSLLEIFDNKELSIIN

SEQ ID NO: 80904 - protein, 294 aa, Unknown
  Bacterial polypetide isolated from the Sargasso Sea
MFALASILSLLALIISVPIFLVFGLGSSVAAIGGLNLPWSVLIQVSFGALTKHVLIAVPLFIFSGMAMLKGGAALRLVRFATTLVGHWPGGLGVAMVIAMGFFAAFCGSILAAITAVGTIMMPKMIEQGYPTPFVVVLAASAALLEALIPPSNAAILFSALTYVPVSKTFAAGVIPGIILLILMVLLVLFKCRHIRADKKATFKERLSSFIAALPALITPVIILGGIYAGFLTPSESAAIAGVYAVAIGFLIYRELTFSSLLSCLNRYCNNYCCYIFNNCNSYFFKCCAYLHTS

SEQ ID NO: 80905 - protein, 272 aa, Unknown
  Bacterial polypetide isolated from the Sargasso Sea
MKNKKIIIGSRGSKLAMIYAEKAKNRILNFYPEFTFDDIEIKKITTKGDVYQNERLSELGGKGLFSKKIEEELINNKIDIAVHALKDMPSEETDGLITSCFLKRNDPREAILSNKNIKLKDLNSNSLVGTSSYRREYQLNNLRNDLKFKLIRGNVDTRIKKLKDNLYDAIILSIAGINSLNLNEYVTEILPTNEMLPSAGQGIIALQSKEDDKRINTILKKINHESTYQCAQAERNVLKVLEGDCETAIGVYSSISDKKIEIKAELFLSMKK

SEQ ID NO: 80906 - protein, 297 aa, Unknown
  Bacterial polypetide isolated from the Sargasso Sea
MGENARKNAIKNHGLNDTHFKKVFPEILKIVRNTSPKKSIFKQKTDNKSSEKQKVSKNKKNSRKEKEEIQTQEIDILDDDELPKISVVTLTHNRKFMFKMAIYNFNTISYPKNKLEWVIYDTSNSDNSVEDLLPSEKDRKELNIKYISYNSEIISIGESRNRSIDYCSNNIVVFMDDDDFYPPESVKTRVSILENSNKNIIACTTIGSFDINKFISFIDVPPYLNTYSHRISPATLCFRKNIINNKCRFSDENIFECLDLFKNIDYMDFKEISWVNVIVSLCHNFNTTSRNSLILNL

SEQ ID NO: 80907 - protein, 288 aa, Unknown
  Bacterial polypetide isolated from the Sargasso Sea
EGLKKKNIANADMLQGKELSYNNIVDADAAWECVREFNDPACVIVKHANPCGVSESDSIFKAYDLAFNTDPTSAFGGIIAFNKEVDGDTAKEINKRQFVELVIAPDYEKKAIKELSKKKNIRVLRVDINQDKLYPGTIKKISGGLLMQDDDDKNINIEDLKCVTKRQPTADELSDLMFAWKVAKFVKSNAIVYVKDKQTIGIGAGQMSRVISAEIANLKAKEEGLKVIDAAMASDAFFPFRDGIDIAASSGIASIIQPGGSVKDDEVIAAADEHNIAMMFTGVRHFRH

SEQ ID NO: 80908 - protein, 316 aa, Unknown
  Bacterial polypetide isolated from the Sargasso Sea
MKIDIFDTTLRDGFQQEGISPSVKDKLAIAKLIDELGVDYIEGGWPGASPKEKEFFDKAKKDLKLENAKLVSFGSTRKLNVKVEDDPQVQALIDSETEYVCIVGKSSNLHITKALETDVDSAILMATDTVKYLKDNGRKVFFDAEHFFDGLKEDSETTLKILDAVIQEGVDCFIFCDTNGGTLPHEVTDLLTPIVEKYPNQSFGVHFQNDNGCAVTNSLAAVNLGVEHVQGTMNGYGERTGNADLCTLIPNLSLKMDFETVPEESLEKLTPIANHIAELVNIAIDSRHPYVGSSAFTHKAGLHASGMSKDNTLYEH

SEQ ID NO: 80909 - protein, 244 aa, Unknown
  Bacterial polypetide isolated from the Sargasso Sea
MFSKKIETELINHKIDIAVHALKDMPTIETDGLITNFYLKRNSPNEILISNRNIKFQDLKPNSIIGTSSYRREYQLQSIRSDLNYKLIRGNVDTRINKLENGDYDAILLSKAGVEALGLNNKITQEFEIEELIPCAGQGIIAIQCRENDQEIINILEKINDEHSRIIANAERKVLKILEGDCDTAVGVYAKIDQDVANIKAELFSVDGKQRFFIDERENKKKINDLSIKIGEKLKSESKGSYKR

SEQ ID NO: 80910 - protein, 197 aa, Unknown
  Bacterial polypetide isolated from the Sargasso Sea
MAPETGAVCGNGSPYKFFINRVPNTRNTIVYLEGGGACWDYASCSGQAGIRGARNPDGIADDYMSLLNPGASLVSPFVVRLHPWTRVKTQNWNMVYVPYCTGDIYSGDKVAVYDDPQGQQQPLVWHHNGLRNMRAVVGWLKDNLPRPTQMLTTGCSAGGAGSLTNYANLRQDMAPSRGYLINDSGPVYTALAGGHQR

SEQ ID NO: 80911 - protein, 201 aa, Unknown
  Bacterial polypetide isolated from the Sargasso Sea
SKFINGLRVTDKNIIDTVEEVLIDFNIDIVNSLKKLGSEAASFHTKKNCIIEVEPEREELGFVGIPKKININLIEDALNKNKIPIIAPLGLGKNNQTFNINGDTAASAIAKKLKARRLILMTNVKGVYDDKKNLISEIKPFDLDNLITWKIVEGGMIPKIENCVDAVENGVRGVVILDGRKPHSILHEIFSDTGSGTLIRK

SEQ ID NO: 80912 - protein, 221 aa, Unknown
  Bacterial polypetide isolated from the Sargasso Sea
GYRNNPMGFKWPNGMKEVHYLDRLEGSKAIFKDGHEQNADAIILCSGYLHHFPFLDDSLKLKTGNRLYPPKLFKGIVWQDNHQLIYLGMQDQFHTFNMFDCQAWYARDVIMGKIKLPSDAEIEADIKKWVAEEESLEDPIQMIDFQTEYTKELHAASDYPAIDFELMRKHFKDWEHHKEEDILTYRNRSFSSPVTGTVAPIHHTPWAEAMDDSMDTFMKSK

SEQ ID NO: 80913 - protein, 153 aa, Unknown
  Bacterial polypetide isolated from the Sargasso Sea
MQKYSVKPLSNIAKIGLEKLEGTSCYLEENAKTPDGVLVRSTKMTSEDLTANLKAISRAGAGVNNIPIEKCTEEGIVVFNTPGANANAVKELVLAGLMLSSRNVYASIDFVNKLTEMNDMAELEPFLESNKKQFKGNELAGSTLGVVGLGAIG

SEQ ID NO: 80914 - protein, 314 aa, Unknown
  Bacterial polypetide isolated from the Sargasso Sea
INNLSVDYQMRKETIYAAKAVNIEVNKGEILGLVGESGSGKSTVGNAIINLIDEPGKVSSGSIILGNINIHEDSKNIAKYRGKKIGLIFQDPQTSLNPILTIGEQLIETIQTHLKLSKEEAKNRSINLLKEVGIKDAESRFDNYPHQFSGGMRQRVVISLALCCEPELLIADEPTTALDVSIQSQILELIKKLTKERNLAVILITHDMGVIAETANRVAVMKNGNLVEIGSTKEVLTNPNETYTKSLVSSVPPTNKKISRFVIVEKENKNKKENNLKILNRWTKRDILNKELVNVKNLTKSFDDNFFTESSKSS

SEQ ID NO: 80915 - protein, 115 aa, Unknown
  Bacterial polypetide isolated from the Sargasso Sea
MIVGSIKEDIISEKRVSITPETAKNIINLGLKVCIEKNYATHLGIDDNEYKKTGVEIKDSSSEVLNLSNLIIKVNCPSENEISLLKEKTILIGMLNPSKNKDQIDKIVKKKIKIF

SEQ ID NO: 80916 - protein, 296 aa, Unknown
  Bacterial polypetide isolated from the Sargasso Sea
TGNTRQIDLSSNITTTGTQTYNGPVRLVGGDRTVATTNSNVVFASTVNSDGTQRALTVTNGTGDTTFSGVIGGSAAVKSLTITSDQLTAGAMTLNGALTATLGGSSSITGVIANGGGGTASLVKAGNGTLTLSASNTYTGTTQVSAGTLTVSGSGRLSDSTAVTVDSGAVYNVAVSDTVASIEGAGNIVLASSQTLTAGDGNNKTLSGVMSGAGNYIKAGGGTQTLSGTNTYTGTTAINAGDLTVSGSLHDSTAVSIASGADYNVNASDTVASIEGAGNIVLASSQTLTAGDGNNK

SEQ ID NO: 80917 - protein, 292 aa, Unknown
  Bacterial polypetide isolated from the Sargasso Sea
LVGESGSGKSTVGNAIINLIDEPEKVSSGSVILGDLNIHENSDRIVKYRGNKIGLIFQDPQTSLNPILTVGEQLIETIQTHLKLTKDEAKIKSISLLKEVGIKDAEKRFYNYPHQFSGGMRQRVVISLALCCEPELLIADEPTTALDVSIQSQILELIKKLTKERNLAVILITHDMGVIAETATRVAVMKSGNLVEIGETKKILTNPQENYTKSLVSSVPPTNKKISRFIIVEKENKNNKENNIKILKRWTKKEIINQDLVQVKNLSKSFDDNFFTENSKNSVMAVNDVSLR

SEQ ID NO: 80918 - protein, 275 aa, Unknown
  Bacterial polypetide isolated from the Sargasso Sea
LKKEKVKHVFGLIGSATMEMFDALYHEKSIKFIGVRDERTGTHMADGYARASNQPGIILAGQNGPGATNLVTGLAQAKAAFSPVVSIAGSYSTKDKMEDAFQGLDQQSLFKPVTKKTWTVKNTKKIPKTFSDAFKLAMSPRRGPVCINLPRNILADKGNFKINDKNQSFDNQNSTKVKSNYIKKAVKIISNSNKTVIIAGGGIKYTSRYKNVVKLAELLNVPIVTAAGHGDAIPFNHKLNAGQMGPRGNPVASKLVKEASVIIALGTRLGFNSTF

SEQ ID NO: 80919 - protein, 56 aa, Unknown
  Bacterial polypetide isolated from the Sargasso Sea
EIRGIMIESHLREGNQKIGEDLQYGQSITDACIHFEDTKQCLSELSSAVQARRLKS

SEQ ID NO: 80920 - protein, 316 aa, Unknown
  Bacterial polypetide isolated from the Sargasso Sea
VLSHKPRRVLNSVFLYHAVQNGLDSAIVNAREITPYTEIDEKEKKIVEDLIFNKHPNALSDLITHFENKTQDPSSKTKKVDVDPTWPAGQRSNFRIINRLKDGIENDVVSAIVEKLSQKDILVDNDGVLSINAAKEVTHQGAIQTLNDDLLPAMKIVGDKFGAGELILPFVLKSAECMKAAVKELEKYLLKEEGTSKGILVLGTVYGDVHDIGKNLVKTIFENNGYTVHDLGKQVPLQKFVEKINEVKPDAVGLSALLVSTSKQMQFFVEHARKTDVNIPILCGGAAINSNYINRIAKQDGIYEPGMFYCGTMFDG

SEQ ID NO: 80921 - protein, 216 aa, Unknown
  Bacterial polypetide isolated from the Sargasso Sea
ELGLPVGTEFLDPISPQFVADLVSWGAIGARTAESQIHRELASGLSCPIGFKNGTTGDLNPAIYGIKASNHSHVFFSNTKEGMVSIYKTSGNSDTHIILRGGTEPNLHPEDIRKTINALQEAEANDSIMIDVSHGNSQKVFKRQLENIGIVSKQVSDGMNEIRGIMIESHLKEGNQKIGNDLQYGQSITDACINFEDTKQCLSELSSAVQARRSKS

SEQ ID NO: 80922 - protein, 43 aa, Unknown
  Bacterial polypetide isolated from the Sargasso Sea
DGVLVITELQPAGKKAMKVMDFLNGRADWFQPGQMLPPVDGQS

SEQ ID NO: 80923 - protein, 264 aa, Unknown
  Bacterial polypetide isolated from the Sargasso Sea
TTKGDIVQNRRLSDIGGKGLFTKKIEDELLKKKIDIAIHALKDVPSNENKKLLVNCFLKRNDPREVLISRNRTKLENLPKNSVIGTSSFRREFQLKRKRDDLKYKLIRGNVDTRIKKLKNKLYDGIILSYAGLKSLKIVNNISQVFSLSQIIPSAGQGVITLQCRKNDNRIIKLLKGINHIPTEKCANAERDVLKVLDGDCETPVGVHAKIKNKKISLETELFSLDGKKRFYLKSSKKVNSAGLIGKELGEKIKKRSKNLYKKR

SEQ ID NO: 80924 - protein, 284 aa, Unknown
  Bacterial polypetide isolated from the Sargasso Sea
EKNLRVDVLINKRDEIISRTRVKNLILKEKLKLNNEIIKSPSKKVSIGDVVNLTIPEPEIASLKPYDFKLNIVYEDSDLLVIDKPSGIIMHPGAGNYDKTIVNALMHYNKESLSTIGDELRPGIVHRIDKNTSGLVVIAKNNETHENLSKQFSKHTIIREYQLLIWGKLRPSFGRIETFITRSSKNRQLMEVSGSKGKKAVTNYKTIEIFENKKIPTLSLVECKLETGRTHQIRVHMNYKGNSLVGDDKYKKKYKKLKSVDFDIQNSITNLDRQFLHAKTLGFV

SEQ ID NO: 80925 - protein, 160 aa, Unknown
  Bacterial polypetide isolated from the Sargasso Sea
MLDLGCGDGSLTVEMGRFAERVIGVDYNLELLASARQRMDRLGLEHVTLLAEDVGSLSLEPQSVDVAVFSQSLHHLDDPFSGIRQAYRLLRPGGLLAVMELAAHDQLWVVEKLKHKWPGFEQEHLLKMMQEAGFSGLKEEILPQSRGELFQVILAMGVRD

SEQ ID NO: 80926 - protein, 299 aa, Unknown
  Bacterial polypetide isolated from the Sargasso Sea
PDSYYYHTANNLKKRPSLSGSHDTDICVVGAGYTGLLTALNLSERGYDVTILEANKLAWGASGRNGGQVGSGHNKKIHELEKDYGKTMANELWQLSEYGKSIVKTRIEKHEIDCDLKVGNATVSNDRNDDHHHKEYVEKLNADYDYNLIRYMSPEEVEEMFHSPFFDGGGSLDMGGMHLHPLNYALGLAKAAEESGVKIFEDSRVINYSNESPCIVKTNEGEVRSRHVVLACNGYLDNLEKKLAVKIMPINNFIIATEPMSEEEVRYINRDDICAHDNKFHVNYFRISQDNRLLFGGGE

SEQ ID NO: 80927 - protein, 274 aa, Unknown
  Bacterial polypetide isolated from the Sargasso Sea
KKEVKCKEIKGLENLDKVIDIDQSPIGRTPRSNPATYIGLFSNIRDLFAQTIEARARGYKPGRFSFNVKGGRCEACQGDGLIKVEMHFLADVYVTCDVCNGSRYNDQTLEVKYKDKNISDVLNMTVEDALSFFDQIPPIKKKLQTLYDVGLGYITLGQSATTLSGGEAQRIKLAKELSKRSTGKTLFILDEPTTGLHFHDIELLLKVLHRLKEQGNTIIVIEHNLDVIKTADWIIDLGPEGGSQGGQLIANGSPEKVAKDKRSFTGKYLKEMLN

SEQ ID NO: 80928 - protein, 263 aa, Unknown
  Bacterial polypetide isolated from the Sargasso Sea
MENRPKKSLGQNFLIDKNIINLIVDLGEINQNDTVLEVGPGTGNLTKAILLKKPKKLIVIEKDKNLASSLKKKLKDQITIINDDILKINENNIANKPMTIYGNLPYNISTQILAKWIKNNNFNNIAKNLILMFQKEVADRIIANTNEKTYGRLSILSCWKMKIKKIIDINPNSFYPSPKIKSTVLFFEPKKKYFKLNNPNNLEHITRVFFNQKRKMIKKPLKLLFKNNIEISNKLGINLNLRPQNLSPMTYFKLCDEYENLSK

SEQ ID NO: 80929 - protein, 291 aa, Unknown
  Bacterial polypetide isolated from the Sargasso Sea
NTNRGKHVITSAGEHHAVLDPLEDLARRNEISLSIVPLRTDGSIHFEDIEAHIQSDTILISLMHANNEIGTINDIPHIFKKLKTTYERISLHTDAVQSVAHIPVDLSKLHADLVSFTAHKLYGPRGAGALYIRSGTPLHGQILGGGQEEGLRAGTENTPAIVGFASAIELASKRMTNDIQQDRELQQILMTELPRRIPCMGITGTKDLNSRLPGHVSCVIGFVEGESILLALDLIGIAASSGSACTTGSIEPSHVLTAMGVPFDLARGSLRISLGRETTKEAIGSLLASLP

SEQ ID NO: 80930 - protein, 289 aa, Unknown
  Bacterial polypetide isolated from the Sargasso Sea
VEKYFDEYKIVPDETRSISDGAIKPWETKVFGYQKKYFVETIDKILKQFKIKKNVPWSQIPKKVKNIILYGDENSELNFLYDFEGIINFIDRKYEETERWWLQYELEKYLSERDCEVCNGYRLNEKALAVRIDENHIGNITKKSISECLQWFSSLESKLDKNNKKIAEGVIKEIKDRLVFLNRVGLDYLSLARASKTLSGGESQRIRLASQIGSGLTGVLYVLDEPSIGLHQKDNQQLIETLFRLRDLGNTVIVVEHDEDAIRQSDHIIDIGVKAGVNGGHIIAEGNLK

SEQ ID NO: 80931 - protein, 259 aa, Unknown
  Bacterial polypetide isolated from the Sargasso Sea
SALKLNQTAEAIFAFERTIESNPKWYEARLFLARAYMLVKNFPAAQNQALILVNSSMAPNTIKTSAQALLDRVALQSKRAGDFYSQNIEFALGVDGNVNAGTTEDTIIIPEIGEFLLSPESKSTDDSYAKLNYSGKYSYPINQQSTVVINANAGWYKFAELSQYDRVNAHFSAAYNYDIGSINWHVQASTTPLILDSELYRTESAITLGANFTLSDSITLFTALSGGELNNRFDDKLDNTFYAINTGVSYSTQHWFNRL

SEQ ID NO: 80932 - protein, 233 aa, Unknown
  Bacterial polypetide isolated from the Sargasso Sea
QKAPRPPARGRQPAAPALQPPARGRQPAATAPQPPARGRQPAATMPRPPARGRQPATTVPRPPARGRQPAAPAPRPPARGRQPAATAPQPPARGRQPAAPAPRPLRARRVAPNPFGQGAPAEPFRARQDRPNPFGQGLRAKNLQARHVAPTPFGQSAPAEPFRARQDRPNPFGQGLRANPFRARRVAPNPFGQGALPNPFGQGSVDRSILSSARLACVSYCRERRSILSIVRV

SEQ ID NO: 80933 - protein, 194 aa, Unknown
  Bacterial polypetide isolated from the Sargasso Sea
MLKLKIIMKVCILGNGLVSLALAKALINKDIFVDIVSRKKKVIYDKERSLGISKSNITFFNKNIVNIDKLLWDIKKIEILSENFENKKILDFENNQNLFSTIKNYKLHDLLFEKIKKSKFLNFKSKFKIDQYKLIINCDFSNNLTKKFFFKKFYKDYKSCAYTTIIKHKKVKDNNIASQIFTKHGPLAFLPISD

SEQ ID NO: 80934 - protein, 270 aa, Unknown
  Bacterial polypetide isolated from the Sargasso Sea
MGLELDDFGTFEDDYVMTMATGMDVEAYGNLDDDTMMGMAMGMETDDFLMFEDDQLFGFVVEMDPTTLDEVGSDAALGMAVALDVEAYATLEDDYLVGMAAGMEFDDFEVFDEEQLYGFVENIEPENFDEIDSDSVRGMATNIQPDAYDDLGSELVEGIATAIDPLEITALDPERKTAIIEVVEPESLAEFDEDLLGGIVAGVEPDNIAEWDPEVELAILEGLDCDVMGTSGADFDELLLEAPDTNFDDIATAAISAVTQQAGADFEDLL

SEQ ID NO: 80935 - protein, 309 aa, Unknown
  Bacterial polypetide isolated from the Sargasso Sea
AVPDGDAAVGIMQEVAAANPDAAGAFAGGMAQANPAAAGEIAGSLAAIDPALAGDMAGAMATANPAAATLVAAGVAELAPDAVGAIAGSMADANPAIAGQVAAGMAQFDPGAAAQFAGDLVAANPDMAANIASGMAQLATQGGMADLAGEFMGQMAAANPEMAGMMAAGMTQMMGNQGAGFMADMGDIMGADMAAQLQSDMQAQMADMQSMMQNAMQGGEMFMGPMMTADMMGPADFGGMMDMDMGMLPGMGPDPMMMGMGPMMGPDPMMMGMGPMIGPDPMMGMMGPDPMMGMMGPDPMMGMMGPDPF

SEQ ID NO: 80936 - protein, 280 aa, Unknown
  Bacterial polypetide isolated from the Sargasso Sea
MESKIILIRMVRMRRLYKHKLTFCFGMLLLLLWSGISEAQTRSGFGRAVRNKFTSLNPYKIGQFDYKRPYSILKGRNWRLKYLTPIYDTTKYTDNPLDRDQKFEGYEEGQSPYSVFLSYKWLGVGKTSLAYRINTNPNFKYHFNMEFHDFGLTFGLQKRFLYRKGKRKYGGVSSVYRSNITLGYGRMVNGEVTIDYTIEGIGESNVTVMKEKFQRGDTWFLIYGWEVFQWDSISIEAAAGYRENNIIYNPPTVVGDPSLTTDEPIQGDFNQIMLGFGVSF

SEQ ID NO: 80937 - protein, 303 aa, Unknown
  Bacterial polypetide isolated from the Sargasso Sea
MGDPVVITPDTFRGAKWRGAMVYVNDYEGKISKINLTNELTSKGSNPAPIELYDYTTLFSLNTNEENGRVSFFGMDAAFGMDTKNLYLFGATGDFNDIARRSRGMDNILYGIRDFDFPNFRMVNSGGVGSLTEAMNARKIDAEDGYTLSPNCVNTADETMDQGDCPAISKDAWVFKLDKPFDKRQDESLVTDTGAPNLTQNLYHKATASPTVFKGTVYYPVYQPPEGGKCNVGNAYVCAADDECGINTSEEIGRASRQMDANAGFDEKTGCYYLQPGVLSKLEVFADKLFANITTDSEDKKIH

SEQ ID NO: 80938 - protein, 207 aa, Unknown
  Bacterial polypetide isolated from the Sargasso Sea
MKKIFPNKLIKKNFNVNQFLKLKKFLFSQGIIVKKKTNFEFGFEKFKTLYLTGFSSLLIILVAFIVPLFSEISPKISKKITINDSNKKFKKVLEGGDLENKSKIDEGLDLSNILEDVFKFEELPKDTVRLSASTIEQLFRDTDYSLTEVRKSKKVKPIRLSLLPNEIKQIESSKKRKNLFIQIILPLILEENNLILIDRKRLFNYIK

SEQ ID NO: 80939 - protein, 128 aa, Unknown
  Bacterial polypetide isolated from the Sargasso Sea
FFPNFRNFRAPKVGRADDPGRVQRSRWRLKAAFLSVVNAVGKVHCVPHLNLKSGADNPKISEIFPNFRNFQAPKVGRADDPGRVQRSRWRLKAAFLSVVNAVGKVHCVPHLILKSGEDNPKISENFPN

SEQ ID NO: 80940 - protein, 263 aa, Unknown
  Bacterial polypetide isolated from the Sargasso Sea
MDFIIPLTIGHGVVNVGDLPIPFDIVLNASALVVLITFVYLKVSWKESIIAHRDEIFDDKQSLLGKLFGFLILFLLVAPGVISNESAKTSVAPLMLWVFLWIGVPVLGLLFGDVYAKFNPLNLFPVSSNRPQSVYFACVLFIGLTWFELVWRKPGNPFNIGVVFILLFITVNLLRYFLKKSLIEVDPLLLLHYLYSKLKLFNSRPYFRSLLDNIGNLARLRGIEYFVLLMIGTVTYDGLRETTFWYEQFGPRINDMGFSTMMF

SEQ ID NO: 80941 - protein, 178 aa, Unknown
  Bacterial polypetide isolated from the Sargasso Sea
MDYIIPLTFGHGVVNVGDLPIPFDIVLNTSALVVLITFVYLKVSWKESIIAHREEIFDDKQSLFGKLFGFLILFLLVAPGVISNESAKTSIAPLMLWVFLWIGVPVLGLLFGDIYAKFNPLNLFPISSNKPQSVYFACVLFIGLTWFELVWRKPGNPLNIGVVFILLFISVNLLRYFL

SEQ ID NO: 80942 - protein, 517 aa, Unknown
  Bacterial polypetide isolated from the Sargasso Sea
MIKSGMIVSGMTLASRVMGLVRDVVIANLLGAGVAADVFFFANRIPNFLRRLFAEGAFNQAFVPVMTEYKKKGDESEVRELLAAVAGTLGGIVTVVTLLGVLGSGVLTALFGWGWFWDWLHGGPAAEKFEMASLMLKITFPYLWFITFTAMAGAILNTFGRFGVSSFTPIFLNITMIAAAWWISPWLDDPELALAIGVFLGGLVQFLFQFPFLRQINMLVWPKWGWHHPGVVKIRTLMIPALFGVSVSQINLLVNTMLASFLATGAISYLYYSDRLLEFPLGMFGVAISTVILPALAKKHVDADPADFSRTMDWGVRMVMLLGLPAMVGIAVLREPILRVLFMRGEFGLHEVSMSSASLLASTTGLLSLMLIKVLAPGYYARQDTRTPVRIGMMSMAANMACNLIFIYPLGYVGLALSTACSGTLNAALLFKGLHQQNVYRPSRHTGVFCLKLLTASLLMGGVLLYLSPDLAQWGAWHMSKASMQLTMLLVLGGAIYAGVLLALGIRPKDLRAGRDD

SEQ ID NO: 80943 - protein, 410 aa, Unknown
  Bacterial polypetide isolated from the Sargasso Sea
MTGGQAAIKSLKKEKVKHVFGLIGSATMEMFDALYHEKSIKFIGVRDERTGTHMADGYARASNQPGIILAGQNGPGATNLVTGLAQAKAAFSPVVSIAGSYSTKDKMEDAFQGLDQQSLFKPVTKKTWTVKNTKKIPKTFSDAFNLAMSPRRGPVCINLPRNILTDKRNFKINEKSQSFDNQNSINAKSNYIKKAVKIINNSNKTVIIAGGGIKYSSRYKNVIKLAELLNVPIVTAAGHGDAIPFNHKLNAGQMGPRGNPVASKLVKEATVIIALGTRLGFNSTFYSYENINKKAKIIQVELEKRMIGRYFPVSVGIYGDAATIADQFYKEIKKQNITIDIKKWTNSYLNERKKFLLSRDKFNQKNFPIQPNGLFKQLRQVLPKNSAITLDAGTLCLQATDALEYYDPPS

SEQ ID NO: 80944 - protein, 212 aa, Unknown
  Bacterial polypetide isolated from the Sargasso Sea
MNKNFWKNKKILITGHSGFTGIWLTSLLALIGGKIVGISLKPNPKINLNKDKFFNKKVKNYYFDIRNFLKLKKIVKNENPDIVIHLAAQSLVSESINYPPDTFTTNINGTINLLEALKDSKKIRSIMLFTTDKVYRNLDNKKRFQEDDPLGGDDPYSSSKASKEIIANSYIKTFFSKKKVGLVTIRSGNIIGGGDWGKNRLIPDLIRFNFEG

SEQ ID NO: 80945 - protein, 423 aa, Unknown
  Bacterial polypetide isolated from the Sargasso Sea
MILSDTSLLILSISMVLLLCSSAYFSGTETAMMAINRYRLKHLVKKKHRAARISNKLLRYPDRLLGVILIGNNLVNFTAATIATIIGMRLFGDTGVLLAPWVLTATFLVFAEVAPKTLAAERPERWAFKAVYVLAPIQRLLVIPVKMVNLLSNAIVRLFLKNEPAQSDSLSTDELRTVVNEGAKGVGERQNMMVRLLDLEQVSVNDIMIPRGEIEAIDIDSEMNEIVEVASNSQYTLLPIYKESINNIIGILHLRRLARFMGSNEFTKSDLMQLTREPYYIPEATSLDKQLIRFQAEKQRIALVVDEYGELQGLVTLEDILEEIVGEFTSDFSANIPEILPQDDDSFVIDGGALLRDINRALDWELPISGPKTLNGLVLEHLETIPEENLCIQINDYQIETLQLSDNMVKNLKCVRVASNSLA

SEQ ID NO: 80946 - protein, 298 aa, Unknown
  Bacterial polypetide isolated from the Sargasso Sea
MPHPGRGKPVWMEASLAQALTDVPSVHTVISLRRFGGAVADPARDLDWSETVGRASPEFAAVPVSADDTFLIAYTSGTTGRPKGVVHTHLGVQAKATADFLLCLDMKRDDRHLWMTDMGWVMGPLTLLSVLLSGSTLVLAEGAPSMPGDPFRLLRLASEMEVTHLGVAPTLVRQFMTQDTESLSGYDLSSLRIVASTGEPWTEDAWLWQLDHICRRRAVPLNISGGTELFGAILTSTVLHEIKPGGFSAQALGVGAKVLRQDGSEAAPGEVGELVVTQPPLGLTPAIWGDRDRYLKPT

SEQ ID NO: 80947 - protein, 305 aa, Unknown
  Bacterial polypetide isolated from the Sargasso Sea
MNRKIIIGSRGSKLALLYAQKAKDKIIKALNLPDDQIIIQTITTKGDQIQDRRLSEVGGKGLFSSTIEKELKEKKIDIAVHALKDMPAIETKGLKTDSFLERTDPREILITNDKKNIKELKQNAIVGTSSYRREFQIKKIRSDVSCKLIRGNVDTRIKKLKEGIYDAIILSYTGIKYLNLDNEISEIFSTDQIIPSAGQGIIALQCRDDDSEIISVLEKINHKDTYKRAHIERNILKVLEGDCETAIGAHSIIEGNKITVEAELFSLDGSQIFYEKKSGNVDMFKEIGTEVGNALKIKSNNSYKK

SEQ ID NO: 80948 - protein, 288 aa, Unknown
  Bacterial polypetide isolated from the Sargasso Sea
MIYAEKAKAEIIKFSKEFDIEIKKITTKGDIIQDVRLSDTGGKGLFCNLIEQELINKKIDIAVHALKDLPSNETQGLTTDCFLKRNDPREILISKNNLDFYKIKTGSVIGTSSYRREFQLKRIRKDLKYRLIRGNVDTRIEKLKKNLFDAIILSYAGIKSLNLEDNIAQIFSTSEIIPSAGQGVIALQCRKDDEAIINLLKKINHKETHCCVQAERNVLKVLEGDCETPVGVLAKIESDKAILEAELFSLDGKKRFYVKSSNKLNLAKNLGIQVGKLLKKRSKNSYKR

SEQ ID NO: 80949 - protein, 307 aa, Unknown
  Bacterial polypetide isolated from the Sargasso Sea
MKSKKIIIGSRGSKLALIYAEKAKEKILKVSKELNVESVEIKKITTAGDLNQKDRLSEIGGKGLFSKKIEIELLENKIDIAVHALKDMPSDETEGLITNCFLERNDPREVLISKNKIKFKDLNQNSIIGTSSYRREFQLKNKRSDLNYKLIRGNVDTRINKLNQNLYDAVILSYAGINSLNLDEHISEIFSIDEIIPSAGQGVIALQCKNDDEFIKNVLKKINDEKTFKSAQAERNVLKVLEGDCETAVGAISVINNENITLEGELFSLDGKERFYCKSSKDIKHASELGIEIGENLKSQSMGSYKK

SEQ ID NO: 80950 - protein, 305 aa, Unknown
  Bacterial polypetide isolated from the Sargasso Sea
MNRKIIIGSRGSKLAMLYAQKAKDQIVKSSDLNDEDVVIKKITTKGDEIQDVRLSEVGGKGLFSSNIEKELQDKNIDIAVHALKDMPAFETQGLKTDVFLERNDPREILITKDKQKLNELKKNSLIGTSSFRREYQIKKIRSDLECKLIRGNVDTRIKKLKDGIYDAIILSYAGIKFLDFDSEISEIFSTEKIIPSAGQGIIALQRREGDEEIISVLKKINHNETFMRAHVERNILKVLEGDCETAVGAHSVIAGDKITVEAELFSLDGSKRYYEKKTGKVEDFSQIGEEVGQILKTKSNNSYKR

SEQ ID NO: 80951 - protein, 292 aa, Unknown
  Bacterial polypetide isolated from the Sargasso Sea
FYIDDAKQGDGIANADQLQGKQLSYNNIADTDAAYECVKAFEEPACVIVKHANPCGIATDKNILVAYEKAFASDPTSAFGGIIALNRELNKELAEKIINNQFVEVIISPGVTDEALNLTKDKENVRILNSKELGSQVKGFKFLSVTDGMLVQETDNGIVTKHDLKIVSKRVPSEIEIQNCLFAWKVCKFVKSNAIVYTRENQTIGIGAGQMSRIDSAKIAASKATERGFKTEGCTMASDAFFPFRDGIDAAAEIGITSVIQPGGSVKDDEVIQAADEADMAMIFTGIRHFRH

SEQ ID NO: 80952 - protein, 226 aa, Unknown
  Bacterial polypetide isolated from the Sargasso Sea
MFVSPNGVIGLVIVLGLIFCATFAEILAPYDPAKMGTGGRFLPPSGEFFLGTDEFGRDMLSRILYGSRITLLIGAVAVGISMTMGMLVGMVAAFRRGWLETILMRSTDVLFSFTETLIALSFVAVLGPSLQNAVIAVGVAGIPFYARTCYSAALVETSKPYFEASISAGAGPGRLLFFHLMPNVLPTMIVVATLGVSTAILAAAGLSFLGLGAQPPLQNGGICWQG

SEQ ID NO: 80953 - protein, 169 aa, Unknown
  Bacterial polypetide isolated from the Sargasso Sea
ENIRVLRCDLDGDAVGIQFKVVSGGVLVQDEDTKIISIDDLKVVSDLKPSQEQLDDFMFAWKVAKFVKSNAIVFAKDGQTIGIGAGQMSRVVSAEIASLKAKEEGLNVEGSCMASDAFFPFRDGIDKAASSGIKSIIQPGGSVKDQEVIDAANEHKMVMVFTGVRHFRH

SEQ ID NO: 80954 - protein, 575 aa, Unknown
  Bacterial polypetide isolated from the Sargasso Sea
ADLESTLDEGINGTQVTLMSTTLTEEQSTRAPHLSAMQAWEGDWSVEDAKTVLTTQAVVGGYDAEGTLVAATGIQLANAIDALYTLGEDDADEAQLGGIYTDAGITAALWAPTASNVDLLLYNDNKTLNQRIEMVRDDTSGVWRHEGDMSLDRQLYRYEVTVYHPITGKIETLLVTDPYSVSLSTNGRFSRFVNLADDDLKPQGWDTHTIPTVENYEDAVIYQGHVRDFSVRDMSTSEENRGKYLAFTEEGTAPVEHLKKLVEAGLTYFHILPANDIATIDEDPTKTVDLYDTVGKLCRLNSGAAVCEEESANALLIDVYNSYDPLSEAGKAQQLTNDLRNLDTFNWGYDPHHFNAPEGSYASSAEGVERIVEMRAMIQALHEMGLRVALDVVYNHTNASGVFSKSVLDKAVPGYYHRYEVDTGAIVRETCCDDTEPRNVMMEKFMKDSLLMWTEHYKYDSFRFDIMSQATKDTMVRLRDAVHSIDEDNYFYGEGWTKIDRGYEQASQLNMAGTEIGTYNDRIREAIRQGAIFRPEDEGLLSAQDRVKMGMIGTLKDYVLETSSGSAGATSNLGG

SEQ ID NO: 80955 - protein, 282 aa, Unknown
  Bacterial polypetide isolated from the Sargasso Sea
MSSYENHQALDGLTLGKSTDYRDNYDASLLQGVPRSLNRDPLDLKADTLPFHGADIWTLYELSWLNTNGLPQVAVGHVELDYTSVNLIESKSFKLYLNSFNQTRFDSWDAVRQTLENDLRACAQGDVSVALYRLDELEGQPIAHFNGTCIDNQDIVIDNYQFSTAYLENAVSGEKAVEETLVSHLLKSNCLITHQPDWGSIQIQYRGRKIDREKLLRYLVSFRHHNEFHEQCVERIFNDILRFCQPEKLSVYARYTRRGGLDINPWRTNTDFTPATGRLVRQ

SEQ ID NO: 80956 - protein, 672 aa, Unknown
  Bacterial polypetide isolated from the Sargasso Sea
MQGTNVLFGQIAVVFGIVIAGVWSATQWTAAALGYQLRLGSPWFDFFGTPVYHPWGLFEWWFFFDAYAPHIFDAGGAIAAGSGLIAMVVAIGMSIWRSRQSKLVTTYGSARWANAEDIHKAGLDQPAGVFLGLHRQQYLRHEGPEHVLTFAPTRSGKGVGLVVPTLLSWPASAVIHDIKGENWSITAGWRSRFSHCLLFNPTDAKSSAYNPLLEVRRGAHEVRDVQNIADILVDPEGALERRNHWEKTSHALLVGAILHVLYAGEDKTLRGVANFLSDPACPFELTLHRMMTTPHIGGGPHLVVASAAREVLNKSDNERSGVLSTAMSFLGLYRDPTVAEVTSRCDWRIADLIAAEHPVSLYLVVPPSDISRTKPLIRLILNQIGRRLTESLDGSDGIARRHKLLLMLDEFPALGRLDFFETALAFMAGYGIRSFLIAQSLNQIDKAYGQNHSILDNCHVRVTFATNDERTAKRISETLGTATELRAQRNYAGHRLAPWLGHLMVSRQETARPLLTPGEVMQLPPDEAVVMVSSVAPIKAKKLRYYADSNFKRRVLPPPVLATLSMQGRYADVPPERADDWSGLAIPAMPVAPTADAADGLENLGSADDSGPRRQPELSEAVTYDPDLVAPAADLGLLDDDDMPHPLPRQLDPALQRTARLASLDPDDGIDL

SEQ ID NO: 80957 - protein, 381 aa, Unknown
  Bacterial polypetide isolated from the Sargasso Sea
MSDSIRIFQLAKELNISHNDILDFLKSKDISVSSHMSPIDGKTQQIVYTEFAKDRQSAERDRKEQVRKEIHDSKVVMKTKSVKKFKIMSVEDQRKSEKKKVEAPVKEEKDSKKTEVKKEAPVEKKPKKKLRKISLREPEKAEDKKQAKKHKDELKKDSSAVKRLKKTLASMDSSPKKKSYKKTKKDDGLDDVDQKRTIELAEYASIDEIAKVLDVSTSEVIGKCLQMGILATVNQRLEWDVIELIAGEYDVELNKYEEVVDDLFVTSHSEQELSNATERAPVVTIMGHVDHGKTSILDFIRETKVAAGESGGITQRVGAYQVLHNDNKITFLDTPGHEAFTAMRARGAQSTDIVILVVAADDSVMPQTIEAINHAKAAEVP

SEQ ID NO: 80958 - protein, 238 aa, Unknown
  Bacterial polypetide isolated from the Sargasso Sea
MKKNTLTIGTRGSKLALIYAEKVKNELNKFFPNEIKLKKILTTGDQKQDQRLSDIGGKGLFAEQIEKELLNEDIDIAVHALKDMPTIETESLLTNNFLKRNSPNEILISKNNIKFEDLAPNSVIGTSSFRREFQLKKKRSDLKYKLIRGNVDTRIQKLENGEFDAILLSKAGIDSLKLHNKITQEFSVDEIVPCAGQGIIAIQCKKNDSDIIDLLEKINDIETRILANAEREVLKVLG

SEQ ID NO: 80959 - protein, 303 aa, Unknown
  Bacterial polypetide isolated from the Sargasso Sea
MKRANLVIGTRGSKLAMIYAENVKKELKKYFSKEIQLKKIATTGDQRQDERLSEIGGKGLFSKQIEKDLLSKNIDIAVHAFKDMPTEETENLLTNYFLKRNSPNEILISKNNIKFEDLEPNSIIGTSSYRREYQLKKKRPNLKYKLIRGNVDTRVQKLEKGEYDAIILSKAGVDSLNLKHKISQEFSVDELIPCAGQGIIAIQCREDDNEIKKLLENINDQETRTVAKAEREVLKVLEGDCDTAVGVFAKLNGEKVDLLTELFSVDGKNRYFIKKSLQKDNIESTSRMVGEELKLKSKGSYKN

SEQ ID NO: 80960 - protein, 295 aa, Unknown
  Bacterial polypetide isolated from the Sargasso Sea
MQPASIDDTLAQLAAQDYFASRELATALYLALRMERPLFVEGEPGVGKTELAKAAAGMLGTSMLRLQCYEGLDTASALYEWDYPRQIMALRLAEAAGERPGNDTLYRSEFLLKRPLLQALMPDENHPGARRVLLIDEIDRADEPFEAFLLELLSDFQISIPEYGTVRAAQRPLVVMTSNRTREVHDALKRRCLYQWIGYPERDRELEIVAARAPQTSVELQRRAVDFVHRLRGMDLFKAPGIAETIDWCRALDALSVTELDPQSVQNTLGVLLKYQDDLARVDAAQIAQCLAPPG

SEQ ID NO: 80961 - protein, 713 aa, Unknown
  Bacterial polypetide isolated from the Sargasso Sea
MSIDKELSWLSFNERVLQEACDPNVPIVERVRFLGIFSNNMDEFFRVRVAAVRRSILLSSLQEGRSNSRHLMAKIQSKVMALQERFDSIYAELMRELVRRNILLINEKQLSDFHSNWLKKHFRDHFKRHIAPLIVNNNRDLVKHINDDATYLCVCLYTKLRRQYALVEVPTKNVPRFIELPAEKSKAKKYLILLDNIIRHCVDELFGPFFEYDAIEVYSMKLTRDADFDITDELEQTQLEKMTKGLKKRLTAEPVRLVYDKEMPEHMLEMLKENLNISSTECLIPGGRYHSFKDFIGFPNPSRDYLENEKLPALNSSGFGRSANSFDAIKMGDIMLNYPYHKFSHFTEMVRQAAYDPAVRFIRINLYRVAKKSHVMQSLIDAVKNGKQVTAVIELRARFDEQSNIEWTRVLAEAGVKVHHGITSLKVHSKLCLIGREEQGEMKLYCHVGSGNFNEGTARVYTDLSLFTANQEIAREVEQVFDLIEHPYRRDNFQHLIVSPYDARQKLTHLIDKEIVNAQSHIKAAITLKLNNLLDESLVQKLYEASAAGVKVKLLIRGICSLIPQIPGISDNIEVYSIVDRFLEHSRVMLFHAGGENKLFICSADWMSRNIDNRVEVSVPIYDPRLKQMVMDILSLQFNDNTKARIINKEQSNPYRNRGNKRKVRSQIAIYQYLINYEKRLQQELNAQREAAKLEAEQAQALTLDPALQAKAS

SEQ ID NO: 80962 - protein, 211 aa, Unknown
  Bacterial polypetide isolated from the Sargasso Sea
MIPRYSRPEMSSLWEAKTRFAIWLDIERYACEAQETLGIIPAGVAQAIMDRGKFEIERIDELERDLKHDVIAFLTNVSENIGEEARFMHQGLTSSDVLDTAFAVQLNRACTILSADLENLCDVLKNRAHEFKHTVCVGRSHGIHAETTTFGLKLAYAYSEFTRSKERIEAAQKEVSVCAISGAVGTYSTLDPAIEQHVAKKLGLIPETIST

SEQ ID NO: 80963 - protein, 305 aa, Unknown
  Bacterial polypetide isolated from the Sargasso Sea
MTKKIIIGSRGSKLALLYAQKAKEQIIKKTTLDTNDIEIKSISTKGDQVKDTRLSDIGGKGLFSTEIEKELENKSIDIAVHALKDMPATETSGLKTDCFLERNDPREILITNNKKKLNDLKLKSIIGTSSFRREFQIKKLRSDLTCKIIRGNVDTRIKKLKEGNYDAIILSYAGIKNLNLENEIAEIFSAQEIIPSAGQGIIALQCREADKEIISILKKVNHEETYKRAHAERNVLKVLEGDCETAIGVYSKIESDTIVVEAELFSIDGSQRFYEKKSGQIDKFKEIGKQIGQNLKMQSNNSYKK

SEQ ID NO: 80964 - protein, 305 aa, Unknown
  Bacterial polypetide isolated from the Sargasso Sea
MRKKIIIGSRGSKLALLYAQQAKDKIIENTDLGNEDILIKSITTKGDEVQDIRLSELGGKGLFSSNIEKELQLKNIDIAVHALKDMPANETEGLRTDSFLERNDPREILITKNKKKLKDLDQKSIVGTSSYRREFQIKKIRQDLNCKLIRGNVDTRIRKLNEGMYDAIILSYAGIKFLKFENEISEIFSAEEIIPSAGQGVIALQCRENDDETISILNKINHEETHKRAHLERNILKVLDGDCETAIGAHSVVDGDKIIVEAELFSLDGKQRFYEKKVGNLNEFKEIGKEIGILLKTKSNNSYKR

SEQ ID NO: 80965 - protein, 594 aa, Unknown
  Bacterial polypetide isolated from the Sargasso Sea
MTHRVAVLDKELCQPKKCGLECIKYCPVNKSGADCIVLNEDTNKATIDEDICNGCGICVKVCPFDAITIVNLASELKTDKIHQYGMNSFRLYKLPTPKKGEVVGLLGRNGMGKSTVVNILSGILKPNLGNYEQPPEWDEILKYYKGTELKAHFEKIKNGEIKASIKPQQVHTIADAFDGTGKELLDKFDQRGTSRELVKQLGLENSLEQNLKELSGGELQRLSVATAASRESDFYFFDEPSSYNDVFQRTGVARVIHGLAEEGKSVMVVEHDLTLLDFLSDYIEVLYGVPAAYGIVSNVLSTKVGINVFLDGYLPTENVRFRDKKFTFDASTSGDEGLEGDAVISYPKLEKKYDSFSVSIEPGTVRKGELLGIMGANALGKTTMMKMIAGVEKPTDGSVDKKIKISYKPQYLSNDIDVEVISVLEKANGSTIEGSAEEEQILDPLKLKKLYNKSVKNLSGGELQKVAIASCLLQKVDLYALDEPSAFLDVEDRIAVAKFLQKFVRSFGKSAIIIDHDLQLMDLVSDSMVIFEGTSSVEGIATSPMPKTDAMNRFLESLDISFRKDEKTSRHRVNKEASRLDKEQKSSGNYYFRK

SEQ ID NO: 80966 - protein, 301 aa, Unknown
  Bacterial polypetide isolated from the Sargasso Sea
MRKKIKFIGVRDERTGTHMADGYARAANKPGVIIAGQNGPGATNLVTGIAQAKAAFSPVVAIAGSYSTKDKMEDAFQGLDQQSLFTPITKKTWTVKNSKIIPNVISDAFNIAMKPRRGPVCINLPRNILAASNNFKINTNKVSFKYESNLKGNIEKIKKAAKIICQAKKFVIIAGAGIKYTSKYKEVTKLAELLNIPIVTSAGHGDAIPFNHKLNAGQMGPRGNPIASRLVKEADVILAIGTRLGFNSTFYSYDNINKNAKIIQIEIEKKMIGKYFPVVIGINADAATATNQIYDEIKKQK

SEQ ID NO: 80967 - protein, 316 aa, Unknown
  Bacterial polypetide isolated from the Sargasso Sea
MKILIKGFKKALTELKLFYFTSFIVALLVIIPISNFLLEGVQYVVSGNFSLGIAGGEEVLETLKVLVLTSFFGGGLGTLNGWLLSNCDFKFRKVLRICQLIPLAAPAYLITAVLQDLGSIFGYQVTGLWWGVLILSISTYPYVFILANESFNKFGVNQINASRGLGVGPWRSFFKIAFPMALPALITGISLMCMEVMNELGTFALLNIPSISTGIAENWIIEGNPKSAIGLSLVALLIIFTLIIFEKFSRRKSKRWSENPASKDSQGWELKKTRALLATTISLFPPIFSFGIPCFWVLLNIDQISKGLSIELLTLS

SEQ ID NO: 80968 - protein, 453 aa, Unknown
  Bacterial polypetide isolated from the Sargasso Sea
SGGEAQRNRLASQIGSGLVGVTYVLDEPSIGLHQRDNAKLIKTLNNLKNLGNTVIVVEHDEEAIRSADHIIDIGPGAGKHGGEICAQGNIDAILQNKNSITAKYLSGKKQIKIPQKRTKFKDEMIRIIDAYENNLKKISVDIPVGLFTCITGVSGSGKSTLINQTLLPISSFILNKSKLSKEIKCDKIDGLDHLDKVISIDQSPIGRTPRSNPATYTGLFSYIRDLLSQTVEARSRGYKPGRFSFNVKGGRCEACQGDGMIKVEMHFLADVYVKCDVCNGKRYNEQTLEIKFKDKNISDILDMTVEDALDFFEAHPSIKKKLNTLNDVGLGYITLGQSALTLSGGEAQRIKLAKELSKRSTGKTLFILDEPTTGLHFADIELLLNVLDRLKKQGNTVVVIEHNLDVIKTADWIIDLGPEGGSDGGTIVAEGTPEDVVKNKDSYTGQFLKQLIG

SEQ ID NO: 80969 - protein, 521 aa, Unknown
  Bacterial polypetide isolated from the Sargasso Sea
MNIKIKTALISVSDKSGLEKVVQSLKEHNIKIVSTGGTAKAIAAMGVDVTDVSSLTNFPEMMDGRVKTLHPNVHGGLLSKRDDNKHVQSQKEHDIEDIDLIIVNLYPFEETIKSEKNEEICIENIDIGGPAMLRSAAKNHQFVTVVTDIKDYDELINEINKNSGSTTLGFRKSLAAKTFSTTAYYDSLISNWFYRNTNEPINKFSTAAELSSTLRYGENPHQTASLYKSSLQQSGIPHAKLLQGKELSYNNINDADAALQLIKEFDEDTPSVAIIKHANPCGVASGSSLCEAYMKAFSCDTTSAFGGIIALNQTIDKETASEVIKIFTEVIIAPDVSDEAKEIFKSKNNLRVLTLSSLRKQNNSHNYKSIEGGILVQSNDEANTTKSDLKVVTEKKPSDDEIEDMLFAFKVCKHVKSNAIIYVKNKKTIGIGAGQMSRVDSAKIASQKNSEMEKSDENSLENSVVASDAFFPFADGLLVTISSGAKAVIQPGGSVKDDEVITAANEAGISMVFTGKRHFRH

SEQ ID NO: 80970 - protein, 174 aa, Unknown
  Bacterial polypetide isolated from the Sargasso Sea
MRNEHLRFVREAPRGGVLHCFVLDCSGSMLGAQRLALAKGLLIALFDRASAARAEAALVCFGGAGATLRFGPAVPRWWNERWLSPVGGGGGTPLASGVREAAQVLERNARRKPAQQRWLWILTDGRSGDRPARPRHADEVVFVDFEREAIRLGRCRALADAWGAALCTPDELIV

SEQ ID NO: 80971 - protein, 445 aa, Unknown
  Bacterial polypetide isolated from the Sargasso Sea
MLFEDYARGKLLKGVEKLADAVAVTMGPTGRNVIIDKSFGGPTVTKDGVTVSKEVDLEDAFENMGAKLVNEVASKTSDLAGDGTTTATVLARAVFREGIRNIVAGSNPTAVRRGIEKGVTAAVNHLMEIARQVSRPEEVAQVGAISANNDTFIGDLLAEALQKVGKDGVITVEEGKTTETAVRFVDGMQFDKGYISPYFINKPAEMICEFEDALILIHEKKISNLRELVPLLEKVAQSGKPFLIIAEDIDGDALTALVVNKLRGVLNISAAKAPGFGDRRKAMLGDIATLTGGTLISEDLGIKLENVELSHLGTARTITIDKDETTIVEGAGKPADVQARVQQIRNQLEATESEYDREKLQERLAKLTGGVAIVSVGAGTEAEMKQKKARVEDALHATRAAVEEGIVPGGGVALVRCREAVEKARSQAKGDEKIGVDIVLGALKA

SEQ ID NO: 80972 - protein, 833 aa, Unknown
  Bacterial polypetide isolated from the Sargasso Sea
MLKARVSSSIKSVDLKQEVGPLIIGERLNTQGSKKAKELVLNDDFDGLVDLARTQVEDGAHCIDVCVATTERSDEKEFILKLVKSLSLEIDAPLVIDSTDPQVIESAIEQIPGKPIINSINLEGDGSRYKALAPLMAKYGIPAIALCIGPDGMAKTPEQKVATAELLYKSGKKYGLRPEQFIFDVLTFTLATGEEEFLDAGKHTLEGIKLVKERFPTSFTTLGLSNISFGLVPQARRVLNSVFLYHAVQNGLDSAIVNAREITPYTEIDEKEKKIVEDLIFNKHPNALSDLITHFENKTQDPSSKTKKVDVDPTWPAGQRSNFRIINRLKDGIENDVVSAIVEKLSQKDILVDNDGVLSINAAKEVTHQGAIQTLNDDLLPAMKIVGDKFGAGELILPFVLKSAECMKAAVKELEKYLLKEEGTSKGILVLGTVYGDVHDIGKNLVKTIFENNGYTVHDLGKQVPLQKFVEKINEVKPDAVGLSALLVSTSKQMQFFVEHARKTDVNIPILCGGAAINSNYINRIAKQDGIYEPGMFYCGTMFDGLKTMDKLVSDEKDEFVNNWKDKLSNWKESKVQQVDSENLPHSDIKPVSPPTPPQLNEVIRLKPEDFDLNEIWNHLNKKSLFKLSWGIRGNSKTDTIDDPEKLLVEWKKRVIEDNLFEPQAVYGYFSCHNRDDKLVVDGPDGQDIIFDFPRSSKTKHLCLTDYFGENDIVAFQSVTVGTKAAELIEKWDKEDKYTDAYYLHGLAVETAEAMAEWINEKIKTELGLSDKGGLRYSWGYPSCPDTTQQHLVWKLIHGEKSGMELTESGQIIPEQSTAAIVVHHPEAEYFVL

SEQ ID NO: 80973 - protein, 589 aa, Unknown
  Bacterial polypetide isolated from the Sargasso Sea
GASAVALSVDAGTPDPVVGWEDAAVDPLRLGDYLRAFQALVDRYGYETSLYGHFGDGCVHARITFDLRSVEGVATWRKFLREAAQLVVEFGGSLSGEHGDGQAKAEFLPIMYGPELMQAMEQFKAIWDPANRLNPGKVVHAYRVDENLRMGPAYKPVTLQTKLTFASQQGDGFQREIERCIGMGKCRSLEGGTMCPSYRATREEQYSTRGRAHLFWEMLQGDVIADGWQSREVKAALDTCLACKGCKSDCPTHTDMASYKAEFLSHYYETNRRPREAWFMGRIGEWAPWAARFPRLTNFMTSAPGLAALGKWAAGVAQARELPKFAVRSYRQIARRSLQTEGDVRADREVKKVILWVDTFNDHFTPEIAQAAADVLTQMGWHVVLPKKRLCCGRPLYDFGLLDRARALLTTILDDLGDDIAAGVPLVGLEPGCLSVFKDELLKQLPGHALAKQLSAQTFLFSDFVARQPFVWPTLAADVIVHGHCHQKALFGMQGDAALLDKLGVKWTLLDTGCCGMAGSFGFNDKHHALSEKIGEDRLFPAVRAAAAANAETIVLTNGFSCREQIEQGTGQHAMHIAQLAQRVLAGRC

SEQ ID NO: 80974 - protein, 689 aa, Unknown
  Bacterial polypetide isolated from the Sargasso Sea
MKKITKNLFLLSFFGISLFASSEKVDFSISEKYQDLSSEIFKNISSHHYTREIDKESFNDLYIDALLEELDGNKNLFLSYEIKSFKRKSSNYKKNRENFDINLAYEILNTYFNRVIEISEYQIKLAKKDSFDLSIDEGIDIFYDDNEYASTMLELKERWRKTTKNDFIVSVLAKDDEDEIISNLTNRYERRIKRVLQRKDEDIFLLAINIMTRQFDPHSTYLSPYNAEDFEIDMSLKLGGIGALLSNSATEDYAIIVSLVPGGPAEKNGELEPNDKIVKIKQQNEDIFEDVTGWRIDEVVQKVRGEPQTLVTLEIIPGDAEDNSVRKIIEIEREIVELEERAAKSKIYSLNKNGSEYKIGIIDLPSFYLDFEAWQARDPSYKSSSKDVKNILDEFKKQSVDAVLVDLRNNSGGALTEANKLTGLFTSAGATLQIKESNGNIIPWGDARVRQAWSKPMAVLVNRYSASASEIFAGAIQDYQRGLVIGQRTFGKGTVQRLDNLSEGQLKITESKFYRVSGDSTQSRGIDPDIILPSTWDIETVGESSLPSHLPWDKIKPTRYRTFTEDSIAIEKTIVAYEERLSTDPNLIYLKDVRSRYDQNKNKMELSLNIDERRSEQKERKQWLLEVENKRRSSLGMEIFKDYESMDEFNDNFDPEDIDTIKDYSLLQGIEIIGDYIDSESNFLSWRNT

SEQ ID NO: 80975 - protein, 311 aa, Unknown
  Bacterial polypetide isolated from the Sargasso Sea
MSARTQLQSKPVADLRAIAEGLGLEHKGLQKAKLIDLLIKQGDAVLEAEVPESKPKTDDDLPSVVNSGDSQIKKGETRTGFLDILPEGYGFLRCDGYKPSEMDVYVPAGVIKKYRIRKGDSVEGPIRAPRAKEKYPALVEPTTVNGGDPELLARRVEFDKLTPLFPDERLKLEIDGEPDKIVGRIVDLIAPIGKGQRGLIVSPPKAGKTTILKELANSITANNPEVHLMVVLVDERPEEVTDMQRSVDGEVVFSTFDRPPEEHTQVSKLAIERAKRLVEEGKDVVILLDSITRLARAHNLATPAREEFYLV

SEQ ID NO: 80976 - protein, 497 aa, Unknown
  Bacterial polypetide isolated from the Sargasso Sea
MDRTAGQLGRQLAQLLRDAIRRGDLQAGEMLPSTRILAASLQVARGTVIEAFDQLIAEGFLTASPRAGTSVAHSLTPPADVQARPSPVEPSSLPGRAHLLAQVARQFSAVPAAPFAVSVPVGRALPDDIWRRLGNRVRARGPGAPAGYGDPQGARALREAIADYVRRSRSVRCEAGQVIITSGTQQGLYLSCQVLLDADDSAWVEDPAYRGITAILESTGRPGRMIRVPVDAEGLDVDAGIELGAHARAAFVTSSHQYPLGMPMSMARRNALLAWARTHNAWIVEDDYDSELRYAGHPFPSLQGLDPSRVIYLGTFSKILFPSLRLGYAVVPDYLVDAFCGARVLMDRNPPNADQHVLAAFIAEGHLDRHIRRIRSVYAERRSQIIETVERLLPKELAWLQPSDQGMHMVLWLREGVDDTAVASLAAQSGVAVRAVSPMYSAGNARPGLILGLGAFTDSEIEIAARHLARCVDAAAIGVTRNAAKRPKKKATQDRSH

SEQ ID NO: 80977 - protein, 409 aa, Unknown
  Bacterial polypetide isolated from the Sargasso Sea
MTSNKRYDLIIVGGGPAGATAALYANRLGLSAVILDKSIWPRDKICGDALSGKAVDILKDLDILSDVKLLDGSTINRIVFGSPKNKIFEIDLSKSLNDRHIREGYVIPRKTFDDYLFDKAKKSVEFLEGFNVQDVLMNDRSVVGIKGINQKGQEEKIFSSIVLGCDGFNSIIAKKLNLYKMDMKHTALGIRCYFEGVKGLTDQIELHFIKEINPGYFWIFPAGDGIVNVGLGLSKKYIKKNKKDLVKLLDIVTQLNYFRDRFKSAKPLEKPKGWNLPMGSIHRKNHGDGFMLLGDAAGLIDPFTGEGIGNAMLSAKFAITVSKKAIEMQDTSERSLSRYDKMVWKEIGPELQISTNLQKLARSKFLLNFVINRASRNEKIKDIIGGMLANEVARGDLTNPLFYYKILFS

SEQ ID NO: 80978 - protein, 411 aa, Unknown
  Bacterial polypetide isolated from the Sargasso Sea
MQKPVLTINDLAADFLQCPDRHDTGSEKWDRYRGRKTSTGKEILPFWVADMDFQSPDVVLNAIRKRTSHAVFGYTHETPDFATTLTTHLREQHNWQIDPSWVLGVPGIVTGLSITARLLSQPGDGILTLTPVYQPFLFLPKLAERRSVRVPLHADVTAQRWTINWEALEAAMTPDVKIFWLCHPHNPTGKVFTQEELLRIAELCERRGVTVVSDEIWDDLILDDSCHIPFASLDHPAARRSITFVAASKTWNIAGLGCAAAIVPNEDFRKQWRQAGGGLVPMVNPLGYAASEAAWKDGEPWRQKLLDVLKYNKQLAVEAIHEIPGISCIPPQATYLLWVDCNEWVARQRAGQNQPQQACEDAGIAPSNGPEFGGPGFLRLNFGCPPALLQEGLKRLRDAFGANKTFGQKHR

SEQ ID NO: 80979 - protein, 394 aa, Unknown
  Bacterial polypetide isolated from the Sargasso Sea
MEEFKLIIEAIGGFLWNNYTLYVVVATGIVFTIWSGFSQYYALTHGFKVIKGDYDKDDDPGAISHFQALSTALSATVGLGNIGGVALAISLGGPGAVFWMWVVGFLGMAIKLSEVSLSMIHRNIDEADNPSGGPMWVVERNFSGKKGFMKIIGKLLAGTFCFALIINTITAGNMFQAWNVANLTQAYFGVPTLVTGAILALIVGSVIIGGIKRIGAVTSKLVPIMLIIYVIACIYVLAINFTAIPEMLRLIVSAAFSPMESSNAFLGGTAGAAFIFGMQRALFSNEAGQGSSAIAHSAAKTDEPVREGVVAGLEPFIDTIVVCTMSALVILVTGIWNRPAEVQLSNLSVNQSGQNWSIDGTIGDAPTLSSGDKVFMIYSGSNNAESGNALNKVY

SEQ ID NO: 80980 - protein, 346 aa, Unknown
  Bacterial polypetide isolated from the Sargasso Sea
MTGGQAAIKSLKKEKVKHVFGLIGSATMEMFDALYHEKNIKFIGVRDERTGTHMADGYARASNQPGIILAGQNGPGATNLVTGLAQAKAAFSPVVSIAGSYSTKDKMEDAFQGLDQQSLFKPVTKKTWTVKNAKKIPKTFSDAFKLAMSPRRGPVCINLPRNILADKGNFKINDKNQSFDNQNSTKAKSNYIKKAVKIISNSNKTVIIAGGGIKYTSRYKNVVKLAELLNVPIVTAAGHGDAIPFNHKLNAGQMGPRGNPVASKLVKEASVIIALGTRLGFNSTFYSYENINKRAKIIQVELEKRMIGRYFPVAVGIYGDAATIADQLYKEIKKQNITLDIKKWTK

SEQ ID NO: 80981 - protein, 648 aa, Unknown
  Bacterial polypetide isolated from the Sargasso Sea
MHRNKLTTLILAALASHAYAAEQEVMVVTASGFQQKIEDTAASISVVTREQLEKRAYRDVTDALKDVPGVVITGGGSSSDISIRGMGSKYTLMLVDGKRVDSRGTRPNSDGPGIEQGWLPPLQAIERIEVVRGPMSSRYGSDAMGGVINVITRKTASMTAWQGSLHADSTFQENKESGDIFQTNAYTAGALVDGLLGVRVNGQLSHRGEDQFQNGFAEQEMRSGTAVFSLTPDEHNRFDFEASRGLQDRNRTPGESLSAKSKPSLSTYERTNFAITHDGRYDFGSSTSYLQREENTNPGRQMQLINTIADTHTQFELGAHYLSVGGQYRYEDLQDQGNQLNVANRANQLTRWSWAMFVEDEWSLTDTFALTGGVRMDQDQNYGTHWSPRLYGVWHLADSWTLKGGVSTGYRSPDLRMSAANWGQATGGGTQDGMLVGSPELKPETSVSQEIALLWDGQQGLNTGLTLFNTDFEDKISEIRRCESKSNPSCTLNGHTYDFISDRINVDKANMRGVEGTANWTINDAWSLASSYTFTQSEQKSGAMEGKPLNQMPRHMFNTTVDWQTTETVSLWSRVNFRSKTSDYLSRVKMAEGTPSYTFFDTGLVYKANEHLDVTAGVYNLFDKTVDYSSFGTVLDGRRYTLGMTYNF

SEQ ID NO: 80982 - protein, 233 aa, Unknown
  Bacterial polypetide isolated from the Sargasso Sea
MSRPVRLDKFICESTSLTRSLAKKALHRGDITCDGTVIKDAGFKVLEGMQVCLEGEPISLVGERYLMLNKPVDTICSTIDEVYPSVLSLLDIEKPETLHIAGRLDADTTGLVLITSDGQWSHRITSPKKDCGKRYLVTLAEPVDESLIGVFAAGVELRNEDGLTKPAELEIIEPQRVRLTITEGKYHQVKRMFAAVGNHVVGLHRESIGKIELDAELALGEWRYLTSEEIASI

SEQ ID NO: 80983 - protein, 1139 aa, Unknown
  Bacterial polypetide isolated from the Sargasso Sea
MRIARWLASYDRNRDIHSGTGQTSTAAARGSGSFVGLCDALRERHGWRWRYRDRWVLVAGDEPIVRRVAPDLVQNGYRISGNTLLLYARQTGEQMDATWLDQIRPLRRRRPVDAIVAVFRAHTSGSQPFDAERTAQRLIRHARALRWAAPAYLLNVTDAGDETSGPHEAIGCTWSNASVRREAIDASLRELSGELADAGVMRLAKHPSDRYAAELSQHIARYGNLLSDLVVRIGQFRIWRSAIHGVLFAPIFTERVSEASDVPTEDAESDPIRQQLVWQTVADHSRRIHGRRVGFSLPTTAAWIATTLIGLWIAGAMLSGFMNRSAIQMATSTATRLATTVDPTEAALTLDSLQKQLDTLEIRQHDGAPWHTRFGLNRDAALFTTLWPVYEGGAARLVVAPIRARLEERLQQLASLSDADIASGGDAQIKSAYDTLKTYLMLAKPERADPKFLTQQLFATGAPALPVNSSLSEGAWQDLREHLATFYASHLIRDPAASGTSLAIVPDALLVGAARQTVIGVRGIQNSTDTVYQQILDDAKPKYPPVCLSTLLGDTSSRGLFSTTATVPGVFTRAAWDERISKSIDDASEQGSVAGDWVLSDSRTRAAPTASLKAELRQRYFDDYARAWQAFLNGIRWQPTATLSGTVDQLTLLGDPQRSPLVALMNVVVYQAETGATAQSLSDTLLNKAQQLVGADEKDPSKIARPQHAAPLAAAFGPLVRLTGNDLAAGGAGSSKASMQMAAAGDLSLARFLERVTAMRLKLQQIMMSTDPDAMSRSAAQAVLQGKTSDIADSRDYASRVAASLGQQWAGFGELFQQPLEQTWQVVLQPAASSLNDTWRSGILADWNRNFGGRYPFADSDNDASLPEMARFMRPDSGVITQFVSTQLAGVVERQGDRWVSAHGSGYNFLTVDPAFLAALNTLMRVSTSFFPSGDARVRFELRAVSTPGITDMKVVLSGRELHYFNQKEEWTPFIWPGDALENISRIEWQTQEGGLRSALDAPGRFGLIRLLERARVTPQDNARYLLAWMPDPTQDIPLKVQLRSEVGAGPLDMLALRHFSLPQRIFLTGSSRGTQERALGELPPLPASMTAAAPTSTATSMKSSDEGKPSSDSNPPVAGRVKAGVTRANRLLADAFVY

SEQ ID NO: 80984 - protein, 263 aa, Unknown
  Bacterial polypetide isolated from the Sargasso Sea
MKIRTHDMATLGLWGPKAKDALGHFIDPNEISIENFPFVAAKHLTLNLTGEKSIDVWAARISYVGESGWEIYLDNDSEDGLALYDSLLEVGVVPVGIETYANSRRLEKSFRLQGADLLTEYNACESAVHRPKVKEANFHGKEAHLIHREEEPSAILCTMTLDNLDVSGNGTRYPVGISPIIDPDTGEVPIDSKGRRSYTTSMSYCPSIKKHVVMGYLPINIAIAGKKLSMEYFNEDGDGIYPMTVEIVGKGCLYDPKNEKVRS

SEQ ID NO: 80985 - protein, 285 aa, Unknown
  Bacterial polypetide isolated from the Sargasso Sea
MPSYAFRLLNVFAESTFGGNPLCVFEDARGMDDATMRALAVQFNLSETTFVLPSERAHARVRIFTPGHEMAFAGHPTLGTAHVVRDLQRAGNALALEFKAGVVDVSAHDDVWTFTAPHAGMPKTAPCELSDARTATLLGLTEDDLLAPPIWIDTGADQLLVALKDPAAVRRAQPDSACLDIWPTSSLGRKTAYVFAFDAERPGTVVSRYFFVKQGSVSEDPGTGSACANLGGWLLAMKRDLPAAFQVEQGDAIGRPCRLRLSVNASGEIGVGGRVIELGRGVVNV

SEQ ID NO: 80986 - protein, 307 aa, Unknown
  Bacterial polypetide isolated from the Sargasso Sea
MSTADRDGFIWFDGKLVPWRDATVHVLTHTLHYGMGVFEGVRAYDTKNGTCIFRIEEHTQRLINSAKILGMKIPYSFDEIVDAQIEVVRENKLTSGYIRPMCFYGAEGMGLRADGLKEHLIVAAWEWGSYFSKENLQKGIRVKTSSYNKHFVNSSMCKAKANGNYINSMLALQEALNGGYDEALLLDTNGFVAEGSGENIFIVTEGKIVTPELTSALDGITRRSVIEFAHDLGIEIITKPITKDEIYIAEEAFFTGTAAEVTPIRELDDKTIGNGEMGNITKELQKLYFKVVNGEEKKYNKWLKPIK

SEQ ID NO: 80987 - protein, 304 aa, Unknown
  Bacterial polypetide isolated from the Sargasso Sea
MNLYRDLSKKIRVWDSSVGQFEKLATKQLHDVASLPVVEGVRAMPDSHWGLGACVGSVIALKKAVIPAAVGVDIGCGMLACKTSLNSHHLPENLKALRAKIETHIPHGKTLAKNKSRDHGAWDSQKIPAHVKKQKKKIEGWFDRYRLDCGGISKWLNRRHPITHLGTLGTGNHFIELCLDEKDHVWIMLHSRSRGIGNSVGTHFINKAKEEMGDRLGALPNKDCAYLTNNQKTFKDYCRAVSICQQYAQLNREMMLTSVVEQMGRAFKNFCLTESVIDCHHNYIDFHYAKDLIITRKGAVSAKK

SEQ ID NO: 80988 - protein, 307 aa, Unknown
  Bacterial polypetide isolated from the Sargasso Sea
MKSKKIIIGSRGSKLALIYAEKARQEILKFASEFNINEVEIKKITTAGDKNQKVRLSEIGGKGLFSKRIEDELLDDKISIAIHALKDMPSQETNGLITNSFLKRNDAREVLISKDKIRFKELKPNSIIGTSSYRREFQLKQLRKDLNFKLIRGNVDTRINKVTENLYDATVLASAGIFSLDLDSHISHIFSIDEMLPSAGQGVIALQSKVDDNFIKNLLNKINHKQTYFSVQSERSVLKVLDGDCETAIGVYSSIKNDIIELKAELFSIDGNERYYVESSKNISQANELGLEVGENLKRQSKGNYKK

SEQ ID NO: 80989 - protein, 346 aa, Unknown
  Bacterial polypetide isolated from the Sargasso Sea
KSKFYSLNKNGSEYKIGIIDLPSFYLDFGAWQARDPNYKSSSKDVKNILDEFKKQSVDAVLVDLRNNSGGALTEANKLTGLFTSAGATLQIKESNGNIIPWGDARVRQAWSKPMAVLVNRYSASASEIFAGAIQDYQRGLVIGQRTFGKGTVQRLDNLSEGQLKITESKFYRVSGDSTQSRGIDPDIVLPSTWDIETVGESSLPTHLPWDKIKPTRYRTFTEDSIAIEKTIVAFEERLSTDPNLIYLKDVRSRYDQNKNKMELSLNIDERRSEQEERKQWLLEVENKRRSSLGMEIFKDYESMDEFNDNFDAEDIDTIRDYSLLQGIEIIGDYIDSESNFLSWRNT

SEQ ID NO: 80990 - protein, 449 aa, Unknown
  Bacterial polypetide isolated from the Sargasso Sea
MTGGQAAVKSLKKEKVKHVFGLIGSATMEMFDALYHEKKIKFIGVRDERTGTHMADGYARASNQPGVIIAGQNGPGATNLVTGIAQAKAAFSPVVSIAGLYSTKDKMEDAFQGLDQQSLFDPITKKTWTVKKASHIPTAFRDAFNLAMSPRRGPVCINLPRNVLSDTSKFKINENKKSYKAESDLKSKKNLIDRTIKLILNSKKTVIVAGGGIKYNSKFKSVTKLAEYLNIPIVTAAGHGDAIPFSHKLNAGQMGPRGNIVASRLVKEAELIIAIGTRLGFNSTFYSYDNINKNAKIVQIELEKTMIGRYFPINVGIHGDAALVTDQILAELIKQKKIFNYKEWTNSFLLERSKFLNDRDNIKSKNFPIQPNGLFRELRKVLPKNTAITLDAGTLCLQATDALEYYNPPSLFTPLDFGLVGFSFACGLGIKVAKPNKTVVSLMGDGGFG

SEQ ID NO: 80991 - protein, 57 aa, Unknown
  Bacterial polypetide isolated from the Sargasso Sea
MTAIILAAGKGERLKPLTALTPKPLIAVSGQTLLERNINCLAESGVKKIICHGSRMG

SEQ ID NO: 80992 - protein, 319 aa, Unknown
  Bacterial polypetide isolated from the Sargasso Sea
KFSFVGKLSSTLRYGENPHQSAILYKSSMQNSGIPQATLLQGKELSYNNINDADAALQLIKEFEEATPTVAIIKHANPCGVASGSTLHEAYTKAFSCDTTSAFGGIIALNQTIDKDSAEQIVKIFTEVIIAPGITDEAKAIFKTKNNLRVLILTSLHEKNNSQNFKSIEGGILVQSNDDESTDKSDLKVVTEKKPSDSEIEDMLFAFKVCKHVKSNAIIYVKNKKTIGIGAGQMSRVDSAKIASQKNSEMEKSEENSLENSVVASDAFFPFADGMLVTISSGAKAVIQPGGSVKDDEVIEAANKAGISMVFTGVRHFRH

SEQ ID NO: 80993 - protein, 520 aa, Unknown
  Bacterial polypetide isolated from the Sargasso Sea
MKQEVGPLIIGERLNTQGSKKAKELVMNDDFDGLVDLARTQVEDGAHCIDVCVATTERSDEKEFLLKLVKNLSLEIDAPLVIDSTDPHVIETAIEQIPGKPIINSINLEGDGSRYKALAPLMAKYGIPAIALCIGPDGMAKTPEQKVATAELLYKSGKKYGLRPEQFIFDVLTFTLATGEEEFRDAGKHTLEGIKLVKERFPTSFTTLGLSNISFGLVPQARRILNSVFLYHAVQNGLDSAIVNAREITPYTEIDEKEKKLVEDLIFNNHPNALSELITHFENTTQDSSVKTKKVDVDPSWAAGKRANFRIINRLKDGIENDVVSAIAEKLEQENLVQDNGGILSINAEKEVTHQGAIQTLNDDLLPAMKIVGDKFGAGELILPFVLKSAECMKAAVKELEKYLLKEEGTSKGTLVLGTVYGDVHDIGKNLVKTIFENNGYTVHDLGKQVPLQKFVEKINEVKPDAVGLSALLVSTSKQMQFFVEHARKTDVNVPILCGGAAINTNYINRIAKTDGIYEP

SEQ ID NO: 80994 - protein, 211 aa, Unknown
  Bacterial polypetide isolated from the Sargasso Sea
MGPNKDSTNRIDDYLICFRKFYNLADYITINISSPNTENLRDFHNQDELNSLIDKLKNEKNKLNSNIPLAIKVSPDLNDDQINEVSKIIMEQEIEIIIVSNTTDKNRENLKNINKLEKGGLSGKPIKKISNEAISKFYKILKDKTKIIGVGGVSNGQDAFEKIISGATLVQLYTGMVYRGPRIASKISKELIDLLKNKGFKNVSEAIGTKN

SEQ ID NO: 80995 - protein, 312 aa, Unknown
  Bacterial polypetide isolated from the Sargasso Sea
MGFSVSGAQQRTGGGGSLVSSSEDELGRVYDGQVVIRLFSYVGLYRGWALFSLAAVLVYTAATVCIPVIVKWGIDSNIQPFIGTGKTSNLGLVIVVFAITSVVHYVSNYLQFVGISKVGQGILYSMRTQLFNHLQSLSPSFFARTEVGRIMSRVQNDILQLQETFSLLVLTLADVLSLVGIISMMMIMSWKLSLLTFAVLPILVLLMAFWQKFAKRSFVRIRTAIAMVNGALQENLAGVRVVQSFNRQSLNLNRFDGLNREHLNANIQASMYSGGVQPLVEGLTGISMGFVILVGGWWVYNGTLEVGVLVAF

SEQ ID NO: 80996 - protein, 185 aa, Unknown
  Bacterial polypetide isolated from the Sargasso Sea
PSCSILLLAGGRGQRMGGQDKGLVEWQGRPLIAWLHETVRKRLANTPPRFFQLAAWCPPVFGGHHFKPPCRGSPVPGQRRSYPKSFKAQVVDECTQPGASVAGVALSHGLNANLVHKWIRRQQAQLPAVPSGFIPIPPVPSLPATPSAADMAIQIAIPHRAGKLSVQWPGNDPEGCARFLRELLK

SEQ ID NO: 80997 - protein, 412 aa, Unknown
  Bacterial polypetide isolated from the Sargasso Sea
MRRLAIPLQGAQMLFVAFGALVLMPLLTGLDTSVALFTAGIGTLLFQLITKRQVPIFLASSFAFIAPILYGVQTWGIPSTMGGIMAAGAVYVCLGALVKVRGTDFIHRLLPPVVVGPVIIIIGLGLAPVAVNMALGKSGDGSLTLVATNTALIISLVSLCTTIAVAIFAKGLLKVMPILAGIIVGYSLSLAFGIVDFAVVTAASWIAIPKFVAPEFNWHAIAFMIPVAIAPAVEHIGDILAISNVTGKDFMKKPGLHRTLTGDGVATIAAAAFGGPPNTTYSEVTGAVTLTRNFDPRIMTWTAITAITLAFVGKLGALMQTIPVPVMGGIMCLLFGSIAAVGLNTLIRNHVDLSEPRNLSIVGVTLVFGIGGMAFGIGSFSLTGISLCGIVAITMNLLLPASKHHDRDAASH

SEQ ID NO: 80998 - protein, 300 aa, Unknown
  Bacterial polypetide isolated from the Sargasso Sea
MAFFSIQDSLIKFIFEDIALFELYFGRTLIQSVFLLSFVLITKKTISLKTHYPLLTLIRVVCFFFGFSFFYISLTFMTLAMTSALFFSCPFFMSMFAKFFLKEKIGIRRWSAIVVGFIGVLIVLNPSLDNFNFFKLAPVACALCYSISMTITKYTSDKDSIYTQMTWLYVFALFASLVIFFVSGDGKFNTFTDPTLQFIVREWFTNPGEAWPYVLIMGIVASISFFCVFTAYSIASPSVVSLFEYSYIVFAMVAGYILFETIPVPRTFLGASIIIGAGVYIYFREKVRGQMIATDTPANR

SEQ ID NO: 80999 - protein, 194 aa, Unknown
  Bacterial polypetide isolated from the Sargasso Sea
MNLEKIIPKDGPSIEEVEKYVKKYSNELIVIKCGGSVLLDENLFNQLIENIAVINKLGLSAIVVHGGGKNIKKKLDQNNIESKFIDGLRVTDEKTIKIVEEALLELNTEILNSINDKKANAQSVTPKNGNIIKIIPEKKELGFVGTPKEVNKEVLLSIVRKKKVPIIVPLGIGDDGKIYNVNADAVASAIAKEI

SEQ ID NO: 81000 - protein, 298 aa, Unknown
  Bacterial polypetide isolated from the Sargasso Sea
QVFINHLCNNAGIPHAKLLQGKELSYNNINDADAALQLIKEFDEDTPSVAIIKHANPCGVASGESLCEAYMKALSCDTTSAFGGIIALNQIIDKETASEIIKIFTEVIIAPNVSDEAKEVFESKNNLRVLTLSSTHKNNNSRNYKSIEGGILVQSNDDANTIKSDLKVVTEKKPSDDEIDDMLFAFKVCKHVKSNAIIYVKNKKTIGIGAGQMSRVDSAKIASQKNSEMEKSDENSLENSVVASDAFFPFADGLLVTISYGAKAVIQPGGSVKDDEVISAANEAGISMVFTGKRHFRH

SEQ ID NO: 81001 - protein, 444 aa, Unknown
  Bacterial polypetide isolated from the Sargasso Sea
MDDQVPTLLLNGGDSLQEVAIGHLCDALQKSDLVYCDTDELDINGAKSSPRFLPDWNPELQFSTAYINTGVMIKAALLKSLHITNQTTIAEIVTELSLTTQSLAIDHLPLPLVRQSPVKKGESNTLERVKTVIEKHTNAKVELDEQFSVNRVCWPNSDPLVSLIIPTKNGKALVKACIESILEKTIYHNYEILLIDNGSDEQESIEYFSYLNTLEKVKVIRYPAPFNYSAINNFGVEHAKGSILGLVNNDIEVISPDWLTYMVGHVERESVGCVGAKLLYSDTRIQHAGVVLGYGGGAGHAHKNFPRFHTGYLKRIVATNNYSAVTAACLLVKRTDFDAVNGLNEKDLSVAFNDVDFCLKVKGLGVNNVYCAEAELFHHESVSRGLDISPEKAARFNRELAYLQTTWSDFIANDPAYNPNLTLKRENFSIRSAVELKECHIRHN

SEQ ID NO: 81002 - protein, 704 aa, Unknown
  Bacterial polypetide isolated from the Sargasso Sea
MFTPTRIAVALSGAFSVLFTSAACAQAIAAPTDSPTASTLPAIHVNATRETDSLTSKSTDSLKRTLEQTVGSVGFVDADSYRNTYAFTLRDVLKDVPGVFVENRYGQELRLSIRGSGIARSYHTRGLEILQDGIPTNLADGSGDYYQIDPLALQAVQVYKGGNGLAYGASTLGGAIDFITPTAHTADAPNILRVEGGSYGTVRASAQISRVLGPLDFLANFSVNHADGYRDHSKGQYEQFNANVGYRFSPTVETRFYVGVYVIDQLLPGTLSLSDALNNPTKAAPNAISGDQARNTRTERIANRTTVKLDSGELQFDTWAIHKSLYHPIFQALDQDGWTYGFAPRYTGHLTLGGMRNDLIVGARFFGGRTQANQYVNVNGNKGAQTLDSTQTAFNYEAYVENRLFFVPTVALMTGVKVLHSVREYIDNGGLPRNPNYKSTNASYSGVNPKLGLMWQPDAHTQAYVDITRSQDVPDFSDLTQTFSNTTRFTPLAAQHAWTIEFGTRGSRERVSWDVTAYRSLVRDQLLQYTTNPDVPASTFNANKTVLQGIEAGASVELLRNVTGRGAGDKVTLSGIWNLNDFRFKNDPQYGNNRIAGVPLNVLRATLGYARPSGFHIAATLDWVPSGAWADDANTLRVPSYTLLGLQAGYDFRNGLSLFVDARNLTNKRYVSDISTVANARTANTAIFYPGEGRSVFAGMRYAF

SEQ ID NO: 81003 - protein, 163 aa, Unknown
  Bacterial polypetide isolated from the Sargasso Sea
MEIDKILPKNGPSIQEVKKYIDKYLNEIIVIKCGGSVLLDENLFNQFIEDISVINKLGLSAIVVHGGGKNIKKKLDKQNIESKFINGLRVTDEKIIKIVEEALLELNTEILNSISEKKAYAKSVTPKSGNIIKIVPEKKELGFVGKPKEINKEIILNIVKEKK

SEQ ID NO: 81004 - protein, 144 aa, Unknown
  Bacterial polypetide isolated from the Sargasso Sea
KVKLKFFGHTEDFGEKVIKKIKYAESETFCEDYKLNLNVALSYGGKQDILDLVKKISKEVFDKKLNIDDIDESKIHESSCAPVNEIDLLIRTGGDKRISNFLLYQIAYAEIMFIDKFWPEFSKKDFKECVSNFQKVSRRFGKRV

SEQ ID NO: 81005 - protein, 329 aa, Unknown
  Bacterial polypetide isolated from the Sargasso Sea
STHIFLQQMLKKMEECHHVFLTPTGFGSVFLSIFSIIRPGDEILASDPVYSPTRALTQDFLKSFNIKTIFYNPHDLNTLKKNITKKTKLIYVENPGSNSFDFQDLSKIVSIAKKYKLFTAIDNTWGTPYFLKPIKLGFDMSIVSATKYYSGHSDVMGGSLAVNKRVFKYVEKANKIAGLRLGPDDAYLIIRGLRTLDVRLDRHQENAKKIANFLSKNKKIKLLYPYKKGSFNFKMWNKYYSGASGLMGLKIKSKNKKSVLKFVNSLKLFGYGYSWGGFESLALHQESRELGDRNFLRLAKDEHLVRLHIGLEDPKDLIADLRKAIKLIK

SEQ ID NO: 81006 - protein, 362 aa, Unknown
  Bacterial polypetide isolated from the Sargasso Sea
SINDDLIDTSFESAKAIENLKFTPGGAFGSCRYKLSDVKKSEVDYQKILNTFEKYNIGYFFYNGGGDSQDTTNKLSKFCKLNKYDISCIGIPKTVDNDLPFIDNCPGFGSVAKYVSTSILEAGLDVASMSETSTKVFVMEVMGRHAGWIAASAALAGRGRNLPPHIILFPEIEFNKKRFLQEVKKCVSKHGYCVIVASEGVKAKGKFLTESSSKDAFGHAQLGGLAPLIVEMIKSNLNYKCHWAVADYLQRSARHLSSKVDVDQAYKLGKFAVQQAVQGNTDRMVSIKRISSKPYKWKLITVPLSKVANVEKKLPKNYISSDGFYITSKCRDYLQPLIYGELGPTYKNGIPVYSRLKNIKAK

SEQ ID NO: 81007 - protein, 309 aa, Unknown
  Bacterial polypetide isolated from the Sargasso Sea
MKKYFDVNSPSSVPLSLYIHIPWCIKKCPYCDFNSHEASISFDELGYVDALIKDLEVELPHIWGRSIVSIFIGGGTPSLFSPESIDKLLSSIRAYFNFNSSIEITLEVNPGTVEANRFSEYKAVGINRLSIGVQSFNDKYLKLLGRIHTSREAEKAISICKGAGFKNFNIDLMFGLPSQNTNDALLDLSTAFDQLPTHISWYQLTIEPNTQFSFNPPNLPCDDNIWSMQKEGQELLKYNDFFQYEISAYAKKKFASIHNTNYWEFGDYIGIGAGAHSKITNFNDGKIERFSRHRVPKRYIELAGHSDVI

SEQ ID NO: 81008 - protein, 317 aa, Unknown
  Bacterial polypetide isolated from the Sargasso Sea
MKKVLITRRLIRESEDKASKLFEAKFNTNDELYSQKKIIEMSQGFDGILSSLTEKLDAETINQLPDTIKIISNFAVGFGNIDLEAAKNRGIAVTNTPEVLSDASAEIGILLILGACRRASEGIESAKEGGWKWSADYLIGKQLTGTRLGILGMGRIGQKIAKIAKSLGMIIHYHNRSKLSEDKEQGATYHDSIKSLFSVSDVLSICCPATKETENLINKETVEYFPKGAVITNVARGDIVDDEALIDALNRRKIYAAGLDVYKNEPNLNPGYLKIPSAFVLPHLGSATKDTRIAMGNLAIDNLDEFFRTGNCINKVN

SEQ ID NO: 81009 - protein, 559 aa, Unknown
  Bacterial polypetide isolated from the Sargasso Sea
MTGGQAAIKSLKKEKVKHVFGLIGSATMEMFDALYHEKNIKFIGVRDERTGTHMADGYARASNQPGIILAGQNGPGATNLVTGLAQAKAAFSPVVSIAGSYSTKDKMEDAFQGLDQQSLFKPVTKKTWTVKNTKKIPKIFSDAFNLAMSPRRGPVCINLPRNILAKKENFKINEKIQSFDNQNSTKAKSNFIKKAVQIINNSSKTVIIAGGGIKYSSKYKNVVKLAELLNVPIVTAAGHGDAIPFNHKLNAGQMGPRGNLVASKLVKEASVIIALGTRLGFNSTFYSYENINKKAKIIQIELEKRMIGRYFPVAVGIYGDAATIAEQLCKEIKKQNITFDIQKWTNNYLNERKNFLLSRDKFVQKNFPIQPKSLFKQLRQVLPKNSAITLDAGTLCLQATDALEYYDPPSLFTPLDFGLVGFSFACGLGVKIAKPDKKVISLMGDGGFGMTISELSTAVEYKINTITIVLNNKSWGAEKAYQKDFYGKRYLGADISSPPFDKVAELYGAKGFKVKKVSEINQAVREALKINKPVVIDVDVDPKALYSFRRDSFQHREKK

SEQ ID NO: 81010 - protein, 224 aa, Unknown
  Bacterial polypetide isolated from the Sargasso Sea
MNKIITIGSRGSKLALLYAQKAKDKIIQNTNLSEENIVIKTITTKGDQVQDTRLSEVGGKGLFSSNIENELLNNNIDIAVHALKDMPAIETKGLRTDTFLERNDPREILITTDKKKLKELNLKSIIGTSSYRREFQIKKIRPDIDCKLIRGNVDTRIKKLKEGIYDAIILSYAGMKYLKLENKISEIFKVEEIIPSAGQGIIALQCRENDSKIISILEKTNHEE

SEQ ID NO: 81011 - protein, 407 aa, Unknown
  Bacterial polypetide isolated from the Sargasso Sea
MENSQYVNATQELINYLSTQKIGAFKAEGFKQWIDNNPNHPLISLARFNYAQQLFYAGGTQQSKIHLSKVKPYELSNSDQADYSFMTGVSLLQDENYENAGKYFEAARKNGFDNHSQLSYYQALTDYNLNNQEEALEGFYTIREDMNYGLSANFYRARILLAKEDYDGVIRLAQEELSEEKSITNAGLFQLLGEAYAKTGETSKADAYFEKAILKYPGKPSSALYYQAGVSKFKLGNVDKALAYLTESGIGSGPFATLSAFQLGRLHIKRNDLENALAAYIEASSSEDIAIKEESIYQAAMLNAKLERYTASIDYCHDYLSKYNQGKWRNEINDLLAQSYLKTSDYDKAIKLLEKISISNQRQKEVYQKVTFQKSLLRFNDGLFDEAEEWFKKSLRYPVIEELTNKT

SEQ ID NO: 81012 - protein, 252 aa, Unknown
  Bacterial polypetide isolated from the Sargasso Sea
MLVFICFFSSLNTIPPLDRDESRYIQATVQMVESKDFINIKFLDTPRLKKPPGIYWMQALSATVVKNILFLEKAPLWSYRLPSAIAASISVWLTFLLGKLLFGRTQGFIAALLLLSSPLVFIESHIAKTDSALMACVLFIIYIFAKIIFDSKFKDNYYSKYLILFAWLVMGFAFLIKGPLIILFIFFMAIFFRIFSGINFIKDCRIITGFTIFLLISLPWFIIINLGDNSEIFVNSVKKDMVIKIGKHQESP

SEQ ID NO: 81013 - protein, 404 aa, Unknown
  Bacterial polypetide isolated from the Sargasso Sea
MNLDKIVIKGAREHNLKNINLEIPKNKLVVITGVSGSGKSTLAFDTIYSEGQRKYVESLSAYARQFLQMMNKPDVDSIDGLSPAISIEQKTTQKNPRSTVGTVTEIYDYLRVLYARVGVPYSPTTGKPIKSQSVSEMTDLIIKNNIDKRIYILSPIVRDRKGEYRKEIEDLKKRGYQRLKVDNVVYDIDEVPSLKKNFKHNIDVVIDRLVVKKNIQQRLSESIEVALTLSDGLLYLENLDTNKISIFSSKFACPVSGFSIEEIEPRLFSFNAPQGACSECDGLGVEKYFDEFKIVPDETRSISDGAIKPWETKVFGYQKKYFVETIDKILKQFKVKKNVPWSEIPKKVKNIILYGDENSELNFLYDFEGIINFIDRKYEETERWWLQYELEKYLSERDCEVCDG

SEQ ID NO: 81014 - protein, 1218 aa, Unknown
  Bacterial polypetide isolated from the Sargasso Sea
MTRNEVVKTKLSIAISAALLSSAAVAGTTAQYNTTNQTTDKYAGLSVTKNDSNEQKQAVAWMVKLKAPSLAQQSQLKGFNKQSVMSQIESSQTKVKNAINSMDADLKIVATTSKLVNSIVVEGNHKQIASLLNNAEVAAILPIYDYKLDVAASAEYIKAKAVIDAGIASGKGQRVAVLDTGVDYTHKALGGSGLVADYKAAVAAKSEMPNWPQGKVIGGWDFVNNDPNPIDVTTNHGTHVSHSVVGIAPDVELLVYSVCNSGCSGIAQLSALEASMDPNGDGDISDRVDTVNMSLGGDFGDVEDGAVQAMINEMVKLGVNLVISAGNDGPTPFVVGGPSTTNSALSVGAMTHPTTKVGKIEASIAGNTVTAIGAGFNKSNAYSFTNTVAPIVYPAANKNGCAAYTEDLTGKTVLIDRGTCGFTVKVLNAQLKGASFVIVANNAANAGAIVMGGTDDKITIPSVMVSKEDGDAIKAALASGDVPFSITSTEVTTAGAIATFTSRGPSIGGTLKPEITAPGTDILTAHPGLGEGLSPISGTSFSSPITAGAVSIIREALPHRNAFEVKATIMNAANLDVTLEPKEINPDTELAPISYIGSGLVDVEKAINLPVAAWNKDTKQAALAFGLLALNKTTSITKTVTVKNFSAAEKTYTLKVDQRFQNDLDSGALSFALPASVTIPAGQTVDFDVTATIDPTKLPEWTLTSSYELDGTAADASVALTLSEYDGAIEFMDGESKALHLVYHVLPKAAAAISVETEVTEDGLVRTLTNVGATSITDPFTAPLIATSPVDESKRHDLLNASSELLLSSSCDTGIAIYNTLQMRDPIVHALVASYDVDYDLNNDGVWDYTAATANLNWFNDAYPRSIYGLVAKYGTSSGTLEPVFHVTGNDFLTSKVCFEDMGLTEADLGKTIKVRYRVEDSDWAPTPSGDEDSVVASLVLDGSGTSAMLVDSDGKEVTELKPGESAILEAQVGDNAKGFMFLSDSGSMSVVANTTDEGNSAPTVENLTLSVKKGTAAGTVLGQIKATDPDMLTSPFSEFVTTGSNSSMVLVAKDGTVRLSDDAVINQQSKTMEVEVIALDTMGNASAPAKVTVLINNTKPTVSPTSANATENSYVALLANGKDADGDTLTYTWKQTSGPAISFVNGSDKLGFTAPAGDNVYTFTVVASDGVDDSNTGTSTVTVKTTKANNAGGTSGGALGWLTALLLPLAAMRRRMK

SEQ ID NO: 81015 - protein, 152 aa, Unknown
  Bacterial polypetide isolated from the Sargasso Sea
MTAIILAAGKGERLQPLTSQTPKPLIKVAGKTLLQRNIDCLKQSGIKNIIVNGSRMGDQIESFLENHKQSNINFDYINEGQEPLGTAGAIFNIIDKGLINDDHFWVINADIITNFSFGAIELNSSVMGHIILVPNPEHNLSGDFCLEGDRVT

SEQ ID NO: 81016 - protein, 159 aa, Unknown
  Bacterial polypetide isolated from the Sargasso Sea
MNYGFVIDNRMCIGCHACTVACKSEHDIPIGVNRTHVKYIDKGEFPKSTREFSVHRCNHCKDAPCVEICPTTALYDRADGIVDFDSDRCIGCKSCMQACPYDALYIDPDTHTAAKCNYCAHKVDHGYEPACVIVCPVEAIISGDLDDPNSNISHLVKNE

SEQ ID NO: 81017 - protein, 253 aa, Unknown
  Bacterial polypetide isolated from the Sargasso Sea
MKFLISAAGTGGHVFPALEFGRECIKNDHEVLWIGTKTGIENRVLPKNIKFLTIPMIGFRGKNLIFKITSLIGLIVSIFKSIFYIKKNNINFIVCFGGYISLPVGLSAWICRKPLFLHEQNAIMGTSNKILKRFSKIVFLGFSINESISKKTMLVGNPIKKLELSSFTNHNHNHNHDPVRIYITGGSQGSEFINKNVPIALNQLNIPLEVKHQSGIGKSLGIKELYSSNISIEVEEFYDSPHELILWSDFIIS

SEQ ID NO: 81018 - protein, 939 aa, Unknown
  Bacterial polypetide isolated from the Sargasso Sea
MDSIYIKGARTHNLKNISLEIPRNKIIVITGLSGSGKSSLAFDTLYAEGQRRYVESLSTYARRFLSMMEKPDVDQIEGLSPAISIEQKATSHNPRSTVGTVTEVYDYLRLLFSRIGTPVCPDHGEELKAKTVSEICDEILKIKENTKIMLLAPVVRGKKGEHLGIYEELRKSGYVRVKVNGTVYPMEEFPDLDKNKKHDIAAVIDRLVIKKSDDIRSRISESIETSLLLSEGLIEVENMDKNEITLYSSNFSCSQCGYAVPELEPRMFSFNNPYGACTKCDGLGVIQFFNEKRLIQDDEVSIANGAIKGWTRRNRFYYYQLRCLANHYDFTLTTKWKDYPQKIKDIILWGTKEKIDFSHRFRSGSRIVRKHRFEGIIPSTERRFKETDSEYIRNELAKLMSESSCDECSGSRLNNYSRNVFINKTQIHKITSMRINDSLKFIKGMNLTGAKKKIAEKILKEIVDRLTFLEDVGLNYLTLDRSAETLSGGEAQRIRLASQIGSGLVGVTYVLDEPSIGLHQRDNAKLIKTLKNLKELGNTVIVVEHDEEAIRSADHIIDIGPGAGVHGGKICAQGDIKAILKNKDSITAKYLSGKREIKVPKKRAKVNSKKITIINAHENNLSNVNIDIPVGLFTCVTGVSGSGKSSLINQTLLPISSFLLNKAKLSKEVKCEKIEGLDHLDKVINIDQSPIGRTPRSNPATYTGLFSHIRDLLSQTVEARSRGYKPGRFSFNVKGGRCEACQGDGMIKVEMHFLADVYVKCDICDGNRYNDQTLEVKFKEKNISDILNMTVEDALEFFDAHPSIKNKLITLNDVGLGYITLGQSALTLSGGEAQRIKLAKELSKRSTGKTLFILDEPTTGLHFADIELLLNVLNRLKDQGNTVVVIEHNLDVIKTADWIIDLGPEGGSDGGRIVAEGTPEEVSKVKESFTGKFLKPILS

SEQ ID NO: 81019 - protein, 303 aa, Unknown
  Bacterial polypetide isolated from the Sargasso Sea
MTKKIIIGSRGSKLALLYAQKAKEQIIKKTTLDTNDIEIKSISTKGDQVKDTRLSDIGGKGLFSTEIEKELENKSIDIAVHALKDMPATETSGLKTDCFLERNDPREILITNDKKKFNDLKLKSIIGTSSFRREFQIKKLRSDLTCKIIRGNVDTRIKKLKDGNYDAIILSYAGIKNLNLENEIAEIFSAQEIIPSAGQGIIALQCREADKEIISILKKVNHEETYKRAHAERNVLKVLEGDCETAIGVYSKVESDTIVVEAELFSIDGSQRFYEKKSGQIDKFKEIGKQIGQNLKMQSNNSY

SEQ ID NO: 81020 - protein, 559 aa, Unknown
  Bacterial polypetide isolated from the Sargasso Sea
MTGGQAAVKSLKKEKVKHVFGLIGSATMEMFDALYHEKKIKFIGVRDERTGTHMADGYARVSNQPGVIIAGQNGPGATNLVTGIAQAKAAFSPVVSIAGLYSTKDKMEDAFQGLDQQSLFDPITKKTWTVKKASHIPATFSDAFNLAMSPRRGPVCINLPRNVLSDTSKFKINENKKSYKAESDLKSKKNLIDRTIKLILNSKKTVIVAGGGIKYNSKFKSVTKLAEFLNIPIVTAAGHGDAIPFSHKLNAGQMGPRGNIVASRLVKEAELIIAIGTRLGFNSTFYSYDNINKNAKIVQIELEKTMIGRYFPVNVGIHGDAALVTDQILAELRKHKKIFNYEEWTNSFLLERSKFLKDRDNIKSKNFPIQPNGLFRELRKVLPKNTAITLDAGTLCLQATDALEYYNPPSLFTPLDFGLVGFSFACGLGIKVAKPNKTVVSLMGDGGFGMTISELSTAVEHGINTITIVMNNKSWGAEKAYQKDFYGERYLGADIQSPPFDEVAKLYGAKGIKVKKLSEVNEAVKSALKVNKPVVIDVDVDPKALYSFRRDSFTHRIKK

SEQ ID NO: 81021 - protein, 307 aa, Unknown
  Bacterial polypetide isolated from the Sargasso Sea
MKSKKIIIGSRGSKLALIYAEIAKNKIFEVKSDFKIENINIKTITTKGDEVQNIRLSDIGGKGLFAKKIEEELLQKKIDIAVHALKDMPSNETEGLITNCFLERNDPREILISRENFFLKDLAKNSIIGTSSFRREFQLKKKRNDLNYKLIRGNVDTRIKKLNDKLYDAIILSYAGIKSLGLDKNISQIFSTSEVIPSAGQGVIALQCRKEDKEIINLLKKVNHESTYHCVQAERNVLKALDGDCETAVGAFAQIDQDKINIEAELFSLDGKERFYHKSSKELNFASQLGKEVGEILKKQSKNSYKK

SEQ ID NO: 81022 - protein, 319 aa, Unknown
  Bacterial polypetide isolated from the Sargasso Sea
MIKKNNLTINEKLYNFVNKVVIPETNLNIDKFWNDFSNIVDEVDPLNKSLIKKRSDLQSKLNDWYKNNKGKEINIAEYKKFLLDIDYLIEEGDDFKIDTKNVDPEIASICGPQLVVPITNARYSLNAINARWGSFYDAIYGTNVLGDLPTTKEYDIKRGERVIKFAKEHLDKIAPLNLSSWNNVKSINFINNKINFDLSTNETTTLLDENQIAGIRANSENQLSELILIVNNLHCRILINRNNAIGKADIAGISDIVLESAISSILDCEDSVATVDANDKVLAYENLLGLMKGNLESTFTKNNKKITRVLNQDIKIKTI

SEQ ID NO: 81023 - protein, 270 aa, Unknown
  Bacterial polypetide isolated from the Sargasso Sea
DKPLVIINESMQFSAGVNLNYVMEFVQKKDLKSVEKFVKYFQETCKHLKYCKHPVVSAPSGLALGGGEEVVMQSNYVVSHTNIVMGLVETIVGLVPAGGGCKELLWRWTQSDQAKRDPDFAPLKVFDIIGYAKTATSPQEANPLLFLDKNHEVIINRNNLLPAARSFIAKNKGLVSPQKCKFRLSGEQVRKKMKKILEELYNSKKILDHGMDVGKELAYVLSGGDTNLDKEVTEDQMYQLELDSFMKLLQTEKTQKRITHTLKTGKPLVN

SEQ ID NO: 81024 - protein, 291 aa, Unknown
  Bacterial polypetide isolated from the Sargasso Sea
MSLNKAFIYIFLRLLSKLSLKSINKLGRVLGSILNLTPNRHKKITLINLRLAFPKLEEEEIIGLCKKSLIETSITLLESGYVWMKLPGSNLPMSIQTRGFEHILKSAKDAQGLIVFTPHQANIEVLINFLGQKIDCSVLYSGIKNKYLNAYVKNARAKMGVKMVKDDISGVKVLLKNLKEGRGVAIASDQVPELSGGELSKFFGQDCLSMTLLSKLHQKTNAKIHSMVCIREENGKGFKLIFSPQLNMPPTTKEGVDTMNKELEKCIMLAPEQYAWEYKKYRRAGNENLYN

SEQ ID NO: 81025 - protein, 208 aa, Unknown
  Bacterial polypetide isolated from the Sargasso Sea
MKFLISAAGTGGHVFPALEFGRECIKSDHEVLWIGTKTGIENRVLPKNIKLLTIPMKGFRGKNLIFKITSLICLIASICKSIFYIQKNNIDYIVCFGGYISLPVGLSAWICRKPLFLHEQNAIMGTSNKILKKFSKIIFLGFSINEPISRKMMIVGNPIQQLKLSSSINLDHEPIRIYVTGGSQGSEFINKNIPIALNELNIPLEVKH

SEQ ID NO: 81026 - protein, 247 aa, Unknown
  Bacterial polypetide isolated from the Sargasso Sea
MKRDKIIIGTRGSKLALIYAEKVTKFLKKVSSTDIEIKKIVTSGDENQNDRLSNIGGKGLFSKKIETELINHKIDIAVHALKDMPTIETESLITNFYLKRNSPNEIFISNNNIKFQDLKPNSIIGTSSYRREYQLQSIRSDLNYKLIRGNVDTRIKKLENGHYDAILLSKAGIEALGLDYKITQEFNTDELIPCAGQGIIAIQCRENDQEIINILEKINDNQSRIIANAERNVLKILEGDCDTAVGV

SEQ ID NO: 81027 - protein, 397 aa, Unknown
  Bacterial polypetide isolated from the Sargasso Sea
MNGIDPIELNLFSSKVSAICDEMGLVLKRAAFSPNIKDRLDYSCAIFDIKGEMLAQADHMPVHLGSMAYAMHSIVRDKDWMQGDLLVLNDPFLGGTHLPDVTVISPIFVDDNRLGGFVVNRAHHANIGCNIPGSMPISSRIEEEGLVIPPTFLFRAGVLQKDSAQLLGIADNALTGDFAAQAGANKIGRIRLEQLIEKIGWTTYQKNIEQLNNFAEEISSAAISKLKPGTYKFIDFLDDDGCGTVNIKLAITMEIISDSVMLDFTDSSTMVQGNLNCPKAVVAAASYYCFRCLMPSYTPACHGLFRNIEIKTCEGSILNAKRPAAVAAGNVETSMRLVDLIFGVLAKASPELIPSAAQGTMNNIAMGLINEDKGSRWDYYETIAGGTGGGPTFKGLD

SEQ ID NO: 81028 - protein, 469 aa, Unknown
  Bacterial polypetide isolated from the Sargasso Sea
HTGEQQTSGGRKGDKPSIALAEQLLEIMPRTGRLKTGTPPRILKASINFKKLEEQAGDNPRPVFSFMSSREDHPKQVSCYIAHTNQRTHQIILDSLKDSPMYTGIIKGVGPRYCPSIEDKVVKFSEKPRHQIFVEPEGLDSEEVYPNGISTSIPEKAQRRFVRSIEGFENAEISQSGYAIEYDYFDPRDLKPTLETKSISGLFFAGQINGTTGYEEAAAQGLVAGINAALKIQNKATWSPKRSEAYLGVLVDDLVTRGTNEPYRMFTSRAEHRLVLREDNADKRLTPLAREMNLISELRWTKYCNKQEKTELEIQRLKDTKITIEQLKNIDSESKKNDSNKTAFELLKRPGVTYEKIVSEIGHRAHYQKNTLEDETIDDLIQTEAKYEGYLKRQKREIENQEKYTNLKLPKNIDYSSLPGLSNEVRQKLAEFEPPTIGHAAQIQGVTPASISVLMVHLKKQQIKRAEGM

SEQ ID NO: 81029 - protein, 351 aa, Unknown
  Bacterial polypetide isolated from the Sargasso Sea
MKFLLVAAKTGGHVFPASVIGEELIKNNHEVIFIGTGSEIEKNAYHNLDSRLYELSMEGFRGTNLIKKLQVLFQTFINIFKVIQIINKEKINAMIGFGGFITVPVGVACWIKRKPIFTHEQNAVIGSANKLLSKISIINFLGFPINGFNKSIYSGNPIRKSFINNGENIINDKNEIRIYITGGSQGSEYINKQLPRIFKDISSNIKIIHQCGKNNFQEVSNIYSLEGIDAEISEFYQNPVEQILWSDFVISRGGALSLSEITSLRRGVVIIPLPTSIDNHQVENAKSIEKIDMGIMHEQKDHINKLQEKIRGIIENKIYLKWKDLENNNHINSSKIIVKQLENYLDKNETL

SEQ ID NO: 81030 - protein, 193 aa, Unknown
  Bacterial polypetide isolated from the Sargasso Sea
MLNHSAKIRLFIDTTLKLNSCIELTTEQSRYLFAVMRLVLRSKILVIDGRTGEYEAEIIDKKAKTGTIKLLSKTRDILYPPDLWLLFAPIRPSRTKIIVEKATELGVTVIKPVITERTNYRDLNMKKMRLIMREALEQCGGTFIPRLDEPKYLGSVLESWPADRSLVYCDEKLAEVDNKVEHRALSVCHSAGI

SEQ ID NO: 81031 - protein, 593 aa, Unknown
  Bacterial polypetide isolated from the Sargasso Sea
MDHPIRSIIVSLIATISVGCGVLSFMIDDDMMKLLPSDLDSKIAWDEIQDEFGSTELIYIAFGEKGKSVFNSKTFADMWDLSKTLEATDQIEEVFSLVNTNRIDNIDDFMEVDDLQTKRDLTQAEVDDIQNYLLKNPSLKKRFISENDEYFVITAQPYTNEEFDVFSKIVVDKSDKILDGYEIHYGGNAYISGIMPGLIRDDAFSLMRFGMLIMIFTLLLNLRSIAGVAMVLMVIVLSLFSMIGAMGWIYYFTGSNKFLFTLANTSMPIILLTIANSDGVHIVSKFFREMRSKKDTRKAVASTMDSLLVPIFVTSVTTISAFLIMTTSPIQPLIGYGISMSIGITWAWFLSSLLLPAVISLKTWNPEDTAFTKPSFFEKLVDKLGSAVLNHPKRVFGTGITIVIIGLFGVTKVTVDVNMRNFFKPGTEIRDSMDFMDNEMNGTVDIRVRVEGDIKDPQTLSSMDELQSFMVKDEQVSTSFSIADVVKQMHRTVMNDDLKYETIPENRGKVNNLFTMYSMSGDPDDFEALVDYEYKIGLITAFADVMSTEQIFSYTNKLNEHINKNFNDDSKIDVTGMIVVFRDLVILIVRSSF

SEQ ID NO: 81032 - protein, 934 aa, Unknown
  Bacterial polypetide isolated from the Sargasso Sea
MNQDKIVIKGAREHNLKNISLEIPKNKFVVITGVSGSGKSTLAFDTIYSEGQRKYVESLSAYARQFLQMMNKPDVDSIDGLSPAISIEQKTTQKNPRSTVGTVTEIYDYLRVLFARVGTPYSPTTGKPIKSQSVGEICDNIINKNKGSKAYILSPIVRDRKGEYKKEIEELKKKGFQRLKVDGIIYEIDEVPKLKKNFKHNIDILVDRLVIKKDIQKRLAESIEVSLMHSDGLVYLENLDSKKITTYSSKFACPVSGFSIEEIEPRLFSFNAPMGACEECDGIGVEKYFDDKKIIPDDSRSILKGAIKPWETKVFGYQKKFFVETVSKILKVYKIDINTPWYKIPPDIQNIILYGDEDNSVKFISDFEGIINFIDRKYSETERWWIQYELEKYLSERNCEVCNGFRLNKKALAVKIAGNHIGEITIKSIDDCLNWFKKLKKNLSDNENKIAEGVIKEIKDRLDFLNKVGLDYLSLSRASKSLSGGESQRIRLASQIGSGLTGVLYVLDEPSIGLHQKDNQQLINTLFKLRDLGNTVIVVEHDEEAIRQADHIIDIGIKAGIHGGEVVADGNLKKILKNNKSLTVQYLKKEKNIEIPKKRRKFNKNKIFTLQKIKTNNLNNLEVKFPLSNFICVTGVSGSGKSSLIIDTLYKRLDEYFNKSLNKDESYFNFRGIKNIDKVIDIDQSPIGRTPRSNPATYTGCFTPIRDWYAGLNESAARGYKPGRFSFNVKGGRCESCEGDGVKKIEMHFLADVYVECDVCKGKRYNRETLEVKYNNKSIADILDMTVEEGYKFFSKIPSIKQKLKTLMEVGLDYIKIGQSATTLSGGEAQRIKLSKELSKRSTGKTLYILDEPTTGLHFDDVNKLLKILHTLVDEGNTVIVIEHNLDVIKTADYIIDLGPHGGIKGGQIIGNGSPEDIANIKKSFTGKFLKKIL

SEQ ID NO: 81033 - protein, 134 aa, Unknown
  Bacterial polypetide isolated from the Sargasso Sea
MDLEKILPTNGPSIEEVKKYIEKYLEEIIVIKCGGSVLLDKNLFKQFIEDVSVIHKLGLSVIVVHGGGKNIKKKLDKLNIKSKFIDGLRVTDETTIKVVEEALLELNSEIINNLKDLQINTESVAPQNKNIITI

SEQ ID NO: 81034 - protein, 301 aa, Unknown
  Bacterial polypetide isolated from the Sargasso Sea
MLTENPEKLILKAANNWSIEITPNASKKIEDFSTILEKNTTVNVTFLPNTHISETIETSKKLFESGMNPVPHVSARAIRDVKELDYFIKNLSETCNVTEVLVIAGSGKKPVGDFHETMQILETGVLQNYNIKNIGVAGHPEGSPDIENDVILDSLKRKYEWSKKNKIPIYIETQFLFDAEIVLSWEKFVRENGINVPIRVGIPGPATIKTLFQFAQSSGVGASMRIIAKQAKNISKLFFVQAPDKFIFDLSKGIHNNRNCLIDNLHFYPFGGFKKTAEWAKALERGNFTLNSNGGFSIHES

SEQ ID NO: 81035 - protein, 114 aa, Unknown
  Bacterial polypetide isolated from the Sargasso Sea
MSDCLFCKIVAGEIPCDKVFENELLIAFRDISPVSPTHILIIPKKHISSLNELSEEDRFLAGEMLLSAKKIAKSEKINLSGYRTVFNTNDDGGQTVFHIHMHLIGGRKMDWPPG

SEQ ID NO: 81036 - protein, 84 aa, Unknown
  Bacterial polypetide isolated from the Sargasso Sea
MTGGQAAIKSLKKEKVKHVFGLIGSATMEMFDALYHEKNIKFIGVRDERTGTHMADGYARASNQPGIILAGQNGPGATNLVTGL

SEQ ID NO: 81037 - protein, 217 aa, Unknown
  Bacterial polypetide isolated from the Sargasso Sea
MSNQFTHSQSFNDFSNVNFSELSDGEIDLFLRRATAQGYTQFDLLKMAKAQGFTQADIENLDKRFKSAQTIARIAESATTPLEETRLRKQWLQNLEVFRETDSDVFGYNVFRGTSFLSFQSNLNLPTPDDYIVGAGDKLFIDIYGQSEAYYQAEISPEGYAILENIGPVNVNGLTIKDARTRLIQRFKRVYNGIDQNKTFINVSVGIPRAIRININW

SEQ ID NO: 81038 - protein, 440 aa, Unknown
  Bacterial polypetide isolated from the Sargasso Sea
MEKIFNKLCEGLFSELESNEALTLSFSGENSQFIRINNASIRQTGLVDDATLGLKFVSNSCTCEGSMTVSGDYEVDLSRGMKELERMRFESNEILEDPFLVMPTNSGSSREIINANGLSFDDAIQALIPSMQGVDLVGIFANGKMYRGNANSLGQKHWFETESHCLDYSLVTPERQMVKGTYAGTDWDQNSYESYIHLSIEKLELMKRKPVRVDTGMYRTWFEPKAVADFIDMFSWNGISEASLQQGCSGFGKMRHNDVRLSPKFTISEDFSSGMVPKFNSNGETGPESLPIISNGVLQNTLVSSRTSAEYGVSSNYAEDTEELRSPSMASGDLTQEDVLSRLDKGLFLSNIHYLNWSDNPGGRITGLTRYACFWVESGEIVAPIETMRFDDTFYRFFGSELESVGSRVEVIPDVLTYGQRNLGVVTCPGILTNQFQLTL

SEQ ID NO: 81039 - protein, 265 aa, Unknown
  Bacterial polypetide isolated from the Sargasso Sea
MIYLISAIVLLGVLIAIHEFGHFIVGRMCNIHIYRFSIGMGPVIYKKLDKHGTEFALSALPLGGYVAFHTEKATEGELDLQQPLTPEQNENTFESKPKWQRALVMLAGPAANFILAIGILSIIFVNSVERQFIPEVSNISSPYLKSNSSLKAGDILTSINEKKVSSLQDIRLELLSLSGTNGSINFNFITGPRASEYTVSVPVENYLSDPDEQNAPENFMGFDLSMKLQPTVGMIAKNTEAAKSELMVNDRILAVNSQSIKSFED

SEQ ID NO: 81040 - protein, 380 aa, Unknown
  Bacterial polypetide isolated from the Sargasso Sea
MKNIYSTFLIILLSLSISKYAYSTNDDDIYKKIDLFSEVLDKINKEYVEDINQSEVMDAAINGVLQSLDPYSAYMSPESFENMQTETSGEFGGLGIEVSMEAGVVKVISPIDGSPADEVGVKAGDYIVKINEHQVQGKTLTEAVDLMRGPVGSDIEITVRRKGVKKAIVFKITREIIKIQSVKSKKINDNIGYIRLTAFNENSSTQIKKKINEFTKDKKIKGYILDLRNNPGGLLSQAIKISDFFLTNGEIVSTKSRKESENRRWFANKGDIINGKVLIVLINYGSASASEIVAGALKDNKRAILLGENTYGKGSVQSIIHLKNNGAIRLTISKYYLPSGKSISEVGITPDIEVAESDDEFRINTEKDNQLNFAIKLLNG

SEQ ID NO: 81041 - protein, 497 aa, Unknown
  Bacterial polypetide isolated from the Sargasso Sea
MLRSKERFINEITHELRTPIQLINGSLEGISKTAHAASKELICVQDNMKRVEQLINQMSQDVPKALAAADYYRSYSPDNIKFIVLSLEPLAKQKRQNLELRIKGKKEISLINDSLEKILANLIQNAIKFTPELGTIKVAAIQDSKVLKVIVSDDGEGIDEHFHKKVFERFTKGSSEHEGHGVGLAMVKTLVELNQGEIALESQKGIGTKVTVTLPIDDIEYVNSHAEKLSPANVKSNKKSLLIVDDSREFRSYLFDLFSSKYRCLVARNGVQALDVMQHYLVDLVITDQMMHEMDGLSLIREIRGNVSYASIPILMLTAETGTELEKSALEEKVDYFLAKPASKEEITLRVEHLLSVREAKEREEEESEEPAFKFGCLKIPEFDNEKDMAFFLNFIAVLEKNYHNESFNRDQAASQLLISPRSLNRRMSELFEYNFSEFLSRFRIEKSIPLLLEGNSILDTCLDVGFGTAAYFSTSFKKVMSLPPKKFVEQYNKTVA

SEQ ID NO: 81042 - protein, 288 aa, Unknown
  Bacterial polypetide isolated from the Sargasso Sea
MTGGQAAVKSLKKEKVKHVFGLIGSATMEMFDALYHEKKIKFIGVRDERTGTHMADGYARASNQPGVIIAGQNGPGATNLVTGIAQAKAAFSPVVSIAGLYSTKDKMEDAFQGLDQQSLFDPITKKTWTVKKASHIPMAFRDAFNLAMSPRRGPVCINLPRNVLSDTAKFKINEYKKSYKTESDLKSKKNSIDRTVKLILNSKKTVIVAGGGIKYNSKFKSVTKLAEFLNIPIVTAAGHGDAIPFSHKLNAGQMGPRGNIVASRLVKEAELIIAIGTRLGFNSTFYSY

SEQ ID NO: 81043 - protein, 186 aa, Unknown
  Bacterial polypetide isolated from the Sargasso Sea
MKILKETKALIDGHFILSSGLHSPRYVQCAQLLSKPQKAFKLCNSLAEKIKESFKDFDLILSPAMGGVIIGYEIGKILNKETIFSERINGNFTLRRGFSIKNNQKVLIVEDVITTGKSSLECSKLIIGSGAEVAGYSCIIDRTNGNSILKEKIVSQIKLNIPTFTKDNLPENLSSIEAIKPGSRNL

SEQ ID NO: 81044 - protein, 520 aa, Unknown
  Bacterial polypetide isolated from the Sargasso Sea
MKIDIFDTTLRDGFQQEGISPSVKDKLAIAKLIDELGVDYIEGGWPGASPKEKEFFDKAKKDLKLENAKLVSFGSTRKLNVKVEDDPQVQALIDSETEYVCIVGKSSNLHITKALETDVDSAILMATDTVKYLKDNGRKVFFDAEHFFDGLKEDSDTTLKILDAVVKEGVDCFIFCDTNGGTLPHEVTDLLTPIVEKYPDQSFGVHFQNDNGCAVTNSLAAVNLGVEHVQGTMNGYGERTGNADLCTLIPNLSLKMDFETVPEESLAKLTPIANHIAELVNIAIDSRHPYVGSSAFTHKAGLHASGMSKDNTLYEHINASQVGNYTRTTVSELAGRASVITKAKEFGIELTNDDAKNLIEQVQDLEYQGFQFEAADGSLYLLMKKIKGEEPSFFDFESFRVYSERRNSENVVSEAVCKISVGEERFVTTGEGVGPVDALNKALKSALNKNYPDVDKIKLTDYKVRIIDSSDGTEARTRVLVEFTDGEINWSTIGVHENIINASWNALCDGFNYYFMESSS

SEQ ID NO: 81045 - protein, 433 aa, Unknown
  Bacterial polypetide isolated from the Sargasso Sea
LRPEQFIFDVLTFTLATGEEEFRDAGKHTLEGIKLVKERFPTSFTTLGLSNISFGLVPQARRVLNSVFLYHAVQNGLDSAIVNAREITPYTEIDEKEKKIVEDLIFNKHPNALSDLITHFENVSQDSSSKTKKVDVDPTWAAGKRANFRIINRLKDGIENDVVSAIAEKLEQQNLVQDNDGILSINAEKEVTHQGAIQTLNDDLLPAMKIVGDKFGAGELILPFVLKSAECMKAAVKELEKYFLKEEGTSKGILVLGTVYGDVHDIGKNLVKTIFENNGYTVHDLGKQVPLQKFVEKINEVKPDAVGLSALLVSTSKQMQFFVEHARKTDVNIPILCGGAAINSNYINRIAKQDGIYEPGMFYCGTMFDGLKTMDKLVSEEKDEFVNNWKDKLSNWKESKVQQVESENLPHSGIKPVSPPTPPKLNEVIRLKP

SEQ ID NO: 81046 - protein, 328 aa, Unknown
  Bacterial polypetide isolated from the Sargasso Sea
MANAIRESSIRGIRDVVVSPDRVTVLYNPLLIDCLRTFEARVHAALTQPQSPPTSGRLHDVPVRYGGESGPDFDAVCRAHAIDTKTLIQLHTEPEYVVTAIGFVPGFPYLEGLPKTLETPRLPTPRRRVPAGSVGIGGSQTGVYPFETPGGWHLIGRTDTTFFDPIHSPPALLQPGDRVRFYETNHVNPTPNHATIAEPRGTTPNYITILEPGLMTTVQDLGRSGFRSSGVPSSGAADRVSAILANSILGNPENAAVLEYTLLGPTVQFKTDCFIAIAGATDNSLATLRPIHVRRGDTLHLGHVAKGCRGYLAVAGGFCVPPVLNSCS

SEQ ID NO: 81047 - protein, 184 aa, Unknown
  Bacterial polypetide isolated from the Sargasso Sea
MSKQITIGSRGSKLALLYAQKTKESIIKNTNLGNKDIFIKKITTKGDQIQDIRLSEVGGKGLFSSNIEKELQDKNIDIAVHALKDLPAIETKGLITDTFLKRNDPREILISTSKKKLKELNLNSIVGTSSYRREFQIKKIRPDVNCKIIRGNVDTRIKKLKEGIYDAIILSYAGIKHLEYENEI

SEQ ID NO: 81048 - protein, 408 aa, Unknown
  Bacterial polypetide isolated from the Sargasso Sea
MKTVHFIRHGETEKNALKVWQGHTDTPLNKKGLQQAKLLSERINSRVTKVFSSDLKRASQTASFLSSSPVLRDNLREINVGDFTGMSVKDTYTSNHEIFQSLQNDSFQFPNGESVQEFKDRVRNELEYIFDQTEEDSETVVVTHGFFIGTAIGLTLGFNTYPFPIGDITNASISTIVKRETVTQVNKFNDSIHLSKENIDFPAKSKDNAITFIRHGQTDSNLEGIWQGHIDNPLNETGIKEASLLKGLFKNYDLYISSPYKRANQTLSLITENNIEISDELTEMNLGQWEGLTTSEILNKYQENFIEALFINHKTKYGIDGESIHEAGKRVENLISDLEKKKLLMASHGGTIKSAITNLIKSPDSKAASAFTIPNNLGVSCMVPKDNKYFLWSYNVGKIGYENISYNK

SEQ ID NO: 81049 - protein, 304 aa, Unknown
  Bacterial polypetide isolated from the Sargasso Sea
MKWLRPDVISMTERVARSGHIGSILWLTGLSDAGKSTLAFELERPLFSLGYSTVVLDWDKLRGSLSSDLVVSKEDSSQGVRRLAARANLFAAIGTIAIVSLISPFAEGRAKARGNASVPFRELFVRATSGGCSRRNPKGFDARVASGAIQRFTEIASPYEPPECQDPIIDTCAAPVTECANHLFDFVCNAVPIRLASPNTRPSKVFVSSLKNQCSFYLAHPAPAQRYTKSPSICTAASSCRTRRRLSARLLISSAASVIGKRRAESLRMSSLQPTTMQKFCSLISVQWRCKKYSNWQSRHWPAC

SEQ ID NO: 81050 - protein, 304 aa, Unknown
  Bacterial polypetide isolated from the Sargasso Sea
MNLFRDLSKKIRVWDSSVGQFEELAAKQLQDVASLPVVEGVRAMPDSHWGLGACVGSVIALKKAVIPAAVGVDIGCGMLACKTSLNSHHLPENLKSLRAKIESHVPHGKTLAKKKSKDHGSWDSQKIPAHVEKQKKKIEGWFDCYRLDCGGISKWLNRRHPITHLGTLGTGNHFIELCLDEKDHVWIMLHSGSRGIGNSVGTHFINKAKEEMGDRLGALPNKDCAYLTNNQKTFKDYCRAVSICQQYAQLNREMMLTSVVEQMGRAFKNFSLTESVIDCHHNYIDFHYAKDLIITRKGAVSAKK

SEQ ID NO: 81051 - protein, 277 aa, Unknown
  Bacterial polypetide isolated from the Sargasso Sea
MTGGQAAIKSLKKEKVKHVFGLIGSATMEMFDALYHEKNIKFIGVRDERTGTHMADGYARASNQPGIILAGQNGPGATNLVTGLAQAKAAFSPVVSIAGSYSTKDKVEDAFQGLDQQSLFKPVTKKTWTVKNAKKIPKTFSDAFKIAMLPRRGPVCINLPRNILADKENFKINNKNQSFDNQNSTKAKSNYIKKAVKIIRNSNKIVIIAGGGIKNSSKFKNVVKLAELLNVPIVTAAGHGDAIPFNHKLNAGQMGPRGNPVATKLVKEAGVIIALGT

SEQ ID NO: 81052 - protein, 269 aa, Unknown
  Bacterial polypetide isolated from the Sargasso Sea
ILIKSITTKGDEVQDIRLSELGGKGLFSSNIEKELLLKNIDIAVHALKDMPANETKGLTTDTFLERNDPREILISNNKKKLKDLDQKSIVGTSSYRREFQIKKIRHDLNCKLIRGNVDTRIRKLNEGMYDAIILSYAGIKFLKFENEISEIFSAEEIIPSAGQGIIALQCRDNDEETISILNKINHEETHKRAHLERNILKVLDGDCETAIGAHSVVDGDKIIVEAELFSLDGKQRFYEKKIGYLNEFKEIGKEIGILLKTKSNNSYKR

SEQ ID NO: 81053 - protein, 153 aa, Unknown
  Bacterial polypetide isolated from the Sargasso Sea
MKKVTLQINGKKVTREISDHITLSGLLRDILNLTGTHIGCDTSQCGACVVHVDGKSIKSCTALAADLDGAKITTIEGLVSNGKLHPMQEAFKKMHGLQCGFCTPGMIMSAVDLLKNKKNPSDQEIRDWLEGNICRCTGYHNIVAAVKEAASKM

SEQ ID NO: 81054 - protein, 201 aa, Unknown
  Bacterial polypetide isolated from the Sargasso Sea
FEIIKIFTEVIIAPDVSDEAKEVFKSKNNLRVLTLSSIQKNNNSQNYKSIEGGILFQSNDEANTTKSDLKVVTEKKPSENEIEDMLFAFKVCKHVKSNAIIYVKNKKTIGIGAGQMSRVDSAKIASQKNSEMEKSEENSLENSVVASDAFFPFADGLLVTISSGAKAVIQPGGSVKDDEVIEAANKAGISMVFTGVRHFRH

SEQ ID NO: 81055 - protein, 1016 aa, Unknown
  Bacterial polypetide isolated from the Sargasso Sea
MQFENYRPRPPQPEPKAKRQRKPRSKGRVWFLFFILIICVAVLIGQEVKTSYFQSKYVHQYAKTLTYELKNQPTQSIIYPSYGPFDERHGYSKLPQYIDRLLQRNFQVTQQVEFSPALQEYAQMGFFPPYHEKAQSGLTLLDCRNTDLYEFAYPKRVYQDDDKIPNEIVNTLLFIENRELWTTEPKLNPVIDWPRFIVAGMSQIAEMVGMNVSTAGGSTLATQIEKFRHSSQGLTLSIKDKLLQIGSATVRVYQQGEITEPARKRIIQDYLNTVPLSSAPNHGEVHGIGDGLWAWFGTDFDTANKLLASPQIKANAVKRGQVFRQVVALMIAQRRPSYYLLQGHEDLENLVDSHIRLLGQYYLIDRQLRDAALAQKLQFKVAKAQRNTQSGADKGVNTIRIRTAGMLNVGLYDLDRLDLTVNSSLHSDLQQQVSHYLRSLGQAATAEKVGLLGERLLEPSQLQNVLYSFTLYEKTETANRVRVQTDSTDQPFDINEGSKLELGSTAKLRVLATYLEIIAEIHDKYSKKHGIELESIEIEPRDHLTRWAIDYLIVNPDRRLDRMLDAALQREYSASPNEQFFTGGGLHVFNNFKKSEDFKVPTMYEALQNSINLPFVRLMRDIVNYSSSMQNEGNMARLLRNDKDPRREEYLRVFADREGNTFVNKFYRKYKKVAPNERLELFFDGQPQAEQQLTAAYRYLQPNESMASFKAFLQQRLPQNNYTDKRIKELYNKYGPEKYNLPDQGYIARVHPLELWVLDYLNQHPEANLNDVKEASKDERQEVYRWLFRTRHKNARDVRVQVMLEVEAFLDIHQRWARLGYPFESMVPSLGSALGSSGDRPAALAELMGIIQNDGYRLPTVRINQLHFAEETPYEVRLENQNTQGERVMRHEVAQALKAALANVVQNGTARRLKGIFTDDNGEMLAIGGKTGTGDNRIVTQMQQGRKVATTAMNRTATFVFYLGDNYFGTLTAFVPGSKSDDFSFTSALPLQVMKGMMPILAPYVKSSKGMCVRDE

SEQ ID NO: 81056 - protein, 212 aa, Unknown
  Bacterial polypetide isolated from the Sargasso Sea
MKKRIIIGSRGSKLALLYAQKAKNKIIQNTNLSEEDIIIKKIITKGDQAQDTRLSEIGGKGLFSSNIEKELQINNIDIAVHALKDMPAIETKGLRTDTFLERNDPREILITKDKIKLKELKSKSIIGTSSYRREFQIKKIRPDFICKLIRGNVDTRIKKLKEGLYDAIILSYAGIKNLKLESEISEIFTTEEIIPSAGQGIIALQKEIVMMK

SEQ ID NO: 81057 - protein, 412 aa, Unknown
  Bacterial polypetide isolated from the Sargasso Sea
MKRLAIPLQGAQMLFVAFGALVLMPLLTGLDTSVALFTAGIGTLLFQLITKRQVPIFLASSFAFIAPILYGVQTWGIPSTMGGIIAAGLVYVLLGALVKVRGTDFIHRLLPPVVVGPVIIIIGLGLAPVAVNMALGKSGDGSLTLVPTNTALIISLASLCTTIAVAIFAKGLLKVMPILAGIVVGYGLSLAFGIVDFAVVTAASWIAIPKFVAPEFNWHAIAFMIPVAIAPAVEHIGDILAISNVTGKDFMKKPGLHRTLTGDGVATIAAAAFGGPPNTTYSEVTGAVTLTRNFDPKIMTWTAITAITLAFVGKLGALMQTIPVPVMGGIMCLLFGSIAAVGLNTLIRNHVDLSEPRNLSIVGVTLVFGIGGMAFGIGSFSLTGISLCGIVAITMNLLLPASKHHERDAASH

SEQ ID NO: 81058 - protein, 81 aa, Unknown
  Bacterial polypetide isolated from the Sargasso Sea
QIKLKDINEKTLHNASSVPVDEIDLLIRTGGDKRISNFLLYQIAYAEIMFIDKYWPDFNKSDFLKCLDNFKNIKRRFGKRK

SEQ ID NO: 81059 - protein, 320 aa, Unknown
  Bacterial polypetide isolated from the Sargasso Sea
GVIHAGVYYDKDSMKAKFCADGNRRMYEYCQKFNVPHINTGKFIVATSANEIPKLEEIFSKAEYNGVEGIERVTGNYVASKEPLVKCIEALFVPSSGIVDQNSLMRSYLGELEESSGNIVFNSQFLRSEIHGEKYCSTVLSDGEEIIIESSAIINAAGLNAENIAYNILPLDEKYIPKTYFAKGNYFETGKDLKIRHLIYPIPNDASLGLHLGLDLGMQVRFGPDVEWVDEIDYEVKKDRQVLFHNDVIKYIPSIKIEDLKAGYSGVRPKLKNKGEGKSDFSIQGEKTHGIKNLVNLFGMESPGLTSSLVIGEYVTNMVS

SEQ ID NO: 81060 - protein, 309 aa, Unknown
  Bacterial polypetide isolated from the Sargasso Sea
RGVFAMPDEIVVSIGCQQALYLIADLLASERTTIGFENPGYPDARNIFENRNARLQPLPVDSGGVRPVEDADLLAQCDYVYVTPSHQCPTTATMPIERRHALLEQAQAHDFVLIEDDYESENNFSGAPHPALKSLDTADRVIYIGSLSKTFAPGLRLGYIVGPRELVRELRALRRLMVRHPAAYIQRAFATFLALGHHDALLRRLAHAYRERAQALMTALDTHLPEARYLPMSGGASCWVEGPPWLDATRLAADAQTHGILIELGRVFFMTGLEQNHCFRMGFSAIKLEKIDEGVRLLAQLVRAQQPEE

SEQ ID NO: 81061 - protein, 186 aa, Unknown
  Bacterial polypetide isolated from the Sargasso Sea
MPRIPNKKRVSSGGILCIIPARGNSKRLPEKNLKNLGNKPLIAWSIDFAVDSEIFDCVLVSTDNPRIAEVALGCGASVPWLRPDHLATDEATTISVVKHALAWYEKECGKPNAIVLLQPTTPLRCISVLREMLDIYNETKNKVKSVVSMSSIDYHPGWTFYESGEGWKPCMDWELGFAPGLRNYQG

SEQ ID NO: 81062 - protein, 270 aa, Unknown
  Bacterial polypetide isolated from the Sargasso Sea
MSTLEIIGEGAFDLLQGQITSDMDKVTDHQICLGALCNIKGRVESSFIVIKKPQTKDTFLLIGDRAVLKETEEILKKYSPFYKLKMRLNDNYKFIAINENFLSDTFPDTDLNLNVQQQGEFLRMHYLKKKYHLLLLNAGYTCFKDFEISNDLNEWERDNIINEDFNIKSGDTNKYTPHELGYHQTNRIDFEKGCYTGQEIVARMHYRAKKLPRLLTKSVGKNETISSEVFDEEGKKIGSLLSTAQELDTTLCLLSMNKNYEDGIITFERS

SEQ ID NO: 81063 - protein, 349 aa, Unknown
  Bacterial polypetide isolated from the Sargasso Sea
MFDALYHEKKIKFIGVRDERTGTHMADGYARASNKPSVILAGQNGPGATNLVTGVAQAKAAFSPVVAIAGSYSTKDKVEDAFQGLDQQSLFKPITKKTWTVKKPKIIPQVISDAFGLAMKPRRGPVCINLPRNILAATENYNINVKKPSFDSESYLKGNKEKITRAAKIISHAKQFVIIAGGGIKYTSKYLEVIKLAELLNTPIVTAAGHGDAIPFNHKLNAGQMGPRGNPVASRLVKEADVILAIGTRLGFNSTFYSYDNINKKAKIIQIEIEKKMLGKYFPVVLGINADAATVTNQIYNEIKKQKIKLDIKNWTNEFSKQRKDYLTDRETNNLGKNFPIQPKGLFKQ

SEQ ID NO: 81064 - protein, 148 aa, Unknown
  Bacterial polypetide isolated from the Sargasso Sea
MTFLKINNLSVDYQMRKETVYAAKNVNIEVNKGEILGLVGESGSGKSTVGNAIINLIDEPGKVSSGSVILGDLNIHENSESIVKYRGNKIGLIFQDPQTSLNPILTVGEQLIETIQTHLKLSKEEAKNKSINLLKEVGIKDAESRFDN

SEQ ID NO: 81065 - protein, 227 aa, Unknown
  Bacterial polypetide isolated from the Sargasso Sea
MTAIILAAGKGERLRPLTTQIPKPLITVAGKTLLQRNIDCLDQSGIKKIIVNGSRMGDQIESFLENHNQSNISFDYINEGEEPLGTAGAIFNIIDKGLINDDHFWVINADIMTNFSFSAIQLNSSVMGHIILVPNPEHNLSGDFCLEGDRVTISGNQRYTFSGISYFSIQCFIQSTQRYFALADLLREQIEKEMITGQLFHGDWLDVGTADRLAEAENICRRRQNNE

SEQ ID NO: 81066 - protein, 180 aa, Unknown
  Bacterial polypetide isolated from the Sargasso Sea
MQPAENLESKIKELWPKDGPSSLEVEKYIKKYSKEKIVIKCGGKVLLDQSLLNNLIEDIVILKKLGLTPIVVHGGGLGIKKKLDEQNIKSKFIMGLRVTDRKMINIVENVMTEFNKKIVDALNKRSCKAKSITIKKNNIIYVEQENKELGYVGKPKKVDSKLLKEIIKEDFVPVIIPNGS

SEQ ID NO: 81067 - protein, 227 aa, Unknown
  Bacterial polypetide isolated from the Sargasso Sea
MTAIILAAGKGERLKPLTALTPKPLIAVSGQTLLERNINCLAESGVKKIIVNGSRMGNQIESFLRNHYEQSNVSIDYISEGDEPLGTAGAIFNIIDEGLLNDDLFWVVNADIITDFPFKRIQLNPETVGHIVLVPNPRHNSSGDFCLEGDRVTISNNERYTFSGISYFSRRCFTQSSQRYFSLAELLNEHIEKRMITGELFQGDWLDVGTMKRLTEAENKLADKRNE

SEQ ID NO: 81068 - protein, 412 aa, Unknown
  Bacterial polypetide isolated from the Sargasso Sea
MKRLAIPLQGAQMLFVAFGALVLMPLLTGLDTSVALFTAGIGTLLFQLITKRQVPIFLASSFAFIAPILYGVQTWGIPSTMGGIIAAGLVYVLLGALVKVRGTDFIHKLLPPVVVGPVIIIIGLGLAPVAVNMALGKSGDGSLTLVPTNTALIISLASLCTTIAVAIFAKGLLKVMPILAGIVVGYGLSLAFGIVDFAVVTAASWIAIPKFVAPEFNWHAIAFMIPVAIAPAVEHIGDILAISNVTGKDFMKKPGLHRTLTGDGVATIAAAAFGGPPNTTYSEVTGAVTLTRNFDPKIMTWTAITAITLAFVGKLGALMQTIPVPVMGGIMCLLFGSIAAVGLNTLIRNHVDLSEPRNLSIVGVTLVFGIGGMAFGIGSFSLTGISLCGIVAITMNLLLPASKHHERDAASH

SEQ ID NO: 81069 - protein, 1016 aa, Unknown
  Bacterial polypetide isolated from the Sargasso Sea
MQFENYRPRPPQPEPKAKRERKPRSKGRAWFLLFILVFCLAILIGQEVKTSYYQSKYIHQYAKTLTYELKNEPTQSIIYPSYGPFDERHGYSKLPQYIDRLLQRNFQVTQQVEFSPALQEYAQIGFFPPYHEKAQSGLTLLDCRNTDLYEFTYPKRVYQDDDKIPNEIVNTLLFIENRELWTTEPKLNPVIDWPRFIVAGMSQIAEMVGMNVSTAGGSTLATQIEKFRHSSQGLTLSIKDKLLQIATATVRVYQQGEITEPARKRIIQDYLNTVPLSSAPNHGEVHGIGDGLWAWFGTDFDTANQLLSSPQIKANTAKRGQVFRQVVALMIAQRRPSYYLLQGHEDLENLVDSHIRLLGQYYLIDRKLRDAALGQKLQFKVAKPQRNTQSGADKGVNTIRIRTAGMLNVGLYDLDRLDLTVNSSLHSELQQQVSNYLRSLGQTSTAEKVGLLGERLLEPSQLQNVLYSFTLYEKTATANRVRVQTDSTDQPFDINEGSKLELGSTAKLRVLATYLEIIAEIHDKYSKKHGIELESIVIEPRDHLTRWAIDYLIVNPDRRLDRMLDAALQREYSASPNEQFFTGGGLHVFNNFKKTEDLKVPTMYQALQDSINLPFVRLMRDIVNYSSSMQNEGNMARLLRNDKDPRREEYLRVFADREGNTFVTKFYRKYKKVAPNERLELFFDGQTQAEQQLTAAYRYLQPNESIAAFKAFLQQRLPQNSYTDKRIKELYNKYGPEKYNLPDQGYIARVHPLELWVLDYLNQHPEANLNDVKEASKDERQEVYRWLFRTRHKNARDVRVQVMLEVEAFLDIHQRWARLGYPFESMVPSLGSALGSSGDRPAALAELMGIIQNDGYRLPTVRINQLHFAEGTPYEVRLENQNTQGERVMRHEVAQALKAALANVVQNGTARRLKGIFTDDNGEMLAIGGKTGTGDNRIVTQMQQGRKVATTAMNRTATFVFYLGDNYFGTLTAFVPGSKSDDFSFTSALPLQVMKGMMPILAPYVKSSKGMCVRDE

SEQ ID NO: 81070 - protein, 449 aa, Unknown
  Bacterial polypetide isolated from the Sargasso Sea
MSARSQLQSKPVADLREIADGLGLEHKGLQKAKLIDLLLEQGDAIGDIADGAEEEVAVVASDNDMPSVVNSGDSQIKEGETREGILDILPEGYGFLRCSGYKPSEMDVYVPAGAIKKFRMRKGDLVTGPIRAPRAKEKYPALVEPKTVNGADPELLARRVDFDKLTPLFPDERLKLEIDGEPERLVGRIVDLIAPIGKGQRGLIVSPPKAGKTTILKEIANSITANNPEVYLMVVLVDERPEEVTDMQRSVDGEVVFSTFDRPPDEHTQVSKLAIERAKRLVEEGKDVVILLDSITRLARAHNLATPASGRILSGGVDSTALTPPKQFFGAARNIEGGGSLTILGTALVETGSKMDEVIFEEFKGTGNMELRLDRQLADKRVFPAIDVTPSGTREEQRLVSPKELESLWTLRRVLVGLEGGAATELLIDRLKTLKSNDAFLKDVAKTNK

SEQ ID NO: 81071 - protein, 305 aa, Unknown
  Bacterial polypetide isolated from the Sargasso Sea
MRKKIIIGSRGSKLALLYAQQAKDKIIENTDLGNEDILIKSITTKGDEVQDIRLSELGGKGLFSSNIEKELQLKNIDIAVHALKDMPANETKGLTTDSFLERNDPREILITKNKKKLKDLDQKSIVGTSSYRREFQIKKIRQDLNCKLIRGNVDTRIRKLNEGMYDAIILSYAGIKFLKFENEISEIFSAEEIIPSAGQGVIALQCRENDDETISILNKINHEETHKRAHLERNILKVLDGDCETAIGAHSVIDGDKIIVEAELFSLDGKQRFYEKKVGNLNEFKEIGKEIGILLKSKSNNSYKR

SEQ ID NO: 81072 - protein, 427 aa, Unknown
  Bacterial polypetide isolated from the Sargasso Sea
IDEADNPSGGPMWVVERNFSGKKGFMKIIGKLLAGTFCFALIINTITAGNMFQAWNVANLTQAYFGVPTLVTGAILALIVGSVIIGGIKRIGAVTSKLVPIMLIIYVIACIYVLAINFTAIPEMLRLIVSAAFSPMESSNAFLGGTAGAAFIFGMQRALFSNEAGQGSSAIAHSAAKTDEPVREGVVAGLEPFIDTIVVCTMSALVILVTGIWNRPAEVQLSDLSVNQSGQNWSIDGTIGDAPTLSSGDKVFMIYSGSKNAESGNALHKVYGTVVIDGTQASIKWDEINSNKQPETNGEVYLDYVGANLTAAAFDKVSDGLGKWLVTLASWLFAISTMISWSYYGEKGVSFLLGEKAILTYKLAFCILAVLSTTGFIQTDRELNLFANLGTGLCIMANLPILWLFGYQAIKDYKDYISKLKSGEFGQ

SEQ ID NO: 81073 - protein, 318 aa, Unknown
  Bacterial polypetide isolated from the Sargasso Sea
FEGGYHGRTLGASSITSSYRYRRRYGHFGERAMFIPFPYPFRRPKGMTPDEYSDHCVWQFERLFESEYNGVWDPKVGQAEYAAFYVEPIQGTGGYVIPPRNFFTGLKRVLDKYGILMVVDEIQMGFWRTGKLWSIEHFGVTPDVLVFGKALTNGLNPLSGLWAREELINPTVFPPGSTHSTFNSNPLGTRLGLEVLKLGKEMDYERTVPEKGAYFLDGLRGLQKRHPEIGDVDGLGLALRAEICQTDGYTPNKELLDRMVDIGLAGDLLHDGKRMGLVLDVGGWYKNVITFAPSLDISYEEIDLAITLLDQALTKAKG

SEQ ID NO: 81074 - protein, 305 aa, Unknown
  Bacterial polypetide isolated from the Sargasso Sea
MDRKIFIGSRGSKLAMLYAKKAKDQIVKSSDLGDEDVVIKKITTKGDEIQDVRLSEVGGKGLFSSNIEKELQDKNIDIAVHALKDMPAFETQGLKTDVFLERNDPREILITKDKQKLNELKKNSIIGTSSFRREYQIKKIRSDLECKLIRGNVDTRIKKLKDGTYDAIILSYAGIKFLNFDSEISEIFSPEKIIPSAGQGIIALQCREDDKEIISVLKRINHNETFMRAHVERNILKVLEGDCETAVGAHSIIKDDKVIVEAELFSLDGSKRYYEKKTGKVEDFSQIGEEVGQILKTKSNNSYKR

SEQ ID NO: 81075 - protein, 51 aa, Unknown
  Bacterial polypetide isolated from the Sargasso Sea
IKSIFTDDILKTGTDIILGNTYHLFLRPGVEILNKFGGLHKYMNLEETNSY

SEQ ID NO: 81076 - protein, 294 aa, Unknown
  Bacterial polypetide isolated from the Sargasso Sea
MARRVDFDKLTPLFPDERLKLEIDGEPERLVGRIVDLIAPIGKGQRGLIVSPPKAGKTTILKEIANSITANNPEVYLMVVLVDERPEEVTDMQRSVDGEVVFSTFDRPPDEHTQVSKLAIERAKRLVEEGKDVVILLDSITRLARAHNLATPASGRILSGGVDSTALTPPKQFFGAARNIEGGGSLTILGTALVETGSKMDEVIFEEFKGTGNMELRLDRQLADKRVFPAIDVTPSGTREEQRLVSPKELESLWTLRRVLVGLEGGAATELLIDRLKTLKSNDAFLKDVAKTNK

SEQ ID NO: 81077 - protein, 1071 aa, Unknown
  Bacterial polypetide isolated from the Sargasso Sea
SQKILKDKDVDEVLAKTNPYREWLKKNSKHLEANLHEYAGPQMREISEKYFNDSARTFCLSKEEINLLEKYSVEGGEPTGSMGDDTPLAPISEFVRSPYDHCRQKFAQVTNPPIDSLREKYVMSLETCIGPELDIFEETSEHANRIVVNSPILSHKKFNLLIKNKKFKVKRFLIEYEREDSLEESLIKLCEDVLASVKESYSIIVLDEKQTSFNKPVIPALLATSAIHNYLIKNNERVSCNIIVNTASARDTHQIACLIGFGATCVHPWLGLQTVLKIGKQRELDSPGNELCASYRKSLNNGLLKIMSKMGISNISSYRGAGLFEVVGFSEKINKVCFPKNETLIFGDCFKDIERKSLEVIDSDKDSKILPKGLHKFVHGGEEHAYQPGVVIELQNSLKEGSYEKFKNFSEIINERKPLAVRDFFELKKNEKTIDLEEVEPVESILKRFDSAGMSLGSLSPLAHETLAAAMNGLGCRSNSGEGGEDRKRFGTNLMSKIKQVASGRFGVTPHYLVNAEVLQIKIAQGAKPGEGGQLPGAKVDSYIAKLRHSKPGITLISPPPHHDIYSIEDLAQLIYDLKQVNHKALVSVKLVSEPGVGIVAAGVVKANADFITISGHDGGTGASPISSIRYAGSPWETGLFETQNILLQSNLRSRVKLQTDGGLKTGLDVIKAAIFGADSFGFGTAPMIAMGCKYLRICHLNNCATGVATQQLRIINDHFLGEVEKVQNYFIFVAKEIREILAALGYKSIEEIIGKSDLLELKKEHYERSTKMGLDKLLFRFRPNKSQLNTKAQNNINKSLNDESLSNLISEKISKNIEKGKGGAFSFKISNTHRSIGAEVSGMISRAHSEKGMPERLILNFKGTAGQSFGCWNAKGLELNLKGLANDYVGKGMNGGKIVITKEKHLKDDRSVLLGNTCLFGATGGEFYANGVAGERFAVRNSGAKAIIEGAGDHCCEYMTGGEVIVLGSVGNNFGAGMTGGFAYVFDEDRSFVDRCNKDLISFNRITSQEMEAHRSYLKDRIFQFIKETDSNVGKTILEDFDRYKSLFWIITPYAENLEKIIKNTREEAA

SEQ ID NO: 81078 - protein, 292 aa, Unknown
  Bacterial polypetide isolated from the Sargasso Sea
MTGGQAAVKSLKKEKVKHVFGLIGSATMEMFDALYHEKKIKFIGVRDERTGTHMADGYARASNQPGVIIAGQNGPGATNLVTGIAQAKAAFSPVVSIAGLYSTKDKMEDAFQGLDQQSLFNPITKKTWTVKKASHIPKTFSDAFNLAMSPRRGPVCINLPRNVLSDTSKFKINENKKSFKSESNLKSKKNLIQKTTKLILNSKKTVIVAGGGIKYNSKFKSVTDLAEYLNVPIVTAAGHGDAIPFSHKLNAGQMGPRGNLVASRLVKEAELIIALGTRLGFNSTFYSYDNIN

SEQ ID NO: 81079 - protein, 307 aa, Unknown
  Bacterial polypetide isolated from the Sargasso Sea
MKSKKIIIGSRGSKLALIYAEKAKENILKISKEFNIGSVEIKKITTAGDINQKDRLSELGGKGLFSKNIEKELLENKIDIAVHALKDMPSDETEGLLTNCFLGRNDPREVLISKNKIKFKDLNQNSIIGTSSFRREFQLKNKRKDLNYKLIRGNVDTRIKKLSENLYDAIVLSYAGINFLNLNQNISEIFSTEEIIPSAGQGVIALQCKSDDLHIKNILKKINDEKTFNGVQAERNVLRVLEGDCETAVGAISMIKNKNITLEAELFSLDGKERFYCKSSKDIKYAAELGIEVGENLKKQSKGSYKK

SEQ ID NO: 81080 - protein, 428 aa, Unknown
  Bacterial polypetide isolated from the Sargasso Sea
MKESTGYPDSYYYHTANNLKKRPSLSGSHDTDICVVGAGYTGLLTALNLSERGYDVTILEANKLAWGASGRNGGQVGSGHNKKIHELEKDYGKTMANELWQLSEYGKSIVKTRIEKHEIDCDLKVGNATVSNDRSDDHHHKEYVEKLNADYDYNLIRYMSPEEVEEMFHSPFFDGGGSLDMGGMHLHPLNYALGLAKAAEESGVKIFEDSRVINYSNESPCIVKTNEGEVRSRHVVLACNGYLDNLEKKLAVKIMPINNFIIATEPMSEEEVRYINRDDICAHDNKFHVHYFRISQDNRLLFGGGENYTRNFPKDLKSYVRKAMLEVYPHLHDKTIDYAWGGRVGVTVNRMPHVGRLHANVYFAHGYSGHGVAMASLAGTVLAEAIDGSVSNLDIFSKIKIPTFPGGTLLRWPGFYLGMLYYALRDRL

SEQ ID NO: 81081 - protein, 305 aa, Unknown
  Bacterial polypetide isolated from the Sargasso Sea
MNKKITIGSRGSKLALIYAKIAKEKIVQNTFLNEEDVLIKEITTKGDQVHDVRLSELGGKGLFSKNIENELQDKKIDIAVHALKDLPVIETKGLITDVFLERNDPREILITSNKKKLKELKPNSIIGTSSFRREFQIKNIRKDLICKLIRGNVDTRIKKLNDGLYDAIILSYAGIESLKLNNLISEIFSVGNLIPSAGQGIISLQCRQDDDDIISILKKTNHNETYQKANAERNVLKVLEGDCETAVGAHAIVEGNKIILEAELFSLDGKQRFYEKKSSEIENAKELGKEVGQILKTKSNNSYKK

SEQ ID NO: 81082 - protein, 386 aa, Unknown
  Bacterial polypetide isolated from the Sargasso Sea
LIINTITAENMFQAWNVANLTQAYFGVPTLVTGAILALIVGSVIIGGIKRIGAVTSKLVPIMLIIYVIACIYVLAINFTAIPEMLRLIVSAAFSPMESSNAFLGGTAGAAFIFGMQRALFSNEAGQGSSAIAHSAAKTDEPVREGVVAGLEPFIDTIVVCTMSALVILVTGIWNRPAEVQLSNLSVNQSGQNWSIDGTIGDAPTLSSGDKVFMIYSGSKNAESGNALNKVYGTVVTDGTQTSIKWNEITSNKQPETNGEVYLDYVGANLTAAAFDKVSDGLGKWLVTLASWLFAISTMISWSYYGEKGVSFLLGEKAILTYKLAFCILAVLSTTGFIQTDRELNLFANLGTGLCIMANLPILWLFGYQAIKDYKDYISKLKAGEFG

SEQ ID NO: 81083 - protein, 445 aa, Unknown
  Bacterial polypetide isolated from the Sargasso Sea
MSARTQLQSKPVADLRAIAEGLGLEYKGLQKAKLIDLLIEQGDAVLEAEVPKSKPKEDDDLPSVVNSGDSQIKKGETRVGFLDILPEGYGFLRCDGYKPSEMDVYVPAGIVKKFRMRKGDSVEGPIRAPRAKEKYPALVEPTTVNGADPELLARRVEFDKLTPLFPDERLKLEIDGEPDKIVGRIVDLIAPIGKGQRGLIVSPPKAGKTTILKELANSITANNPEVHLMVVLVDERPEEVTDMQRSVDGEVVFSTFDRPPEEHTQVSKLAIERAKRLVEEGKDVVILLDSITRLARAHNLATPASGRILSGGVDSTALTPPKQFFGAARNIEGGGSLTILGTALVETGSKMDEVIFEEFKGTGNMELRLDRGLADKRVFPAIDVTPSGTREEQRLVSPKELESLWTLRRVLVGLEGGAATELLIDRMKTLKSNEAFLKDISKAKK

SEQ ID NO: 81084 - protein, 188 aa, Unknown
  Bacterial polypetide isolated from the Sargasso Sea
MGIRLIIMGPPGVGKGTQAKIIKEIYSIPHLSTGQILRNEIELESEVGMIAKNFIDDGLFVADEILIKIIENNISNPTCSNGYILDGYPRNLEQVRNLNELLTKLNHTIDFAVSLIADENELIKRLTKRSKDSGRRDDTVEIVTKRQKIYWEQTAPIIQYYKDLGILKEVNGIGTIEEISQNIIKAIT

SEQ ID NO: 81085 - protein, 303 aa, Unknown
  Bacterial polypetide isolated from the Sargasso Sea
MKKDKIVIGSRGSKLALIYAEKVKLELEKEFSNKIEIKKIVTSGDKNQKDRLSNLGGKGLFCTKIENELINNEIDIAVHALKDMPSIETKGLTTNFFLKRNSPNEILISKGNIKFEDLQSNSIIGTSSYRREFQLKQKRSDLNYKLIRGNVDTRIKKLENGEYDAILLSKAGIDALGFNEKISQEFDVDELIPCAGQGIIAIQCRDNDNEMKDILEKINNKESRILANAEREVLKILEGDCDTAIGVYAKIENEKINLKTELFSVDGNERYFVNESGEKESFLNLSKSIGEQLKSKSKGSYKK

SEQ ID NO: 81086 - protein, 302 aa, Unknown
  Bacterial polypetide isolated from the Sargasso Sea
MKSKKIIIGSRGSKLALIYAERARKKLSEFCSNVEIKKITTTGDINQKDRLSEIGGKGLFSKQIENDLLDKKIDIAVHALKDMPSKETKGLLTNCFLERNDPREVLISLNNNHIKDLKPNSIIGTSSYRREFQLKKIRKDINYKLIRGNVDTRLNKLNERLYDAIILSYAGIKSLKLDQKVSQIFSTKEIIPSVGQGVVALQCREDDFETIKLLEKINHKLTNISVIAERQLLKILEGDCETAVGAIANIEDKNINLEAELFSVDGKQRFYHNATKNINFAFELGTEVGEILKKESKNSYKR

SEQ ID NO: 81087 - protein, 305 aa, Unknown
  Bacterial polypetide isolated from the Sargasso Sea
MNKRITIGSRGSKLALLYAQKAKDKIIENTNLVDGDIIIKSITTKGDQIQDSRLSDVGGKGLFSSNIEKELKNNSIDIAVHALKDMPAIETDGLITDTFLERNDPREILITNNKKKLKELNLKSTIGTSSYRREFQIKKIRPDIKCKLIRGNVDTRIKKLKEGIYDAIILSYAGIKYLNYENEISEIFSAEEIIPSAGQGIIALQCRDEDKDTVSILEKINHLETYKRAHAERNILKILEGDCETAIGAHSKINGDQITLEAELFSLDGSLRFHEKKTAKIDEYKKIGTEIGKILKQKSKNSYKI

SEQ ID NO: 81088 - protein, 255 aa, Unknown
  Bacterial polypetide isolated from the Sargasso Sea
MAYSDNGGELFSKSNIVKNKVCPCCSTDICSKTTGETFVQYRNVIGNYGEPNYRDIVVSKSDDHGMIWQPPTLVGDDGYETNGCAHTVSSMALDSNGYLHATWYTGGRSNAEGPGLYYAVSKDDAETWSYPTKVFGETFFPPAHIKITIGSDDVPRLAWSDRTVTGGEVYTAAIDPKTNALQGMQKVGSGDNAWISSVGGITAMTWNSSSVWWDTDNLDEDGVYEKWKDGDYTGGNIKDKQTEGEIFVRIWDDRL

SEQ ID NO: 81089 - protein, 370 aa, Unknown
  Bacterial polypetide isolated from the Sargasso Sea
MADARKEWLRGYDPNVFVNHSSSQITYTDFVDRELIHFSNADNVRSIPSMVDGLKPGQRKILFSCFKRGKSIIKNEIKVAQLAGYVSEHSAYHHGEASLAGTIVGMAQTFVGSNNIALLHPAGQFGTRLLGGKDAASPRYIFTKLPSLTRLIFHPDDDGLLDYLEDDGQAIEPKYYVPVLPMVLINGAEGIGTGWSSSVPNYNPRDVVDNLKAMMKGEQIEPMHPWYRGFTGTIAPSNEASTAFTTYGNVAKLDDETVLVSELPIRKWTQDYKDGVLEPLLGNVADPKEKEKIVPLLNDIREHHTDTTVSFSLKFAGGAKALSEHEEAGTLHKTLKLSSSLATTNMTLFDAHGRILKHESPEDILTSFYS

SEQ ID NO: 81090 - protein, 227 aa, Unknown
  Bacterial polypetide isolated from the Sargasso Sea
MTAIILAAGKGERLKPLTTQTPKPLITVAGKTLLQRNIDCLDQSGIKKIIVNGSRMGDQIESFLENHNQSNISFDYINEGEEPLGTAGAIFNIIDKGLINDDHFWVINADIMTNFSFSAIQLNSSVMGHIILVPNPEHNLSGDFCLEGDRVTISGNQRYTFSGISYFSIQCFIQSTQRYFALADLLREHIEKEMITGQLFHGDWLDVGTADRLAEAENICRRRQNNE

SEQ ID NO: 81091 - protein, 200 aa, Unknown
  Bacterial polypetide isolated from the Sargasso Sea
MTGGQLAVKSLKKEKIKHVFGLIGSATMEIFDALYHEKNIKFIGVRDERTGTHMADGYARASNQPSVIIAGQNGPGATNLVTGLAQAKAAFSPVVSLAGLYSTKDKMEDAFQGLNQQALFEPVTKKTFTVKKTNKISKTLSKAFEIAMSPKRGPVCVNLPRNILANKTYSKININKKSYLSLSNDKGKISSIKNSCKLVN

SEQ ID NO: 81092 - protein, 181 aa, Unknown
  Bacterial polypetide isolated from the Sargasso Sea
YSGHSDVMGGSLAVNKRVFKYVEKANKITGLRLGPDDAYLIIRGLRTLDVRLDRHEQNAKKVASFLSRHKKVKLLYPFKKGSHNYKMWKKYYSGASGLMGLKIKAKNKNSINKFVNSLKLFGYGYSWGGFESLALHQEFRELGNRSFLKLEKNEHLVRLHIGLEDPKDLINDLERSLRFIR

SEQ ID NO: 81093 - protein, 324 aa, Unknown
  Bacterial polypetide isolated from the Sargasso Sea
PNGISTSIPEQAQRRFVRSIEGFESAEISQPGYAIEYDYFDPRDLKPTLETKSISGLFFAGQINGTTGYEEAAAQGLVAGINAALKIQNKAAWSPKRSEAYLGVLVDDLVTRGTNEPYRMFTSRAEHRLVLREDNADKRLTPLAREMNLISETRWIKHCNKQEKTELEIQRLKDTKITIEQLKNIDSESKKNDSNKTAFELLKRPGVTYEKIVSEIGHRAHYQKNTLEDETIDDLIQTEAKYEGYLKRQKREIENQEKYTNLKLPKNIDYSSLPGLSNEVRQKLAEFEPPTIGHAAQIQGVTPASISVLMVHLKKQQIKRAEGM

SEQ ID NO: 81094 - protein, 537 aa, Unknown
  Bacterial polypetide isolated from the Sargasso Sea
MNYGFVIDNRMCIGCHACTVACKSEHDIPIGVNRTHVKYIEKGQFPNSSREFSVHRCNHCHDAPCVEICPTTALYDRADGIVDFDSDRCIGCKSCMQACPYDALYIDPDTHTAAKCNYCAHKVDHGYEPACVVVCPVEAIISGDLDDPNSNISHLVKNEETMTRKPEKQTIPNLYYINGSNEMLDPTATERTSDYLWSEQSKGVGHFAKYAEERVAESNTENLLVQLAMENSSKLNKPIDRRAIDDVAKEINNEIDNKEVKRTYDTPSKGVLWGWEVSTYVWTKAIATGTFLMLSFYSLFFGSIDNSIEINGMLISLIFMAITGGLLVMDLDRPDRFLYVLLRPQWKSWLVRGAYIITAFGGIVSLKLIDTMFELGMGFLWYVGAIFSILGAIYTAFLFAQARARDLWQSKWTSAFHMLIHAIMAGTIVIIFIDKSSLNTFSDILMWCIIINLIIITKEIFFPHHTTDIDQTITLMTKGYYARYFWTGIIIGNLIPFLMLLIFPDTIICLIAGSLVMLGILLTELVRIRTPQMIPLS

SEQ ID NO: 81095 - protein, 395 aa, Unknown
  Bacterial polypetide isolated from the Sargasso Sea
MPIPFDIILNASALVVLITFVYLKVSWKESIIVQREEIFNDKQSLFGKLFGFLILFLLVAPGAISNESAKTSIAPLMLWVFLWIGVPVLGLLFGDIYAKFNPLNLFTVSSNKPQSVYFACVLFIGLTWFELVWRKPGNPLNIGVVFILLFISVNLLRYFLKKSLIEVDPLLLLHYLYSKLKLFNSRPYFRSLLDNIGNLARLRGIEYFVLLMIGTVTYDGLRETTFWYEQFGPRINDMGFSTMMFFLMNLATILFYRFACFFAIKIGGSDLELNKVSNLFGHTMLPIAFAYHVTHYLTLLLFESQTFFFRLNDPIGTGLNLFNAQEPSINYFVEPIVIWSVQVGVTLLGHMLSVILAHDLAVKLFGHQQSDKTQYIFLFITVALTLQALFVLSVG

SEQ ID NO: 81096 - protein, 495 aa, Unknown
  Bacterial polypetide isolated from the Sargasso Sea
MEELTPLSDFTPDAGGIFAGGYYGDVDFPAAYDTSYLDSDGYYAEIQIVSDLDGPFNFQAGANYGEGEAHTIYDVYFNGGDVASLFPALQGLRLWPGHFRNESKPAKTETIGIYIDGTYEVSEDVSISVGVRHNDVTKTVRDRSLLLNSIILAGGTAPGVPVFATVQTSDPNLFGILTGQTGPAQNTLADFPALGEQRATYGLPTEITEEEVTGRVVVNWTPDLEFTDSTLVYGSYSKGYGPGMFNPIVNPAQYPGVPTESDGEMIDAFEIGTKNILLDGTLLANLSAFHYEYDGMQTTKITNRTAVNVNLDAEMTGFEVELQWKVAAVPGLTVEFNGSVLDTKYASGTTDINPTNKGNNDPSLWQLRCIDSWGTMAFPKMGLLAGIGGGILNLDPTAGALDMIAAPKTLSVDGFTSADPSGTVNPLIQIGGMGALPTIGHCANIDGKLTAAGLMAEDGTLGISKPIDISGNPLPYSPEVSYSVALQYGYTYQPQ

SEQ ID NO: 81097 - protein, 589 aa, Unknown
  Bacterial polypetide isolated from the Sargasso Sea
NVKKNIKQRLSESIETALTLSDGLIYVQNLENDKIEIYSSKFACPVSGFTIEEIEPRLFSFNAPQGACEECDGLGIEKYFDERKIIPDETRSINQGAIKPWETKVFGRQRRFFIETINKILKNYNISINTTWEKIPLKIKNIILDGDKKNEIKNLDNFEGIINYIDRKYNETERWWVQYELEKYLSERDCEICEGFRLNKKPLSIKINNVHIGEVTKKSIKECLDWFENLSKKLNKNQLTIAKTIIREIYERLNFLNKVGLDYISLSRASKTLSGGESQRIRLASQIGSGLTGVLYVLDEPSIGLHQKDNRQLIETLFRLRDLGNTVIVVEHDEEAIKNADHIIDIGIGAGIHGGEVIAEGPIQNITKNKKSLTGQYINKQKNIIVPKIRRKKDKNKILQIHKANLNNLKNLSVSFPLSNFICVTGVSGSGKSSLVIDTLYQRLDEYFNKSLNKEEKNFNISGVKNIDKIIDIDQSPIGRTPRSNPATYTGCFTPIREWYTTLNESQIRGYKPGRFSFNVKGGRCESCEGDGVKKIEMHFLADVYVECDVCKGSRYNRETLEVKYKEKSISDVLNMTVEEGYKFFYKIP

SEQ ID NO: 81098 - protein, 503 aa, Unknown
  Bacterial polypetide isolated from the Sargasso Sea
MIIPRVTQPYEPGLPALGDDLENYLVTGGGSLTLKLEPDDKFKIINLEGHQQAEIVCFNSKRECNLSALGLNNEHNGQLTKKILSSEEESAQIARTKLKKLGYELESINQSILVFSQNSLSGSIEEFKTNDSIVCIISAPGESEITHENIPASELRVIVQRNKKREEGEFLLPDPLMDPVEEIFVKRYTAMAYEVKEGDFIQIIDVYGRQCSDFMAFDSESLQKGQELSIDTTNSRYLMGSAFPMPGLHSKYYDENQMPMVEVYRDTVGRHDTFGTACTSKFYDDIGYFGHPNCSDNFNYVLDKFTVRKRLGWNAINLFYNTAIDANNALIFDEPWSRPGDYVMFKALKNLVCVSSACPDDVDAANGWNPTDIFVRVYRPNRPFSKGMAFRMKADSEPKLTKETGFHPRVSKLTENIVEYKGFWLASNYNNHGAHQEYEACRERAIIMDLSALRKFEVRGPDAEELLQMTCTRNIRKLSVGQVVYTAMCYEHGGMLDDGTVFK

SEQ ID NO: 81099 - protein, 549 aa, Unknown
  Bacterial polypetide isolated from the Sargasso Sea
LKKEKVKYVFGLIGSATMEMFDALYHEKNIRFIGVRDERTGTHMADGYARASNRPGIILAGQNGPGATNLVTGLAQAKAAFSPVVSIAGSYSTKDKMEDAFQGLDQQSLFKPVTKKTWTVKNTKKIPKTFSDAFNLAMSPRRGPVCINLPRNILAKKENFKINEKIQSFDNQNSTKAKSYYIKKAVQIIKNSSKTVIIAGAGIKYSLKYKNVVKLAELLNVPIVTAAGHGDAIPFNHKLNAGQMGPRGNLVASKLVKNANVIIALGTRLGFNSTFYSYENINKKAKIIQIELEKRMIGRYFPVAVGIYGDAATIAEQLYKEIKKQNIILDVQKWTNNYLNERKNFLLERDKFAQKNFPIQPKSLFKQLRQVLPKNSAITLDAGTLCLQATDALEYYDPPSLFTPLDFGLVGFSFACGLGVKIAKPKKKVISLMGDGGFGMTISELSTAVEYKINTITIVLNNKSWGAEKAYQKDFYGKRYLGADISSPPFDKVAELYGAKGFKVKKVSEINQAVREALKINKPVVIDVDVDPKALYSFRRDSFKHKSKK

SEQ ID NO: 81100 - protein, 416 aa, Unknown
  Bacterial polypetide isolated from the Sargasso Sea
SIPEIVCYEKQEDWGGLWNYSWRTGSDQYGDPVPNSMYRYLWSNGPKECLEFADYSFDEHFKQPIPSFPPREVLYNYILGRAKNGNLKKYIKLSTTVTNVNFNGSQFELTSINKKENKIIKEIFDYVVVSTGHFSVPYIPEYEGMKSFPGRILHGHDFRDAEEFRNKDVVVLGSSYSAEDIALQCYKYGAKSVTIGYRNNPMGFKWPNGMKEVHYLDRLEGSKAIFKDGHEQNADAIILCSGYLHHFPFLDDSLKLKTGNRLYPPKLFKGVVWQDNHQLMYLGMQDQFHTFNMFDCQAWYARDVIMGKIKLPSDAEIEADIKKWVAEEESLADPIQMIDFQTEYTKELHAASDYPAIDFELMRKHFKEWEHHKEEDILTYRNRSFSSPVTGTVAPIHHTPWAEAMDDSMDTFMKSK

SEQ ID NO: 81101 - protein, 571 aa, Unknown
  Bacterial polypetide isolated from the Sargasso Sea
GRGAKPKIGLVGYNVSNLRIPNFLRSWEKAEHKPSRIASPLDIMIEAPIGAAAFNNEFGRPATLGYFRCFETDFKNNKAFGYHKPIMLAGGIGEVRDANNFKLQIEEDYLVVVLGGPAMLIGLGGGAASSVSSGDSDEDLDFASVQRDNAEMERRCQEVINRCSSQDNSLIEFIHDVGAGGLSNAIPELAKDSNLGVFIELSKIPNSDKSMSPMEIWSNESQERYVLAIHKNNKESFEKICKRERCEYAIVGHTTKEMSVKLYDAENENYPVDVPLSMLFGDLPITEMEVFEEVAAEIHEDNSEEFGLDSSITKILQHPTVASKSFLITIGDRSVGGMVARDQFVGPFQVPVSDYSLSLRSFTSNKGEAVTIGEKPTIALVNPEASMRMALGEALTNMSGVVITGLNNVQVSANWMAASGENSDDLALRSGVEALSKIAIDLKVSIPVGKDSLSMRTKWSEKSRDFEVSSPLSGIVTAMAPVEDVTDSVTPELNLNENTCLLLVKLEDENRLAGSIFSEVTQSTYKQTPDIENIDKFKNLFNTIQNLVKNKKILAMHDISDGGLITTLLEM

SEQ ID NO: 81102 - protein, 840 aa, Unknown
  Bacterial polypetide isolated from the Sargasso Sea
FDIERIEVLRGPQGTLYGSTATGGVVNINFKQPVMGEIEGSGEISLGNYNHEVMKVALNIPMGDNVALRVSGMSQARDGFTTNNVTGNDIDGRNMDQFRAILKANLSEDTNITLTAFRLAENSTRARAGRTMCHATETPNWGCHPNKIGYDGAPLGASGLNGITLALSGLLGFSPLDYTKSNAVVGERTVNMWRDPTYVTKEEGFSLKLETKINDDYLVAVRAAKYTNYVMSQQDYSNSGTDTKLSPFNPAFPGGVTPLSDFTPDAGGIFAGGYYGDVDFPAAYDTSYLDSDGYYAEIQIVSDLDGPFNFQAGANYGEGEAHTIYDVYFNGGDVASLFPALQGIRLWPGHFRNESKPAKTETIGLYIDGTYEVNEDVSISVGVRHNDVTKTVLDRSLLLNSIILAGGTAPGVPVFATVQTSDPNLFGILTGQTGPAQNTLADFPALGEQRATYGLPTEITEEEVTGRVVVNWTPDLEFTDSTLVYGSYSKGYGPGMFNPIVNPAQYPGVPTESEGEMIDAFEIGTKNILLDGTLLANLSAFHYEYDGMQTTKITNRTAVNVNLDAEMTGFEVELQWKVAAVPGLTVEFNGSVLDTKYASGTTDINPTNKGNNDPSLWQLRCIDSWGTMAFPKMGLLAGIGGGILNLDPTAGALDMIAAPKTLSVDGFTSADPSGTVNPLIQIGGMGALPTIGHCANIDGKLTAAGLMAEDGTLGISKPIDISGNPLPYSPEVSYSVALQYDTLINPGVVATARIDYYWQDNMWSRPYKGPRDGIDEYDNINASITFASVENGWYVRIWGQNLADDSNVIAHYHTENTSGMFRNEFLMDPQTAGITLGLQF

SEQ ID NO: 81103 - protein, 485 aa, Unknown
  Bacterial polypetide isolated from the Sargasso Sea
AEKILKEIKDRLTFLEDVGLSYLTLDRSAETLSGGEAQRIRLASQIGSGLVGVTYVLDEPSIGLHQRDNAKLIKTLNNLKSLGNTVIVVEHDEEAIRSADHIIDIGPGAGKHGGEICAQGDLNSILKNKDSITAKYLSGKKKIKIPAKRTKIKNEKIKIINACENNLKEVSVDIPVGLFTCVTGVSGSGKSSLINQTLMPISSFVLNKSKLSKEINCEKIEGLDHLDKVINIDQSPIGRTPRSNPATYTGLFSHIRDLLSQTVEARSRGYKPGRFSFNVKGGRCEACQGDGMIKVEMHFLADVYVKCDVCQGNRYNEQTLEIKYKDKNISDILNMTVEDALDFFEAHPSIKKKLVTLNDVGLGYITLGQSALTLSGGEAQRIKLAKELSKRSTGKTLFILDEPTTGLHFADIELLLGVLERLKNQGNTVVVIEHNLDVIKTADWIIDLGPEGGSDGGEIVAEGSPEDVAKVKKSFTGMFLKDVLS

SEQ ID NO: 81104 - protein, 369 aa, Unknown
  Bacterial polypetide isolated from the Sargasso Sea
KKYGLRPEQFIFDVLTFTLATGEEEFLDAGKHTLEGIKLVKERFPTSFTTLGLSNISFGLVPQARRVLNSVFLYHAVQNGLDSAIVNAREITPYTEIDEKEKKIVEDLIFNKHPNALSDLITHFENKTQDPSSKTKKVDVDPTWPAGQRSNFRIINRLKDGIENDVVSAIVEKLSQKDILVDNDGVLSINAAKEVTHQGAIQTLNDDLLPAMKIVGDKFGAGELILPFVLKSAECMKAAVKELEKYLLKEEGTSKGILVLGTVYGDVHDIGKNLVKTIFENNGYTVHDLGKQVPLQKFVEKINEVKPDAVGLSALLVSTSKQMQFFVEHARKTDVNIPILCGGAAINSNYINRIAKQDGIYEPGMFYCG

SEQ ID NO: 81105 - protein, 455 aa, Unknown
  Bacterial polypetide isolated from the Sargasso Sea
MKIPQLRKKLEVKSCHNISWEDNYSWVHQENILEVLKDGSKLLPEVREYLNEENKYTDFQLKDTSEIQKTLFKEIKGRIKLEDESLKYKDKAYEYWTKTTEKGNYSIKLRKKIGTENIEEIWNGDLEKKKLNTNYFGVGDLEVSYNDKYLAYSLDVKGSEYFTIYVRDIKTNTFVTEEIKDTSGSIMFSLDDKFIFYSKLDENHRPRKIFRHEIGKPVKDDILIFEEKTKAFTVGIGLTSDEKYYLITSSDHNTTEKYYFHVDEKIPEPKLIKEREKGIIYSINSWNNNFYMHTNKDAEDFKILVSKNIDSNHWEDFISAKDETLIGSLVFLNNWIIRTELTNALDKVFIRNIITNEEEELIFTDEKVYDPSVSLRQKDRDTDEIYISYSTPKTQNRTYLYNIKTKEKKLVKEQIIPSGHEPNDYIVERLECPSHDGRVVPITITRHKNTPIDGS

SEQ ID NO: 81106 - protein, 413 aa, Unknown
  Bacterial polypetide isolated from the Sargasso Sea
MILINSASLNHGVVNVGDLPIPFDIVLNSSALVVLITFVYLKVSWKESIITPRQEVFNDKQNFIGKLFGIIILFLLVAPGIFGNESSKTSVAPLILWVFLWIGVPVLGLLFGDIYSKFNPLNLFSLKSDKPESVYFACVLFIGLTWFELVWSRPGNPLNIAVVLITLFVCVNLLRYFLKKSLIEVDPLLLLHYLYSKLKLFNSKPYFRSLLDNIGNLAKLRGIEYFVLLMIGTVTYDGLRETTFWYNQFGSRTDDMGFSTMMFLIMNLGTILFYRFACFFAIKVSGSDLELNHVSNLFGHTMLPIAFAYHVTHYLTLLLFESQTFFYRFNDPIGIGMNILNVQEPTINYFVEPLVIWGIQVAVTLLGHMLSVVLAHDLAVKLFGHQQSDKTQYIFLFITVALTLQALFVLSVG

SEQ ID NO: 81107 - protein, 334 aa, Unknown
  Bacterial polypetide isolated from the Sargasso Sea
MAGGRSTKKIANDKKGGKKVERKKTIVTIAKAKKQQDEQQPHRPSKYVGVNWNKRDNKWEAAIKIDGKRKFLGLYHDEKEAARMYDEQAALLGKPVNFPLHEGMMQAVKERKDRSKVPNVNRPSKYVGVTWSKQGKKWQAQIMIDGKRKNLGLYHDEKEAARMYDEQAALLSKAVNFPLHEGMEQAVKPIKDRSKVPNVNRPSKYVGVSWSKEMKKWQASITIDGKQKSLGYYHDEKEAARMYDEQAALLGKPVNFPLHEGMEQAVKAAPKGSGKRMQKSRAKSSNDDEDESDDDSMEEQDNNNEALDDDDNDEIDDPIIMGDEDRDDDQHASS

SEQ ID NO: 81108 - protein, 113 aa, Unknown
  Bacterial polypetide isolated from the Sargasso Sea
CIHKREIYLDHNDNKLRGVDHIIKKSDGIPIRYVFRFHLNPKLTAVKTMSGSSALIQISKNKSLIFTMKNENIEIEKGIYLGGRKILDNNCISISGNLVNKDKSFEWDIKKKI

SEQ ID NO: 81109 - protein, 356 aa, Unknown
  Bacterial polypetide isolated from the Sargasso Sea
MNLQSRNLALYPVELQAHIVLILYFMKKSINFIVEEEEKNLRVDVLINKREEIISRTRVKNLILKEKLKLNNEIIKSPSKKVSIGDVVNLIIPDPEIAYLKPYDFKLNIVYEDADLLVINKPAGIIMHPGAGNYDKTIVNALMHYDKESLSTIGDELRPGIVHRIDKNTSGLVVIAKNNETHENLSKQFSNHTIIREYQLLIWGKLRPSFGRIETFITRSSKNRQLMEVSRSKGKKAITNYKTIEIFENKKVPTLSLVECKLETGRTHQIRVHMNYKGNSLVGDNKYKKKYKKLKNVDFDIQNSISNLDRQFLHAKTLGFIHPRTQKELIFTSILPQELNNILKMLRNTEEKIIEN

SEQ ID NO: 81110 - protein, 193 aa, Unknown
  Bacterial polypetide isolated from the Sargasso Sea
METCKIKFSNFFLFLIILIFFQTQTCASSFKEIAKSKISIIDLVIFKIESFMIKNKQRMFVQDPFKILYQEIGFNVQYIDGEKIHISVLGLMDKLRYKKTKKYKPNIKDCNVLRNKIFYNKYGYSPIRRKKTLDLDENYMKEILKEYVFNLDSLGEKQVDFLIDNTHIEILISHPLPRYNISCIGKLTAFELE

SEQ ID NO: 81111 - protein, 571 aa, Unknown
  Bacterial polypetide isolated from the Sargasso Sea
LTSENAPQEENLSFATQQFLVSNDPMRFVQSTYESNKVYHALVFEQEDTLNFQYKMDSEPEGYERPDHLLSIPLEQAKRLPQADRLTNTHIDLISVAKRAGSANFPQDQDGIIRRAPTAIHFEGPNHVYPTLVLAAAMDILGVPADGFDYDFENFVLRLTDTTGTVVREIPIDEEGRMYVNYYGRFKTFYYLPYMYCFDPEMLDPTYWEGKVAMVGASLPGLMDLRNTPVQETFAGVEIHANVMNSILQNQFVTKTSPSKNFYTILILTIFTGIIVSLPKKTLYTIPVPIIGMVAWWAFTLFQFFNHLIMWEMVRPMLSIFGTYGGVFLYNFFGAEKDKRFLKNTFSTYISPELIDQMFDAKEEPQLGGEEGYHTAFFTDIQSFSAFSEKLSASDLVELLNDYLTEMTDILLDNKGTLDKYIGDAIVAFYGAPAPVDDHEYYACRTAVIMQKRLSEMRDKWRAEGDRWPEIVHNMQNRIGINTGQMVTGNMGSTMRMNYTMMGDTVNLAARLESSAKQYGIYIQVANESYTACKDQFVWRDLDFVRVMGKTEPAQVYELIAIAGEETEKEK

SEQ ID NO: 81112 - protein, 402 aa, Unknown
  Bacterial polypetide isolated from the Sargasso Sea
TDRIEFNLGGPDLFLQTYPDIMGLDLPGRFSFFFNGYGKMYDGNLPVASKLYPHRYWNSSLLNDNTADNIMSKLAGRENNDWHLLYKMTWEISPKKKASLSYDASMNINQGFFMPRAFSSTYFPYRYMNILDNYNTITRDTRLINMNWTHTLSTRSFYEITVGRFTTMEHSAVQDLHWTDYQQRLDLEPINYNLDNTDLDGNIHITYGDEFYDTGFAPEWYDLSSENTRMDMDWTIHTRSGHKLKTGFEHTITDIQVLDIDEPWSGSSGFGANYDHYNAKTYFGAFYLQDRIIFEGMTLNIGFRNDYWIPGRYVEDAISDTSSIIITEKAREIFQKETFEFPWFGDPYRMKARLSPRFGISHPITDNDVLYFYYGHFSQLPTFQYVYAKINSRAQSTYQVFG

SEQ ID NO: 81113 - protein, 464 aa, Unknown
  Bacterial polypetide isolated from the Sargasso Sea
MKKVEIYFLINLGAILSIFAIEGELGEYMRRQDDILLEVAKDKLESMVSIENINSLNSDSLYKFTFNLDGEYEDNSANVEANFTLNDTSASDVQYSVSSKAVEKEGSYVAEIPLSDFDVYQNKRFDVELIIGFRPEISNLTMNNWASVFGSEKIATKIEKNISDKVRREGSFKISRKLDAFITPVPLEGQRTDFFVLFDKKRYTVLKGLKWEVPITVGGVYSNKDFEISVTSGKDMVAKLEQGTPRSILIGTSTNTGGTIEVSGIRKSDSKVVTSKARIVVIEPKWASDQDIAEIYTNEKYNFDMRVKSLSRDRVAIRFSSTFGDKNKIIEKSSMTVGPYKKSGKLTFETLVDGTPLKDLTHVVQVKTLPAPSVDFKRKPNTNDLTLEVVTYGKSNAVDKLFPIGGISGKVIEISAEKYGNRKLTRYRLSISRPAYGGLQSVKLKIKDKYGVLNEYENEFEYLD

SEQ ID NO: 81114 - protein, 776 aa, Unknown
  Bacterial polypetide isolated from the Sargasso Sea
MLKRQKKKSILESVINQANNYWQQIAMISLLIILLSFLFPRGKTLLYSYQLNDVSKEEIVAPFNFPILKNNVELQSDLDEAIALEPYLFVRSNSAVNNQIKEINTFFDLTKKNQIANLKLIESRNNLYIDRFSKNFNKSRMIVEADSVSLSELNNRMKKTFTFTGEDDKWNKILFESTSSYTEIDLETLKKIIIKISRNRWAEGIYDIPISNILSNQVAMNLSDGKANILTSPSDYNDLQTAWTKARFEITNEFSENQVIEREIGYSLIVELMKPNLIFDRETTERRQQARLDRVPRNKGIILENERVVEANKRITEDDLEKLYSLSVAVDAKSASEDTLQIALAYFGRLIVVGILASLLFGFIFVYKRSIFEDQKMVLFLSIIFLIEGVLTYLLTQKFALSEYLIPITVAAMVITIMFDGFVGLIATFSMALLIGTQIGNNVDFMITSVFISIMGIYTVRNLRRRSQLFTAIFVLIASSAIAIVGQGLFKGHTWQAMSYDMTNLLLLSVLSPILTYGLIGILEVSFGITTNLTLIELLDFQQPLLKRLQKEANGTFNHCVVVGNLAEACADAIGANSLLCRVGAYYHDIGKMLRPEYYIENQYGGENKHDKITPVMSAKIIKSHVSDGLILAKEYSLPSIVSDFIPMHHGTTRVEYFYRKAIEEEKNVDEDQFRYPGPKPNTKETGILMICEAIEAGIRSIKDPDLIKIDDMITKIINSRVSSGQLSECPLTMDELNRIKGNMDGNTGLLSVLKGIYHIRIEYPDELESNKATKQ

SEQ ID NO: 81115 - protein, 263 aa, Unknown
  Bacterial polypetide isolated from the Sargasso Sea
GTRGSHLAQIYTKKVIDHLKKVSSTQIETKKIVTSGDENQKDRLSNIGGKGLFSKKIEVELINHNIDIAVHALKDMPSIETEGLITNFYLKRNSPNEIFISKDDINFHDLKPNSIIGTSSYRREYQLKSIRSDLNYKLIRGNVDTRIKKLENGDYDAILLSKAGIEALGLTNKITHEFNTEELIPCAGQGIIAIQCRENDQEIINILEKINDDQSRIIANAERKILKILEGDCDTAVGVYAKIDKDLVNIKAENVSVDGKQRF

SEQ ID NO: 81116 - protein, 194 aa, Unknown
  Bacterial polypetide isolated from the Sargasso Sea
MKRDKIIIGTRASQLAQIYTEKVINDLKKVSSTHLETKKIVTSGDENQKDRLSNIGGKGLFSKKIEIELINNNIDIAVHALKDMPSIETEGLTTNFYLKRNSPNEIFISNDNINFQDLKPNSIIGTSSYRREYQLKSIRSDLNYKLIRGNVDTRIKKLENGDYDAILLSKAGIEALGLTNKITHEFNTEELIPC

SEQ ID NO: 81117 - protein, 276 aa, Unknown
  Bacterial polypetide isolated from the Sargasso Sea
MKRDKFIIGTRGSQLALIYTKKVMKFLKNVSSTDIEIKKIVTSGDENQNDRLSNIGGKGLFSKKIETELINHKIDIAVHALKDMPSIETKGLITNFYLKRNSPNEIFISNNNIKFQDLKPNSIIGTSSYRREFQLQSIRSDLNYKLIRGNVDTRINKLENGDYDAILLSKAGIEALGLTNKITQEFDTEELIPCAGQGIIAIQCREDDKEVINILEKINDNQSRVIANAERNVLKILEGDCDTAVGVYAKITKDIVNIKAELFSVDGKQRFYVDES

SEQ ID NO: 81118 - protein, 269 aa, Unknown
  Bacterial polypetide isolated from the Sargasso Sea
MEIKQIVTSGDENQNDRLSNIGGKGLFSKKIETELINHKIDIAVHALKDMPTIETEGLITNFYLKRNSPNEIFISNNNIKFQDLKPNSIIGTSSYRREYQLQNIRSDLNYKLIRGNVDTRIKKLENGDYDAILLSKAGIEALGLDNKITQEFNTEELIPCAGQGIIAIQCRENDQEIINILEKINDNQSRIIANAERNVLKILEGDCDTAVGVYAKIIKDIVNIKAELFSVDGKQRFYVDESENEKMINDLSIKIGEKLKSESKGSYKR

SEQ ID NO: 81119 - protein, 276 aa, Unknown
  Bacterial polypetide isolated from the Sargasso Sea
MKRDKFIIGTRGSRLAQIYTEKVINDLKKVSSTHIEIKKIVTSGDENQKDRLSNIGGKGLFSKKIEIELINHNIDIAVHALKDMPSIETKGLITNFYLKRNSPNEIFISNDNISFQNLKPNSIIGTSSYRREYQLKSIRSDLNYKLIRGNVDTRIKKLENGDYDAILLSKAGIEALGLEKKITHEFNTEELIPCAGQGIIAIQCRENDQEIINILEKINDDQSRIIANAERKILKILEGDCDTAVGVYAKIDKDLINIKAELFSVDGKQRFFVERK

SEQ ID NO: 81120 - protein, 233 aa, Unknown
  Bacterial polypetide isolated from the Sargasso Sea
MKRDKFIIGTRGSQLAQIYTKKVINHLKKISSTQIETKKIVTSGDENQKDRLSNIGGKGLFSKKIEIELINNNIDIAVHALKDMPSIETEGLITNFYLKRNSPNEIFISNGNINFQDLKPNSIIGTSSYRREYQLKSIRSDLIYKLIRGNVDTRIKKLENGDYDAILLSKAGIEALGLTNKITHEFNTEELIPCAGQGIIAIQCRENDQEIINILEKINDDQSRLFAMLRENL

SEQ ID NO: 81121 - protein, 138 aa, Unknown
  Bacterial polypetide isolated from the Sargasso Sea
GASGKEAELLYVPGGGSKDVNGFRFLKMEGKEVFKEAVKVIQSNSLEAIKAANLEPADIDLFIPHQANMRIIEAARERLELPLEKCFINIDKYGNTSSASVLLALHEAHKESKIKKGDNILFSVFGAGFAWGSAVLKW

SEQ ID NO: 81122 - protein, 244 aa, Unknown
  Bacterial polypetide isolated from the Sargasso Sea
ALTEPNQLFFEPPQLGYSPAPPHYSSWGRRFSLRYLLYFSASAPSSSRDLRTSDLELWALTEPNQLFFEPPQLGYSPAPPHYSSWGRRFSLFYLLYFSASAPSSSRDLRTSDLELWALTEPNQLFFEPPQLGYSPAPPHYSSWGRRFSLCYLLYFSASAPSSSRDLRTSDLELWALTEPNQLFFEPPQLGYSPAPPHYSSWGRRFSLFYLLYFSASAPSSSRDLRTSDLELWALKEPTFPPGFK

SEQ ID NO: 81123 - protein, 283 aa, Unknown
  Bacterial polypetide isolated from the Sargasso Sea
MKRDKFIIGTRGSQLAQIYTEKVINDLKKVSSTHIEIKKIVTSGDENQKDRLSNIGGKGLFSKKIEIELINNNIDIAVHALKDMPSIETEGLITNFYLKRNSPNEIFISNNNINFQDLKPNSTIGTSSYRREYQLKSIRSDLNYKLIRGNVDTRIKKLENGDYDAILLSKAGIEALGLTNKITHEFNTEELIPCAGQGIIAIQCRKNDQEIINILEKINDDQSRIIANAERKILKILEGDCDTAVGVFAKIDKDFVNIKAELFSVDGKQRFFVDESEDKKMMK

SEQ ID NO: 81124 - protein, 216 aa, Unknown
  Bacterial polypetide isolated from the Sargasso Sea
GGPRIERKLKEENIQTKFINGLRVTDEKVISIVENVLIDFNKDIVESLKKKGSEAVSITSKINNIINVIPDNKELGFVGIPDSINIEFLKDIIEKKQIPVIAPLGVDKNKNIYNINGDTAASAIAKKLKSRRLLLMTNVEGVYDDRKTLITEIKPFDIENLVKLKIVQGGMIPKIKNCIDAVENGVRGVVILDGRKPHSILDEIFSDKGSGTLIRK

SEQ ID NO: 81125 - protein, 237 aa, Unknown
  Bacterial polypetide isolated from the Sargasso Sea
MKNKILIGTRESKLALYQSNLVIKKLSSLYPNISFEIKKIKTKGDILLNHNIESSIDKGFFVKEIQQKLLNKEIDIAIHSLKDLPVDDVSGLEISAILKRDNHKDVFLSNNNFTISKIKKNAVIATSSNRRKSQLLRLNPKFNIISIRGNVDTRISKMRNGYCDGLVLAAAALERLNLKDNIANYFDSDEMLSSPGQGAIAIESRKNDKINQLLSNLNHEETSLCIKQERSFLKYLE

SEQ ID NO: 81126 - protein, 288 aa, Unknown
  Bacterial polypetide isolated from the Sargasso Sea
MNQKTIIRQLNDNWFYEKAGGVPDLVFGYQKSKVLVDKYSKFQHIELFESQQWGKVLVLDGVLQITEKDYFAYNEMMAHIPIYAHHNPHSVFIIGGGDGCILNEVTKHEYLKNITICEIDQDVIDISKEYFPFWSQGWSDPRVKSITKDANLYIKTIPSKSLSCIIMDSSDYYEDTPSAVLYKNEFFTEVDRVLTDDGIYCFQGESIHFDKKEIKQFMTDLQKFFPICCYGNMTTPTYPGGQIGIIICSKKYNPKILNKNRPIIKNLKHYNFAYHEASFVLPNSHKIF

SEQ ID NO: 81127 - protein, 257 aa, Unknown
  Bacterial polypetide isolated from the Sargasso Sea
PKGIGYQILGGKGLFSKKIEIELINNNIDIAVHALKDMPSIETEGLITNFYLKRNSPNEIFISNDNINFQDLKPNSIIGTSSYRREYQLKSIRSDLDYKLIRGNVDTRIKKLENGDYDAILLSKAGIDALGLTNKITHEFNTEELIPCAGQGIIAIQCRENDQEIINILEKINDDQSRIIANAERKILKILEGDCDTAVGVYAKIDKDLVNIKAELFSVDGKQRFFVEESENKTMVKDLSIKIGEKLKSESKGSYKR

SEQ ID NO: 81128 - protein, 266 aa, Unknown
  Bacterial polypetide isolated from the Sargasso Sea
VLSLNLEIKKIVTSGDDYQKDRLSNIGGKGLFSKKIENELIDQNIDIAVHALKDMPSIETESLITNFYLKRNSPNEIIISKNNIKFNDLKPNSIIGTSSYRREYQLKNIRSDLNYKLIRGNVDTRIMKLENGDYDAILLSKAGIEALGLTNKITQEFNTEELIPCAGQGIIAMQCRENDKEIINILEKINDEHSRMIANAERKVLKVLEGDCDTAIGVYANIKQDVVNMKAELFSVDGKQRFFIDKSANKKLVNDLSIRIGEKLKS

SEQ ID NO: 81129 - protein, 175 aa, Unknown
  Bacterial polypetide isolated from the Sargasso Sea
MKRDKFIIGTRGSKLAQIYTEKVTKFLKKVSSTHIEIKKILTSGDENQKDRLSNIGGKGLFSKKIETELINHKIDIAVHALKDMPTIETEGLITNFYLKRNSPNEILISNNNIKFQDLKPNSIIGTSSYRREYQLQSIRSDLNYKLIRGNVDTRIKKLENGDYDAILLSKGLAIE

SEQ ID NO: 81130 - protein, 200 aa, Unknown
  Bacterial polypetide isolated from the Sargasso Sea
PPNMAVTSEHGGHLRTWRSPPSMAVTSEHGCRLRTWRSSPNMAVTSNTSERGGHLRTWRSSPNMASPPKISVTSEHGGHFRTWRSPPSMAVTSEHGCRLRTWRSSPNMAVTSEHGGHLRTRRSPPNMAVTSQHGGDLQTWRSPHEHGGHLRTWRSPPNMAVTFEHGGHLRTWQSPSNMAVTSENPHLQPSFIICNHHSWF

SEQ ID NO: 81131 - protein, 221 aa, Unknown
  Bacterial polypetide isolated from the Sargasso Sea
VTYTDSDGDSATKYNLWTSNDWWLADVGQDASGTGKYLDANAGYQVTGAEFNRLYVRADDKLSEQTLWVQSYDGEDYSDWGSFILKTIASTNSPPKVTISGDVTLNEGGYKKVSEFVTYTDSDGDSATKYNLWTSNDWWLADVGQDASGTGKYLDADAGYEVTGAEFNRLYVRADNKLSEQTLQVRAYDGEDWSDWGSFILKTQVPNNKPVINVSDQALKV

SEQ ID NO: 81132 - protein, 259 aa, Unknown
  Bacterial polypetide isolated from the Sargasso Sea
MKIKRIGCQTFGGKGLFSKKIEIELINNNIDIAVHALKDMPSIETEGLISNFYLKRNSPNEIFISNDNINFQDLKPNSIIGTSSYRREYQLKGIRSDLDYKLIRGNVDTRVKKLENGDYDAILLSKAGIEALGLTNKITHEFNTEELIPCAGQGIIAIQCRENDQEIINILEKINDDQSRIIANAERKILKILEGDCDTAVGVYAKIDKDLVNIKAELFSVDGKQRFFVEESENKTMVKDLSIKIGEKLKSESKGSYKR

SEQ ID NO: 81133 - protein, 303 aa, Unknown
  Bacterial polypetide isolated from the Sargasso Sea
MKRDKFIIGTRGSQLAQIYTEKVINDLKKVSSTHLEIKKIVTSGDENQKDRLSNIGGKGLFSKKIEIELINNNIDIAVHALKDMPSIETEGLITNFYLKRNSPNEIFISNGNINFQDLKPNSIIGTSSYRREYQLKSIRSDLIYKLIRGNVDTRIKKLENGDYDAILLSKAGIEALGLTNKITHEFNTDELIPCAGQGIIAIQCRENDQEIINILEKINDDQSRIIANAERKILKILEGDCDTAVGVYAKLDKDLVNIKAELFSVDGKQRFFVQESENKIMVKDLSIKIGEKLKSDSRGSYKR

SEQ ID NO: 81134 - protein, 1078 aa, Unknown
  Bacterial polypetide isolated from the Sargasso Sea
LKARNTKELNGVGTNHEIGNYLRLTNVYGSPDISDVSGETTAYRPILLWDNNQSSRGTISDANAVGVLRPRSFEHEANGSATGTATAGSSSTNDDGVYRLYAFDVRNFVRLTMTDTPNRSLSSAYFATGGVRVTGVTSGATGFVFNDTTSFPGTTFTSGATIYLTNVIGEFDEGEKIKASEDTNADLIMQNSSGTDLTIVSIINSRLSDARAVQMQESDSGQQFTADIVLENLEGNSTSVFLEESDDSENATGGTQEKKQIGKDDEATGIELEVLKGAKLRDPQLQQSLFKLPKDAIKTLLTPKNNGASDTDLIFRRQFVGTTSASGAVSFSAASGEIFEAHTEKDYTLSVLTAGNGSASQGDIVSVASTISGTGTSTITITDSTNLGDSAKVKVIATVKKTDVIQAVKTTNLSKQLKVIASDADGAFGTRATDDIISLGRTDVYRIQAIYDSEDTSTDAVAPTLTVSDISGTFERGEQIKGATSGARGRLITTSSPLSYTLTLGDGADDFVVGETIKGTASGATATIDTDGVTAGSKIVTNDFVFDDGQRNNYYDISRLERKKDRNAPKGRMLVIYDYLSHGAGSFFSVDSYSAVSEQMTYDDIPIFVPTVTDPDDPAPASEFPLSDCLDFRPTVENIAGTSETITDVDQVTANSFDFRSRQFDGTGAVIVDTPKPDSLVTTDIEFYLPKIACLYLDKNADFILREGEPNENLIPPAPIYEAIKIAEFTLPAYTFRPTDVGIYYEPYKRYRMEDIAALEGRIDSLEYYTSLTLLEQDVRSLEVLDTNGLPRFKSGFVTDSFNGHAVGDVNHIDYDCAIDNIERELRPKTVDKRAGLEEFLTTDAAREAAGYNRKASIITLPYDETVAINNSSQGPVLCTSAGLVATDFEGELTLTPDTDNWFETEILSETPVYDTASFDKTKKQVDKHNANSKYGGWNDVGSAVPTNIGYGYSAPGAGGVQNYTGRGGSNGHINRHDSKGNPTSGDVWIYEFRYTQKQKRTKTLKSISHDWTSPVTTDVLRSTSQIRYIRPIKIQFVAEGLAPFTKHYIYFGGRDVGKFTTPDSLEFTSASSVKKGA

SEQ ID NO: 81135 - protein, 906 aa, Unknown
  Bacterial polypetide isolated from the Sargasso Sea
VVITGVSGSGKSTLAFDTIYSEGQRKYVESLSAYARQFLQMMNKPDVDSIDGLSPAISIEQKTTQKNPRSTVGTVTEIYDYLRVLYARVGVPYSPTTGKPIKSQSVSEMTDLIIKNNIDKRIYILSPIVRDRKGEYRKEIEDLKKRGYQRLKVDNVVYDIDEVPLLKKNFKHNIDVVIDRLVVKKNIQQRLSESIEVALTISDGLLYLENLDTNKISVFSSKFACPVSGFSIEEIEPRLFSFNAPQGACSECDGLGVEKYFDEYKIVPDETRSISDGAIKPWETKVFGYQKKYFVETIDKILKQFKVKKNVPWSEIPKKVKNIILYGDEESELNFLYDFEGIVNFIDRKYEETERWWLQYELEKYLSERDCEVCNGYRLNEKALAVRIDENHIGNITKKSISECLSWFSSLESKLDKNNKKIAEGVIKEIKDRLVFLNRVGLDYLSLARASKTLSGGESQRIRLASQIGSGLTGVLYVLDEPSIGLHQKDNQQLIETLFRLRDLGNTVIVVEHDEDAIRQSDHIIDIGVKAGVNGGNIIAEGNLNKILKNNKSLTAKYLNKSLEIEVPQNRRKFNKNKVFKLNKIKTNNLDNLNVTLPLGNFITVTGVSGSGKSSLIIDTLYQRLDEYFNKSLNKDESRFNFKGINHIDKVIDIDQSPIGRTPRSNPATYTGCFTPIRDWFANLNESSARGYKPGRFSFNVKGGRCESCEGDGVKKIEMHFLADVYVECDICKGKRYNRETLEVKYKDKSISDVLEMTVEEGYKFFDKIPAIKQKLQTLMDVGLDYIKIGQSATTLSGGEAQRIKLSKELSKRSTGKTLYILDEPTTGLHFDDVKKLLKILHTLVDEGNTVIVIEHNLDVIKTADHIIDLGPLGGVNGGKIVGTGTPENIANNKKSYTGEFLKKIL

SEQ ID NO: 81136 - protein, 792 aa, Unknown
  Bacterial polypetide isolated from the Sargasso Sea
MIIAPIIRGKKGEHLAVYEDLRQEGFVRAKVNEKIYSLDEFPELEKNKKHNISAVVDRLVIKNNEEFRQRVAESVETASNFSDGIIEIDFIDGKNESILFSTNFSCPECGYSIPELEPRMFSFNSPFGACDACDGLGIIQYIDPSKLIPDEDVSINNGAIKGWTRRNRFYFYQLKCLAKHYDFSLTTKWSDLDEKYKDIILWGSDDVIDFSKRWRSGSRLVRKHKFEGVIVNTQRRFRDTDSEFMRNELSKLLSDKNCDACDGSRLRKESRNIFIENTPINQITEMRINESLKFVSELNLIGNKKKISEKILKEINDRLSFLENVGLGYLALDRSAESLSGGEAQRIRLASQIGSGLVGVTYILDEPSIGLHQRDNGKLIETLKNLRDLGNTVIVVEHDEDAMREADYIIDMGPGAGVHGGKVCAEGDFEKIIKDKKSITAKFLSKKREIKVPKKRSKHQDKFIEIKSAFANNLNNIDIEIPVGLFTAVTGVSGSGKSSLINQTLLPMSSFMLNRANLKKEVKCKEIRGLEHLDKVIDIDQSPIGRTPRSNPATYIGLFSNIRDLFAQTIEARARGYKPGRFSFNVKGGRCESCQGDGLIKVEMHFLADVYVTCDVCNGSRYNDQTLEVKYKDKNISDVLGMTVEDALSFFDQIPAIKNKLKTLNDVGLGYITLGQSATTLSGGEAQRIKLAKELSKRSTGKTLFILDEPTTGLHFHDIELLLKVLHRLKEQGNTIIVIEHNLDVIKTADWIIDLGPEGGSQGGELVACGTPEKVSKDKKSFTGKYLKGMLS

SEQ ID NO: 81137 - protein, 443 aa, Unknown
  Bacterial polypetide isolated from the Sargasso Sea
TSATQDAAYSYTLVATDSDVGDSLTLSAVTLPSWLSFNAATGVLSGTPSNANVGSHAVVLRATDVDGLTADQSFTIVVANVNDAPTISSTALTSATQDAAYSYTLVATDSDVGDSLTLSAVTLPSWLSFNAATGVLSGTPTNANVGSHTVVLRATDVDGLTADQSFTIVVANVNDAPTISSTALTSATQDAAYSYTLVATDSDVGDSLTLSAVTLPSWLNFNAATGVLSGTPTNANVGSHTVVLRATDVDGLTADQSFTIVVANVNDAPTISSTALTSATQDAAYSYTLVATDSDVGDSLTLSAVTLPSWLSFNAATGVLSGTPSNANVGSHAVVLRATDVDGLTADQSFTIVVVNVNDAPTISSTAVTSATQDAAYSYTLVATDSDVGDSLTLSAVTLPSWLNFNAATGVLSGTPTNANVGSHAVVLRATDVDGLTADKALR

SEQ ID NO: 81138 - protein, 302 aa, Unknown
  Bacterial polypetide isolated from the Sargasso Sea
FISFYYRDVLAATILGFVVGIIRLSSNWLLSRVAYIYVEFTRNVPLLLQIILWYAILIQLPRIKQAIQFFDNFYIANRGLFGPRPIFEEGFNVVFYIIILTIIVAFFIRRWAKKRQDQTGKQFPTFSFNTGLIIFVPLIIFFIVGSPLSFEYPALKGFNFKGGMVIRPEFIAMFLALTIYTGAFISETVRSGILSVTKGQREASGALGLKKSWIMRLIILPQALRVIVPPLTSQYLNLTKNSSLGIAVGYADLVHGFGGISLNQTGQAIECMAITMATYLTISLTISLFMNIYNRSIQFKEK

SEQ ID NO: 81139 - protein, 301 aa, Unknown
  Bacterial polypetide isolated from the Sargasso Sea
MNDSADIRFLLTIRESGSLIAAARKLGLSPSAVTQRLQQLEKRLGAQLVNRTARRLQFTEEGTLLCERGAELVQQFDALFEDFQTRRGGLIGTLKINAPLGFGRRHLAPVIADFQQQNPDVDVALTLSDQPLTETMDRFDVVVHIGELPVSNLVGYTIAPNARFVCAAPALVKRMGQLESPEELSKLPCIVLRENNEDVSLWQFSKGRTRRSVRVSSHLSCNDGDVIRQWACEGRGVILRSEWDVADDLAKGRLVRLLPGWKAPDANVIALTHQRAGLPARTRHFMQYLQGRFRPLPPWRR

SEQ ID NO: 81140 - protein, 756 aa, Unknown
  Bacterial polypetide isolated from the Sargasso Sea
SDGTQRALTVTNGTGDTTFTGAIGGSAPVKSLTITSDQLTAGAISLNGALTATLGGSSSITGVIANGASTANLVKAGSGTLTLSASNTYTGTTQVSAGTLTVSGSGRLSDSTAVTIASGADYNVNASDTVASIEGAGNIVIASSQTLTAGDGNNKTLSGVISGAGNYIKAGSGTLTLTGNNSYTGSTTISAGLLKIIRDNPTSYLAATSGFTGPGNLTIESSGDDFTADIVTGTHVQLAGTALGNLIIGKTGNTRQIDLSSDITTTGTQTYNGPVRLVGGDRTVATTNSNVIFASTVNSDGTQRALTVTNGTGDTTFTGAIGGSAPVKSLTITSDQLTAGAISLNGALTATLGGSSSITGVIANGASTANLVKAGSGTLTLSGANTYTGTTTINAGDLTVSGSLHDSTAVTIASGADYNVNASDTVASIEGAGNIVIASSQTLTAGDGNNKTLSGVISGAGNYIKAGSGTQTLSASNTYTGTTQVSAGTLTVSGSGRLSDSTAVTVDSGAVYNVAVSDTVASIAGAGSITLGSNTLTSGGSNASTTFSGVISGTNGNLVKAGSGTLTLSGANTYTGTTTINAGDLTVSGSLHDSTAVTIASGADYNVNASDTVASIEGAGNIVIASSQTLTAGDGNNKTLSGVISGAGNYIKAGSGTQTLTGNNSYTGSTTISAGLLKIIRDNPTSYLAATSGFTGPGNLTIESSGDDFTADIVTGTHVQLAGTALGNLIIGKTGNTRQIDLSSDITTTGTQTYNG

SEQ ID NO: 81141 - protein, 290 aa, Unknown
  Bacterial polypetide isolated from the Sargasso Sea
VPCQALADPGDGIDVSGCLSVASGTDCTVSCEATHVGSSTTYTCPPNNTDPTVQPTGDPPSCVPIVPCQALADPGDGIDVSGCLSVASGTDCTVSCEATHVGSSTTYTCPPNNTDPTVQPTGDPPACNEIVPCQALADPGDGIDVSGCLSVASGTDCTVSCEATHVGSSTTYTCPPNNTDPTVQPTGDPPACNEIVPCQALADPGDGIDVSGCLSVASGTDCTVSCEATHVGSSTTYTCPPNNTDPTVQPTGDPPACNEIVPCQALADPGDGIDVSGCLSVASGTDCTVS

SEQ ID NO: 81142 - protein, 247 aa, Unknown
  Bacterial polypetide isolated from the Sargasso Sea
MTGPQGIQGPTGAQGIQGIQGVTGANGQDGATGAQGIQGPTGSQGIQGIQGVTGADGQDGATGAQGIQGPIGPTGSQGIQGIQGVTGADGQDGATGAQGIQGPTGSQGIQGIQGVTGANGQDGATGAQGIQGPIGPTGSQGIQGIQGVTGANGQDGATGAQGIQGPIGPTGSQGIQGIQGVTGANGQDGATGAQGIQGPIGPTGSQGIQGIQGVTGANGQDGATGAQGIQGPIGPTGAQGIQGPIGP

SEQ ID NO: 81143 - protein, 229 aa, Unknown
  Bacterial polypetide isolated from the Sargasso Sea
MACTATLTGHGACVRSVVFHPTQAAVLASASEDKTVKLWDIDTGKSTITLTGHGNNLTSVVFHPTQAAVLASASGDRKVKLWNIDTGECTATLTGHGDWVRSVVFHPTQAAVLASASDDKTVKLWNIDTGECTATLTGHGHYVFSVVFHPTQAAVLASASGDKTVKLWNIDTGECTATLTGHGGTVYSVVFHPTQAAVLASASRDKTVKLWNINTGKCTATLTGHGGIV

SEQ ID NO: 81144 - protein, 198 aa, Unknown
  Bacterial polypetide isolated from the Sargasso Sea
MMMNDPAMMQMGMDFFGGPENMMNEMMMGMGPMMGPDPMMMGMDPMMGMPGMGPMMGPDPMMMGMGPMGPDPMMMGGMPGMGPMMGPMMGPDPMMMGMGPMGPDPMMGMMGPDPMMMGMDPMMMGMPSMGPDPMMMGMDPMMMGMPGMGPDPMMMGMDPMMMGMPGMGPMMGPDPMMMGMDPQSMMDNMVMMGMDPYD

SEQ ID NO: 81145 - protein, 280 aa, Unknown
  Bacterial polypetide isolated from the Sargasso Sea
QDGATGAQGIQGPTGSQGIQGIQGIQGVTGADGQDGATGAQGIQGIQGPIGPTGSQGIQGIQGVQGVTGADGQDGATGAQGIQGIQGPIGPTGSQGIQGIQGVQGATGSDGQDGATGAQGIQGIQGPIGPTGSQGIQGIQGVQGVTGADGQDGTTGAQGIQGPTGLQGIQGIQGVQGVTGADGQDGATGAQGIQGIQGPIGPTGSQGIQGIQGPIGPTGSQGIQGIQGVQGATGSDGQDGATGAQGIQGIQGPIGPTGSQGIQGIQGVKGVTGADDKTEL

SEQ ID NO: 81146 - protein, 448 aa, Unknown
  Bacterial polypetide isolated from the Sargasso Sea
CKPVYETREQCYTVCKPVYETKTKEIPYTVCKPVYETREQCYTVCKPVYETCTKEIPYTVCKPVWETRERDVCHTVCKPVHYTKTVKVCKGRWETERCEIPGPLVTKCVRQPGCWETDCSGKRCYRPGPVKKIQVQCPSRTICKKVWVPEICEKQIDCVRYERETIVKKQCYKVCKMVQEQRIKTCCYKVCKMVPEQRVRTYKVCKMVPEQRVRTCCYKVCKMVPEQRVRTYQVCKMVPERRVKTCCYKVCKMVPEQRVRTYQVCKMVPEQRVRTCCYKVCKMVPEQRVRTYQVCKMVPEQRVRTCCYKVCKMVPEQRVRTYQVCKMVPEQRVRTCCYKVCKMVPEQRVRTYQVCKMVPEQRTKTCSYRVCKMVREQRCREECYKVCKTVKETHTKKVPYCVTRPVHYTKTIDVCRLVPKKVAYTVTKCVPKTVWREVPCEPSCGYED

SEQ ID NO: 81147 - protein, 493 aa, Unknown
  Bacterial polypetide isolated from the Sargasso Sea
QRKPLGCPKVTNRNTAPAPGGPQITNRNTAPAPGGPKVTNRKTAPAPGGPKVTNRNTAPAPGGPKVTNRNTAPAPGGTTIINMNTAPAPGGPKVTNKNTAPAPGGPKVTNMNTAPAPGGPKVTNMNTAPAPGCPKVTTMNTAPALGGPKVINRNTSPAPGGPKVTNRKTAPAPGGPKVTNMNTAPAPGGPKVINRSTAPAPGGPKVSNMNTAPAPGGPKVTNRNIAPAPGGPKVTNRNTAPAPGGTKVTNRNTAPAPGGPKVTNMNTAPAPGGPKVTNRNTAPAPGGPKVTNMNTAPAPGDTKVTNMNTAPAPGGPKVTNMNTAPAPGGTKITNRNTAPAPGWPKVTNRNTAPAPGGPKVINRNTAPAPGGPKVTNRSTAPAPGGPKVINMNTAPAPGGPKVTNRNTAPAPGGPKVTNRNTAPAPGGPKVINRSTEPAPGGPKIINRNTAPAPGGPKVTNRNTAPAPGGPKVTNRNTAPAPGGTKVTNMNTAP

SEQ ID NO: 81148 - protein, 319 aa, Unknown
  Bacterial polypetide isolated from the Sargasso Sea
DIGGPTLIRAAAKNYEFKIVVVDNNDFSIILDEMINSKGVSLETRKYLAMKAFLYISNYDNMIAQWFLKENEPNHYPTYFPLSAKLKYQLRYGENPHQKGAVYSSDKNIKGALNAKLLQGDTLSYNNLNDADTAFNLVHEFLEPTVAIIKHANPCGVSSDISIKKAWKKALNCDPISAFGGIISLNKKVTSEIAKLLIKIYSEIIIAPEFSASAVKIFKQKPKLKILETRYQNQNEQNIYTVKSINGGFLIQDKDNYSLNKNELKTVTNFSPSEKNIQDMLFAAKVIKYVKSNAIVFVKNKITIGIGAGQMSRIDAAYL

SEQ ID NO: 81149 - protein, 191 aa, Unknown
  Bacterial polypetide isolated from the Sargasso Sea
GVLRSLPNITIISPADPTETVKAVFASIKHNESVYIRLTGGSNCPQIYKKDYDFEIGKAVNLKDGTDLLIVACGPMVKTALDTADHLEKSGISSQVLNMHTIKPLDKNNLNKAIKGKKMVVTIEEHNVIGGLGSAISEVLSENDNMPKKISFGINDKYSKGGSYSFLKKNFGLDVDTLTKKIMDQLNYGRI

SEQ ID NO: 81150 - protein, 225 aa, Unknown
  Bacterial polypetide isolated from the Sargasso Sea
MKLKESVKFLEEDDNFLSFKTRFFGIYQAAALTQKSYDSLANDIEVESLVSKLKNKYQTEIFTTIKTVENTIPTPQQTNDLEENLIVVPVKTENSIDTDNDGVEDSADNCVGIANTGQENLDKDNYGDACDPDKDGDGVANEDDAFPINANETLDTDSDGIGDNGDNCKETANTGQKNLDKDNYGDVCDPDKDGDGVANNNDAFPLNASETLDTDSDGIGNNSDN

SEQ ID NO: 81151 - protein, 82 aa, Unknown
  Bacterial polypetide isolated from the Sargasso Sea
MLWSNIIQPRLISLACTSKPICKQRSKVIPFAKGEVLEIGFGSGHNLPYYNQNEIKSLIGLEPSLSMQKLSSERLKDSAINF

SEQ ID NO: 81152 - protein, 140 aa, Unknown
  Bacterial polypetide isolated from the Sargasso Sea
MGHEHQKATVKESTLFSHTGNAGSSSFIGQTDKDNYNNAETNPTKELISLNRNPTINNTKIFNGGDSINMKVDKIEENYINDRINGADKVYQEIPTEHNCKLTSMKDRLEDKSISNRINSELLDPFKSNPYTQPLNSFAY

SEQ ID NO: 81153 - protein, 807 aa, Unknown
  Bacterial polypetide isolated from the Sargasso Sea
MTRRPYPRGFHMTIRHRITLLVILMFVALSAIGGYAVYQTRGSAAEVRKVTEGVVPSALASADLVSQVKDVQLATMTLVYAPDANMVSQAQDELKKKKTALQQALALQAKDAASHAQQGLVSQANESLENYFSAIAETAKMKADGKNELAQAYLFANVAQYRDELEGIVETLRVEKNRQKDEAITALNATLSTTTTAIAAVTGIAIILLTFIGTLLYRQITRPLSRMQAMMSEIASSQDFTRRVPVGRLDEIGHSIVAFNGMIEKIQESSAQLKQKTADIQAMLQNMQQGILTVVDGAVIHSEYSAYLEDIFETKDIAGRGLMDLVFSDTDLGSDVLSQIDAAAHACLGEDCINFAFNQHLLVGEISKRMADGRVKILDLSWSAITDENDIIVRLMLCVRDVTELRKLAAEASEQRRRLDMIGEILAVSEEKFHHFIESSAGFISENERIIRKHSEADHAAIAELFRNMHTIKGNARTYNLAHLTNVVHETEQSYHELRQPDADRSWDQDLLMQELTRVREAIESYARINEQSLGRKAKAGANNAGHAGRYVMVEKEQIQQTLSMLDKTNAGDLHELQSMHNAMRQTLSALGSESVRDALSGVLDSLPSLAQELGKPAPTVRIDDNGYRLRGQTGGTLSNVFMHLLRNSMDHGIETAEARSAQGKTPAGTIDIEVGVDSGTLQITLSDDGRGLALERIRGIAVERGWVGSDEQLSDEAIAEFIFRPGFSTAATVTEVSGRGVGMDAVRDFLKRENGRIELRFTDDHKGASFRQFQTIVCLPDSVAVDTLGEQARGDAGQLRVGAMVD

SEQ ID NO: 81154 - protein, 989 aa, Unknown
  Bacterial polypetide isolated from the Sargasso Sea
MLKKTLSIAISAIFVPILFIGVVNTQTLERGGIEEIIVTAQKTDENIQDVPIAVTAFSNESLELQQIETFGDLQFNAPNITFTKSNFTGANMTIRGVNSGTVAASGDGGVAFHVNSVPVPTRVFETEYYDLESVEILRGPQGTLYGANSTGGVVNMKFAKPTEVFEGAVDLEVADYNHRRIKGVINMPITESVSMRIAGMMLERDGFTENQFPGKEGEDIDGRDITSWRMTIAAELSENTTATFTYYNFEEDDNRARVGKQMCYETETPVYGCNPYKIRYGQPKGASDLSGVWGAIAGLNTWSPLDYAAGNLTRSQDLRETYQNIDPVYKASEDTYILEIESGAIENYTITARAAYSETSVFSQQDYYNTDGSQKYAKLGENAGNPLLPPGNAAFPDGIVPVSAYTESMCGIFCNAISGYYDFAMAYDTSAGETEFKFAEIQVSSDLDGPVNFLAGFNYTEATSSSIYDVYWTTAEAAALSPLLGPRLYPSHYRNQTDPYELERKGLYTQVYYDASEDLRITVGARWNESEKSVADRQNLVNSIILAGGTRVGDPVTLGVQTVDPALGLVLTGQGAPTLPLVPGLGQQRKTLGVPTSFTEEEITGKVGVDWTPDLEGTDSTLVYATFSRGYRPGAFNPPIDPTLFSNVPQTTDPEFIDAYEIGMKNVLLDNTLVANLTAFFYDYEGLQVSKIIARTSVNENIDAEMQGLEAEFFWSPSSVPGLRFDLQVSLLETEIANGVTSVNPLDKISKVKGDTEGWLMKDFGSGATCGFKKQDLFIGIGAGALNINPAAGALDMIAAPKTLSPTEGPGSNFDSADPTGLVNPAVLIGGGALPTIANCASIQAKLAGLKAAGVPGVYGDYWEPVYDLSGNELVQSPATTIHFGAEYTANFENADLQVVSRIDYYWQDDMFSRIYNNPRDLIDAWDVLNAQIIIQSTVNPWYVKIWGQNLMDDDNITGHYFTAEASGGFRNDFLVDPQMIGISFGARF

SEQ ID NO: 81155 - protein, 354 aa, Unknown
  Bacterial polypetide isolated from the Sargasso Sea
MDLTIILDYIIISIIASLTVNSFLRNYAKKYKILVDIPDTSRKFHKRPTPLTGGIGILIALLISGKLYIDLNNLTGYVPEFTFQLMVISIPLVILFLIDDFKELKPLFRILIQVALTIYMIQSTGVYLETLGNLFGPGEINLGIFSMPITVFCVVGIMNAFNMMDGINGLCSGCAMITLMLIGFFSGLIYDSMLVLIIGSMIGFVIFNLGIFGKQNGVFLGDSGSNLVGFWVAWIAIYASQSKIYSIEPMTILWFVAIPLLDCIGLIFTRTINGISWATAGRDHIHHKLMKKFSPQSTLLIILTTTLLTGIFGIIVEIIFTSYISTLLFFVYAILYYLFTGYFWKKVFFGDATN

SEQ ID NO: 81156 - protein, 260 aa, Unknown
  Bacterial polypetide isolated from the Sargasso Sea
ARRLSPILKVPYHKLFNELKSKQQFIWIKRRLHPQQTRLIQKLGLKGIGFIEEYRRFYPNGNFAGQLLGYSGIDTQGLEGIEHKYESLLAGIPVTYVLEKEGMYRTDPLSNISKKIPDQYSLYLTIDSTIQHFAEKALREGVIKSRGDRGTAVVIHAKTGAILAMANYPGYDPNRYQRYSRERQLNYAVTAGYEPGSTFKMVTLAAGLNERLISADQEFFCEDGEYKIGNNLIRDSSPQGMLTLEQILKKSSNICAAKIG

SEQ ID NO: 81157 - protein, 267 aa, Unknown
  Bacterial polypetide isolated from the Sargasso Sea
ADGGEGLLDVLGGPDRSTVVTGPLGDPVEAGWRLDRGTAVIEMARVAGLELAGGADGNHPLDATTAGVGELILSAVESGARRVVVGMGGSATTDGGLGAIDAMGSQARYRGVEILVACDVRTRFTDAAEVFGPQKGATDAHVRLLNGRLERLVQVYGERFDVDVSVLDRAGAAGGLAGGLAAMGAELVDGIDLVAEELRLDEHVADADLVVTGEGWLDPTSYDGKVVGGVGVYAAAAGVPMLVVVGGAEPEVVGRGGVVSLSDRFGM

SEQ ID NO: 81158 - protein, 298 aa, Unknown
  Bacterial polypetide isolated from the Sargasso Sea
MILNAGERMIEGLEEAVEYIRNAKNIYITGSGTSYNSALIAKQILSKYVKIKSEPIIASELQFAPETIEEGSVLIAISQSGESADVLEAVRIAKKNNCKIISIVNLLTSSLSRKGDVVLGMGCGPEIGVAATKSFTAQLIILYKIVQKLGENITIDFEGFSESISKMIENTLGIKKIAKELKNVSDIYILGRGINYPIAIESALKLKELTYIHAEGIPGGELKHGPLALMDTDVFVIVINPSDSTYNDTLTSAREIKARGAKIIGVSDIESDVYDYWMDIPKISEILYPFQRYFQYSY

SEQ ID NO: 81159 - protein, 248 aa, Unknown
  Bacterial polypetide isolated from the Sargasso Sea
MTSNSLKFLDKFREVKNLEIIESQSDVKRLSKDFYNYSPILTERLDECIADLVVRPSDHNAVKKVAKICWEFSIPLTLRGSGTGNYGQAVPLFKGVVMQMSHFNKLEEFDPDTGFVKAQSGCVMGDLNKQLEKYGRELRLLPSTWKTATIGGFIAGGSGGIGSIRWGFLRDPGNLIGLEAVTINEKPDLLKFDAQESEPLNHAYGTNGIITSLLLATDIKRKWYSIVIACIEFEKTIEILKTLTSAAM

SEQ ID NO: 81160 - protein, 284 aa, Unknown
  Bacterial polypetide isolated from the Sargasso Sea
EDDEITVDSQGVEKKKRRRRATKGSSEKRRKRAEKRRLAALRKAEAAENIKTAEREERFSMRYEDFRSREVRKDEHRLQVYLEGADRALDKADYILEQRDEEEAVKLRHEQGVVRTELKMERREKERQEEEQMLIECVKLDGEASGGYLSGGLDRFVRGSTAKKDSRCPPMREIRESAMRMTQDLFEARSRLVLALQQCLQLEDVVKQFSKSAERADHEARKLQRTLRLLESNRGLKGALAPKQQEIDEMRHAHELKVAEYQSTSDVLASRERKLRLANRIAQA

SEQ ID NO: 81161 - protein, 300 aa, Unknown
  Bacterial polypetide isolated from the Sargasso Sea
MKIIHFLILFLVSINTYSNQEILTLGFGSCLHQDRSMAILKTIEKKELDLFMFIGDNVYGDQEDGELDKLIRTYKQQFNNLENFLQNVSTEFIWDDHDFGLNDGGSNYRYKDIAKSLFLETWQIPANDPRRLRDGLYFDKIINKNGLKIHLIFLDNRSFKSEWKLTDEFNKKGKERYIEDFNPEKTLLGKNQWKWLKDKLIVESDIKIIISSLQILSLGHGWESWDKFPLEREKFLKLIDESNISNLFILSGDRHRGGFYQFKTVGNNNIYEFTSSSLNLPILFNTEEKGPLRIGSTYRK

SEQ ID NO: 81162 - protein, 372 aa, Unknown
  Bacterial polypetide isolated from the Sargasso Sea
AMGGDRPKYEKEYIIPSTFDPRLISVIPVAVAKAAIKSGVARKKIENFEIYSEQLKQRLDPSVTIMQGINSQIKRNQKRVVFADGEDENTLKAAIAFQKSGFGTPILVAKEKVVKQRLKEIGYSENFNIQIINSTDKEKREKYKKFVFEKLHREKGFLERDCDRLVRNDRVVWGSCMVSCGDADAMVTGNTRRYGQSLQKVLKIIKSRPGEIMFGLNMVVNKGRTVFIGDTTVHEYPSSEQMADIALSAARVVRLFGFDPKVAFLSHSTFGQPITSRTKHIRDAVEILKKKKVDFKFDGDMQPDVALSEEYKDLYPFSEIVGKANILIMPGQHSAAISYKIMKTLGGAKVIGPLLIGLGEPIEIAPLRSSTS

SEQ ID NO: 81163 - protein, 219 aa, Unknown
  Bacterial polypetide isolated from the Sargasso Sea
MSNDILIVDDESDIRTLLSGILEDEGYFTREAANSEQAYAEINARLPSLVILDIWLHGSEQDGVDILKWVKTVYPSVPVIMISGHGNIETAVNSIKAGAYEFIEKPFQADKLVLLVKRALEAEGLRQENLELRKRAGFNEELIGESLSISQLKATINKVAPGNSRILITGPPGAGKEIVARAIHANSGRIDAPFIVLNCATMNPDRLEVELFGINHPSN

SEQ ID NO: 81164 - protein, 296 aa, Unknown
  Bacterial polypetide isolated from the Sargasso Sea
ADFDGDQMAVHVPLSIEAQLESRALMMSSNNILSPANGEPIIVPSQDVVLGLYYMTREKVKDKGEGGIFANIEEVERAFHNGFLGLHAKIKLKVATQNEEKPTEIAETTCGRALFSKIVPDEIPFSVTNKTMDSKEISRLINRCYREVGLKATVIFADKLMYLGFEYATKSGVSIALDDMVVPENKEEILTDAESQVKSIQNQFTSGLLTQGERYNKVVDIWSRTNDQVANAMMDKLGKERVTDSKGKKQDQESFNSIFMMADSGARGSAAQIRQLAGMRGLMAKPDGSIIETPIT

SEQ ID NO: 81165 - protein, 88 aa, Unknown
  Bacterial polypetide isolated from the Sargasso Sea
LKQGVTVLGHVQRGAQPTHRDRLIASAFGVYAVDLIAKKKFNRVVVWKDRGVQDLKLSQVAGFSKTIQKNDPLIKVARGLGIYIGELT

SEQ ID NO: 81166 - protein, 265 aa, Unknown
  Bacterial polypetide isolated from the Sargasso Sea
MSFLKIQNLSVDYKLRKETVHAAKDINIEIKRGEIVGLVGESGSGKSTVANAIIDLIDEPGKVSEGSIYLSDINIHENKKNILSLRGKKIGFIFQDPQTSLNPILTIGQQLIETIQTHLNLSNSEAKEKSINLLKEVGIKDAEKRFNDYPHQFSGGMRQRVVISLSLCCEPELLIADEPTTALDVSIQSQILELIKKLTKERNLAVILITHDMGVIAETTNRVAVMKNGNLVELGTTKQILTEPKETYTKSLVSSVPPTNKKISR

SEQ ID NO: 81167 - protein, 208 aa, Unknown
  Bacterial polypetide isolated from the Sargasso Sea
MKIKKAVFPVAGFGTRFLPATKSTPKEMLPVVDKPLIQYAVEEASKIGVEEFIFITHHAKGSIDKHFQNNEGLFNMLAEQGKDDLAKSIKDIGGSNAKYISVDQGEPKGLGHAIGCAENYIEENEFFVVLLADDLIYTKERNVLEQMKEQAEKYGKQVLALEQIPKEDISKFGVVDPKSSEGSISHLKGIVEKPAAHDAPSNLAVVGR

SEQ ID NO: 81168 - protein, 98 aa, Unknown
  Bacterial polypetide isolated from the Sargasso Sea
MIKKENEAYKTISEVAEELNLVNLKSGKVSTHTLRFWEKEFKQIKPKIFAGNRRYYDIKTIEILKKIKYLLKDKGMTIKGVKNQLLIDESDLDVSTNT

SEQ ID NO: 81169 - protein, 163 aa, Unknown
  Bacterial polypetide isolated from the Sargasso Sea
RKAKTKQKNEIIGSTAKIYSQKGTGNARHASKKAPIFVGGGVAHGPKGESNYKIRKLNKSEKKLSIASIITEKNKSNNLLVFNDFNEKIQKTKDVNKILLKFDAKNSILIVDKKSKENIEKATRNIPNVKITDIGHFSAFDLVKYKKIIFTESSVKELEKRYQ

SEQ ID NO: 81170 - protein, 222 aa, Unknown
  Bacterial polypetide isolated from the Sargasso Sea
MILALVFAVSVIGSASAKTLKIQLTFPKTSYDGQIVKMWTDRVTKLTRGELKFELLSKGEVVGMKETLEAVDKGLVDGGAAWTHYWSNYHPAAMLFGSPVAGGGIGLSTKSWLAWYFDNGGKELYDQLWSEMGMNVKGFVMASSGPEALGWFKEPIKNMDDFRKYRFRTPPGIPGQTYKDIGIASVSLSGGDILPALEKGTIDAAEWCCPKPDSVFGFQKVL

SEQ ID NO: 81171 - protein, 256 aa, Unknown
  Bacterial polypetide isolated from the Sargasso Sea
MFHIAPKAGIKRDRDTGRRYFDNSPAYLEAELDKSLARLGLDRIDLFYIHRRDPNTDIEEVTETLAAMVKVGKIGAFGFSEISPTTLYKAAAIHEVAAVQSEYSLSVRSPEMGLVQATADLGVSLVAFSPVGRSLLTDRPHSFETAQAAPFLKPNPRFNEPNLSANIAATSGFRELAKEFDTSAAALAISWLLHKGPHVIPIPGTRSVNHFRELCSGVEKRLSAEDMGRIETVLPIGWAHGDRYSVAQWDGAERYC

SEQ ID NO: 81172 - protein, 184 aa, Unknown
  Bacterial polypetide isolated from the Sargasso Sea
MTIKRVKFSDIRINFFDDVIDVRSPLEFEDDRIPGSINLPVLSDAEREMIGKMYKQRSKFEAKKLGASIVSKNISDHLKDYLYNKNRDWLPLIYCWRGGQRSYALATILDQIGWKVEVVDGGYKSFRKHVSEFLNKNIERYYLILLTGNTGTAKTKVLNLIEKRDGQTIDLESLANHKGSVFGS

SEQ ID NO: 81173 - protein, 77 aa, Unknown
  Bacterial polypetide isolated from the Sargasso Sea
EKLAGELAEKAQKGEDFANLARMNSDGPSVPKGGLLGTFGRGQMVPPFEEAAFVLKVGEVSGVVETPFGFHVIKRDR

SEQ ID NO: 81174 - protein, 204 aa, Unknown
  Bacterial polypetide isolated from the Sargasso Sea
MAKVILEGVKSLKPKKDRNLIAIAGPPGAGKSTVAEIVTDLMNENLMKTSLVPMDGFHLDNKTLKRAKLLDRKGAPETFDVKGFTELIKNLRYKRNLSVPLFDRSVDEVVKNARKIPAEQEYIIAEGNYLLLNKDYWRDLYNYWDYKVFISVDKNVLKSRLLERWLSENHTYSEAEARVLKNDLVNANIVNSNRLNATVEFQTG

SEQ ID NO: 81175 - protein, 207 aa, Unknown
  Bacterial polypetide isolated from the Sargasso Sea
MKINKLSIDGKKQSIEVLDKIFSAKINNQLVSGVIYKLNANFKGRKAKTKQRNEITGSTSKIYSQKGTGNARHSSKKAPIFVGGGIAHGPKGQDNYKIRKLNKSEKKMSIASLITEKNKSNNLIIFDDFGKKIEKTKEMFELLKKFDANNSLLIVDTKSKDNILKSTKNIPNVKLTDANHFSAFDLVKYKKIIFTESSVKELEKRYQ

SEQ ID NO: 81176 - protein, 180 aa, Unknown
  Bacterial polypetide isolated from the Sargasso Sea
MTPEEVESYFTRNDGTFLFARWGRPVAPVVFGLDDNSLAILKGAIEAVMSLTNQQMSETDPELGSNFMFFFFSNWLELIEVPNLDKLVPNMSTLVEQLIEAEANQYRIFRFDNAGAIRACFVFIKIDENIMQVPAQTLMLSQVVQSVLLWSDDAFKSGSPLLVSDDHHTFVKPTVSTLIR

SEQ ID NO: 81177 - protein, 199 aa, Unknown
  Bacterial polypetide isolated from the Sargasso Sea
CFLKEIESLNTILNSSNQKITAIVGGNKIDDKLQMLDNLSKKINNIYIAGNNINAYNDKKEFINKLNNNKANIILMKDGFGNTDKNETPLYINSCLDKKDDQKIFDIGPKSLCELHNLIGNSDIIFWNGTLGIVEDNFYKYGSEMLINFLNYSNKKIIIGGGDTAGFVNNYSNNFYHVSTGGGASIEYLSNGYLIGMKK

SEQ ID NO: 81178 - protein, 201 aa, Unknown
  Bacterial polypetide isolated from the Sargasso Sea
MKKILIIGGSGLIGKKLKKNLKKKYKLIAPKRGKNFDIRKISTLKKYFNESIDVIINLSGQASDKKKMNETIIIGNKNIINLLRKLNKKILIIYFSTNLVYGYSNKILNEKSKTNPFDFYSKYKLKAEKNYERSNLNYLILRLGNIYGDIKKENNVLSKIYNSLKKKNKLNITNPKVFRNYISLDDLVNIIRKILAKRLKE

SEQ ID NO: 81179 - protein, 320 aa, Unknown
  Bacterial polypetide isolated from the Sargasso Sea
GNTRVRIYNIDEKIRQVKLRTTNSEMPANLDIGPSSPQNYSIPQSALLRFSESIVNEDIPYDAILDLLNRKSPNIKGITRGSPIIQSGDLLSEIRNIIPNLQNSCLSIQGPPGAGKTYSASRAIVDLLKSGNRIGIASNSHKAINNLLDGIMKAAKEQNFVFKGVKKSTVDYDISEFDDGYAGQYIENNAYTLQREDFLYPYEECTNSMCKRPRTRRDRLPVGSPYSEGTCPSCGSYGFGSSGVFHIRLYAGTAWSFSQERFDQLFDYMFIDEAGQLSMAHTIAIATAAKNLVLIGDQMQLPQPTVATHPGDSGLSSLEY

SEQ ID NO: 81180 - protein, 279 aa, Unknown
  Bacterial polypetide isolated from the Sargasso Sea
GSVDDGKSTLLGRLLYDSQNVFADQMDQAKIESEKYGTQGKDIDLALLIDGLQAEREQGITIDVAYRFFETSKCKFIVADTPGHEQYTRNMATGASNSDVAIILIDAQKGVLEQTKRHSFIVNLLGIQHVVVAINKMDLVNYDEHIFNKIVTEYKELIKNFNFISTKYIPLSALKGDNVFSNFENTKWYSGPSLIETLENIQIEEEGMNDGFSMPVQWVNRSSSDFRGYAGTITSGKISKGDVISTASSNSQTSIKNIYGPNGELDEAFTNQAVTLTLQ

SEQ ID NO: 81181 - protein, 281 aa, Unknown
  Bacterial polypetide isolated from the Sargasso Sea
NLLTKDKWISQPIIDELTSCLNKKEQALLFLNRRGYSPLSLCFECGYRYQCNQCTSWLVMHRSKKRLLCHHCGVIYPIKSDCPKCESKESIKLIGPGIERIQEELGILFPQYRIGVMSSDVANTPNKIKNIVENFENNKIDILVATQIMAKGYHFPNLSFVGVLDADAGLTGGDMRAIERTYNLLQQVSGRAGRTNKRGKVLIQTYFPDQEVIQSLIKRDRKLFVQQALQDRKTFNIPPFTYMTSIIISGHAKSQAESYAQKLVQNNFSSKNINILGPVEA

SEQ ID NO: 81182 - protein, 259 aa, Unknown
  Bacterial polypetide isolated from the Sargasso Sea
MDLASAKTLKIQLTFPKTSYDGQIVKMWTDRVTKLTRGELKFELLSKGEVVGMKETLEAVDKGLVDGGAAWTHYWSNYHPAAMLFGSPVAGGGIGLSTKSWLAWYFDNGGKELYDQLWSEMGMNVKGFVMASSGPEALGWFKEPIKNMDDFRKYRFRTPPGIPGQTYKDIGIASVSLSGGDILPALEKGTIDAAEWCCPKPDSVFGFQKVLKNYYLQGLHQNVVNGDIYINGDVYNSLTDHQKYAMEVASEAMITRNIT

SEQ ID NO: 81183 - protein, 76 aa, Unknown
  Bacterial polypetide isolated from the Sargasso Sea
MEEFKISIVTPSLNQGNYIEDAIQSVLNQNYKNFEHIIIDGLSTDKTIEILKKYKHLKWISEKDEGQSDAINKGFK

SEQ ID NO: 81184 - protein, 269 aa, Unknown
  Bacterial polypetide isolated from the Sargasso Sea
FAEGIKEHVMETGASIISAQKSQETYQEPSLFTENSMLKESAVWDCVTCGACMEECPVMVEHVDSIVDMRRYLVMEQASMPEGAEGVLLNMEQRGHPWSGNQTSKTEWMEGLDIPTFADENEAEVLLWVGCTSALNEANQKAPRAMASILRVADIKFAVLGNEEGCTGDPARRIGNEYLYQMMAEQNIQTLNQYSFKKIVTLCPHCFNNIKNEYPQLGGNYKVYHYTEFVDELIQNGKLKPVKSVDISMTYHDSCYLGRHNKVYDAPRN

SEQ ID NO: 81185 - protein, 200 aa, Unknown
  Bacterial polypetide isolated from the Sargasso Sea
MLFIIIPVVATTNAVDGPPCSVAQFGAVADNKTDNTLAFRQAAKACAGGEVLVPAGAWMTGPFNLSSNTILRVEGTISGSQIPEVYPVVTQQPLDEAYRAPWKLNRQRQALVSAYSATNITITGAGTIDGNGWPWWDNQTSQQCNGRHPTTWKPNASQTACLMQRPKLVEFVDCEDITLVGDSADKPLTLRNSPFWTFTR

SEQ ID NO: 81186 - protein, 77 aa, Unknown
  Bacterial polypetide isolated from the Sargasso Sea
MLKVKKAVFPVAGSGTRFLPATKAMPKELLPIIDKPLIQYAAEEAVQAGIDTLIFITGRNKRAVEDHFDNNQELEMA

SEQ ID NO: 81187 - protein, 252 aa, Unknown
  Bacterial polypetide isolated from the Sargasso Sea
FANDREGMHDLAEALDLPLSSVMSRVETLAEYNPMLGMRGVRVGVTVPEIYEMQARAIFEATAEASKNGTFVVPEIMIPLVSAKREVELVRARIDGVASMVRAETGVKFDYRLGIMVETPRAALRADDIALNSAFLSFGTNDLTQMTYGLSRDDAGRFMSDYVQQGVFPEDPFHTLDIDGVGELLKMGVTRARSVKSDIVLSICGEHGGSPESIDFCRQIGMDYVSCSPFRVPIAKLAAAQLAIKDRIDPSK

SEQ ID NO: 81188 - protein, 253 aa, Unknown
  Bacterial polypetide isolated from the Sargasso Sea
TFLLSAYLLYFLKNKYVNTTSSNPPFSIKNFQEGINYFFKTKNIRNIAFSISSCLIGAGTLFILGHTFLTVDLGFSESSFGFMIASFGTGIIFSMLTLSYFVTTFNRINFLIGSCMIITGISLFSAFRSVDFVVILLSIFISGVGTGGVYLLTISYLQASTNPELRGRVFGNFYTIGRLALLISFLISGTAANYLDGVFNQDGVYLVLIGSSILIFITGILNFTIGYKRIFKEFGIERSNFNKIKFDLDKKEN

SEQ ID NO: 81189 - protein, 278 aa, Unknown
  Bacterial polypetide isolated from the Sargasso Sea
TGIFFTIYLGFPQIKYFKHGWRILSGKYVKEDTEGDTTPFQALTTALSGTVGTGNIGGVALAIFLGGPAAIFWMWVTAFLGMTTKFVEVTLSHKYREKLPDGTMSGGPMYYIENGLNMKWLAIVFSVCLLMMCLGTGNMPQISSISVVLLDTFDIPKIVTGLVLSVLVWLVIIGGIKRIAQIASKLVPFMAFWYIVGGLAVIISNYENIIPSFQSIFIHIFTPTAAVGGFLGASVAAALTRGVNRGLYSNEAGQGSAPIAHASSKTENPIEEGMVSVL

SEQ ID NO: 81190 - protein, 292 aa, Unknown
  Bacterial polypetide isolated from the Sargasso Sea
MVATVSTVAYLGLEARTVEVQCQLVPGLPAFIVVGLPDKAVAESRERVRNAIAAIGLSLPPKRITVNLSPADLPKEGSHFDLPIAVALLGAMGVIDAETLAGYIVVGELGLDGRTAPSPGVLLAALHAGEQDLGLVCPAAQGSEAAWAGQVEVVATPDLLSLLNHFKGTAALSPPQPGAVEPPMRAADLRQVKGQESAKRALEIAAAGGHNLLMVGPPGAGKSLMASCLPGILPELTPTEALETSMVASVAGTLEGGRISRARPFRNPHHSASMAALVGGGLKARPGEVSMA

SEQ ID NO: 81191 - protein, 251 aa, Unknown
  Bacterial polypetide isolated from the Sargasso Sea
MTSNTPKFIDKFRGVKNLEIIESQSDIKRLSKDFYNYSPILTEKLDECIADLVVRPSDHKAVKAVAEICWEFSIPLTLRGSGTGNYGQAVPLFKGVVMQMSHFNKLEEFDPDTGFVKVQSGCVMGDLNKQLEKYGRELRLLPSTWKTATIGGFIAGGSGGIGSIRWGFLRDPGNLIGLEAVTMNEKPELLKFDAEESEPLNHAYGTNGIITSLLLATDIKRKWYSIVIDCIEFEKTIEILKTLTSAAIDLN

SEQ ID NO: 81192 - protein, 147 aa, Unknown
  Bacterial polypetide isolated from the Sargasso Sea
MSIYSERILYTAKIDLISSKISSNKLLRKALIKYQRRFPKIQKKIIKHVIIEGRDIGTVIFPRAEVKFFMWASSKIRAKRRYDQVKKTSKKAKLLSIHKEIDRRDLRDMTRKVAPMIPAADSYLIDNTNYDIPQTFNAILKILNEKN

SEQ ID NO: 81193 - protein, 192 aa, Unknown
  Bacterial polypetide isolated from the Sargasso Sea
MILALVFAVSVIGSASAKTLKIQLTFPKTSYDGQIVKMWTDRVTKLTRGELKFELLSKGEVVGMKETLEAVDKGLVDGGAAWTHYWSNYHPAAMLFGSPVAGGGIGLSTKSWLAWYFDNGGKELYDQLWSEMGMNVKGFVMASSGPEALGWFKEPIKNMDDFRKYRFRTPPGIPGQTYKDIGIASVSLSGGE

SEQ ID NO: 81194 - protein, 175 aa, Unknown
  Bacterial polypetide isolated from the Sargasso Sea
MQNSKNKDNENINLDILKRLNYIYKSIISEDKTLEYSKKINRLINHFKKSEVKTETKGTWSENTILLITYADSINKGISGKSLNNFGTFYKKYLKKFINSIHFLPFFPSSGDGGFSVKNHFEVDETFGTWEDIKDLSKNANIMTDLVLNHASSKGLWYKNFLKREKTGQKLFLYY

SEQ ID NO: 81195 - protein, 306 aa, Unknown
  Bacterial polypetide isolated from the Sargasso Sea
AEDFTVLGGSIGPGSTSKRHRIAELAERDRLPLVMLLEGAGHRPSGTGGAEPGRTPTDLIQQARLSGRVPLVAAILGPSAGHGALVVPLSDYTVMTRDAAVFTAGPPVVKAALGEEVTAGELGGPDVAVASGLVHDVADDDRSALDLVRTWLSFFPSSAWSYPPRREGIDTDLRPVDDLVDLIPRQSNRVYDVRPVVERLVDDGRFVEVQPGFGASIICGLAHLGGESVAVVANQPAVRAGAIDVAAADKAAHFIQVADSFHLPLVFLTDNPGVLAGTASERAGILRAGARMFAAQTQARTIKVQA

SEQ ID NO: 81196 - protein, 152 aa, Unknown
  Bacterial polypetide isolated from the Sargasso Sea
MNDIIRTLSSEFSDLANAAEAVRAVVRMTVSIVLGGLLGYERESSGKSAGVRTHMLVALGACVFVVVPLQAGVQLADMSRVLQGLTSGIGFLCAGAILKPDNETHVRGLTTAASIWIAAAIGVAAGMGHAVTAIVATAFALIVLRILQMSKK

SEQ ID NO: 81197 - protein, 219 aa, Unknown
  Bacterial polypetide isolated from the Sargasso Sea
MSFLKINNLSVDYKMRRETVYAAKNVNIEVGKGEILGLVGESGSGKSTVANAIINLIDEPGKVSNGSIFLGDINIHKDPENIVKYRGKKVGLIFQDPQTSLNPIFTIGEQLIETIQTHLNLNTEEAKNKAITLLKEVGIKDAEKRFDNYPHQFSGGMRQRVVISLALCCEPELLIADEPTTALDVSIQSQILDLIKKLTKERNLAVILITHDMGVIAET

SEQ ID NO: 81198 - protein, 138 aa, Unknown
  Bacterial polypetide isolated from the Sargasso Sea
LYSSDVDNVSSIISARKQVRNKLIMFQRSFPKKYGNNIKFAIIEGRDIGTVIFPKANYKIFLWADAEIRAKRRYKQLGKNAKNVSYSKIFSEINVRDRKDMTRKIAPLMPAANSVLLDTSYIDIEQAFNALKEIILKA

SEQ ID NO: 81199 - protein, 227 aa, Unknown
  Bacterial polypetide isolated from the Sargasso Sea
MVSPIGPDGIKPKTLANIAADLRARRPATLCLNASSGKLAQPLSSSIPKTSCLDEKSMLFYLVQPPGRRLVIIGGVHISQFLAPMANFVGYDVTIIDPRSVFTSAERFPEINCVTAWPDEAMRTLKPDSRTAIVALAHDPKIDDPGLQVGLASDAFYIACLGSDRTHAARCARLQEAGFNKVDLQRLNGPAGLNIHALTPAEIAVSILAEMIAADRNPEIMINQVVC

SEQ ID NO: 81200 - protein, 101 aa, Unknown
  Bacterial polypetide isolated from the Sargasso Sea
KGKKFAIIEGRDIGTEIFPQAKIKIFMWADAKVRAKRRYLQIKKKGQKTSLKRIYDEIVARDMNDLNRKIAPLKPAVNSVLLDTSYLDIEQAFNVIKRIFS

SEQ ID NO: 81201 - protein, 250 aa, Unknown
  Bacterial polypetide isolated from the Sargasso Sea
TLEAVDKGLVDGGAAWTHYWSNYHPAAMLFGSPVAGGGIGLSTKSWLAWYFDNGGKELYDQLWSEMGMNVKGFVMASSGPEALGWFKEPIKNMDDFRKYRFRTPPGIPGQTYKDIGIASVSLSGGDILPALEKGTIDAAEWCCPKPDSVFGFQKVLKNYYLQGLHQNVVNGDIYINGDVYNSLTDHQKYAMEVASEAMITRNITNRAVENGKALIDLTENHGVKLWDTPADYFTEYMNAAQATLKKNAAS

SEQ ID NO: 81202 - protein, 297 aa, Unknown
  Bacterial polypetide isolated from the Sargasso Sea
MTFLKISNLSVDYKMRKETVNAAKNVNIDIKKGEIVGLVGESGSGKSTVANAIVNLIDEPGKVSSGSILMGETNISENPETIVQYRGKKIGLIFQDPQTSLNPILTIGEQLIETIQTHLKLSSEDAKNKAINLLKEVGIKDAEKRFYNYPHQFSGGMRQRVVISLALCCEPELLIADEPTTALDVSIQSQILELIKRLTKERNLAVILITHDMGVIAETTDRVAVMKNGDLVEIGLTKQILVEPKEKYTKSLVNSVPPTNKKISRFTIIEKENVSNQNNNVKILNRWSKKIIVDQNL

SEQ ID NO: 81203 - protein, 263 aa, Unknown
  Bacterial polypetide isolated from the Sargasso Sea
IAVFPIAGMGTRFLPITKTISKEMLNILDRPLLDYAVKEAKDAGIETFIFVTNKENTKPIDYFSKNTKLESFLKKKKKINILEEIKKLNINKKNLKIIFQDKPAGLADAILRTEKYVKKEDFCVILPDDLIIGSNCTKELINAYNKKKSTVIAIMEVNKKDVSSYGIIESSIFKQNIYKIKNMVEKPSVKDAPSNLAIVGRYILLNDIFKYIKKTKMGSGQELQITDAIFLSSKFNEIWGYKFNGKRYDCGNKIGFLKAQIAV

SEQ ID NO: 81204 - protein, 190 aa, Unknown
  Bacterial polypetide isolated from the Sargasso Sea
MTIKKCLFPVAGFGTRFLPATKAVPKEMLPIVTKPLIQYGVEEAMSAMIDEMAFVTGKNKRAIEDHFDINYELENAISGTEKETLIESTRNIINNCSFVYKRQTEMLGLGHAILIGEAMIGSEPFAVILPDDLCFGSELSVIDQMVKLYEQYNCSVIAIEEVPREETHRYGVIAGEEESAGIFRVSDMVE

SEQ ID NO: 81205 - protein, 62 aa, Unknown
  Bacterial polypetide isolated from the Sargasso Sea
MRQIRKAVFPVAGSGTRFLPATKAMPKELLTVVDKPLIQYAAEEAVAAGIDTLVFVTGRNKR

SEQ ID NO: 81206 - protein, 303 aa, Unknown
  Bacterial polypetide isolated from the Sargasso Sea
KMWTDRVTKLTRGELKFELLSKGEVVGMKETLEAVDKGLVDGGAAWTHYWSNYHPAAMLFGSPVAGGGIGLSTKSWLAWYFDNGGKELYDQLWSEMGMNVKGFVMASSGPEALGWFKEPIKNMDDFRKYRFRTPPGIPGQTYKDIGIASVSLSGGDILPALEKGTIDAAEWCCPKPDSVFGFQKVLKNYYLQGLHQNVVNGDIYINGDVYNSLTDHQKYAMEVASEAMITRNITNRAVENGKALIDLTQNHGVKLWDTPADYFTEYMNAAQATLKKNAASNAFFKEVYEHMTAHAKIVVPFIA

SEQ ID NO: 81207 - protein, 89 aa, Unknown
  Bacterial polypetide isolated from the Sargasso Sea
MTFLKINNLSIDYKMRKETVNAAKNINIDINKGEIVGIVGESGSGKSTVANAIVNLIDEPGKISSGSIFMGETNISENPETIVSYRGKK

SEQ ID NO: 81208 - protein, 181 aa, Unknown
  Bacterial polypetide isolated from the Sargasso Sea
MILALVFAVSVIGSASAKTLKIQLTFPKTSYDGQIVKMWTDRVTKLTRGELKFELLSKGEVVGMKETLEAVDKGLVDGGAAWTHYWSNYHPAAMLFGSPVAGGGIGLSTKSWLAWYFDNGGKELYDQLWSEMGMNVKGFVMASSGPEALGWFKEPIKNMDDFRKYRFRTPPGIPGQTYKDI

SEQ ID NO: 81209 - protein, 292 aa, Unknown
  Bacterial polypetide isolated from the Sargasso Sea
NLSKESIKINGLDDPELQRNIPKDLLEKLVEELEIVKTLLPKLDSKSILEGHLTPIWFGSAINSFGVKELMNGLTKLAPEPQIQRATPRDILPEEEKVSGFVFKVQANMDPKHRDRVAFLRMASGHFKRGMKLTHVRTNKPMAISNPVMFLASDRELADEAWAGDIIGVPNHGQLRIGDTLTQGEELRVSDIPSFAPELLQYCRAADPLKSKHLEKALMQFAEEGAAKVFRPSVGTGFIIGVIGSLQFDVLASRIELEYGLPVRFEASQFNSARWISGNKIDLDKFSSENKQ

SEQ ID NO: 81210 - protein, 159 aa, Unknown
  Bacterial polypetide isolated from the Sargasso Sea
MIKKCLFPAAGYGTRFLPATKAMPKEMLPVVNKPLIQYGVEEALDAGLNEISIVTGRGKRALEDHFDISYELENQIKGTDKEKYLVGIRKLLDECSFSYTRQTQMKGLGHAILTGRPLIGDEPFAVVLADDLCVNLEGDGVLTTDGQALPEIPLHHRCG

SEQ ID NO: 81211 - protein, 265 aa, Unknown
  Bacterial polypetide isolated from the Sargasso Sea
PKLLKFDAEESEPLNHAYGTNGIITSLVLATDIKRKWYSIVIDCIEFEKTIEILKTLTSAAIDLKLGAILEEEIVDQMPKWFKTKSRSHKILIQSTLGGIKTIELICKKFKVESNLLGEEEKLVNGISEVVWNHTTLHMRSRDKNWTYLQMLLPLNNELELINFLRKKWGKKVLWHLEAVSQQGSPRLAALPVLKWNGAEELNEIMEDCKKLGAFIFNPHVLTVEGGGLGVVDADQVKAKLRFDPKGLLNPGKLEGWEVKEQFKI

SEQ ID NO: 81212 - protein, 232 aa, Unknown
  Bacterial polypetide isolated from the Sargasso Sea
MQKVNKAVFPVAGMGTRFLPATKAMPKELLPIIDKPLIQYAAEEAIAAGIETLIFVTGRNKRAIEDHFDNNRELEMALRSKNKNEQANMVKNILPAGVECIFVRQPEQLGLGHAVLCAERAVGSEPFAVLLADDFLTYEGAGATSDLICNFETSGNTQLSVMEVNSQEISNYGVIIPNLELGSVAGLIEKPKVEDAPSNLASIGRYVLTSDIFQILRSQPAGAGGEIQLADA

SEQ ID NO: 81213 - protein, 47 aa, Unknown
  Bacterial polypetide isolated from the Sargasso Sea
GDLIHRSEFDLLKTPNLCKKSLNEIKDVLASKDLSLGMNVENWPPVG

SEQ ID NO: 81214 - protein, 180 aa, Unknown
  Bacterial polypetide isolated from the Sargasso Sea
SIISTRIFRRRRRALLKIKPYVEHWHNHLSKSKEQIGINFLSGIQNISPEEEEEEVISKKIAEQLLKQRSIEALTGKCSFGPHRDDIEFLINNISVRKYGSSGQQRTFILALKMAELDLLSKTLNVPPILILDDVLAELDITRQNLLLNSVGKNSQCFISATHLDKFNQSFLDSSQMIYL

SEQ ID NO: 81215 - protein, 263 aa, Unknown
  Bacterial polypetide isolated from the Sargasso Sea
MSPNPDLIVFDEPTTALDVTTQVDVLAAMRDIVKTYETAAIYITHDLSVVAQMADRIKVLRYGEEVEEAMTRKMLKSPKEDYTKSLWSVRSIQKPEKKSKDIILEVGNIDAFYGSFHVLKNINIKLPLGRTVALVGESGSGKSTVARVITGLLEPKTGSIKFKNSDLPPSLKGRTKDQLQKIQMIYQMADVAMNPKQTVYDIISRPASFFAGLTGANLRKRVIELLKQIDLDESFIDRYPSELSGGQKQRICIARALAANPEV

SEQ ID NO: 81216 - protein, 280 aa, Unknown
  Bacterial polypetide isolated from the Sargasso Sea
SNGDDAKFQDFVNQAISQKYDGIILSQGRDPYSTALVKKAVDAGIKVAVFDTAVNGEIPGVTVTQQDDASLTELSFGQLVKDFNGKANIIKLWVAGFPPMERRQAAYQTLLKQNPGIKELESIGAVSSDVQGDTANKVGAILAKYPKGKIDAIWGTWDAFSQGAYKALKENGRSEIKLYSIDISNQDLQLMRESGSPWKVSVAVDPKLIGATNVRLIANKIAGEPTPATYDFKAAAIPQALLAAQPGAVNVASLGKIIPGWGQTEDFIAPWFATLEAKNK

SEQ ID NO: 81217 - protein, 292 aa, Unknown
  Bacterial polypetide isolated from the Sargasso Sea
SQFKKLVHNCHFDAAKDPVAWLPPMVVLQSQDKFIQQWVTYPDWLPQTHRLTNVFCGGETQGKLQLDSYFASNLPHSYKLVRNELAGWEHSTKFSPWLANGSVSARQVLSALRQFESQHGANESTQWIEYELLWREYFHWYSHKFNNKLFWFSGINGKKPLTSFYAQRFQAWKTATTPYPLVNALMSQLNQTGYMSNRGRQIVASCLIHELQCDWRYGAAYFQQQLIDFDVAINWGNWQYLAGVGADPRGSRRFNLAKQQQTYDPKGQFIKAWLGSVALSQDNLEQVAQLDY

SEQ ID NO: 81218 - protein, 270 aa, Unknown
  Bacterial polypetide isolated from the Sargasso Sea
CWRHHDNPVGTSFRWQVDEPKTLVDGFESQHKTMIKAMKGVPGVKPERFEAASKQVRHCALSLVGEPIIYPRINELLDELHGRGISSFMVTNAQFPDQMETLRPCTQLYISVDAPTAPELKAVDRPLFPDFWERFLACVDLLREKRQRTVFRLTLVNGWNTAELSKYVELVRRGQPDFVEVKGVTYCGDSKASPLTIKHCPYHDEVRAYCAAMVAELGEGYELASEHAHSNIVLIARSAFKVDGVWHTWIDYDRFAALATSGQAFGALDY

SEQ ID NO: 81219 - protein, 315 aa, Unknown
  Bacterial polypetide isolated from the Sargasso Sea
TDRVTKLTRGELKFELLSKGEVVGMKETLEAVDKGLVDGGAAWTHYWSNYHPAAMLFGSPVAGGGIGLSTKSWLAWYFDNGGKELYDQLWSEMGMNVKGFVMASSGPEALGWFKEPIKNMDDFRKYRFRTPPGIPGQTYKDIGIASVSLSGGDILPALEKGTIDAAEWCCPKPDSVFGFQKVLKNYYLQGLHQNVVNGDIYINGDVYNSLTDHQKYAMEVASEAMITRNITNRAVENGKALIDLTENHGVKLWDTPADYFTEYMNAAQATLKKNAASNAFFKEVYEHMTAHAKIVVPFIAQMETSDASIGSALQL

SEQ ID NO: 81220 - protein, 206 aa, Unknown
  Bacterial polypetide isolated from the Sargasso Sea
MKIDKINIDGKKNSIEVLDKIFSAKINKQLVSNVIYKINANYKGRKAKTKQRNEISGSTAKIWAQKGTGNARHSSRKAPIFVGGGVAHGPKGESNYKIRKLNKSEKKNSLASLITEKKLNNNVIIFSDFTSKINKTKEMKSILVKFEILNGLIVLDKKSKENVYKSLRNISNIKTTNASHFSAYDIVKYKKLIFTESSVKELEKRF

SEQ ID NO: 81221 - protein, 257 aa, Unknown
  Bacterial polypetide isolated from the Sargasso Sea
KDFYNYSPILTEKLDECIADLVVRPSDHKAVKAVAEICWEFSIPLTLRGSGTGNYGQAVPLFKGVVMQMSHFNKLEEFDPDTGFVKVQSGCVMGDLNKQLEKYGRELRLLPSTWKTATIGGFIAGGSGGIGSIRWGFLRDPGNLIGLEAVTMNEKPELLKFDAEESEPLNHAYGTNGIITSLLLATDIKRKWYSIVIDCIEFEKTIEILKTLTSAAIDLKLGAILEDEIVDQMPKWLKSNDRSHKILIQATFGGTKT

SEQ ID NO: 81222 - protein, 272 aa, Unknown
  Bacterial polypetide isolated from the Sargasso Sea
YATLPIASLLLGFFSDLDTFNVVNEFGNGWSGSIIFLLDTITFLLSAYLLYFLKNKNVNTTSSNPPFSIKNFQEGINYFFKTKNIRNIAFSISSCLIGAGTLFILGHTFLTVDLGFSESSFGFMIASFGTGIIFSMLTLSYFVTTFNRINFLIGSCMIITGISLFSAFRSVDFVVILLSIFISGVGTGGVYLLTISYLQASTNPELRGRVFGNFYTIGRLALLISFLISGTAANYLDGVFNQDGVYLVLIGSSILIFITGILNFTIGYKENF

SEQ ID NO: 81223 - protein, 149 aa, Unknown
  Bacterial polypetide isolated from the Sargasso Sea
LGGPAAIFWMWVTAFLGMTTKFVEVTLSHKYREKLPDGSMSGGPMYYIENGLNMKWLAVVFSVCLLMMCLGTGNMPQISSISVVLLDTFNIPKIVTGLVLSVLVWLVIIGGIKRIAQIASKLVPFMAFWYIVGGLAVIISNYENIIPSF

SEQ ID NO: 81224 - protein, 285 aa, Unknown
  Bacterial polypetide isolated from the Sargasso Sea
HRLDVVKVELPPRFKKIGRYAFYGCSNLEECVVPPGVEVDQNAFYDCSKLRATTVLGDADFPTVWDDTVSEKAFIHRLDVVKAELPPPTTVLSDADFPTEWGDTVPDKAFAYRRDVVKVELPPRIKKIGVEAFIRCSKLEECVVPPGVEVGKDAFTWCSKLRATTVLSDAYFPVEWGDTVPDKAFVNRRDLKKVVLPPRIKKIGVEAFARCSKLEECVVPPGVEVGKDAFTWCSKLRATTVLSDAYFPVEWGDTVPDKAFADRSDVVKVELPLRIKKIGKNAFYG

SEQ ID NO: 81225 - protein, 172 aa, Unknown
  Bacterial polypetide isolated from the Sargasso Sea
GMAHRGRLSTLAHILGKPYANILSEFEGKAYDGDGLFDGDVKYHLGYSRKQVADTGEEVTITLAPNPSHLEAVDPVVEGIARARIDARDGDEASVLPILIHGDAAIAGQGVVYEVAQMAGLEGYRTGGTVHIVVNNQVGFTTNYLDARSSTYCTDVAKVTKSLVFHVNADDV

SEQ ID NO: 81226 - protein, 289 aa, Unknown
  Bacterial polypetide isolated from the Sargasso Sea
MKIKKAVFPVAGFGTRFLPATKSTPKEMLPVVDKPLIQYAVEEASRIGVEEFIFITHHAKGTIEKHFQNNSELYNMLLDQGKDDLANSIKNIGGPNAKFISVDQGEPKGLGHAIACAEKYIAEDEFFVVILADDLIYCKERNVLEQMKEQAEKYGKQVLALEQIPVVDISKFGVVDPESSEGRTFHLKGIVEKPLAEDAPSNLAVVGRYLFNKSIFDHIDNDNAGKHGEIQITDAILSNINDFIGFKFEGDRFDCGSKVGYLKANIALGLANEELSERLKNYIEEIKDL

SEQ ID NO: 81227 - protein, 312 aa, Unknown
  Bacterial polypetide isolated from the Sargasso Sea
MIPPSLLPEGLSDRLPPQAEASARLARRVLDTVATHGYERVMPPLAEFEDTLTQRLKSMRAQDLVRAVDPVSQRTLAFRPDMTAQVGRIAATRLRSAPRPLRLSYAGPVIRQKASQLRPEREKMQLGAELIGSDSAAAAVEIVNIAIEALTAAGVTGITIDFTLPDLIDALAAGPLPLGAEELEAVRAELDAKDAGALVAISPAAAAYLPLIEATGPFHAAMERLEAFSASLGGAIDSRIAGLRAIAKPIGWDITLTLDPTERHGFEFQNWFGFSIFAEGSSARSAVAAAMPLPVAAKRMSQPWAFRSIPIR

SEQ ID NO: 81228 - protein, 202 aa, Unknown
  Bacterial polypetide isolated from the Sargasso Sea
IVGLTGSVASGKSTVASWMCEMGIAVHDADAVVHSLLASNGEAVMETISTFGSDIGASDGSIDRKKLGKHVFANPADRKKLESILHPLVRHHRDQFLRDQQRLGSQIVVLDVPLLFETGGDLLCDYVIVVYASEDTIRRRALSRPGMTAGKLSGILATQMPASQKCQRADFVLDTDLDPDITRQDLSSWLKRITTAPDSSKR

SEQ ID NO: 81229 - protein, 188 aa, Unknown
  Bacterial polypetide isolated from the Sargasso Sea
MNQSLIQGILKNDHGSIARVMSLVENNEISADILSKLHIHSKKSIRVGITGPPGAGKSTITNALIEICLANQKTVGVIAVDPTSPFTGGALLGDRVRMNKYSWDEKVFIRSLGSHGDLGGLSRKAHEIGDVLAASGKDYIFFETVGVGQGEHDIINTADICVVVLTPESGDEIQLMKAGLIEIADIFI

SEQ ID NO: 81230 - protein, 285 aa, Unknown
  Bacterial polypetide isolated from the Sargasso Sea
EQISDLVKEEKKLKKNGVPKTFKEFSYIKSIGFSDSKIAELTKSSTKEIQKKRQKFKIFPVFKKIDTCAGEFKSETPYMYSTYQKLADNLSACESNPTKKEKIIILGGGPNRIGQGIEFDYCCCQASFALRKKKYETIMINCNPETVSTDYDTSDRLYFEPLIEEHVMNIIYKEKEKGKLLGVIAQFGGQTPIKLARTLNDNKIPILGTQFNSIDLAEDRERFKKIIIKENLKQAESGIAKNKEESFEIASKIGFPIVIRPSYVLGGRGMEIIYTRSDLEKYIDE

SEQ ID NO: 81231 - protein, 138 aa, Unknown
  Bacterial polypetide isolated from the Sargasso Sea
MYSSNVDNIASIISSKEELRKELIKIQQDFPKKFAKNKKFAIIEGRDIGTVIFPDANHKIFLWAKSSIRARRRCDQIIKNGKKANYNKIYSEINKRDSKDITRKIAPLKPAENSVLLDTSYLDIEQSFNAVIKILGRY

SEQ ID NO: 81232 - protein, 257 aa, Unknown
  Bacterial polypetide isolated from the Sargasso Sea
MPVGSDTLLAHYGGGAGEIPMTIDYFVDRNGTSTDAPTHTIDVDFSAPGPAPGEDPENSLLARVRVFGVDPTKENELTDADFNRDATIETVLWSTPLPAPGTIIKWYWGDLAHKFDELTLTNEGGGDTLTRTVPWSIIREVGNRTLPVFYTLGWPTNDNTQRSLAQNVVVAANKVVLEEPRFVKATAFLACTDLNRATREATVRVPGNTVYFQEHMVVRCEFRVFSDITGDTQLGNTLALSSLPLTPDMVSNGFDIK

SEQ ID NO: 81233 - protein, 79 aa, Unknown
  Bacterial polypetide isolated from the Sargasso Sea
EAKKLAGELAEKAQKGEDFANLARMNSDGPSAPKGGLLGTFGRGQMVPPFEEAAFALKVGEVSGVVETPFGFHVIKRDR

SEQ ID NO: 81234 - protein, 255 aa, Unknown
  Bacterial polypetide isolated from the Sargasso Sea
MTIVKRKNKLQVRKAVFPVAGFGTRFLPATKAMPKELLPVVDKPLIQYAAEEAIAAGIDTLIFVTGRNKRAIEDHFDNNQELEMALRARGKEKQANMVKNILPAGVECIFVRQPEQLGLGHAVLCAERAVGRDPFAVLLADDFLTKDGDGVTADLVRNFERSGKSQLSVMEVNDSDISKYGVIVPNGEPGSVLGLIEKPSADTAPSNLASIGRYILNPDIFDILRNQPVGIGGEVQLADAINIQAANNDVEAVTL

SEQ ID NO: 81235 - protein, 287 aa, Unknown
  Bacterial polypetide isolated from the Sargasso Sea
GNRMTYVAQSAAASFNPAHRLINQTTESTIRAGLKKQNEAFDEARALYDALNLPNPSTIGERYPHQVSGGQLQRIMTAMAMSPNPDLIVFDEPTTALDVTTQVEVLAAMRDIVKTYGTAAIYITHDLSVVAQMADRIKVLRYGEEVEEAMTRKMLKSPKEDYTKSLWSVRSIQKPEKKSKDIILEVKNVDAFYGSFHVLKNINIKLPLGRTVALVGESGSGKSTVARVITGLLEPKRGSVKFKNNGLPPSLKGRTKDQLQKIQMIYQMADVAMNPKQTVYDIISRPA

SEQ ID NO: 81236 - protein, 125 aa, Unknown
  Bacterial polypetide isolated from the Sargasso Sea
TTQDMQDVEFTVENKKLWMLQNRSGKRTAKSAVKIAVDMVKEKLISRKEAILRIDPNSLDTLLHPTLDEKSEIKVIAKGLPASPGAVSGKVVFSSEEAERLNGMMQNTILVRVETSPEDIHGMHA

SEQ ID NO: 81237 - protein, 27 aa, Unknown
  Bacterial polypetide isolated from the Sargasso Sea
MKIKKAVFPVAGFGTRFLPATKSTPKE

SEQ ID NO: 81238 - protein, 290 aa, Unknown
  Bacterial polypetide isolated from the Sargasso Sea
HLAISRAITLIESGDDIDDKLFSKIYPYTHNTIKLGVTGPPGAGKSTLTDQLIRLYLNQNKSVGVIAVDPSSPFSGGALLGDRVRMNNYLWNDNVFIRSMGSQGNLGGLNKKAQEAGDVLAASGKDIVIYETVGVGQGEHDIAKAADLTIVLLVPESGDDIQLMKAGLIEIADLFVVNKSDRNGSEKLAQSIKSVLHIFKNKDNFEPPVFKVSADRGNGVEELFNGIGNFLDNEAHKLYLKNKKISRYKDRVLNIIQNRLIGSFWTNSNIERLESIINDLKNFRILHHIK

SEQ ID NO: 81239 - protein, 240 aa, Unknown
  Bacterial polypetide isolated from the Sargasso Sea
MQNSKNKDNENINLDILKRLNYIYKSIISEDKTLEYSKKINKLINHYKKSEVKNETKGTWSENTILLITYADSINKGISGKTLNNFGTFYKKYLKKFINSIHFLPFFPSSGDGGFSVKNHFEVDETFGTWEDIKYLSKNANIMTDLVLNHASSKGLWYKNFLKEKRPGKNYFYIVDEDYDRSKVVRPRDHNLLSEIKFLNEKKFLWCTFSHDQIDLNFKNPEVLLEFINLILTLASYGIK

SEQ ID NO: 81240 - protein, 284 aa, Unknown
  Bacterial polypetide isolated from the Sargasso Sea
MILALVFAVSVIGSASAKTLKIQLTFPKTSYDGQIVKMWTDRVTKLTRGELKFELLSKGEVVGMKETLEAVDKGLVDGGAAWTHYWSNYHPAAMLFGSPVAGGGIGLSTKSWLAWYFDNGGKELYDQLWSEMGMNVKGFVMASSGPEALGWFKEPIKNMDDFRKYRFRTPPGIPGQTYKDIGIASVSLSGGDILPALEKGTIDAAEWCCPKPDSVFGFQKVLKNYYLQGLHQNVVNGDIYINGDVYNSLTDHQKYAMEVASEAMITRNITNRAVENGKALIDLT

SEQ ID NO: 81241 - protein, 322 aa, Unknown
  Bacterial polypetide isolated from the Sargasso Sea
AVARAAMSSGVARKNIENFDIYSEQLKQRLDPSVTIMQGINSKIKKNKKRVVFADGEDENTLKAAIAFKNSNLGIPIIVAKEKVVKERLKEIGYAENFDIEIVNSTKKDKREKYVNFLFKKLQREEGLLERDCDRMVRNDRVIWGSCMVACGDADAMVTGNTRRYAQSLQKIKKVVEPRPGEIMFGLNMVVNKGKTVFIGDTSVHEYPTSEQLAEIAISAARVVRLFGFDPKVAFLSHSTFGQPLTSRTKHIRDAVEILKNKEVDFKFDGDMQPDVALNNEYADLYPFSEIVGKANILIMPGQHSATISHKMMKSLGGAKVI

SEQ ID NO: 81242 - protein, 205 aa, Unknown
  Bacterial polypetide isolated from the Sargasso Sea
MIVKPQALDKINDNSNFFLFYGKNEGLKSECIKKVLKISKKHNIFKYDEKQIQDEKEVFFENTLSNSLFENEKTIIINHSSDKIHDIVKELIDRDIKNIKILINSGALEKKSKLRSLFEKDKNLVCVPTYLDTDETLVKLGIYFFQKYKISISHMNINLIVSKCSGDRLNLENELEKIRIFAKKKGKISTEEILKLINLSENHTF

SEQ ID NO: 81243 - protein, 222 aa, Unknown
  Bacterial polypetide isolated from the Sargasso Sea
SSEHSDETINLTGYSSESLVHDGLQRQYLMYLPSSYQENNNYPLVINFHGFEGQINQYATYADMRSLADSENFILVYPQGADLDGSPHWNAALLGGDNKSDIDDLGFIESLILKLSSRNLIDLERVYMVGYSNGGMMSYAMACHKSNLIAAIASISGTMLYISNCEPNRSIPLLNIHGTADPTLPYNGNDYYNSVDAALNFWNTNNNSDPTPNSILLNTNLN

SEQ ID NO: 81244 - protein, 151 aa, Unknown
  Bacterial polypetide isolated from the Sargasso Sea
MGLEDKIKESIILAMKAKDKTRLEALRAVKSAILLEKTKAGNKENLDENQIIKLLQKLVKQRNESAKIYKEQNRDELAEIEDSQSKIISEYLPDQLNEEELITIIDEVIKSTGAESIKDMGKVIGATNAKVLGKAEGRVVADLVKSKLNSL

SEQ ID NO: 81245 - protein, 176 aa, Unknown
  Bacterial polypetide isolated from the Sargasso Sea
MDLEKFFQNQNKKKQVKILTCGSVDDGKSTLLGRLLYDSQNVFVDQMDQVKIESEKYGTQGKDIDLALLIDGLQAEREQGITIDVAYRFFETPKCKFIVADTPGHEQYTRNMATGASNSDVAIILIDAQKGVLEQTKRHSFIVNLLGIQHVVVAINKMDLVNYDEHIFNKIVTEYK

SEQ ID NO: 81246 - protein, 249 aa, Unknown
  Bacterial polypetide isolated from the Sargasso Sea
LGKEKLESQMIEAYKEGLRELEKGDVIYAARKFNEAELLYPQSEWASKAILMSAYAFYSQNYYERSVTELERFISKYPKHKNLDYAYFLLAMNYYENIVDEKKDLEPLLLSKEKFEYIITNYPGTDFAQDAAYKIGLIKDVLASKEMHIGKYYIKRKKWVAAINRFKTVVEDYDTTVYVEEALHRLVETYYKIGLEQEAQKYANVLGYNYQSSMWYEQSYKVFNKNYGTSIEIKKDKKSVLKRFKNIFK

SEQ ID NO: 81247 - protein, 174 aa, Unknown
  Bacterial polypetide isolated from the Sargasso Sea
ITVPTPVNTDKTPDLSYVRSASRSVMEEIDPERGTIVVLESTVYPGVTRKELGLICSDLGIEIGEHVQIAYSPERINPGDPLHSASSVDRIVGCDDPEIGQYLAEVYSNITSAKSSFVGPIEVAEAAKLIENVQRDIDIAFVNELATVLPLMGIDVEQVLSAAATKWNFHRHTP

SEQ ID NO: 81248 - protein, 304 aa, Unknown
  Bacterial polypetide isolated from the Sargasso Sea
HCFGRHCGHHVWAHTLHCIGRHRRHHISIHTAHGIRRHCGHHVRAYTTHCIGRHRRHHISIHTAHGIRRHCGHHVRAYTTHRIRRHCGHHIRTHTFHAIGRHCSHHISIHTAHGIRRHRRHHISIHTAHGIRRHCGHHVRAYTTHCIGRHRRHHISIHTAHGIRRHCGHHVRAYTTHCIGRHRRHHISIHTAHGIRRHCGHHVRTHTFHAIGRHCGHHISIHTTHCIRRHCRHHIRAHTFHRCWRHCGHHVSIHTAHGIRGHRCHHIRAHTFHCCWWHCGHHISIHTFHCVWRHCGHHICIHTA

SEQ ID NO: 81249 - protein, 137 aa, Unknown
  Bacterial polypetide isolated from the Sargasso Sea
VKELDNLRKELREKDILFKITKNRITKIALKDSPCKELEKYFKGPTAAAMSSDPITSAKILTKFAKSNKNLKIVAGFMDGKVLDQKEVAIIAALPTLEEARAKIVGILASPAQKLLSILLAPGSKIANLTRAKSLKK

SEQ ID NO: 81250 - protein, 108 aa, Unknown
  Bacterial polypetide isolated from the Sargasso Sea
MNLNNNKFKPGLYCVATPIGNMGDISFRAIKILQVSDLILCEDTRVTKKILQKFEINTKLLSNHKFNENKNLEKTIEILKNDKIVSLVSDAGTPAVSDPGRILVKECG

SEQ ID NO: 81251 - protein, 96 aa, Unknown
  Bacterial polypetide isolated from the Sargasso Sea
MKKAYWVGVVNVKNHTEYKKYTDIAGSALKGFDAKILSRGGKIKNLEGDSMNRIVIIEFLSMDHADAFYKSDEYQKGLKYLNAEVADRFLNLAEAI

SEQ ID NO: 81252 - protein, 322 aa, Unknown
  Bacterial polypetide isolated from the Sargasso Sea
KDGGTVVSSGSPVEVATPYAHTDLDKLKFTQSADVMYLVHPDFAPRKITRTSHTAWTIAEVDLLRGPMGEDNTTATTLLASGRTGTVTITASANTFASTDVGRLVKVHEGFAKITVFTDAQNVNATVQENTDGRTELMPSYNATTISAHEGDPSATGLEHNDRFQDSAGQFVTQGFKVGMKVTVTGFTTANNNETSAIIVKVTDDTLLLAPSSDLTDEAAGDSVTISGDLTASTDWALGAFSATTGHPSAVAFYEQRLVFASTTEQPQTLFFSVGGSFEDFGAGVDADDALTYTLGSNQVNIIRYLQAGRVLLVGTSGGEFV

SEQ ID NO: 81253 - protein, 157 aa, Unknown
  Bacterial polypetide isolated from the Sargasso Sea
MVQGKFGEFFVNFSAKHMLNPNTYHLIKNVTLPTDDGSTQIDHIIVSKFGVFVVETKNMKGWIFGNPKQRMWTQKLYKHSSKFQNPLHQNYKHVQTLVSVLGLNDDQVHSVIVFVGDSKFKTELPENVTNGLSYVKYIKSKKSPVLTSMQIIKIKDE

SEQ ID NO: 81254 - protein, 141 aa, Unknown
  Bacterial polypetide isolated from the Sargasso Sea
MDLKAFFEKQNNKKQLKILTCGSVDDGKSTLLGRLMYDSKNIYSDQLTQTQKESEKYGTQGKKVDLALLIDGLQAEREQGITIDVAYRYFETEKCKFILADTPGHEEYTRNMATGASNSDVAIILIDASKGILDQTKRHTF

SEQ ID NO: 81255 - protein, 307 aa, Unknown
  Bacterial polypetide isolated from the Sargasso Sea
DSKKMKPVRINTRKQFLENLDNPDFDFADVKGQENIKRAMEIAAAGGHNLILIGPPGAGKTMLAKRFSSILPPMTLHEALETTKIHSVAGKLGSKHGLVAQRPFRSPHHTISDVALIGGGTNPQPGEVSMAHNGVLFLDELPEFKRTVLEVLRQPLEDRHVSISRAKFSVNYPASLMLVASMNPCPCGYYNHPDKECICPGGSVQKYLNKISGPLLDRIDLHVEVTPVSFDELSNSKPGEKSTLIRERVIKAREIQTSRYKHSKKTHSNAQMNSSQLENSCLLSKECKSLLKNAMNKLDLSARAYNR

SEQ ID NO: 81256 - protein, 128 aa, Unknown
  Bacterial polypetide isolated from the Sargasso Sea
MKEGQISDPVDSPFGFIIFHRVPLDVITASHILISFKGASRSDQNRSRDEAKKLADELAEKAQKGEDFANLARMNSDGPSAPKGGLLGTFGRGQMVPPFEEAAFALKVGEVSGVVETPFGFHVIKRDR

SEQ ID NO: 81257 - protein, 105 aa, Unknown
  Bacterial polypetide isolated from the Sargasso Sea
GFSPKGDKKFEGDGKTPEGKYYIDRKNPNSQYYLSLGISYPNDNDRKEAAKLGKSPGGDIFIHGRDKSPKWWKRDWTFGCIAIRNHEMDEIYRAVAIGTPIFILP

SEQ ID NO: 81258 - protein, 117 aa, Unknown
  Bacterial polypetide isolated from the Sargasso Sea
MIKKCLFPAAGYGTRFLPATKAMPKEMLPVVNKPLIQYGVEEALEAGLNQISIVTGRGKRALEDHFDVSYELEHQIKGTDKEKYLVGIRRLIDECSFSYTRQVEMKGLGHAILCGQP

SEQ ID NO: 81259 - protein, 286 aa, Unknown
  Bacterial polypetide isolated from the Sargasso Sea
DRVTKLTRGELKFELLSKGEVVGMKETLEAVDKGLVDGGAAWTHYWSNYHPAAMLFGSPVAGGGIGLSTKSWLAWYFDNGGKELYDQLWSEMGMNVKGFVMASSGPEALGWFKEPIKNMDDFRKYRFRTPPGIPGQTYKDIGIASVSLSGGDILPALEKGTIDAAEWCCPKPDSVFGFQKVLKNYYLQGLHQNVVNGDIYINGDVYNSLTDHQKYAMEVASEAMITRNITNRAVENGKALIDLTENHGVKLWDTPADYFTEYMNAAQATLKKNAASNAFFKEFMST

SEQ ID NO: 81260 - protein, 111 aa, Unknown
  Bacterial polypetide isolated from the Sargasso Sea
SRIIESIKEIPNKVCVIGITGPPGAGKSTVTNCIIKIFREKGSRVGIIAVDPSSPFNGGAVLGDRIRMQDHALDNEVFIRSIGSRGDLGGLSNCASGIIRLFDIFGMNIVI

SEQ ID NO: 81261 - protein, 305 aa, Unknown
  Bacterial polypetide isolated from the Sargasso Sea
LKELGKLDEAEASYNQAILFKPDYARALHNRSGLLFDKAEYEAALRDADACNLKRAKVLSLISLYALGRIEEIYKRLENLSKVDEEDIDIAAFAAFISEVEKKPTKYNFCPNPIDFVHTANLSSHVSELDAYVAGVIEELNKIESIWEPSGKSTVGGFQSLVSINLFENPSERIAQLKSILITEIEAYYLKFQNEPCSYIQRFPSKNNLHGWTVTLKHQGHQDAHIHRLGWLSGVIYLKVVPSLGKDEGAIEFSLNGQRYHDANSSKLTFQPKVGDIVFFPSSLHHRTIPFTTDADRIIISFDLT

SEQ ID NO: 81262 - protein, 238 aa, Unknown
  Bacterial polypetide isolated from the Sargasso Sea
MVNKTDPFGTAYSLHKVNEKNPIIFIHGVGLTKEIWEPQINFFKNYNTLTYDLLGHGKTPLKKSKVSFEDFTKQLVKLTKELNITKFHLVGFSLGALIARDFASKHCDKLISLILLGSIYKRTEDQKRVVRNRFEVAKMNRPASKQAALRRWLSVDFSKKNPDIYKKIYSILEKNKRLDFLKCYEIFVNYTDDDKMLKKINVNTLLATGENDVGSTPEMSRNLSKMIQRSKFIEIKKG

SEQ ID NO: 81263 - protein, 274 aa, Unknown
  Bacterial polypetide isolated from the Sargasso Sea
MPDGQVRRDVPTQGNEGRIIGRGGSKIRELQDRFRTRITMNRPAALAEVVGMLEHVNDCADEITRIVEDGNIREAAERAGQPVATGAYSSYGGGGGGGFGGGGGGGGGFSGHMESVPCEGQEGRIIGRGGENIRRVESQTGTRIKMNRVANVAEVYGTPQQCAEAIRMIQEYIHTAPNRGGGGASFGQGGYGQGGYGGGYQQQGGYGGGYGQQGGYGGGYQQQGYGQQGGYGQQAYGAPAAGAGAGGPLPHGWEEVNPGNGGPVYYWNTVTNVT

SEQ ID NO: 81264 - protein, 283 aa, Unknown
  Bacterial polypetide isolated from the Sargasso Sea
CLAGPMYYIENGLNMKWLAIVFSVCLLMMCLGTGNMPQISSISVVLLDTFNIPKIATGLVLSVLVWLVIIGGIKRIAQIASKLVPFMAFWYVVGGLAVIISNYENIIPSFQSIFIHIFTPTAAVGGFLGASVAAALTRGVNRGLYSNEAGQGSAPIAHASSKTENPIEEGMVSILEPFIDTIIICTLTGLVILSSGVWNQKFENKFEASAMVFVDGTFSEVNQEDATQLRDYYYGNNSEIEYNGTIEVVDGVLNLNKVTLLHNRSIAENTLVYLSQDNTVFSG

SEQ ID NO: 81265 - protein, 249 aa, Unknown
  Bacterial polypetide isolated from the Sargasso Sea
KRIREDFLRILRYVRFFLNYSKTKHQSNIKKIIRQNINGVAKLSKERLLTELEKLLLSRGFINLSKDEFCKEIILLIFPQLKNLNTFKHINKYNKSLISKKDFIFLLSLLLIDETDNSDYFLYKFNLSNYAKNKINFLKKIYCKPIDKNTFSKKNLQKVLYYYGNSYLEDMIDFKLFRSNKINTKLIELKEYFKKKERPLFPIKANIIMEKYNIKEGKELGDKLKNLENLWVENSFKINDKDVDNVFSN

SEQ ID NO: 81266 - protein, 168 aa, Unknown
  Bacterial polypetide isolated from the Sargasso Sea
CKAYNADFDGDQMAVHVPLTLEAQLECRALLMASNNILSPSNGRPIIDPSQDVVLGIYYMTREKINAKGEGSIFADVKEVSRAFETGAVELQAKVKVRIKDREGQTELKDTTVGRALLYQISPDGLNFQHFNKTLTSKGISDLINTCYMRLWFERYCNFCRSAHVSRL

SEQ ID NO: 81267 - protein, 314 aa, Unknown
  Bacterial polypetide isolated from the Sargasso Sea
PSRAAMLSGKYPSQVGLRDFLMLNDNYENQGINPNTVLWPKLLKDHGYVTGLIGKWHLGTDENRKPTNMGFEHFIGYDQDLSPYDPKLSVQGQDMVIKGHTSEIFTTYAKNFISENKDNKFALVVAFREPQMPWEGVPEIDLDAVKNIDPEVPDFEGVNKEWLKKITRDNYASVHALDRSIGEIYDHLSDNDLLSKTIIFYVGDHGILIGHHNAFGRGAIGVISGDKVVGYEGIANLYEEAIKIPFILHLPENKRDGLVSKVPVSNIDIFPTILSYLGLDVPKDLEIEGKDILRLVENEAESMHRSIYAQYSMR

SEQ ID NO: 81268 - protein, 121 aa, Unknown
  Bacterial polypetide isolated from the Sargasso Sea
MIKSNEAYKSISEVAEMLNLINPKTGKISTHTLRFWEQEFVQIKPKVFAGKRRYYDNKTIEILKKIKFLLKDKGMTVKGAKKYLSGQETYLDETVNTTINTKNILKSKLSKIKKIVKELKK

SEQ ID NO: 81269 - protein, 152 aa, Unknown
  Bacterial polypetide isolated from the Sargasso Sea
MQDSQHAKFFYTDIVTEISGKITPENLAARLYMVPVPTFVRNQARNIASVTSNAPLLLCGPPGAGKTENAKQTAMLHGRESERINFSGSTTVEHLFGSRIPVMELDTSDGDPRKGKKGKGDAAAPKMRRVFRWQDGVLLEALRGNKWIILDE

SEQ ID NO: 81270 - protein, 239 aa, Unknown
  Bacterial polypetide isolated from the Sargasso Sea
YPISFLWNQISPNGTVWSLGIGENDRLYYLTPSGLNYYDLKPGSNPVVSENLYPYFPNISFGTGSKINIDFQGNVWASSSSQGVYVLQENTSYWPNLEGFNSLNSDLLSDEIRDIDFDHKRNLAYIATSNGVSVLKIPFGIPKNDFTNVKIFPSPYYVPSNNPMIIDGIIYESSFKVMTLNGKVIREVTSKGASKDGQQLKWDGRNSKGNYVATGVYLLMIYNQDGKNTIEKITVINKS

SEQ ID NO: 81271 - protein, 147 aa, Unknown
  Bacterial polypetide isolated from the Sargasso Sea
MKKRKKKTKIFIAVDGGSASGKTTAAEFLSSYYNINFLSSGRLYRYCALKIINNKNNYNKLFINKIIKSLKDTSLKNSKLYNKEVTKKSSEIAKVKYIRESLKKFQLKFYKNLDGAIIEGRDIGTKIMPNADLKLFFVCSAKEKARR

SEQ ID NO: 81272 - protein, 265 aa, Unknown
  Bacterial polypetide isolated from the Sargasso Sea
QHPAQQRLIFEELVSQQLSMLQLRQQCRVQQGRSFVVDETQNQKFLAALPFAPTAAQLRVIHEIRHDLSQNEPMLRLVQGDVGSGKTLVAALSALTVLSRGAQVALMAPTELLAEQHANTFKAWLEPLGYQIAWLAGKASVKQKQLQLSAIQSGEAQMVIGTHALFQQQVQFQQLALVIIDEQHRFGVHQRLELREKGADTGFYPHQLVMTATPIPRTLAMTAYADLDTSVIDELPPGRTPVTTVVLPDSRRAEVTERVRQAVQN

SEQ ID NO: 81273 - protein, 104 aa, Unknown
  Bacterial polypetide isolated from the Sargasso Sea
MNKKHFLEKLLKSDIRSVAKLITLIENEDPIAESLLKNIWNKTGNSYIIGITGPPGAGKSTIVDFLAKFLADKGKKVAILAVDPTSPFSGGAVLGDRLRMSNAQ

SEQ ID NO: 81274 - protein, 88 aa, Unknown
  Bacterial polypetide isolated from the Sargasso Sea
MKIKKAVFPVAGFGTRFLPATKSTPKEMLPVVDKPLIQYAVEEAAEIGVKEFIFITHHAKSSIEQHFKKNEGLFNMLINQGKEDLANS

SEQ ID NO: 81275 - protein, 215 aa, Unknown
  Bacterial polypetide isolated from the Sargasso Sea
GGPRIKRELDKSNIQTKFIKGLRVTDEKIIKIVEKVLIEFNEDIVSSLRVKGFNAVSLNTKENNVIEVMPEAKELGFVGIPNKINVEKIKDKINKKLIPVISPLGLDNNNQTYNINGDNAAGAIAKSLKSRRLLLMTNVEGVLDKNKKLIHEISSSKIIDMIKDGTITEGMIPKINTCLDAINNGVTAAAIIDGRKKHSVLFEIFSDKGSGTLIR

SEQ ID NO: 81276 - protein, 211 aa, Unknown
  Bacterial polypetide isolated from the Sargasso Sea
MNRVLVHAHGTGTPQNRVTESHILSSLANAFGIAAMPVTAIKSHLAHSLAAAGGDQLTSMLGSWQLDIVPGITSTPELAENVYKSNLNFLLKNQQIEKTEYDFAILNAKGFGGNNGTSLIMSPFKTIEILKQKHTEKKWKSFKKVQENIIIELENFDNELRSKPPLARYKFGEGVIDGESELEFSNTDLIIKSNNQKISIKSELPYKKFLK

SEQ ID NO: 81277 - protein, 134 aa, Unknown
  Bacterial polypetide isolated from the Sargasso Sea
MSGYVLAIDQGTSSTRAFLFDAKHRIAAHEKIELKSHFPQSGWVECNPEEIWATTLLACNKAMAKINISPEKIAAMGITNQRESAVIWDRRSGKAIYPAIIWQDRRTSKICADMKKNNFEKFVTEKTGLLLDPY

SEQ ID NO: 81278 - protein, 186 aa, Unknown
  Bacterial polypetide isolated from the Sargasso Sea
MAYNSQEDNKNKPKGFDDFELKLGDTLRGERATMGKCVVEVQNELKIKAAYISAIENCDPLAFDTPGFVAGYVRSYARYLNLDPDEVFSKFCSESGFSTVHGMSDKASSVKEKSNSVLLPSDNFIDGEELFNKSPTAILDSSSKTFDKIEPGAIGSIAALICIVCGIGYGGLTLFNQMQTVKISPS

SEQ ID NO: 81279 - protein, 211 aa, Unknown
  Bacterial polypetide isolated from the Sargasso Sea
SGKSTVANAVINLIDEPGKVSNGTITLADIDINKDTSKVINYRGKKIGLIFQDPQTSLNPILTIGEQLIETIQTHISLSKEEAKKRSINLLKEVGIKDAESRFDNYPHQFSGGMRQRVVISLALCCEPELLIADEPTTALDVSIQSQILDLIKRLTRERNLAVILITHDMGVIAETTNRVAVMKNGNLVELGPTKEVLTNPKEIYTKSLVS

SEQ ID NO: 81280 - protein, 284 aa, Unknown
  Bacterial polypetide isolated from the Sargasso Sea
LTLRGSGTGNYGQAVPLFKGVVMQMSHFNKLEEFDSDTGFVKVQSGCVMGDLNKQLEKYGRELRLLPSTWKTATIGGFIAGGSGGIGSIRWGFLRDPGNLIGLEAVTINEKPELLRFDAEESEPLNHAYGTNGIITSLILATDIKRKWYSIVIDCIEFEKTIEILKTLTSAAIDLKLGAILEEEIVDQMPKWFKSNARSHKILIQSTFGGTKTIELICKKFKVEFTLLGEEEKLVNGISEVVWNHTTLHMRSKDKNWTYLQMLLPLNNEIELINFLRKKWGRNV

SEQ ID NO: 81281 - protein, 309 aa, Unknown
  Bacterial polypetide isolated from the Sargasso Sea
IPSDLPEWIPNKIILENNWPTFSKALKSIHIPNTMIEVDNRSLYLQRLSFDEVFANQLGMQIYKKKYQILNVNKKERKSKYFYKCLKNLNFNLTHSQNECIEDLYSDLCSKTQMKRILQGDVGSGKTIVAIAAILNVIENSKQAALMAPTELLSTQHYKFIKNFTENLNIEVALLTSKIDKNERISILDKISNGYVDIVIGTHSLISDRVTFNNLGIVVIDEQHKFGVIQRSKVLAKGENVHLLLLTATPIPRSLSMTMYGDLDLSEIKEKPKNRKKIITRVLPLEKYENVKLAIARALENEEKIYWGM

SEQ ID NO: 81282 - protein, 219 aa, Unknown
  Bacterial polypetide isolated from the Sargasso Sea
MKNSDNNINDNINLDVLKRLNYIYRSIISADKTLDYSKKINQLINLYKSKNISSDVNEPWSEKTTLLITYADNVKNGLYGKTISDFISFYNKFFSLFIDSIHFLPFFPSSGDGGFSVKNHEAIDPAFGTWDEIKTLSKNANVMTDLVLNHASSEGKWFKNFLLNKNPGKDYFFTINNNYDYSNVIRPRDHDLVKKIKILNDTKNLWCTFSYDQIDLDFR

SEQ ID NO: 81283 - protein, 239 aa, Unknown
  Bacterial polypetide isolated from the Sargasso Sea
RGDREHPSSLGQLCIKGATVGDTLARGRLRQPLFRSKLTDDFAPISWDDALNTITGQIQASVARRGNADGIAMYGSGQFHTEDYYLAQKLLKGALGTNNFDANSRLCMSSAVAGYSRSLGSDGPPCSYEDLDHCTVAFLIGTNTAECHPVLFQRLLKRKRKNPGSVTIVVVDPRRTDTAKAADIHLPIAPGSDLAMLHGIAHLVLRDNGQDPAFIDDHTENYDAFFDVAARWTPRRVAL

SEQ ID NO: 81284 - protein, 231 aa, Unknown
  Bacterial polypetide isolated from the Sargasso Sea
GRELRLLPSTWKTATIGGFIAGGSGGIGSVRWGFLRDPGNLIGLEAVTMNEKPALLKFDAEESEPLNHAYGTNGIITSLLLATDIKRKWYSIVIDCIEFEKTIEILKTLTSAAIDLKLGAILEEEIVDQMPKWFKSNSRSHKILIQSTLGGTKTIELICKKFKVESTLLGEEEKLVNGISEVVWNHTTLHMRSRDKNWTYLQMLLPLNNELELINFLRKKWGRKVLWHLEA

SEQ ID NO: 81285 - protein, 251 aa, Unknown
  Bacterial polypetide isolated from the Sargasso Sea
MTFLKISNLSVDYKMRKETVNAAKNINIDIKKGEIVGLVGESGSGKSTVANAIVNLIDEPGKVSSGSISMGETNISENPETIVQYRGKKIGLIFQDPQTSLNPILTIGEQLIETIQTHLNLSSDDAKNKAINLLKEVGIKDAEKRFYNYPHQFSGGMRQRVVISLALCCEPELLIADEPTTALDVSIQSQILELIKRLTKERNLAVILITHDMGVIAETTDRVAVMKNGDLVEIGLTKQILVEPKENTQKV

SEQ ID NO: 81286 - protein, 165 aa, Unknown
  Bacterial polypetide isolated from the Sargasso Sea
MDIEKFFQDQNKKKQVKILICGSVDDGKSTLLGKLLYDSQNVFLDQMDQAKIESKKYGTQGKEIDLALLIDGLQAEREQGITIDVAYRFFETSKCKFIVADTPGHEQYTRNMATGASNSDVAIILVDSQKGVLEQTKRHSFIVNLLGIQNVVVAINKMDLVNYDE

SEQ ID NO: 81287 - protein, 232 aa, Unknown
  Bacterial polypetide isolated from the Sargasso Sea
YVAGSTVVYGHLGKTGGQSFLRGHDDDVTCMAVSHSGKLIATGQTGVNADVVLWDAVNGKELFRLSEHDEGIACLAFSPDDRLLVSCGIHADGKIFAWDTETGCIVANGALSPRETNAIAFAPKIQRNGTYYTFGTAGKEEVVIWGCDAGRGLIGGQKCGTGNTKRYFTSCIFSPDSQELYAGSKSGDISTLNTQGCVLRTWSPCCKGAAQVFMPVDGGRYYLVGGGDGSVG

SEQ ID NO: 81288 - protein, 298 aa, Unknown
  Bacterial polypetide isolated from the Sargasso Sea
AMSPNPDLIVFDEPTTALDVTTQVEVLAAMRDIVKTYGTAAIYITHDLSVVAQMADRIKVLRYGEEVEEAMTRKMLKSPKEDYTKSLWSVRSIQKPEKKSKDIILEVKNVDAFYGSFHVLKNINIKLPLGRTVALVGESGSGKSTVARVITGLLEPKIGSVKFKNRELPPSLKGRTKDQLQKIQMIYQMADVAMNPKQTVYDIISRPASFFAGLTGANLRKRVIELLEQIDLDESFIDRYPSELSGGQKQRICIARALAANPEVVICDEVTSALDQIVQEGILKLLGRLQKDLNLSYI

SEQ ID NO: 81289 - protein, 265 aa, Unknown
  Bacterial polypetide isolated from the Sargasso Sea
IEYQTRKETIYASKNVSFNLQRGEIIGIVGESGSGKSTVANAIINLIDKPGIITNGSIRLDDRELHNDTDVIKSIRGKKIGFIFQDPQTSLNPLFKIRDQLIETIQTHSDLNYKEAESKSINLLREVGIENPKKRINDYPHQFSGGMRQRVVIALAISCEPDLIIADEPTTALDVSIQYKILQLLKKLTVERNLGIIIITHDMGVIAETTDRVIVMRHGIIVEQGKTKDVLLKPKSLECKSLVMSVPPTNKKIDRFKLLSPEGKQ

SEQ ID NO: 81290 - protein, 246 aa, Unknown
  Bacterial polypetide isolated from the Sargasso Sea
MAQPKSVVPNVHIRNPFKRGNVSVPKKVEAVLAPAAAPSTQTQVAGVAALIAYQKLVSEVFKATNVKFPAMLGACMSLFAILLGTEAVNPSLAQSIFDGLTPGANLLAKWLPMFFAPALTLLPLSPPIGSATEVAKVFLTVVIGWVYSLITTAFCVLALRKAQGSVSQGAVSKPPAAAGKPFSQETLSFFTKAFVVTGAISIMATRTGFEYAQPIQTVFMTCYTIALYVFAARLPTGFVKLVHPLV

SEQ ID NO: 81291 - protein, 223 aa, Unknown
  Bacterial polypetide isolated from the Sargasso Sea
MKLDKLNLDGKKSSIEVLDKIFSAKINHKLVSSVLYKTNANYKGRHAKTKQQNEVSGPTSKIYAQKGTGNARHASKKAPIFVGGGIAHGPKGQLAYKTRKLNKSEKKQSIASLITEKTLNKDLVVLNDFNNEIKKTKEMSLILKKFEILNSLIILDKTSKEKIEKSIRNIPNIKVTDINHFSAFDIIKFKKIVFTESSVKELEKKVCLKWKKYIYTIKSCHLC

SEQ ID NO: 81292 - protein, 152 aa, Unknown
  Bacterial polypetide isolated from the Sargasso Sea
MDLETFFKNQNEKKQLKILTCGSVDDGKSTLLGRLMYDSKNIYSDQLSQTQTESEKYGTQGKKIDLALLIDGLQAEREQGITIDVAYRYFETENCKFIVADTPGHEEYTRNMATGASNSDIGIILVDATKGILDQTKRHTFILSLLGIENII

SEQ ID NO: 81293 - protein, 298 aa, Unknown
  Bacterial polypetide isolated from the Sargasso Sea
MILALVFAVSVIGSASAKTLKIQLTFPKTSYDGQIVKMWTDRVTKLTRGELKFELLSKGEVVGMKETLEAVDKGLVDGGAAWTHYWSNYHPAAMLFGSPVAGGGIGLSTKSWLAWYFDNGGKELYDQLWSEMGMNVKGFVMASSGPEALGWFKEPIKNMDDFRKYRFRTPPGIPGQTYKDIGIASVSLSGGDILPALEKGTIDAAEWCCPKPDSVFGFQKVLKNYYLQGLHQNVVNGDIYINGDIYNSLTDHQKYAMEVASEAMITRNITNRAVENGKALIDLTENHGVKLWDTPADY

SEQ ID NO: 81294 - protein, 173 aa, Unknown
  Bacterial polypetide isolated from the Sargasso Sea
GIRIRPTPRIDPKEGITVWIALSEASSESGCMQMIPGSHHNGILEHHDRFGENNILTRGQTIEGIEKERAVDVTLKPGQISLHHVRTVHSSTPNRSDDRRIGLALQSFIAASVKQTLGEDYALSVLGQDPFQHFLRARRPRSDNEPEGIAFREAANQRLSDILYHGSELKRDY

SEQ ID NO: 81295 - protein, 215 aa, Unknown
  Bacterial polypetide isolated from the Sargasso Sea
QVSVVGESFAKADVYVSNHVSWLDILVIQTLLDVVFVAKSEVKSWPGFGFLAKIADTVFIDRRVMAAKSQQKEMASHLSLKKTLYFFPEGTSSNGLSVLPFKSSLFESMTRIKAHNANAIMICPITLKYHQPTGRSQDFFGWWGDMSLATNIVRVVAFGASGRLEVIFHRAFDATLIGDRKKIANLSELMVREGLNDIASATTIKNLVLRKKDKS

SEQ ID NO: 81296 - protein, 264 aa, Unknown
  Bacterial polypetide isolated from the Sargasso Sea
ELLKFDAEESEPLNHAYGTNGIITSLLLATDIKRKWYSLVINCIEFEKTIEILKTLTSAAIDLKLGAILEEEIVDQMPKWFKTNSRSHKILIQSTLGGIKTIELICKKFKVESTLLGEEEKLVNGISEVVWNHTTLHMRSKDKNWTYLQMLLPLNDELELINFLRKKWGKKVLWHLEAVSQQGSPRLAALPVLRWNGIDELNEIMEDCKKLGAFIFNPHVLTVEGGGLGVVDADQVKAKLRFDPKGLLNPGKLEGWEVKEQFKI

SEQ ID NO: 81297 - protein, 235 aa, Unknown
  Bacterial polypetide isolated from the Sargasso Sea
TDIKRKWYSIIIDCEEFKKTIEILKIFTTAAIDLKLGAILEKEIVDQMPSWFKGKSKSHKILIQSTLGGVKTIELICKKYEVNSFLLGEEDKLTNGISEVVWNHTTLHMRAKDKNWTYLQMLLPLDKEFELINSLRKKWDKNILWHIEAVAQQGVPRLAALPVIKWHSSDQINQIIDNCKKLGAIIFNPHVLTVEGGGLGVIDSDQVKAKLKFDPKGLLNPGKLQGWEIKDEFNI

SEQ ID NO: 81298 - protein, 185 aa, Unknown
  Bacterial polypetide isolated from the Sargasso Sea
MIKIGITGSLASGKSTVARIFAGTKYPLFNADLQVSKIYRQKMFANKIFKVFRLNNKKNIKFKIKNIIKKNKGEINKLEKIIHPLIRNQIKIFTRKNKKKKFIFFEIPLLIESKLMKNYDVIIFVNSTRKIRLKRHLKRGKNKEMFNLLDKRQLPPQKKIKFSDYVINNNGSLKKLKIKIKSIKN

SEQ ID NO: 81299 - protein, 243 aa, Unknown
  Bacterial polypetide isolated from the Sargasso Sea
IKPFDSNFHFNERVQEVIEDKGNWLVKTNKSKQFLAPNIIIAGGVGSFEPRKLSLKELEKFEEKSVFYSINKKDLLKNKKITIFGGGDSALDWALELSKNSTVTLVHRRNEFRGAPHTLSEIEKLKKSGKISIKTPYQIHSVNKGEALSSIEIKNDDEKIEKINTDIILGFFGLIMQLGPIAEWGLNMTKKTIEVNTENFQTNKPGIFAIGDMCNYPGKLKLILSGFHEAALASVECFKRGKA

SEQ ID NO: 81300 - protein, 258 aa, Unknown
  Bacterial polypetide isolated from the Sargasso Sea
GQSIAQKTYIALRRAGWLVSPLIEGEIGNIRFIGLDWATVPFTSPYTTTQSTSDSDTIDLRQRLYVHSETAEQLEFSLPIEIDDTLPLATVIGDVGVIQTILRRSDLSRLLISSSQPMNQIPLNQITNKLIIQSAQQTADLSQLTQSFHMNLTAFSLLSFTVGLFIVYSTVGLTFEQRNGLIQVLRVLGVPLRKVIIILIVEALLIATVSAVLGILIGYLIAASLLPDVAATLRGLYGAQIPSSLTLQGDWWLSGIGM

SEQ ID NO: 81301 - protein, 151 aa, Unknown; identical to SEQ ID NO: 81244
  Bacterial polypetide isolated from the Sargasso Sea

SEQ ID NO: 81302 - protein, 265 aa, Unknown
  Bacterial polypetide isolated from the Sargasso Sea
MTSNTFKFIEKFREVKNLEIIESQSDIKRLSKDFYNYSPILTEKLDECIADLVVRPCDHKAVKEVAEICWGFSIPLTLRGSGTGNYGQAVPLFKGVVMQMSHFNKLEEFDPDTGFVKVQSGCVMGDLNNQLEKYGRELRLLPSTWKTATIGGFIAGGSGGIGSIRWGFLRDPGNLIGLEAVTMNEKPELLKFDAEESEPLNHAYGTNGIITSLILATDIKRKWYSIVIGCIEFEKTIEILKTLTSAAIDLKLGAILEDEIVDQMP

SEQ ID NO: 81303 - protein, 252 aa, Unknown
  Bacterial polypetide isolated from the Sargasso Sea
ADFDGDQMAVHVPLTLEAQLEARALMMSTNNILSPADGSPIINPTQDVVLGLYYMTRDNANASGGGRTFSNADEVLRAYETENLEIHSPVKVRITHENGETSIEETTVGRILIWRITPAEVGFKNINTVLNKKTVSKLVDTSYRKAGLKKTVIFADQLMYLGFDFSTRSGSSIGVNDFVIPEEKASIIDSSEKEVKAIEKQFDSGLVTRGERYNKVIDIWSRANEQVAKAMMEKISSETVKNPDGENVDQSS

SEQ ID NO: 81304 - protein, 314 aa, Unknown
  Bacterial polypetide isolated from the Sargasso Sea
MATHAAGVVIPAQNLAEFVPLYKDPSSSSLLPSTQFDMYTSENAGLVKFDLLGLKTLTVINKTISLLKEKRIKLDISKIKLDDQKIFELLSLGHTVGLFQLESAGMRDALVNMKPNKFEDIIALVALYRPGPMSNISIYNQCKHGEKKPDYLHQKLKKILEPTYGVIIYQEQVMQIAQELSGFTAGEADILRKAMGKKKSAILDKQKEKFVNGAVKNGITKETAIFIFGKIEPFAQYGFNKSHAAAYAMIAYQTAYLKTYYPNEFIAASMSNELSNTDKLSEFYEELKRLKIKVSRPCINFCFAEFIPEKIHYI

SEQ ID NO: 81305 - protein, 250 aa, Unknown
  Bacterial polypetide isolated from the Sargasso Sea
YIAVPAEQPFFSFNDWFISSTEVKKGTLKETEHFTLKFNYNDISSLEELYKKYPDQIAGVILEPATSLIPCISGCQKINSCRECPDNGNNFLNQVRALTKKHKSVFILDEMITGFRWHLKGAQYFYNVDPDLCTFGKAMANGFAVAALCGKEKIMSLGSIRNIGAERVFLTSTTHGAEMSSLGAFIKTIEILKRDNVIQHIWDYGSTLIKEANSISKKHGLSKNIIFNGLGCSPNYLIMDNQGNNSLSLR

SEQ ID NO: 81306 - protein, 305 aa, Unknown
  Bacterial polypetide isolated from the Sargasso Sea
RIAGKARKNDFISISELMTGIENRVFSRKEVSQLIFKESHKSLKIGITGPPGAGKSSLMNKLIPQIRKENLSVGVIAIDPSSPITGGSFLGDRVRINNAVNDDNVFVRSMGSRAELGGVTELAEDFSDILAFSGKDIIFIETVGVGQSEYSVSEITDLTTLVFVPESGDEIQLLKAGILELADVFVVNKSDRKDSNLLVKSINNILSSTKKDSKKIPIFKTSCKTDEGIEDFSKAITSYFKSMKDNKDIQEKQVLRYNRRIKSIVEKDILSQFWNEERTALLDGIDKASMKTKSPYEIVDEIKEK

SEQ ID NO: 81307 - protein, 204 aa, Unknown
  Bacterial polypetide isolated from the Sargasso Sea
MNILLIVILVICYLIGSVQNGILLSKIFYKLDIRNFGSKSTGATNVNRVLGVKPGIIVLILDILKGLIPILILRIFLDNEIIPILASCSIVIGHCFPLYHKFKGGKGVATGFGSVILHLPIIIVVLIPSLPIIYISKYVSLGSVIGSFLSIILILYLVLTNNISGDYLYIGLIIPSIILFKHYQNIKRLINKTESKISFTNGSK

SEQ ID NO: 81308 - protein, 193 aa, Unknown
  Bacterial polypetide isolated from the Sargasso Sea
GFHSAFFIRFSDLPIGIGIKTISYIIDDNSALGMGLDIGYNKTFNKSSFGFVIKNFPSSGLIWNTGTIEGTTPSFSLGIHHPMKPFKQHSIIIHAVGSIEGSFSNANLESDFKSGIFSLDGSFGFEGSYNDKIMIRFGKNTVNNLTGGIGLQWEVMGLDYCFLSTSNNIDIKNHHLISLKLSIDWIISKFLKK

SEQ ID NO: 81309 - protein, 303 aa, Unknown
  Bacterial polypetide isolated from the Sargasso Sea
MRSSIHATCSYGATEDFVKYHDKVKPASPASNISWRRRRQIYDEKKLELPSKEISRPSSSDLLWRGQGGHPGTRNGDNLTSLYMRRFQSVQHNDHFQTYLKQRKNRLKSFITVKQQRSSSFWSDTTFRKVPSLQAMSEVSHLLSSLTSDPHFSGSDSSHYYSGTSRLISGDSSTPSSSSHHSSILGPNISQSFNDTIRPKSDSDSDGHDGDNDASDNDDHDGNDNASDNEQGSDGDGHQGEKGENDGHFDHMLNLSIGDDDIDPEEVSDNGDDDQLGAVGLSGGAGRSRSSSSSPRPLRLVSP

SEQ ID NO: 81310 - protein, 280 aa, Unknown
  Bacterial polypetide isolated from the Sargasso Sea
MRTRETVETQLPGAERLVGALSPAPCKEFGPSSRQAALQDAKAKAGETKQRRTSHPVVDEKVPVWDVRPTRTAGTGGSFGGQGSESDGDPLQRLLQRQALGSGALGTPAADAPRPLRLAGGPVGGLTRVQAMDADQLVRASRSDGGSAWGLATAEELLQPLSLEGRPISEAVMETLARSVALSTNRTYPTAWNDWRIFCDVRQESPVIVGGHTEESRRDEDRLLQFSVYLADSLARAAGTVKNKLMGVRHAHVINGLEDPLIGKNRVWLFFFALKNAKKL

SEQ ID NO: 81311 - protein, 267 aa, Unknown
  Bacterial polypetide isolated from the Sargasso Sea
VPLGKVSGELNYKDKSIIMNDINSFWNQNFIKASGRIPVDLDLHSIDISKFYEKGKLELNTSGKFETAVFLTEYLSDIDSIAGDISIDLSIKRDRSKYYRDGKIVVNNGQIYTVLMDEPVRKFNVDAILKNNLLEINRFNGSLNDSQNRKKDDLTNLFISGGIDFERFFMPRYNLNINGDDIFYRSLNSDMEGYGDIQISLTGRDTIDIAGKISAKNGAIYTEFINNDSESIKDRNKRTFTNYSIRFPIENTFSIRNSQIDAKVSGE

SEQ ID NO: 81312 - protein, 122 aa, Unknown
  Bacterial polypetide isolated from the Sargasso Sea
MINKKNDAYKTISEVAELLNLINAKTGKISTHTLRFWEKEFKQIKPKIFAGNRRYYDLKTIEILKKIKFLLKDKGMTIKGVKKFLLNDESKLDETFNTSINTKNILKSKLSKISKIVKELKK

SEQ ID NO: 81313 - protein, 206 aa, Unknown
  Bacterial polypetide isolated from the Sargasso Sea
MDSLTFDTTQIFRNNHDPLDCPRYHTAFNTYNIIPKNCFSCFKVQVNVFNVVDLIKLHFLFDNITFVKNIKKCMVEKRKDIDGNYKGFIYCKTVDEAETLKVQIEQLINKSLKIDHKTIIKRGCSEFTLKYPDYKITDSKSKSFFKYKDEWQKKENIINEFYPKNISSELNPHDTLKGNSLNDMITIKNWINYAESINDYSFKKLT

SEQ ID NO: 81314 - protein, 361 aa, Unknown
  Bacterial polypetide isolated from the Sargasso Sea
QNVFVDQMDQAKIESEKYGTQGKDIDLALLIDGLQAEREQGITIDVAYRFFETAKCKFIVADTPGHEQYTRNMATGASNSDVAIILIDAQKGVLEQTKRHSFIVNLLGIQYVVVAINKMDLVNYDENIFNKIVSEYKELIKNFNFISTKYIPLSALKGDNVFSSFDNTQWYSGPSLIETLENFQIEEEGMNNAFSMPVQWVNRSSSDFRGYAGTITSGKISKGDVITTASSNSHTSIKNIYGPNGELDDAFTNQAVTLTLQDELDISRGDIILKQDNKEIIKADQFAAHLVWMDQDAMLPERNYIFRFNNTYINGQITDLVHSINVNSYEEIATKKLKLNDIAYCKIALTKMHSIAPYKNN

SEQ ID NO: 81315 - protein, 262 aa, Unknown
  Bacterial polypetide isolated from the Sargasso Sea
TGPPGAGKSTITNILIEIILDNNKTVGVVAVDPTSPFSGGSLLGDRIRMNQYAWDERVFIRSMGNQGDLGGLASKSQDVGDILSASGKDFVLYETVGVGQSEHDIVKAADLCVVVLVPESGDEIQMMKAGLIEIADLFVINKSDRDGANRLSSILKNIIHNFTKIGKLEPPVFNTVATERIGVSELFKGMESHMELMLETGHLERRRLDRYRQRVMSQVREKLEKGFWTGLKLQDLKEMTAKIDEIDMVPHMMANRLMDKTK

SEQ ID NO: 81316 - protein, 347 aa, Unknown
  Bacterial polypetide isolated from the Sargasso Sea
MSSVNLIESKGVLRNNWNIEVEDYVIACEWAEDGNILLVGDVAGGVNALDSKTGKTLWQKSSIHDGNLLAMRVSPNGKLFATSGQDGCILIGETSKGSVIETIELGRGWVEHLEWSKDGMSLAASISKNVYIFDCKGKEKWKSEQHSSTVSAIAWSSNDELATACYSKVAFYDVIENKTKQTLQWKGSLISMKLSADGDIVACGSQDNTVHFWRRSTGQDSMMSGYPGKPSSIAFDSSGKLLATGGSEIITVWSFENDGPEGTTPGQLYHHQSFVSDFSFAPQGKRLASGARDGSIAVWGLKNDGHGGSIGTSQMSDQVSSIAWRKDSRALAAGDARGLVITWKVKT

SEQ ID NO: 81317 - protein, 453 aa, Unknown
  Bacterial polypetide isolated from the Sargasso Sea
NQIFINYKKRKTLIICGIGGNGGDGFILAQELLNKKWDTDVIIIGNKNLLKGDALKAFNQLKIKPKKFEDINLNKVDLFVDALFGIGLSRKINNKTIEILKIIDKHKAPIVSVDIPSGIDSNTGQILGYAPYCDLVITFSTLKYGHILVPGSEKYNKIKVENIGIKKSVINSITPKIYINNPSLWLQSIQWPKIDDHKYSRGYSLIVGGSKNMTGAGRLAAISAQRAGSGIVCVASEKEAEQIYFTTLISQIVKSYKNIKEFDEIILDKRIDSFLIGPGLNLNQYSINKIKSLFKTNKNIVVDAGAISNFKGKLNTLKDIIYGKNAVITPHEGELRSILPNLKGNFIDKALKAASELNCIVVLKGATTVIASPDNKAIVNCAGAKWLATAGSGDVLAGIICGTLSNKMDSFLASAFSVWMHSEIGNYLGPGLVAEDIPENINLIYKKLLKTNI

SEQ ID NO: 81318 - protein, 329 aa, Unknown
  Bacterial polypetide isolated from the Sargasso Sea
MPNRYSSLALTLWLCGVSHHAIADTVFLNNGDKITGEIKALDEQNLVIKPSYAPKITIERSAVRSFETREPQPWSINRSIKEVMVQASELDSFVLIDDQQTPISELIYSELLSDSDWHYSGSVEAAIDVTHNSKNTQKLHAKGDVTAETLNWRHNLKSEVRYETEDKTTKRNTLEAHYSLDYLISDHWFLRQEDYYQEDKLNLDIRSYYAALGPGYRFWGVNRDKLDFVLTYNHFWLDYQVFTYELNAWAATINYKQYWFDGVLETYADLQIAFPDIPTIEYISDSTFGLKYLLTQQIYLSFKYDINETKSAVQHSRDISYSLGLGVNF

SEQ ID NO: 81319 - protein, 743 aa, Unknown
  Bacterial polypetide isolated from the Sargasso Sea
MSDGPRSVRSQCPYCGVGCGLELLPPAVKGQAVKRDAEGNPMWTARGDREHPSSLGQVCIKGATVGETLARGRLRQPLFRSKLTDDFAPISWDDALDKITGQIQASVARRGNADGIAMYGSGQFHTEDYYLAQKLLKGALGTNNFDANSRLCMSSAVAGYTRSLGSDGPPCSYEDLDHCTVAFLIGTNTAECHPVLFQRLLKRKRKNPGSVKIVVVDPRRTDTAKAADIHLPIAPGSDLALLHGIAHLVLRDNGQDPAFIDDHTENYDAFFDVAARWTPRRVALFCNIPEKRLRDVAALFHRRQKVLSLWSMGVNQRREGTAVVQGLINLHLLTGQIGKEGAGPFSLTGQPNAMGGREAGGLAHLLPGYRLVANPEHRAEVEQAWQLPAGQIAAKPGLAAWQQVEAMERGDLDLWWVAATNPLVSMPDLDRVKQAMGNCPLVVVSEAYADSETSHYAHLLLPAAQWSEKAGAMTNSERRVTFCPAYRLRFGESRPDWEVFADVGRRLGYTDQFRFDSAAEVYAEFTRLTQGRLCDVSGLSHELLEQAGPQQWPYPLGNKPDTTSKRLYTDHQFATPSGRARFSTDQPLGLAEPPCDTYPLVLTVGRYLGQWHTMTRTGKVERLMKQHPEPLLEIHPSDAQELQLRNGELAAISSRRGHLTATVKVTDRIRCGTVFLPMHWGFTQEKACEANTLMHDDACPVSKQPELKACAVIVAPAVSVVKPVEQEKGRLEALRRLLTPALR

SEQ ID NO: 81320 - protein, 314 aa, Unknown
  Bacterial polypetide isolated from the Sargasso Sea
MYRSLVHGILENDHGSISKAVTLIENGGAETGPLLNDIYKSTVESLRIGITGPPGAGKSTITNALIDIFLENKKTVGVIAVDPTSPFSGGSLLGDRIRMNHYAWDERVFVRSMGSHGELGGLARKSQDVGDVLAASGKDIVLYETVGVGQSEHDIVKAADVSIVVLVPESGDEVQMMKAGLIEIADLFIINKSDRDGADRLSSMLKNVLHSFNPEGKIEPPIFNTVGTEGVGIKELYKGIFDHVDSMIGLGQLDKRRLARYRQRVSALVRETLEDSFWTDDKKELLYKVTKTSDRITDAPHIMAEALLGNTDEE

SEQ ID NO: 81321 - protein, 319 aa, Unknown
  Bacterial polypetide isolated from the Sargasso Sea
AMKRDHKDLIKGLVSNDRVCLSKLISQIESNSSYIFKVINSVKKIPNKVYTLGITGPPGAGKSTLTNQIIKKFRGMDLKIGVIAIDPSSPFTGGAVLGDRVRMQEHSLDNSVFIRSVGSRGDLGGLSSSTSSMIKLFDIFGMDIVIIETVGVGQTELDIIKISDCVLVTLVPEAGDGIQAMKAGLMEIGDLFVVNKADRGGADKLAREIDYMCSLKHDSSIRKTKVLTSEAENGIGIDDLVEEVLAFKQYEESNGLLLKKRNKRKVSELNAMIDKRLRNELEKTQETATFKELMNKLENGLLEPELLVEKIINLIKKNN

SEQ ID NO: 81322 - protein, 640 aa, Unknown
  Bacterial polypetide isolated from the Sargasso Sea
MDIYSSFANRFEKTREEELSLEEYLALCKNDPSAYATAGERMLEAIGEPEHIDTRNDPRLSRIFANKVIKVYPAFREFYGMEEVIEQVVAYFRHAAQGLEEKKQILYLLGPVGGGKSSIAERLKQLMERVPFYSLKGSPVNESPLGLFDYDEDGPILEEQYGIPRRYLKNILSPWAVKRLHEYNGDIRQFRVVRRYPSILRQVGIAKTEPGDENNQDISSLVGKVDIRKLEQYAQDDADAYSYSGGLCLANQGLLEFVEMFKAPIKVLHPLLTATQEGNFKGTEGFGAIPFDGIILAHSNESEWKAFRNNRNNEALLDRIFVVKVPYCLRVSEETKIYEKLIRNSSLAEAVCAPGTLKMMSQFSVLSRLHEPENSSLFSKMQVYDGENLKDTDPKAKSYQEYRDYAGVDEGMTGVSTRFAFKILSRVFNFDSSEVAANPVHLMYVLEQQIEREQFPPETEQKYLSFVKDVLASRYAEFIGKEIQTAYLESYSEYGQNIFDRYVTYADFWIQDQEFRDHDTGESFDRAALNAELEKIEKPAGISNPKDYRNEIVNFVLRARAANAGKNPVWTSYEKLRVVIEKKMFSNTEELLPVISFNAKGSAEEQRKHEDFVNRMVAKGYTPKQVRLLCDWYLRVRKSS

SEQ ID NO: 81323 - protein, 300 aa, Unknown
  Bacterial polypetide isolated from the Sargasso Sea
MDKFLIQNLEANNQRDLSRLITEIENTDVEKSVDLDKLFRKTNHAIRIGITGPPGAGKSSITNELIKNFIKTNHKVGVIAIDPTSPFSGGSLLGDRVRMNQYHNNENIFIRSMSTQGQLGGLSRKAQDIGDILAIAGKDIIIYETVGVGQGEYDIVNVADLTIIVLVPEAGDEVQLMKAGLIEIGDLFIVNKSDRKGAKQLTEKLKSIININKEINRPIFNTTAKEGKGIEELFKGIMNKYEELDATGHILKRQKIRYRLRVKKIIQEKILNKFWTKKKITKLNSATESINDLKKSPIIT

SEQ ID NO: 81324 - protein, 368 aa, Unknown
  Bacterial polypetide isolated from the Sargasso Sea
MDRAERSVRRAIAGGDARSRPRPVEGQPDGRRDRARPPARRDRRDPRGDRRARPAPPQPEVRDGHDVRRHRHGCGGHHRTPVSGARRQAATVRGPRARAPFFHSDRGKSKETVVAEIQVERADGVVTITIARPAKKNALTAAMYQTMADALAEAQEDKAVRVILLRGGDGNFTSGNDLEDFLKSPPKDDTAPVFQFLARISSASKPIVAAVPGLAIGVGVTMLLHCDLVYAADTATFSLPFTQLGLCPEAASSVLLPRLAGHQVAAEKLLLGEAFDALEAHRIGIVNRVLPAAELDAFAAKQAAKLAALPAASLRVTKALLKDTGGVAVQARMAEEAGHFATMLRAPEAREAMTAFFEKRKPDFRQFD

SEQ ID NO: 81325 - protein, 545 aa, Unknown
  Bacterial polypetide isolated from the Sargasso Sea
PKNITMIDRKGVVYKGRDGLKEWKLPFAINTKNRTLSDAISNTDVFLGLSSAGLIKKDMVKKMSKNPIIFACANPDPEITPEEIEEVRKDAIIATGRSVYPNQVNNLIGFPYIFRGALDVRAKTINEEMKIAAVKSIAKLARERVPDEVAAAMGGERPVYGKEYIIPSTFDPRLISVIPLAVAKAAIKSGVARRKIENFEIYSDQLKQRLDPSVTIMQGINSQIKKNQKRVVFADGEDENTLKAAIAFQKSGFGIPILVAKEKVVKQRLKEIGYSENFNIQIINSTNKEKREKYKKYIFEKLHREKGFLERDCDRLVRNDRVVWGSCMVSCGDADAMVTGNTRRYGQSLQKVLRIVKSRPGEIMFGLNMVVNKGRTVFIGDTTVHEYPSSEQLAEIALSAARVVRLFGFDPKVAFLSHSTFGQPITSRTKHIRDAVEILKKKKVDFKFDGDMQPDVALSEEYKDLYPLSEIVGNANVLIMPGQHSAAISYKIMKTLGGAKVIGPLLIGLGEAIEIAPLRSSTSDILNLASVAAYSAGIIDYSIKN

SEQ ID NO: 81326 - protein, 383 aa, Unknown
  Bacterial polypetide isolated from the Sargasso Sea
MWKFSIPLTLRGSGTGNYGQAVPLFKGVVMQMSHFNKLEEFHPDTGFVKVQSGCVMGDLNKQLEKYGRELRLLPSTWKTATIGGFISGGSGGIGSIRWGFLRDPGNLIGLEAVTMNEKPELLKFDAEESEPLNHAYGTNGIITSLLLATDIKRKWYSIVINCIEFEKTIEILKTLTTAAIDLKLGTILEEEIVDQMPKWFKSNARSHKILIQSTFGGTKTIELICKKFKVEFTLLGEEEKLVNGISEVVWNHTTLHMRSKDKNWTYLQMLLPLNSELELINFLRKKWGRKVLWHLEAVSQQGSPRLAALPVLRWNGIDELNEIMEDCKKLGAFIFNPHVLTVEGGGLGVVDADQVKAKLKFDPKGLLNPGKLEGWEVKEQFNI

SEQ ID NO: 81327 - protein, 451 aa, Unknown
  Bacterial polypetide isolated from the Sargasso Sea
MTSNTLKFLDKFREVKNLEIIESQSDVKRLSKDFYNYSPILTEKLDECIADLVVRPSDNEAVKKVAEICWEFSIPITLRGSGTGNYGQAVPLFKGVVMQMSHFNKLEEFDPDTGFVKVQSGCVMGDLNKQLEKYGRELRLLPSTWKTATIGGFIAGGSGGIGSVRWGFLRDPGNLIGLEAVTMNEKPALLKFDAEESEPLNHAYGTNGIITSLLLATDIKRKWYSIVIDCIEFEKTIEILKTLTSAAIDLKLGAILEEEIVDQMPKWFKSNSRSHKILIQSTLGGTKTIELICKKFKVESTLLGEEEKLVNGISEVVWNHTTLHMRSRDKNWTYLQMLLPLNNELELINFLRKKWGRKVLWHLEAVSQQGSPRLAALPVLKWNGIDELNEIMEDCKNLGAFIFNPHVLTVEGGGLGVVDADQVKAKLKFDPKGLLNPGKLEGWKVKEQYNI

SEQ ID NO: 81328 - protein, 493 aa, Unknown
  Bacterial polypetide isolated from the Sargasso Sea
MIKIKTALLSVYDKTGIIELAQYLAKNNIEILSSGGTAKHLIENGIKVTEVSDYTGSAEMFDGRVKTLHPKIHAGILARGKKDQIELEKFGAKKIDLVVVNLYPFSEEVAKDSSEQEIIEKIDIGGPAMLRAAAKNFEHTIAVAEPEKYKEINVEGMHIESSRELAKRIFDLISKYDWDIGGWFGGEGIPEKVDLRYGENPHQEANLLIDEMSPIDFSNPLQGKQISYNNVADALSAWACVNEFEEPAVCIVKHTNPCGVATDQNLNKAYEKAFSTDPTSAFGGVIALNTTVDSEVMHRMIENQFIEVLIAPDFDDASLKVLSKKPNIRALVGKEIASDQEEMKFITGVVLNQKTDNADFSNMDLKTVTEIKPSKSELEDLIFAIKVAKHVKSNAIVIAKNQMTLGIGAGQMSRVVSTKIAFMKAEEEGLDVSNCVLASDAFFPFRDNIDLAAEKGVKHIIQPGGSVKDDEVTEAADEHKISMTMTGIRHFKH

SEQ ID NO: 81329 - protein, 445 aa, Unknown
  Bacterial polypetide isolated from the Sargasso Sea
MTFLKINNLSIDYKMRKETVNAAKNINIDINKGEIVGIVGESGSGKSTVANAIVNLIDEPGKISSGSIFMGETNISENPETIVQYRGKKIGLIFQDPQTSLNPILTVGEQLIETIQTHLNISTIEAKNKAINLLKEVGIKEAEKRFSNYPHQFSGGMRQRVVISLALCCEPELLIADEPTTALDVSIQSQILELIKKLTKERNLAVILITHDMGVIAETTDRVAVMKNGDLVEIGPTKQVLVEPKEKYTKSLVSSVPPTNKKISRFTIIEKENLNNQNNNIKILNRWSKKSIVDQNLVKIQNLSKSFDDSFFTENTKNSVMAVDDVSFDIKEGKSFGLVGESGSGKTTIAKMVVNLFKPSSGDIFFDNVNVTKIKKNKDLLKFRRQIQMIFQDPFSSLNGRLKVKEIIAEPIKLHNPNIKSMDLDNYIYDLLESVELSQQSAIRY

SEQ ID NO: 81330 - protein, 437 aa, Unknown
  Bacterial polypetide isolated from the Sargasso Sea
MTFLKISNLSVDYKMRKETVNAAKNISIDIKKGEIVGLVGESGSGKSTVANAIVNLIDEPGKVSSGSILMGETNISENPETIVQYRGKKIGLIFQDPQTSLNPILTIGEQLIETIQTHLNLSSEDAKNKAINLLKEVGIKDAEKRFYNYPHQFSGGMRQRVVISLALCCEPELLIADEPTTALDVSIQSQILELIKRLTKERNLAVILITHDMGVIAETTDRVAVMKNGDLVELGLTKQILVEPKEKYTKSLVSSVPPTNKKISRFTIIEKENVNNQNNNIKILNRWSKKIIVDQNLIEIKNLSKSFDDSFFTENTKNSVMAVDDVSLNIKEGQSFGLVGESGSGKTTIAKMVVNLFKPSSGDIYFDSVNVTKIKKNKDLLKFRKQIQMIFQDPFSSLNGRLKVKEIIAEPIKLHNPDIKSSDLDSYIYDLLESVEL

SEQ ID NO: 81331 - protein, 391 aa, Unknown
  Bacterial polypetide isolated from the Sargasso Sea
MEVNTETKDAWSESTILLITYADSISKGISGKSLNNFGTFYKKYLKKFINSIHFLPFFPSSGDGGFSVKNHFEVDETYGTWDDIKELSKNANIMTDLVLNHASSEGQWYKNFLKEKRPGKNYFYIVDKDYDCSKVVRPRDHNLLSEIKFLNEKKFLWCTFSHDQIDLNFKNPEVLLEFINLILTFSSYGIKIFRLDAVAFIWKKSGTTCLNLTQTHEIIKLLRDIVDQLEKNIIIVTETNLPKQENLSYFGKNDEAHWVYNFPLPPLIINTFLFEDSRALTKWSMKMPPAQIGNAYLNFISSHDGIGMRPAEGVLTDKEIKKMLQRLKKNGSQFSMRKLSNGEEKVYEANISLFDALKFTDNDEKGKFDLKRFIAAHCIILAIEGVPAFLF

SEQ ID NO: 81332 - protein, 192 aa, Unknown
  Bacterial polypetide isolated from the Sargasso Sea
GADRVMLMDLHAGQVQGFFSATVDELTALPILARYFIEKKLDDIVVVSPDIGGTKRARDFANKLGAPLAIIEKRRIGNKDTVESLNIIGDVKGQSAVLFDDEINTGGTMLAGSVLLKENGVKDVYVAATHGVFPEDSIEKIVNSKEIKEVVVTNSLPINYKSEKLKILSISELLGEAIKRTNRGDSVGALFL

SEQ ID NO: 81333 - protein, 550 aa, Unknown
  Bacterial polypetide isolated from the Sargasso Sea
MIISAAATGLHAWLVRPALDEVLIKGNKEMLFLIPIAIIIVTLCKGISTYTHSFQMSKVAHSVIAKLQTHMFEKLMYLNLSYFNESKSGNLISRLINDTYYLRLAIVKSVTAVIKDILVIIFLLANMFYQSWSLTLFAFFAFPLAIWPIKKIGKSIRKITYEIQNEIAKFSNVLAESIKGIRQVKAYNREEYEKKRAFETINFIKKFFIRSAFVSNRLSPLMEFIGSLAVAVSIYAGGVFVLNESMTTGQFMSFLVSLLLAYQPVKALGNLNISVQEGLAGAERIFLLLDTPLEKSEKHEVSSNIKLNGNIEFKDVNFSYSEQKILNNINLTIDSGKKTAFVGMSGSGKSTLINLLLRFYDHYKGTIKIDQKDIKSLSLFDLRENISLITQETLLFNESILDNIRYGNMSSNDDEIQAIADISGVSKFANQLPDKLNTIVGESGIKLSGGQRQRIAIARALIKDAPILIMDEATSSLDNLTEKEIQSALDELMKDKTTIIIAHRLSTIQNADVIFTLEKGIIESNGDHEYLIKNSAVYKKLQLQEDYNDN

SEQ ID NO: 81334 - protein, 148 aa, Unknown
  Bacterial polypetide isolated from the Sargasso Sea
ANCTKAGCNMIICDGRPMSLLLKLNQQEAKFSWFKANEKPLNSRKQWISGALQVKGKITIDQGASEAIKKGFSILSAGIIKTEGNYEKGDLIQIIDENETFVGKGLTHFNNSEVELIKGSKSNNIETILGYRGKDEVIHRDDLVFEIK

SEQ ID NO: 81335 - protein, 534 aa, Unknown
  Bacterial polypetide isolated from the Sargasso Sea
MRPVSGSAFVWDDAHRTAPPRKNGHGPVSSFPVSGSRRFPPRVRERAEHHRDQERAETDRKRAEIQPAVAAERIDDQATGDGARGHPEAAGHRAAADHGAHHPQREVLAREHRIQRHHARVDEAEHDGDRVEPVERAHEVIPERTQRLREQPGHQHALRAEAVAQDPERDPAAHAGKPFDAVDRHRDDQRDPARHRVADRMEDRARVRRAAEEVGQQQHDELRRAQRIRDRHRRGVAGRRRHRGSRLRAVERGRPAHQQRHRNHHDGRQRRNQQHRRAPVAHRHEPRGQRGHRHRRHPHAGRHERHREAAVRVEPARHARHHRREYRSRRAADGETEGELEREQRRRAARQRQACRQQDGARHDDRARADAVRQAAPRHAREGHRDEAERHRAGNAGHRPARVARDRAQEHRQRKHRADRDAAHQAARGDDDPAVSGVRHGVPPCRDDDPREPGATCFAQCPVDMDTTGDASGNRHARHTQRRTFIVRRSAPPATGGPGRHRTPDRPFGPPLPRAFPESGKSKSEIVGWTARSG

SEQ ID NO: 81336 - protein, 277 aa, Unknown
  Bacterial polypetide isolated from the Sargasso Sea
LIGLEAVTMNEKPELLKFDAEESEPLNHAYGTNGIITSLLLATDIKRKWYSIVIDCIEFEKTIEILKTLTSAAIDLKLGAILEDEIVDQMPKWLKSNDRSHKILIQATFGGTKTIELICKKFKVEFTLIGEEEKLVNGISEVVWNHTTLHMRSKDKNWTYLQMLLPLNNELELINFLRKKWGRKVLWHLEAVSQQGSPRLAALPVLRWNGIDELNEIMEDCKKLGAFIFNPHVLTVEGGGLGVVDADQVKAKLKFDPKGLLNPGKLEGWEVKEQFNI

SEQ ID NO: 81337 - protein, 198 aa, Unknown
  Bacterial polypetide isolated from the Sargasso Sea
MAIVRNKDHLVFFLSLILSISLLLNNQNPRMGIIRGKAAEIISFLSSPMTLMKSLIFLEEENQLLREKTLALSLQVESMLNLQKENDELLSMLDFKRETKLLIKPARVVNKGLQPNLVSIVIDGGKIDGIKKDQAVLTPKGVIGKTIEAGEKASIVQLITDSNYRISVRILPSGATGILRMIKGNTGQIREVQKNVEN

SEQ ID NO: 81338 - protein, 356 aa, Unknown
  Bacterial polypetide isolated from the Sargasso Sea
MILALVFAVSLINTASAKTLKIQLTFPKTSYDGQIVKMWTDRVTQLTRGELVFELLSKGEVVGMKETLEAVDKGLVDGGAAWTHYWSNYHPAAMLFGSPVAGGGIGLSTKSWLAWYFDNGGKELYDRLWDEMGMNVKGFVMASSGPEALGWFKEPITSMDDFRKYRFRTPPGIPGQTYKDIGIASVSLSGGDILPALEKGTIDAAEWCCPKPDSVFGFQKVLKNYYLQGLHQNVVNGDIYINGDVYNSLTDHQKYAMEVASEAMITRNITNRAVENGKALIDLTENHGVKLWDTPADYFTEYMNAAQATLKKNAAENAFFKEVYDHMTAHAKIVVPFISQMETSDASIGTAFAKQQ

SEQ ID NO: 81339 - protein, 374 aa, Unknown
  Bacterial polypetide isolated from the Sargasso Sea
MEQGPDGLVYCAIRGSRVFSSNPPRWSGGVIVLDVDDPTNISVIDTTFLSYHTTSGNSIPYQVTLDIEFDIDGNLWIANPYCINGNNPIHVRSPDGIWKHFGSSETSTRISQSPGSIVFDSWGRTWVSAFQAEEANLGIYPNGGISMLSYEGQPYDPFSFNWDIINSSGTVWSLGMGINDRVYYLTPSGLNYYDIDGGYDPVIRENPYSYFPNISFGNGAGISIDKQGNIWTYSPSQGVHVLLENTSYWPDINGFRTNNSPLLSDEIRDIDFNEKLNLAYIATSKGVNVLRVPFGVPKTSYKNIKVFPSPFYLPSDKPMKVDGLLYGSSMMVTTLDGKIVRHIRSQGLEIDGDQLSWDGRDRKVIMCPQVYICC

SEQ ID NO: 81340 - protein, 255 aa, Unknown
  Bacterial polypetide isolated from the Sargasso Sea
MSSKNLKEIADKARKNDFISISELMTGIETRVFSRKEVSQIIFKESHKSLKIGITGPPGAGKSSLMNKLIPLIRKENLSVGVIAIDPSSPITGGSFLGDRVRINNAVNDDNVFIRSMGSRAELGGVTELAEDFSDILAFSGKDIIFIETVGVGQSEYSVSEITDLTTLVFVPESGDEIQLLKAGILELADIFVVNKSDRKDSNLLVKSINNILSSTKKDSKKIPIFKTSCKTDVGIEEFSKAISSYYKSMKDNKD

SEQ ID NO: 81341 - protein, 243 aa, Unknown
  Bacterial polypetide isolated from the Sargasso Sea
MNLENFFENQNKKKQLKILTCGSVDDGKSTLLGRLMYDSKNIYSDQLSQTKAESEKYGTQGKEIDLALLIDGLQAEREQGITIDVAYRYFETAKCKFIIADTPGHEEYTRNMATGASNSDVGIILVDASKGILDQTKRHTFILSLLGIENIIVTINKMDLIDYDEKKYQEIIKSFRLISNKFNFKIEQFIPISALNGDNVFTKNKNIIWYKGKTLIEKLEQITLVDVEEDVFSMPVQWVNRLS

SEQ ID NO: 81342 - protein, 456 aa, Unknown
  Bacterial polypetide isolated from the Sargasso Sea
MTHTAPTNTTLPNAELAQQDIGSQSTAPESIASDHFVSEKVVPETSTLLTQAFDLNSQIRSQFPTLTQMLGDYPLCYLDTAATSQKPQCVLEAMAQYYQYDNANVHRAAHQLSARATSSYEKVRDQLQVFINAKRREEIIFTHGTTESINLVAFGLTPQLKSGDLILIDSAAHHANIVPWQELAKRTGAIIKPIPLTQDCRLDLNAYQALLELKPKVVALCHVSNALGTVNPVVELVRQAKAQGTLTLVDGAQAVAHLSVDMAAIDCDFYVFSGHKMYGPTGIGVLYGRFEILDTLTPLLTGGEMIKRVSFDGTEFGSLPNRLEAGTPPISAVIGLGAAIRFLQQHLTSEVKAHEAELLQYLQNQLRVLGDVHLYGAHRDNIGTVAFNLADEHHQDVGILLDQQGVAVRCGHHCAMPLMQTLNLKGCCRASIGIYTNKTDIDRFIAALASVKELLL

SEQ ID NO: 81343 - protein, 388 aa, Unknown
  Bacterial polypetide isolated from the Sargasso Sea
MTSNSLQFIDKFREVYNLEIIESQSDIKRLSKDFYNYSPILTEKLDECIADLVVRPKDHNAVKKVAEICWELSIPLTLRGSGTGNYGQAVPLFKGVVMQMSHFNKLEEFDPDTGFVKVQSGCVMGDLNKQLEKYGRELRLLPSTWKTATIGGFVAGGSGGIGSIRWGFLRDPGNLIGLEAVTMNEKPALLKFDAEESEPLNHAYGTNGIITSLLLATDIKRKWYSIVINCIEFEKTIEILKTLTSAAIDLKLGAILEEEIVDQMPKWFKSKSRSHKILIQSTLGGIKTIELICKKFKVESILLGEEENLVNGISEVVWNHTTLHMRSRDKNWTYLQMLLPLNNELELINFLRKKWGKKVLWHLEAVSQQGSPRLAALPVLKWNGAEEL

SEQ ID NO: 81344 - protein, 608 aa, Unknown
  Bacterial polypetide isolated from the Sargasso Sea
MFGSNETRVWISDVSTKSDDNSGAKTIGLGSYDNYYTHQGWLTEDHRYFIVNDELDESNNAYNNTRTLIWNVEDLNNPVVHKTYFGPTPAIDHNNYIIGNNVYMSHYTAGLRVMDISDISNPTESAYFDVYPSSNNTSFDGTWSNFPYYGSGSIVVTGIDEGLFVVSPSGSGPAPAPEVTYTIPSDGNVTLNWQDLICISSCTVNIYRSLEPGFTPDSSNLLTSVNYPTFEFTDSNLDENIFYYYRLSVTSNGQESLFTDEIQVKPVFVPNQAPTIDTPDDVQFFEDNRYDVVLTGISYGNDINPQNITIDATSDNDDLFSDVSIDYDPAADPILLSLIPNQDKYGTSLITLTVKDDGGTVGGGVDSTVVSFNAEVLPVNDAPASFSTVGEYFISDGEYITGIDFRTLYITPENVNDSLRFVWNATTDIDGDDVSYRMIGYQGLEFLSMDESEYITDNYKTWALKDLAAQTDTVTVLEGFWNVIASDGSLSRSASLLNGQMRIDGRQLIPDILAIRQSYPNPFTNFTTIEYDVPSEQNVVIRIFNIRGQTIRTLVNEDKNAGYYTVIWDGTNENGDEVSSGVYFCQMYTPKNPNGGQFVKAKKMVKIR

SEQ ID NO: 81345 - protein, 578 aa, Unknown
  Bacterial polypetide isolated from the Sargasso Sea
MKAILVTACPAGIATSFLAAKRIEQQAKLAGWELTLDVGSSVQPRQVPDKAQIAAADLVLVVASAPVDLAAYDGKRVYQGSMDLALQDPAALLDAAASGASLYRHQAASAVANAAAKPAAAGKRIVAVTACPTGVAHTFMSAEALETMAKQLGHQIRVETQGSVGAQNALTAEEIAAADLVFLATDIEVDMARFDGKPVYRTSTGAALKKTRAELDKAWSEAKTYRHSGASQPKKEEKAGPYKHLLTGVSFMLPMVVAGGLIIALSFVFGIEAFKVEGTLAAALMKIGGGSAFALMIPVLAGYIAYSIADRPGLAPGMIGGMLASSLGAGFLGGIVAGFLAGYSAKYLSDKVRLPVTLEALKPILIIPLFASLFTGLVMIYVVGGPVAGIMNAMTTFLNNMGSANAVLLGVIIGAMMCFDMGGPVNKAAYAFGVGLLASKTYAPMAAVMAAGMVPALGMGIATFLARTKFIKAEQEAGKASFVLGLCFISEGAIPFAAKDPMRVIPACMVGGALTGALSMLFGCELMAPHGGLFVLFIPHAISNVMMYIVAIAAGSLLTGVSYAMLKRGEEQAKLATA

SEQ ID NO: 81346 - protein, 227 aa, Unknown
  Bacterial polypetide isolated from the Sargasso Sea
MERLDLLSKTGLQTGANSEITRLRDRAGSERGPRLGLAEALIERGYTIDGINLGWGLFRDEGAWDQEILRVTYPFPYRELISRAAEDWGISPYVMAAIIRQESAFKADIVSHAGAIGLMQVMPPTGAELARTHGPEGFTPESLTRPEVNLHLGSAFFVAMSRRYDHELPFVLSAYNAGPTRATRWRRYPEASDLVRFTERIPFSETRGYVKNVRRNLAIYRALYGQD

SEQ ID NO: 81347 - protein, 151 aa, Unknown
  Bacterial polypetide isolated from the Sargasso Sea
MGLEDKIKESIILAMKAKDKTRLEALRAVKSAILLEKTKAGNKEILDENQIIKLLQKLVKQRNESAKIYKEQNRDELAEIEDSQSKIISEYLPDQLNEEELITIIDEVIISTGAESIKDMGKVIGATNVKVLGRAEGRVVADLVKSKLNSL

SEQ ID NO: 81348 - protein, 305 aa, Unknown
  Bacterial polypetide isolated from the Sargasso Sea
MKHNEKDLIDGINSGSRVSLSRLISLVESDKSAIFRISNLLKKKAKSTYVVGITGPPGAGKSTLTNRLIQNFRSKKLSVGVLAVDPSSPFTGGAVLGDRIRMQEHALDDQVFIRSIGSRGDLGGLSNSTSAIIKLFDSFGMDIVIIETVGVGQTELDIIKISDCVLVTLVPEAGDGVQAMKAGLMEIGDVFIVNKADRGGADKLAREIDYMISLKHTNSSWNTKVILAEAENNVGIDEIVEQIESFKSYEEQNKLLEAKRNKRKITEIESLLLQKVKLEVEQLKKREEIINIISDASSGKIKTEE

SEQ ID NO: 81349 - protein, 776 aa, Unknown
  Bacterial polypetide isolated from the Sargasso Sea
LDLSGITQSFEVRASVTDLAGNSALDGAPLIGQSETLTLSEAGLANGPVTATGSLNTGAGIDGSLQVTFAADQSGLEGLKLTSHGVALDYVWGGQTLTATAGGVTVFTLTLNNNGSYRIVWSQSLDHPESKGQTLLNTQETLSLPFNLEYRDSDGDLVTAPLVINLLDSNPPSFEIPAITLVEDDFTNGAAVIGESRFVVGHTADPLLADSLVFSNQSDTLATLNGSGLASDGHPLVFEFADDRTLLGYYPGSNGQRVEVLRAQLLAEQQGSDVGGRVVVTLTGSLDHQGSDSLSLGLQVSANEIDGDTTSANLFLTIDDGRDPSLGFDKGVSLQEGGNQRIDGQLPVTVGSDRLVSLTFEASQPVLAGLTSGGKPTSYQVNGNLLTLLDAEGKGILTVTLDLDGKYHLELKGVLDQPVATDSIKLGLQVVGRDFDGDQSNLGTLNITIIDGVLPQVDPVSLTLTEDSDWQLGQTLGGELAITAGSDPLVSIAFDASQPGLQGLSSGQQSVTITVADHLIEGRTPDGQLVFELTLGNDGKYSFALHQPLDQGSADALLTAGLTLTDSDGDKVSSTITVAVGDGANPTISAVTGTAITEMAQGEAAAVSTMSFVVTHGSDALDPASLGFDIATIQSTLTGLTSHGSLISFSLDGNGQLVGTTADGREILRAELSLIEHSGNWSVSARVTLTGELDHQGSESLNLPLAVTLADKDGDRIGTTLPLTIADGKAPSFIPGTGVTLDEGNLTGSNSLSQTGHFDVQAGSDRVVEVAFADAN

SEQ ID NO: 81350 - protein, 309 aa, Unknown
  Bacterial polypetide isolated from the Sargasso Sea
AAGTAYTTHDIEMMLFYIFYSMFGFKRVMDLAWAAGDSQTRGFLIGATSGRTTLAGEGLQHQDGQGLIMASMIPNCISYDPTYAYEMATIIEDGIKRMHTNKENIFYYITALNENYKHPEIPKHVKKEDILKGMYLFKEFRKKGKAIVQLFGSGSILNETIKAAKILSEDFGIDSDVWSITSYSEIQRNGAEILRWNQLHPDKKPKKTYIQKCLKGRSGPIIAASDYIRSHIDQIRPYVENSFYTLGTDGYGRSDTRKELRKFFEVNKKSIVVNTLSALSKEQKIASKVVNDAIKKYKIDPEKPYPIKL

SEQ ID NO: 81351 - protein, 278 aa, Unknown
  Bacterial polypetide isolated from the Sargasso Sea
MKKKAKSTYVVGITGPPGAGKSTLTNRLIQNFRSKKLSVGVLAVDPSSPFTGGAVLGDRIRMQEHALDDQVFIRSIGSRGDLGGLSNSTSAIIKLFDSFGMDIVIIETVGVGQTELDIIKISDCVLVTLVPEAGDGVQAMKAGLMEIGDVFIVNKADRGGADKLAREIDYMISLKHTNSSWNTKVILAEAENNVGIDEIVQQIESFKSYEEQNKLLEAKRNKRKVTEIESLLLQKVKLEVEELKKREEIINIISDASSGKIKTEEAVNLIFKFFKNGS

SEQ ID NO: 81352 - protein, 506 aa, Unknown
  Bacterial polypetide isolated from the Sargasso Sea
METFTAILDFLTYWLVDQYWFPAFLIGTGIFFTIYLGFPQIKYFRHGWRVLTGKYVKEDTEGDTTPFQALTTALSGTVGTGNIGGVALAIFLGGPAAIFWMWVTAFLGMTTKFVEVTLSHKYREKLPDGSMSGGPMYYIENGLNMKWLAIVFSVCLLLMCLGTGNMPQISSISVVLLDTFNIPKVATGLVLSVLVWLVIIGGIKRIAQIASKLVPFMAFWYIVGGLAVIISNYENIIPSLQSIFVHIFTPTAAVGGFLGASVAAALTRGVNRGLYSNEAGQGSAPIAHASSKTENPIEEGMVSILEPFIDTIIICTLTGLVILSSGVWNQKFENKFEASAMVFVEGKFIETSQEDAIDLRNYYYGNNDEIEYTGPIEVIDGRINLEKVTLLHNRSIAENTIVYLSSDNSLFSGLLEIKNGSVKNTGDYVIRGKSLLLGADLTGKAFTKSIFGDFGQYIVAIGLLLFAFSTVIAWSYYGDRATVHLFGEGWVFWYRVIYVAAFLQPQ

SEQ ID NO: 81353 - protein, 349 aa, Unknown
  Bacterial polypetide isolated from the Sargasso Sea
MINFIKQIAGMFSTDISIDLGTANTLIYMKGKGIVLDEPSVVVVRDEQGANKRVEAVGNEAKNMLGRTPVGLTAIRPLKDGVISDFTICEKMLQHFIKKVHKSAWFRPSPRVLICVPCGATQVERRAIRESASGAGARVVHLIDEPMAAAVGAGMPLDEPRGYMVCDIGGGTSEVATISLNGIVYASSTRIGGDTFSEALISYVRRNYGCVIGDPTAEKIKHEIGSAYPSSDLLEIEVKGTNLAAGVPQSFTINSNETLEALQEALQGIVAAVKTALENTPPELGADIHERGMVLTGGGALLKDLDMLIKEETGMNVVVAEDPLSCVARGGGKVLEIIDEKGVEFLSMD

SEQ ID NO: 81354 - protein, 422 aa, Unknown
  Bacterial polypetide isolated from the Sargasso Sea
TINEEMKIAAANAIAYLARERVPDEVVAAMGGERPTYGKDYIIPSTFDPRLISVIPVAVAKAAIASGVARKKIKDFEIYKEELKQRLDPSVTIMQGINSQIKKTQKRIVFADGEDENTLKAAIAFKNTKLGIPILVGKKEKIKEQLKNIGYSENFNIEITNSTDKEKREKYVNFLFKKMQREQGLLERDCDRMIRNDRVIWASCMVSCGDADGAVTGNTRRYGVSLEKVKKVIEPRPGEIMFGLNMIVKKGKTVFIGDTSVHEYPSSEQLAKIAISSARVVRLFGFDPKVAFLSHSTFGQPLTSRTKHIRDAVDILKKKKVDFKFDGDMQPDVALDKEYSDLYPSSKIVGNANILIMPGQHSAAISYKIMKTLGGAKVIGPLLIGLGQAIEIVPLRCSTSDILNLASIAAYSAGVIDYNKTN

SEQ ID NO: 81355 - protein, 301 aa, Unknown
  Bacterial polypetide isolated from the Sargasso Sea
MKFLEVSNLDIEYQTRKETIYASKNVSFNLQRGEIIGIVGESGSGKSTVANAIINLIDKPGIITNGSIKLDGGELHNDTDIIKNIRGKKIGFIFQDPQTSLNPLFKIRDQLIETIQTHSDLNFKEAESKSINLLREVGIENPEKRINDYPHQFSGGMRQRVVIALAISCEPDLIIADEPTTALDVSIQYKILQLLKKLTVERNLGIIIITHDMGVIAETTDRVIVMRHGIIVEQGKTNDVLLKPKSLECKSLVMSVPPTNKKIERFKLLSPEGRQIKSSSIKLTNNIIKNWAKRETSTKKI

SEQ ID NO: 81356 - protein, 380 aa, Unknown
  Bacterial polypetide isolated from the Sargasso Sea
MTTNEPDQSNSEVISRDPVSLPLVVTVGDLAEILQESQVDVVKSLMKLGVMASVNEEVDFSTAARVAQSFEIPVLKPKESVDNKNALNVGSSIDTSDKNTGEKRAPVITVLGHVDHGKTTLLDAIRKTNIVEKEEGGITQKIGAYQVKHQGSEITFIDTPGHEAFSSMRVSGTSVTDIVILVVAADDGLMPQTIESINHAKNANVPIIIAINKCDLEGADVDKVKGQLTEHELIVEDYGGEVLSVEVSALKGEGINELLESISLLSEISELESNSNLSGKGVIIESYNDPKKGSISTVLVKSGSFKQGDIIVSGTNSGKIRQMIDGYGKQTKSAKPSTPIQIMGIGGINEIGEIVEVVSSEKEAKKMIQKLSRSNQKQNN

SEQ ID NO: 81357 - protein, 143 aa, Unknown
  Bacterial polypetide isolated from the Sargasso Sea
MCDYNGHMNVTYYYKLFDSVYSSFYIEKLGFDNEYLKSGFSTFTLEDSIRYLREFKLNDKVRPFFELHNANEKMMHFVGVLLNENNEIAAIFETVLGHVNLKIRKITAFSDEKCTFLQNYIKQNKSNEDLPFQIRLKIKSLRN

SEQ ID NO: 81358 - protein, 938 aa, Unknown
  Bacterial polypetide isolated from the Sargasso Sea
MIRIIDFALKKAKTTLLIAFMVIIAGSYARQEIPIAASPNVQLPFITVSVFLDGASPSDTSRLIARPLENRLKSVTGVKNIRSTSYLSYARIFLEFEVGFDIDQALVDVKQGVEETKYQLPLGAEDPQIEEYSEASFPVMNISIVGGSSVRQKVFYARELKDRIEPIEQILEVRMTGAPEEVLEGVIDKSKMESYGVTLSDIYNSVASNNVIIPGGKQDTGRGSFNIEVPSIIESAKDVYSIPVKVSKDAIVTLGDIATIKRTFKDFTSYARVNGQDAVTLEISLRESANAIDASNAIRDILSNFKNELPENLSIVISNDDTVYASLMVKELNGNIIAAVVLIMVLVIASMGTRVSMLVGLSIPFCFLMTYLILYSLNMEVNFLVMMGLLLGMGMLIDGSIVITEYADKKIAEGLSRAEGYALASKRMFYPIVASTGTTLAAFIPIMFWPGFTGQFMRYLPITIFFVLSASLFYSLIVIPVLGSYFGQKESALNNNEEQTSIFVRLTEWYGKYIKRFVENPLETFLAVVSVLLIIIMSYAFSGKGTIYFAIVDPVQANITVKARGNFSALETKEIIEQVEERFLEVEGIKNVYLRSGTNWWQSGADRIGGGFIETLEPSQRDISGFEIMDRLKASTKDLPGITVEVEADIGGPSFDSPIELDVFGNTESEVNNAVAKIENYMRNEMSGLNNIFSSKAYPSVEWSVDVDKQKAAQLGVSVSDVGALVQMLTNGFKVGEYRPDDAKDEVEIRARFPDSDRTITGIRDLNVVTKQGTVPVSSFVNVAPKENRETVNRKNGKYFQEVGAGSDDDSKVNQKIEELESWLQKTDLGYGISYQFSGMAEETEEVNNFMIIAGLTAVFMMLLMLITQFNSFYQSLIILSSVTISFVGVLLGLLITGKSFSTTMTGISIVTLAGIVVNNNIVLIDTFNKLKEEAPHL

SEQ ID NO: 81359 - protein, 429 aa, Unknown
  Bacterial polypetide isolated from the Sargasso Sea
IQKNPSFFEKLKKDYSEKTLIETGLFYLDEKKKIYVERFRGRLIFPINNISGQPIALGGRVIENLDYLAKYINSPETNFFKKGSNLYNLDLARKLSNKIDHIYLVEGYMDVVGLSKNGIDNVVANLGTSLTDKQILTLNQFFDDIIICFDGDESGYKAAVRAAENSIKELRPEKQISFLFLPDKEDPDSYVNKNGKANFIDFTKQSKLSIHQFIFSHYKKQTNNNPSSMAIFEKKLRNIANTIKDDFIKKYVLEYFLAKIAELTPHSNYNNKKFYSKKTKSLESTKKYFNESQSLTGVELKEFSLLYLLINNLELLQANIHLIENIKLFTELNKKILEMIIEKLKSGIQITVQDLNLDIQLTEKINKFAPIKHILKNQSDDDQKIIELLEDISRDLMNYDLEFRIQELESKFSVDMSESTFNELKELKK

SEQ ID NO: 81360 - protein, 222 aa, Unknown
  Bacterial polypetide isolated from the Sargasso Sea
MPKANNFFREKNVHKVNIPGIVLAGGQSTRMGGIDKGLISLGRYTLLEHVIARLKPQVSTIVLNANGDKSRFAGFSIPIFSDSIQGFLGPLAGVLAGFEWAEQNGYEKIVTVAADTPFFPKTLVERLDTELNEKSADIALACTSKGSGTKLTRHPTFGLWSVSLKEDLKKSLLAGTRKIVLWTEKQKTVEVIFDETDSETFYNINTQDDLLTMKEKLQRIST

SEQ ID NO: 81361 - protein, 431 aa, Unknown
  Bacterial polypetide isolated from the Sargasso Sea
RGALDVRAKTINEEMKTAAADAIAKLAREIVPEEVAAAMGGETPSYGKEYIIPSTFDPRLISVIPVAVARAAMSSGVARKNIENFDIYSEQLKQRLDPSVTIMQGINSKIKKNKKRVVFADGEDENTLKAAIAFKNSNLGTPIIVAKEKVVKERLKEIGYGENFDIEIVNSTKKDKREKYVNFLFKKLQREEGLLERDCDRMVRNDRVIWGSCMVACGDADAMVTGNTRRYAQSLQKIKKVVEPRPGEIMFGLNMVVNKRKTVFIGDTSVHEYPTSEQLAEIAISAARVVRLFGFDPKVAFLSHSTFGQPLTSRTKHIRDAVEILKNKKVDFKFDGDMQPDVALNNEYADLYPFSEIVGKANILIMPGQHSATISHKMMKSLGGAKVIGPLLIGLGQPIEIAPLRSSTSDILNLASVAAYSAGVINYKKPN

SEQ ID NO: 81362 - protein, 450 aa, Unknown
  Bacterial polypetide isolated from the Sargasso Sea
MISKLKFIDKFREVKNLEIIENKSDVKRLSKDFYNYSPILTEKLDECIADLVVRPSDHKAVKEVAEICWELSIPLTLRGSGTGNYGQAVPLFKGVVMQMSQFNKLEEFDPDTGFVKVQSGCVMGDLNKQLEKYGRELRLLPSTWKTATIGGFIAGGSGGIGSIRWGFLRDPGNLIGIEAVTMNEKPALLKFDAEESEPLNHAYGTNGIITSLLLSTDIKRKWYSLVIDCIEFEKTIEILKTLTSAAIDLKLGAILEEEIVDQMPKWFKGKSRSHKILIQSTLGGIKTIDLICKKFKVESTLLGEEEKLVNGISEVVWNHTTLHMRSRDKNWTYLQMLLPLNNELELINFLRKKWGKKVLWHLEAVSQQGSPRLAALPVLKWNGAEELKEIMEDCKKLGAFIFNPHVLTVEGGGLGVVDADQVKAKLRFDPKGLLNPGKLEGWEVKEQFKI

SEQ ID NO: 81363 - protein, 464 aa, Unknown
  Bacterial polypetide isolated from the Sargasso Sea
MTTTDPDQTNEEIKSPVSLPLIITVGDLAETLSESQVDVIKALMKLGVMASVNQEVDFSVAARVAQSFEIPVLKPKEAVDNSTALNVGSSIDVNDDNQGEKRAPVITVLGHVDHGKTTLLDSIRKTNVVDGEYGGITQKIGAYQVKHKGSEMTFIDTPGHEAFSSMRVSGTSVTDIVVLVVAADDGLMPQTIESINHAKNAKVPMIIAINKCDLEGADIDRVKSQLTEHEIIVEDYGGEVLSVQVSALKGDGIDELLESISLVSEINELESNSKTSGKGVIIESYNDPKKGSISTVLVKSGTFKQGDILVSGNNSGKIRQMVDGYTNEIKSAKPSTPIQIMGMSDINNIGDVVEVVKDEKQARKIIQQRNREKQTKNSKITTLSQVVKRAKASKDKEINIVIKTGSNGALTAVEQVVSDLTSEEIQVKIISGSVGAVTESDVMLASSAEDSIIVAFQTIVKMVQ

SEQ ID NO: 81364 - protein, 132 aa, Unknown
  Bacterial polypetide isolated from the Sargasso Sea
MDKVLIQNLEANNQRDLSRLITEIENTDVEKSVDLDKLFRKTNHAIRIGITGPPGAGKSSITNELIKNFIKTNHKVGVIAIDPTSPFSGGSLLGDRVRMNQYHNNENIFIRSMSTQGQLGGLSRKAQDIGDI

SEQ ID NO: 81365 - protein, 481 aa, Unknown
  Bacterial polypetide isolated from the Sargasso Sea
METLTGILDFLTYWLVDQYWFPAFLIGTGIFFTIYLGFPQIKYFKHGWRILSGKYVKEDTEGDTTPFQALTTALSGTVGTGNIGGVALAIFLGGPAAIFWMWVTAFLGMTTKFVEVTLSHKYREKLPDGSMSGGPMYYIENGLNMKWLAVVFSVCLLMMCLGTGNMPQISSISVVLLDTFSIPKIVTGLVLSVLVWLVIIGGIKRIAQIASKLVPFMAFWYIVGGLAVIISNYENIIPSLQSIFIHIFTPTAAVGGFLGASVAAALTRGVNRGLYSNEAGQGSAPIAHASSKTENPIEEGMVSILEPFIDTIIICTLTGLVILSSGVWNQKFENKFEASAMVFVDGSFVETSQEDASLLRDYYYGNNSNIEYTGTLNVTDGKINLEKVTLLHNRSIAENTIIYLSKDNSLFSGVLEIEGGKITNIGDFALRGESLLLGAVLTGKAFTKSIFGDFGQYIVAIGLLLFAFSTVIAWSYYGDRA

SEQ ID NO: 81366 - protein, 350 aa, Unknown
  Bacterial polypetide isolated from the Sargasso Sea
HFNKLEEFDPDTGFVKVQSGCVMGDLNKQLEKYGRELRLLPSTWKTATIGGFIAGGSGGIGSIRWGFLRDPGNLIGLEAVTMNEKPELLKFDAEESEPLNHAYGTNGIITSLLLATDIKRKWYSIVIDCIEFEKTIEILKTLTSAAIDLKLGAILEEEIVDQMPKWFKSNSRSHKILIQSTFGGTKTIELICKKFKVKSTLLGEEENLVNGISEVVWNHTTLHMRSKDKNWTYLQMLLPLNNELELINFLRKKWGRKVLWHLEAVSQQGSPRLAALPVLRWNGINELNEIMEDCKKLGAFIFNPHVLTVEGGGLGVVDADQVKAKLKFDPKGLLNPGKLEGWEVKEQFNI

SEQ ID NO: 81367 - protein, 391 aa, Unknown
  Bacterial polypetide isolated from the Sargasso Sea
MDYSFKTFLKHTAKDFYNQSVNPPVVRASTILFKSLNDIRKTQKKHLKDPTGGHFDYGRQGTSTTHALSKILTKFEESYHVFLTPTGFGSVFLAMFSVVRPGDEILVSDPVYSPTRILTQDFFKDFNIKAIFYNPRDLSTLKKNMTKKTKLIFVENPGSNTFEFQDLSKIISIAKKNKIFTAMDNTWGTPYFLKPIKLGFDMAIVSATKYYSGHSDVMGGSLAVNKRVFKYVQRAEKISGLRMGPDDAYLIIRGLRTLDTRLDRHELNTKKIASFLSKHKKITVLYPYKKGTKDYKMWKKYYKGSSGLMGLKIKSRNKSSIDRFVNSLRLFGYGYSWGGFESLALHQKIKEQGKRKYLNLSKDEHIVRLHIGLEDPKDLIKDLKNSLKFIK

SEQ ID NO: 81368 - protein, 327 aa, Unknown
  Bacterial polypetide isolated from the Sargasso Sea
MQDVPQENQRTTKTHADQLNRQCYCITLDRKALTDSLQKQFSDTGNEAPATPEIHHFFSNTPVFVPQADIATMERIVQAIESAAELPSYRERALSWAPDIAGFDPGPIGAFMGYDFHLGENGPQLIEINTNAGGAFLNTVLARAQHRCCDPSQQTAGTNRALDGFEDAVFAMFQQEWQRQGGDSTPGCLAIVDDTPESQFMFPEFQLAQQLFQARGIETLILDPSELEYVDGALSAHGKPIDMVYNRLVDFALEAPALGALRRAYLDGAAVVTPNPRAHALMADKRNLILLSDAQTLRDWGLSETEAGFLDRAVPKTRLVSASDEAE

SEQ ID NO: 81369 - protein, 799 aa, Unknown
  Bacterial polypetide isolated from the Sargasso Sea
MSGCFHCGEPVPAGSRYALEIKGIVQPMCCPGCQAVAETILECGLASYYEHRTAPGTKGELVPAELAALTHYDLAEVQQDFVTDSATGSHKVREIQLTVEGLTCAACAWLIERHLGNLAGLHYINVNTTTHRARIKWDPDQLSLSDILKGFAKIGYRAYPFQTHQQEALYAKEVRSYMFRLALAGLGSMQVMMCAVALYMDLFISVEEEFMVYFKWISLLLSTPIMIYSAQPFYVGAWRSLKQGHLSMDVSVSLALIGAFVASMWATVFNTGEVYYDSITMFVFFLLLGRFLELRARRKASESSSNLARLVPIMATRLDEEGEHEVAAKTLQVGDRVRVLAGATLPADGIILLGQASLNESMLTGEQLPLLKQVGDAVYAGTINTDAPLEIRVSHRIEESRLAQIMRLQDHALDDKPAIAQMADVLSRHFILVLLFIAAGVWTFWHFHQPEQAFWVTLAVLVATCPCALSLATPTALTSATARLTRAGILLRRGHVLDVLTRANRIVMDKTGTLTTGNISLTSTEALGNLDAARCLAIARALEAYSEHPIARAFRSNTAEDAVLLAASKVTPVIGHGIEGVIEGRHYRLGSARWLGISDAHAAQADGLVIYLADEDRALARFLLTDTLRPDAKALIQAFKAAGLKTTILTGDSSAQADEVARELGVDELVKGVTPDGKLAYLKEHEARGDISIMVGDGINDAPVLAGAHASFAMAGGTDLAKNSADAILLADDLSRLLDARALALRTRKIIKENFAWSIGYNLLVLPLAASGWLPPYVAAAGMSLSSLIVVTNSMRLNR

SEQ ID NO: 81370 - protein, 313 aa, Unknown
  Bacterial polypetide isolated from the Sargasso Sea
MSTKKLKEIAGKAKKNDFISISELMTGIENKVFSRKEVSKHIFKESHKSLKIGITGPPGAGKSSLMNKLIPLIRKENLSVGVIAIDPSSPITGGSFLGDRVRINNAVNDENVFVRSMGSRAELGGVTELAEDFSDILAFSGKDIIFIETVGVGQSEYSVSEITDLTTLVFVPESGDEIQLLKAGILELADIFVVNKSDRKDSNLLVKSINNILSSTKKDSKKIPIFKTSCKTDEGLEEFANAIVSYFKSMKDNKEIQGKQILRYNRRIKSIIEKDVLEQFWNNQRLTLLDKIDKSSIKKKSPYEFVDEIKGKE

SEQ ID NO: 81371 - protein, 159 aa, Unknown
  Bacterial polypetide isolated from the Sargasso Sea
MLIATKSSRINISEEKKTKAIAKIFAKNIKAGDVLFFKGELGVGKTTFIKYLINFLQEDKKYPITEIPSPTFNLVNEYQIGSLILKHYDLYRINNEKELNSIGIFEYNSEQITLIEWPDIIKQNKIKNIINLHFEYDEDYNNRFLNVSSDNKIIFLDEL

SEQ ID NO: 81372 - protein, 227 aa, Unknown
  Bacterial polypetide isolated from the Sargasso Sea
MKKITSMILALVFAVSLISTASAKTLKIQLTFPKTSYDGQIVKMWTDRVTQLTRGELVFELLSKGEVVGMKETLEAVDKGLVDGGAAWTHYWSNYHPAAMLFGSPVAGGGIGLSTKSWLAWYFDNGGKQLYDRLWDEMGMNVKGFVMASSGPEALGWFKEPITSMDDFRKYRFRTPPGIPGQTYKDIGVASVSMSGGDILPALEKGTIDAAEWCCPKPDSVFVSKKF

SEQ ID NO: 81373 - protein, 115 aa, Unknown
  Bacterial polypetide isolated from the Sargasso Sea
MASGKLIYDDQCASCHGINLQGQEGWQDELVDGLRLAPPHNEEGHTWHHTDYHLFMLTKYGIEEFLSMDYPNNMPAYKNLLSNDQIISVLSYIKSKWPSHIRIKHDQLNKVFKEN

SEQ ID NO: 81374 - protein, 315 aa, Unknown
  Bacterial polypetide isolated from the Sargasso Sea
MVDSNQNDVINRILKNDHRAISKVISQIEFETDTNNALYSRLYPHTNNCLKIGITGPPGAGKSTLTDQLINKYLSDNKSVGVVAIDPSSPFSGGALLGDRVRMNNYLWNENVFIRSMGSQGNLGGLNNKAQDVGDVLAASGKEIIIYETVGVGQGEHDIAKAADLTIVMLVPESGDDVQLMKAGLIEIADLFIVNKSDREGSDRLAQSIRNVLHIFKNKDNHEPPVFKVSANNGNGIKELYAGITEIINEMKNKDFIEQKRIARYKDRVLNLVQESLISNFWTDKKLKKLEAIIKGLEVSDSSPHETAEKILNQS

SEQ ID NO: 81375 - protein, 305 aa, Unknown
  Bacterial polypetide isolated from the Sargasso Sea
DASAKKKFTDISAAYEVLSDKEKRSIYDRYGEEGVARHEQGGGRGGGGGAQDIFSQFFGGGFGGFGHGEPEEPETPKAPTIKVDLVMSVEETYLGARVPVRREKMVTKAARGTRKCNCRQKLVTRQVGPGMYQQYSEETCEDCPNVKLVRERADLNVEVDPGTPVGHEILFFEEGDAMIDGDPGDLVFVVKTRDDEKNRIKRVGASDLHMTYEITLIEALNGFSKIFKHYDGHEVKIERDGVTVPFDKMTLRGEGLPKHNQFKKFGDLFITFQVQFPDSLNKAQRDAVAKTFAKTTFLPVGDVKP

SEQ ID NO: 81376 - protein, 74 aa, Unknown
  Bacterial polypetide isolated from the Sargasso Sea
MANQNDAVLEALSLAIAVRIPILLWGPPGAGKSSAVTAMCESAGFPYEVVIASIREPSDFSGLPVVGEEGVTFA

SEQ ID NO: 81377 - protein, 372 aa, Unknown
  Bacterial polypetide isolated from the Sargasso Sea
MHIAEGVKEHVMETGASIINAQKSGETFQEPSLFTENSMLKESAVWDCVTCGACMEECPVMVEHVDSIVDMRRYLVMEQASMPEGAEGVLLNMEQRGHPWSGNQTSKTEWMEGLDIPTFEEEKESEVLLWVGCTSALNEANQKAPRAMASILRVAGIKFAVLGNEEGCTGDPARRIGNEYLYQMMAEQNIQTLNQYSFKKIVTLCPHCFNNIKNEYPQLGGNYKVYHYTEFVDELIQDGKLKPVKSVDISMTYHDSCYLGRHNKVYDAPRNISKAIPGLELHEMERNCERGFCCGAGGGHMWMEDSGGQRINHMRIDQFLDTEGETLGVSCPFCYQMFAEGIQSKGVQESKQTKDLVEIIAESVVPKEEEEK

SEQ ID NO: 81378 - protein, 285 aa, Unknown
  Bacterial polypetide isolated from the Sargasso Sea
MPRWAVKPFAKPYVAGEKIQDVTNVVKNLNHNGFSATIDILGEFVDSKEEAIEVRNQYSKLIKAIAELKLDSTISVKLTHLGLELDYFFCKKEMHKLVEYAKKFDVGIAIDMESSKYTESIYQIYQDVSTVYSKVGAVTQAYLYRSINDIKKLDSSNLNLRICKGIYNEPSTIAIKNKEKINENFEKLVHTTYNQNGYICIATHDLDLISRLELWINKNSIPLDRFEFQVLYGVPMKNTLNRLKSKGIKLTVYVPFGKSWFDYSMRRLKENPKIISYVLKNLFKK

SEQ ID NO: 81379 - protein, 552 aa, Unknown
  Bacterial polypetide isolated from the Sargasso Sea
FFQDNPYVDIIVHGEGEFTFKDILLENLKPKDEQDWTSVAGCSVPLEDGTTFVTPNRDRIPDINGMPSPYLNGLFDEIAKDCPYVLEATLETTRGCPYQCTFCEIGTKYYQRVKWQDLEKVYKEIDWMSDHKVAFVYNADSNFGLLPNHLEVTKYFVKKKKETGYPDKHRCDWAKNKADKVLELAKLFTDSGMDKGITVALQSRNPDTLKAVKRRNLDDGKLGEFLKMYNEAKVPAYVELILGLPEETLETFIQGISDVIELDQHNYIGIYAMTALPNTPFGMQSYIDEYELEIISTFQAFNHYDISGDNELEREKMVVGHKKLTFEDYKNMHYFRWAVMSGHYLGLTQFISRFLRSEHNVSYKKFYESLLKYCYDNPNSFLGNELKQTMINLEGSLGATQPWGRIIDEVRENFGWDFEEATAINVCLHKEKYYLEILDLMNRYLKVEIEQDVLDDLMTYQKIGVLDPTIAYPVRKSFKYNIHDVITRKSKLRKYKNEIEFNAKNYNGDLYEWGKETLWWGRRVGACKTKRTKITRKYKATDVLNPLSGFKR

SEQ ID NO: 81380 - protein, 334 aa, Unknown
  Bacterial polypetide isolated from the Sargasso Sea
MVEEVASFDQPWSMAFLPDGNFLVTEKPGKMFLMNQAGETLSEISGVPEVAYGGQGGLGDVAIHPDFNENKTVYVSFAEEGKNDTRGAVVIKATLDLTEEGGALTNLEYIWRQVPKVTGRGHYAHRMAFSEDGYLFISSGDRQKFDPAQDMTSNMGKIIRLNDDGSIPTDNPFYNDGVVAAEVWSLGHRNPLGIDFDADGKLWNIEMGPRGGDELNLVLKGEDYGYPTVSNGIHYNGSNIPNHDTRPEFEEPKEWWGDGYSIPVISPSSFVIYQGDLFYDWQGSGFISGLSSESLIRVQFDGDSAKEIERFDMGRRIRSVEEGPDGALWLLEDY

SEQ ID NO: 81381 - protein, 183 aa, Unknown
  Bacterial polypetide isolated from the Sargasso Sea
MTFLKINNLSVDYKMRKETVNAAKNINIDIKKGEIVGLVGESGSGKSTVANAIVNLIDEPGKVSSGSILMGETNISENPETIVQYRGKKIGLIFQDPQTSLNPILTIGEQLIETIQTHLNLSSDSAKNKAINLLKEVGIKDAENRFYNYPHQFSGGMRQRVVISLALCCEPELLIADEPTTAL

SEQ ID NO: 81382 - protein, 313 aa, Unknown
  Bacterial polypetide isolated from the Sargasso Sea
MNQFNYKDIFNNNHVAISRAISLIENNDATVEEFYKAIYEKSNFSIRIGITGPPGAGKSTLVDQLISHFVESEKSVGVIAVDPSSPFTGGALLGDRVRMSKYSDNENVYIRSMGNRGDLGGLSKMAQEAGDVLSASGKDVVIYETVGVGQAEHDIVNAADYTMVVLVPESGDEVQLMKAGIIEIADIFIINKSDRPGAKRISRSLSDILHNNSKKDSIIPRVMNSTASIGEGISEIFEQMISDLKINSDNGTLDKRRLYRYKNRIKNLIIKRLKNEFWTADREKLFTEITQSIDSIEIPPDNIVDRLISDFDH

SEQ ID NO: 81383 - protein, 561 aa, Unknown
  Bacterial polypetide isolated from the Sargasso Sea
MTIDFVTLLHQSDSLLLFVVLAFGLLLGKVRFGNFQIGNTIGVLFTALLFGQMGFEFTATTENVGFMLFIFCVGIEAGPHFFSVFLRDGIHYITLTLVILLTALFLTVGLAKFFNLGPGMAAGILAGSLTSTPALVGAQDALRSGLLNLPHQTDMQSVLDNMGIGYALTYLVGLVGLMLVVRYLPSLARLDLNTEAQKIARERGLSDNESRKTYLPIIRAYRVGPELAAWIGGRTLRETGIYPHTGCYVERIRRNGILASPDGDAVIQEGDEIALVGYPESHEKLDVNYRNGKEVFDRNLLDLQIVTEEIVVKNDAVVGRHLVELNLTEKGCFLNRVVRSQIEMPFDRNIMLQKGDVLQISGEKQRVKLLANKIGFISIHSQTTDLVAFTTFFVLGLLIGSVSLVFGQLEFGLGNAVGLLLAGILMGYLRANHPTVGYVPPGALRLAKDLGLAVFMVSTGLKAGGGILDHLSQVGAVVLFSGMLVTTLPVLVGYLFGVWVLKMNPALLLGAITGARTCAPAMDVVNEAANSSIPALGYAGTYAVANVMLTLAGSFIIGFWF

SEQ ID NO: 81384 - protein, 492 aa, Unknown
  Bacterial polypetide isolated from the Sargasso Sea
DRHSVAMGETFMLMITIDSTKAPMPDLSVLNGDFQVVSTAQSSQVSIINDQSSSEKTWHIELLPRHLGQATVPALSSQGERTAPIAMTITKTPQVTAASRHGGEASPIHVEARLAHARTIVGAQSVYTVDLVTSVDLAQAELHPPKVKGATLRMVGKDEQFTRTGQNGVEKVLRRHYVVTPQQAGTVTIDPALVVAYVPDSRPRSDDPFAMPFSSPFTQPTRRVVVQSQPVSLQVQKAKSTDGWLPAWQLSLKQTWSKPLSDWRVGDPITRHITLEAQGVAVESLPDITSVSLSGMNVYPDKPQQAQDFSGEHTTASVSRQFAYVPTQAGTVSLPAMTVRWWNMTKKRFEQARLAAQQVTILPALNAPATPPATAKTPLVGSSAASAVTVPQAAVASTAVLPTKGKAAYLQHRWPLWFWLFMVAMLLWLTTLWLWWRGRRRNRVSVTGELTASESALKQACMSNDVKAIQAGLLGLGQRWFRLPVEAGLVTL

SEQ ID NO: 81385 - protein, 116 aa, Unknown
  Bacterial polypetide isolated from the Sargasso Sea
GLGLAKELLKLFFHLCATKGTAEYIKKHGMRCKIINKVSSGSPHIVDVLDSKKIALVINTGGGNTEHRLNDAIALRRATLKNKVPYCTNMSTALACIEGIKSLKTKKLEVTSLQNI

SEQ ID NO: 81386 - protein, 400 aa, Unknown
  Bacterial polypetide isolated from the Sargasso Sea
MKFLEVNNLDIEYQTRKETIYASKNVSFNLQRGEIIGIVGESGSGKSTVANAIINLIDKPGIITNGSIRLDGRELHNDTDVIKSIRGKKIGFIFQDPQTSLNPLFKIRDQLIETIQTHSDLNYKEAESKSINLLREVGIENPEKRINDYPHQFSGGMRQRVVIALAISCEPDLIIADEPTTALDVSIQYKILQLLKKLTVERNLGIIIITHDMGVIAETTHRVIVMRHGIIVEQGKTKDVLLKPKSLECKSLVMSVPPTNKKIERFKLLSPEGKQIKSSSIKLTNNIIKNWAKRETSTKKLLNFIKVSKIFDEGSILSSKNKVSNVKALDNVSFEVFEGESFGLVGESGSGKSTIAKIISSLIHPSSGEIYFDNISLFDPKNKVIKNKFRGQIQMIFQDP

SEQ ID NO: 81387 - protein, 87 aa, Unknown
  Bacterial polypetide isolated from the Sargasso Sea
MTEATTQTLLASALNGDRFSLARLLSHIERDPSAEAEIRASLASMKTESVVIGFTGPPGAGKSSLISALLPHTTDSFDKTAVLAVDP

SEQ ID NO: 81388 - protein, 799 aa, Unknown
  Bacterial polypetide isolated from the Sargasso Sea
MEDIIFSGTSNKPAKNLSEVAITIDNSKKEGPGKYLEMDEIVIKRKIEREKGSKYFINDKEVRARDVQTFFADLSTGAHSPSIISQGKIGMIVTAKPHERKSVLEEAAGISGIHIRRHEAETRLNAAENNLKRADELKKQQEKQLENLKKQAEEATRYREISEKIKKVEAGLFYLKLQDIENETSQVKVKLSAIDNDVNSIKKDIEHNKDLVEEENKKLEPLKDKKIENSSSIQKINLEISSLNEKEKRVKDLNVKLINNIKTIQSDLEREKSISLDASLNEKRILEEKNELLKTERQLFDIEKKSEIDLDLSRSELKDHQIKLDEFVEKKLETIDLKEQLKIFIKIDEINKSAIKNLEDSKLDETNSSLKKINELIENQIENIEVIDRNDLSINIKGLIENITLSQERYASSFGKNQTIRSDSIKRKERIKNIDQELENWKDLKVNSEKMILELSKRVEKVELELKENQKNPEQIAINKGQNIQKLENTEKQNIDLDLEIEKVEANYIEANNKLKSIEEKSVVLRENKARFEATIEGIDQRKMDLIYLVKNELKLENINNLLSFSDLNGLPKLPSVNEQEEKLNNFKKDRESLGSVNLRADVETEKYRKTIKKMEEDRADLVSAIVKLKSSINELNQKGRERLLDAFNKVNRKFNEVFTKLFNGGNAKLELVDSEDPLEAGLEMLVSPPGKRLQSITLLSGGEQALTAISLIFAIFLTNPSPICILDEVDAPLDDANVTRFCSLLDQLISITKTKFIIITHHALTMSKMNRLYGVTMPEKGVSKLVAVDLQKAEELVA

SEQ ID NO: 81389 - protein, 306 aa, Unknown
  Bacterial polypetide isolated from the Sargasso Sea
LKFELLSKGEVVGMKETLEAVDKGLVDGGAAWTHYWSNYHPAAMLFGSPVAGGGIGLSTKSWLAWYFDNGGKELYDQLWTEMGMNVKGFVMASSGPEALGWFKEPIKNMDDFRKYRFRTPPGIPGQTYKDIGIASVSLSGGDILPALEKGTIDAAEWCCPKPDSVFGFQKVLKNYYLQGLHQNVVNGDIYINGDVYNSLTDHQKYAMEVASEAMITRNITNRAVENGKALIDLTQNHGVKLWDTPADYFTEYMNAAQATLKKNAAENAFFKQVYEHMTEHAKVVVPFIAQMETSDASIGSAFAAQQ

SEQ ID NO: 81390 - protein, 101 aa, Unknown
  Bacterial polypetide isolated from the Sargasso Sea
MNSKNSFNSEQIIDIDNKIYKYFDLNKAAQQYGLNLLKVPISLKILLENLMRNEDGESINKDMISSVFKTLTNKNDENQEISFFPTRVLMQDLLEFRLLLI

SEQ ID NO: 81391 - protein, 443 aa, Unknown
  Bacterial polypetide isolated from the Sargasso Sea
MQKDHLALHPGPAEATVTDTRSTPAVTRRGAIAAAVIGNWLEFFDFTVYGFFAVLIGKLFFPSSDPTTSLLLSVATFAAGFFTRPLGSVVLGVYADRKGRKAALNLTIMLMALGTGLIAIAPTYAQVGVAAPLLVVFARLLQGFSQGGEFGAATSTLLEQGGTSRRAFRASWQLATQGGAALMGSGFAALLSNTMTKDALEGWGWRLPFLVGVLIAPVGMFLRRRLADDAPGDRHHGIERGVLHELFSKHTRTVLLLMLTVMGGTVSTYILTFYMPTYAIHTLGLPMKLSMFVGVASGCVMLVTCPLFGWLSDRLGSRRLPIFVGRGVLVALLFPAFWLMNHHPTLSVILPLTALMLLFYSLGSASEMALMCESLPRHVRATGISIAYALAVTIFGGTAQLIATWLVKTTGSKLAPAGYVAACVVLSLIAVAMLRETARDSMD

SEQ ID NO: 81392 - protein, 314 aa, Unknown
  Bacterial polypetide isolated from the Sargasso Sea
MPNPFELLRTEMDELVVGHSDVKTALLLGIISREHIYIQGPPGTAKTMLSEIVSKSAELNFFFYQMHRDTRLSELVGDLVISREDTKNGEIIRQNIIKGGILTSEICLLDDISRAPGESLNVLLRILNERKYGDEEIPLLTAIATSNPTADEYYNEPLDPANLDRFVIQINSNGLSYSKEWDDVKKIVSLYSAKNDSNGHIEKIGKDVLDESYEKLENVIVSSEVQEGLVSFISWLIDDQRLNESNSVISDRTFLVKSIKIIKANAVLDGRSEANLEDLKALKYILAFRVPEEVLKMAEEKLESLQAQKKKTKK

SEQ ID NO: 81393 - protein, 972 aa, Unknown
  Bacterial polypetide isolated from the Sargasso Sea
MASNNVAQFAAELKMPAGVLLEQLQAAGVQKASEDDALSETDKARLLDHLRKSHGATDGDKRKITLTRKHTSEIKQSDATGKARTIQVEVRKKRTFVKRDDVSEGAEQGQAQVAEADDDADLKRREEEARREAELLEKQAQELRERQERLEREEAERRAREEAAEAERRRAEEEAAAKRAAAEAAAAQQQAAAQQAAAAEQQEAASTQSAQDEARAAAERAAQREAAKKAEDAAREAADKARAEQEEISKRRAAAEAEARAIREMMNTPRKAVVKAVEPPKPVEPPKPAEAKGTLHKPAKPEGAQARPAVKKPAGAAAPATTAPAGAGDRNKKPGAGKGGWQDDASKRRGIKTRGDSSGGVDRGWRGGPKGRGRHQDSSTFQAPTEPIVREVHVPETVSVADLAHKMSVKASEVIKVMMKMGQMVTINQVLDQETAMIIVEELGHRAVAAKLDDPEALLVEGETGTDAEQLPRPPVVTVMGHVDHGKTSLLDHIRRAKVAAGEAGGITQHIGAYHVETPRGVITFLDTPGHEAFTAMRARGAKATDIVVLVVAADDGVMPQTKEAIAHAKAGGVPIVVAINKIDKPDANLDRVKQELVAEGVVPEEYGGDSPFVPVSAKTGAGIDDLLENVLLQAEVLELKAPVEAPAKGIVIEAKLDKGKGPVATILVQSGTLNRGDVVLAGTAYGRVRAMLDENGKPTKEAGPSIPVEIQGLSEVPGAGEEVIVLPDERKAREIALFRQGKFRDVKLAKQQAAKLESMLEQMGEGEVQNLPLIIKADVQGSQEALVQSLLKLSTDEVRVQIVHSAVGGISENDVNLATASKAVIIGFNTRADAQARKLAESNGIDIRYYNIIYDAVDEVKAAMSGMLAPEKREVITGMVEVRQVFKVPKIGAVAGCMVTDGVVKRSSSVRVLRNNVVIFTGELESLKRFKDDVKEVKQGFECGMSVKNFNDIVEGDQFEVFEVTEVARTL

SEQ ID NO: 81394 - protein, 357 aa, Unknown
  Bacterial polypetide isolated from the Sargasso Sea
MNKIKIFSKSQFSLLWWSGSISSFGDWATLFASVALASYIGTETGNSELTAVVPLVARIIPALLSSFAGLIADRFDKKFVMIFCDLTRMVLVLFLFFADNLYFIFIINFFSEIFSLIRQPSREAVVPEIIDSENLVKANSLFAIGTYATLPIASLLLGFFSDLDTFNVVNEFGNGWSGSIIFLLDTITFLLSAYLLYFLKNKNVNTASSNPPFSIKNFQEGINYFFKTKNIRNIAFSISSCLIGAGTLFILGHTFLTVDLGFSESSFGFMIASFGTGIIFSMLTLSYFVTTFNRINFLIGSCMIITGISLFSAFRSVDFVVILLSIFISGVGTGGVYLLTISYLQASTNPELRGRVF

SEQ ID NO: 81395 - protein, 209 aa, Unknown
  Bacterial polypetide isolated from the Sargasso Sea
FTEVVWYYPGTDSSYNDKYVVFNYGESGRQPGGIWYTGVNTYSIRTSFIDATVYPKPYATQFNSSSSGTFPDVVGATGLGQSVYFEHEVGTDQLNPDGTTTTLTSYATSFDFPINTQQGTGEYFLAMRRFLPDFKTLTGTAKVTVGVKNYPSQSMTSSTYSPFSVTSSSTKFDTRARGRYANIKIENESSGENWRYGTFQVDVQADGRR

SEQ ID NO: 81396 - protein, 342 aa, Unknown
  Bacterial polypetide isolated from the Sargasso Sea
MNNIKIFSKSQFSLLWWSGSISSFGDWATLFASVALASYIGTESGNSELTAVVPLVARIIPALLSSFAGLIADRFDKKLVMIFCDLTRMVLVLFLFFADNLYFIFIINFFSEIFSLIRQPSREAVVPEIIDSENLVKANSLFAIGTYATLPLASLLLGFFSDVETFNVVNEFGNGWSGSIIFLLDTITFLLSAYLLYFLKNKNVNTASSNPPFSIKNFQEGINYFFKTKNIRNIAFSISSCLIGAGTLFILGHTFLTIDLGFSESSFGFMIASFGTGIIFSMLTLSYFVTTFNRINFLIGSCMIITGISLFSAFRSVDFVVILLSIFISGVGTGGVYLLTIS

SEQ ID NO: 81397 - protein, 286 aa, Unknown
  Bacterial polypetide isolated from the Sargasso Sea
MKKITSMILALVFAVSVIGSASAKTLKIQLTFPKTSYDGQIVKMWTDRVTKLTRGELKFELLSKGEVVGMKETLEAVDKGLVDGGAAWTHYWSNYHPAAMLFGSPVAGGGIGLSTKSWLAWYFDNGGKELYDQLWSEMGMNVKGFVMASSGPEALGWFKEPIKNMDDFRKYRFRTPPGIPGQTYKDIGIASVSLSGGDILPALEKGTIDAAEWCCPKPDSVFGFQKVLKNYYLQGLHQNVVNGDIYINGDVYNSLTDHQKYAMEVASEAMITRNITNRAVENGKAL

SEQ ID NO: 81398 - protein, 362 aa, Unknown
  Bacterial polypetide isolated from the Sargasso Sea
MKKITSMILALVFAVSVIGSASAKTLKIQLTFPKTSYDGQIVKMWTDRVTKLTRGELKFELLSKGEVVGMKETLEAVDKGLVDGGAAWTHYWSNYHPAAMLFGSPVAGGGIGLSTKSWLAWYFDNGGKELYDQLWSEMGMNVKGFVMASSGPEALGWFKEPIKNMDDFRKYRFRTPPGIPGQTYKDIGIASVSLSGGDILPALEKGTIDAAEWCCPKPDSVFGFQKVLKNYYLQGLHQNVVNGDIYINGDVYNSLTDHQKYAMEVASEAMITRNITNRAVENGKALIDLTQNHGVKLWDTPADYFTEYMNAAQATLKKNAAENAFFKQVYDHMTEHAKVVVPFIAQMETSDASIGSAFAAQQ

SEQ ID NO: 81399 - protein, 106 aa, Unknown
  Bacterial polypetide isolated from the Sargasso Sea
MSSLVRKAIFPVGGLGTRFLPATKAMPKEMLPVVDKPLIQYAVEEAAAAGIEEFIFVTGRGKSAIEDHFDVSYELEQTLGERGRDDVLGTIRAIGLEPGQISYTRQ

SEQ ID NO: 81400 - protein, 53 aa, Unknown
  Bacterial polypetide isolated from the Sargasso Sea
MGGGNSKERRPRSVIIIFGPPGAGKGARRRRRRRSSSSRTRRSTRVIARRARD

SEQ ID NO: 81401 - protein, 131 aa, Unknown
  Bacterial polypetide isolated from the Sargasso Sea
MTKIAITGSLASGKSTVAKLMSRQRYPIFDADKSVKDLYVKRSFKKKVKIKFNFKNTDKIKNKIKNLIKKDKKTLKKLELIIHPFVRREMKAFMKSKKKIKIKIFEIPLLIESNLQKYFDIIVFVGAKKKI

SEQ ID NO: 81402 - protein, 80 aa, Unknown
  Bacterial polypetide isolated from the Sargasso Sea
MIKKAIFPVGGLGTRFLPATKAMPKEMLPVVDKPLIQYAVEEAAEAGIEEFIFVTGRNKTAIKDHFDHSFELEATCPQKA

SEQ ID NO: 81403 - protein, 187 aa, Unknown
  Bacterial polypetide isolated from the Sargasso Sea
MINIGVTGSLASGKSTVAKILANRKHKIFNADEAVSDLYKKKEFKKKIIKEFNLVNSKNIKKKIKNLIKKDKKKLKKLETIIHPIIRMKMKTLMRHKKRGKIIIFDIPLLIESKLGKYFDVIIFVGSKKKIRLKRYLRKKGTKQIFTILDKRQAKSNKKIKNCDYIIYNNRSLKVLRKKVKLLMKRI

SEQ ID NO: 81404 - protein, 174 aa, Unknown
  Bacterial polypetide isolated from the Sargasso Sea
MSKKIKKIRKAIFPVGGLGTRFLPATKTIPKEMLPILDKPLVQYAVEEALEAGIEEIIFVTGRGKSAIEDYFDHSIELEKNLKGQNKSRTLKYIQNMILNPGSVSFVRQQNPLGLGHAVWCARNFIANEPVAILLADDLIDAKPGCMKQMIDDWKGGNMVATMEVTAQETSSYG

SEQ ID NO: 81405 - protein, 161 aa, Unknown
  Bacterial polypetide isolated from the Sargasso Sea
MKIKKAIFPVGGLGTRFLPATKSMPKEMLPVVDKPLIQYAVEEAANAGIEQFIFVTSRGKSAIENHFDHSYELENTLAKKGKNKTLTVAQEMLKIPGSFAYVRQQEPAGLGHAIWCARHLINDEPFAVILADDLVAGNSLIGNMINNYTGGNIWQLECRKK

SEQ ID NO: 81406 - protein, 108 aa, Unknown
  Bacterial polypetide isolated from the Sargasso Sea
MIKIGITGSLASGKSTVAKIISSGKYPLYNADRAVQKIYQTNNFQAKVFKKFKIKSKKNIKNKIKKIISLDKNSLKEIEKIIHPLVRKQMSKFTKKNKGKKFLIFEIP

SEQ ID NO: 81407 - protein, 156 aa, Unknown
  Bacterial polypetide isolated from the Sargasso Sea
MIKSNTINTYLKNQASLDLLRFITCGSVDDGKSTLIGRMLYESQMIFDDQVASLKNDSKKYGTQGEDIDFALLVDGLSAEREQGITIDVAYRFFSSSKRKFIVADTPGHEQYTRNMATGASTADMAILLVDARNGILTQTKRHSFIVSLLGIQNIV

SEQ ID NO: 81408 - protein, 187 aa, Unknown
  Bacterial polypetide isolated from the Sargasso Sea
MIKIGITGSIASGKSTVAKMFAGKKYPLFNADHEVNKIYQRNSFKNKICRKFDFKNKKNIKSKIKKIIKKNKKYIKELEKIIHPLVRKELRRFSVRNKRKTLLFFEIPLLIESKLMKNFNIIIFVNSNKALRLKRYTKRGKNVKIFNLLDKRQLSTGKKIKFCDYVINNNRSLKNLKKNVEVIKNKL

SEQ ID NO: 81409 - protein, 260 aa, Unknown
  Bacterial polypetide isolated from the Sargasso Sea
PRNNGNNTREQRETMGTTNANNGKKWEQCTRTTGNNGNNAREQRETTGTTHANNGKQREQRTRTTGNNGNGTKACEQRGTMGTMHANKWKEREQRTRTTGNNGNSAREQRETTRTTHANNGIQREQSMRTTRNNENNALEQRETKGTTHANNGKQLEQRTRTTGNNGNNTREQRETMGTTSAKNGQNGNNATHANNGKQREQRRRTTGHNENNARAQRETTGMGPKHANNGKQWEQCTRTRENNGNNAPEQRETTGTTHT

SEQ ID NO: 81410 - protein, 239 aa, Unknown
  Bacterial polypetide isolated from the Sargasso Sea
MSDKKILEVKNLKVFYESSGSFFTNKNIVKAVNGIDININQGETFGLVGESGSGKSTVAKAILNLVNINSGEIKLEKENLTELKGSKLRSKQKEIGAIFQDPYSSLNPRMKVRDIIAEPLRVQGKKDVDEDVKNLLQIVGLDSRMDDRLPHEFSGGQRQRIGIARAVSTNPKLIICDEPVSALDVSVQAQILNLLKDLQKKLNISYLFIAHDLSVVKYLSLKIGVMYLGKIVEMADSEV

SEQ ID NO: 81411 - protein, 225 aa, Unknown
  Bacterial polypetide isolated from the Sargasso Sea
MGCNSKGDLLKNYGPRKKTETRGKIRETTTGDHGPRKKVETRRKIRETTTGDHNGRPHRETTTGDHGPRKKVKTKGKIRETTTGDHNGRPPRETTTGGHGPRNKVETRGKIRETTTGDHNGRPQREATGHGTKWKPGGRFGRPQRETTTGDHNGRPQRETTGPRKKVETRGKIRETTTGDHNGRPRAMEKCGNQGDDSGDPNGRPQRETTGHGKMWKPGGRFGRP

SEQ ID NO: 81412 - protein, 274 aa, Unknown
  Bacterial polypetide isolated from the Sargasso Sea
TSHGRQVGPSLTRGDLGLEAATEIGDPAEGWGFPWRPVKEDPPLYAQKNPRPTRQNRRAIRRPLFPIQIPDQKPSKPRWLLFGLASIITLVGITLMLITIRQVDIEVGGIEDGVALQPSSIQGTQIYFSVNGANARSAQLLLDEFPVSGVQRYGNQIVWVVPPLTEGEHSLKLVVQRRLYGQVSRSIDFTVDDTPPMISLPKVLDPVPMNEPVTIAGSSEPGATLVVGGVPIETQDGSFVLELDEPPAGPVSVLAIDRAGNTNTFNMIIPISYP

SEQ ID NO: 81413 - protein, 311 aa, Unknown
  Bacterial polypetide isolated from the Sargasso Sea
PWSLTPHGQQVGPSLAKDEVTSAGETVDTDPAEGWGFPWRPVKKDPPVYASNLPRPTRQNRRAVRRPLFPIQVPNQPPSRPRWGLMAIASLATIIGVVLMLITIRQVDIEIGGIEDGVALQPSSIEGTEISFTVSGANARSAQLLLDDFPVSGVQRYGNRIVWVVPPLTEGDHSLELVVDRRLYGTTSRAIGFSVDGTPPLIGLPDVLEPVPMDEPVTIAGTSEPGATLVVGGVPIETRDGSFVLELEEPPAGPVSVLAIDRAGNTSTFNMIIPIAYPRTQGVHVSAAAWAQDGLKSSVLELIRAGKVTAV

SEQ ID NO: 81414 - protein, 386 aa, Unknown
  Bacterial polypetide isolated from the Sargasso Sea
MVFALSLARGIFSYFHVYQGEKIGQYLAFDLRKSYFNKLQKLSFKFHDSQHTGDLITKGIIDIEGSRMFVNTGVLRLVFLTIFILTGAYLVISVDLWLGLLSLSFVPFIAFISSFSRLKLRKNWYRLQEQLGVLTRVMDENLSGVRLVRSFMKQKYELEKFNIASNVVKKTTFRQIIIRSFSISLNTLAFLVSMSLVVYFGSIAVLESKITLGELTSLIAFMSILQGPVRQIGMLVNSFSRASATSTRLFETLDHQEDVINIEGQRFNEPVKELVVNNLSFSYESKKVLKNINFIANPNHSIGIVGPPGAGKTTLSRLLPRFYNPDQGEILLNGKNISTLDLTDLRKSVNLVDQDNFLFSDTFTENIRYGDPKAKKDKVTCQQKKL

SEQ ID NO: 81415 - protein, 151 aa, Unknown
  Bacterial polypetide isolated from the Sargasso Sea
MGLEDKIKESIILAMKAKDKTRLEALRAVKSAILLEKTKAGNKEILDENQIIKLLQKLVKQRNESAKIYKEQNRDELAEIENSQSKIISEYLPDQLNEEELITIIDEVIISTNAESIKDMGKVIGATNAKVLGRAEGRVVADLVKSKLNSL

SEQ ID NO: 81416 - protein, 113 aa, Unknown
  Bacterial polypetide isolated from the Sargasso Sea
MLKIGITGSLASGKSTVAKIISFKKYPLFDADKAVKKIYQTKNFKTKVLKKFRLKNKKNIKNKIKKIVSKNRRSLKDLEKIIHPLVRKEIRRFSKINKRKKFLFFEIPLLIES

SEQ ID NO: 81417 - protein, 513 aa, Unknown
  Bacterial polypetide isolated from the Sargasso Sea
MLGFFKIINLIPAIRALIAEESLLPKNSHNKIPFALKFLKYILFVKHNKNKDLSLTLKKLGPTWIKLGQFLSTRPDIIGIELSDKLKNLQDKVEPFPKSKTIEILKNEFKEEYLDTFIDIMPSKTAASIAQVHKGTIKLNNKEYDVAIKILRPNIEREIKKDLGKFFIAASLLEKLSKEAKRLRLTEVVQTLAESLSMEIDLRLEAAAQSEIKDNIINDEYFDVPNIYWDLTRKNILISEWVNGIPAKNINKIVEEGLDTKKIGKNILKIFLTTSIRDGLFHADMHQGNLFIEKNEKIIAVDFGIVGYLDFESKQYLNNILLGFINRDYNKIAKVHFEAGYVPETEDQNKFAQALRSIGEPIQGKDANDISIGNLLTQLFEITNQFNMKTQPQLLLLQKTMVVVEGVAREYDPNLNIWTESEPILNDLNKLDFTNKFNFSSDEVINRAKEAIINLPNNIEGVKKNINQMGKMIDYQGVKIHPDSLNTINKGNNNLLFYIIIFLLLLLIVIAIF

SEQ ID NO: 81418 - protein, 279 aa, Unknown
  Bacterial polypetide isolated from the Sargasso Sea
MRALGRSATVRSPASPRSSHLAPAGSGSGGGTGRRTSEAPARGQQPAAAHAGVAPLPLDLPHLAPTGSRRSVGLDLRALGQSATVRSPASPRSSHLAPAGSGLGGGTGRRTSEAPARRQQQAAVHVGVAPPPPSLACFASAGSRRGVELELGALGQCATARSPASPRSSHLAPAGSGLGGGTGRRTSEAPARGQQSAAAHAGVAPLPPDFPHLAPAGSGRSVGLDLRALGQSATVRSPASPRSSHLASAGSGLGGGTGRRTSEAPARGQQPAAAHAGGR

SEQ ID NO: 81419 - protein, 59 aa, Unknown
  Bacterial polypetide isolated from the Sargasso Sea
MAQKFTILFDLDGTLIDTAPDLMNAHNYVMNKYGYETKSTEDIRKLVGKGSASLIGRSV

SEQ ID NO: 81420 - protein, 311 aa, Unknown
  Bacterial polypetide isolated from the Sargasso Sea
TTFDGRPLAMQGKADKALVAAATASFVGGTISVVLFTAFAPPLAEVALAFGPPEEFALMMLAFATFIGLGGDDIPKTFFSIFIGLVLSAVGLDVVSGEPRLIFMDLSGFMHGINFLVLAIGIYGIGEMLWTVETSRGDVSMSRATVSVARVFTTLKELLGTWKTMIMGSFLGYFVGILPAAGATPGSLMAYGVAKTITKEPESYGKGNIDGVVAPEAANNAASTGSMLPMLTLGIPGSPTTAILLGGMVIWGLEPGPLLFTEHKEFVWGLIASLYAANFFSLIINIAFIPAFVAVLKMPFTILAPVIFGSA

SEQ ID NO: 81421 - protein, 249 aa, Unknown
  Bacterial polypetide isolated from the Sargasso Sea
MSIKRFIYNRFDWFCFVNNISFISLFCKEPKKANSVKAVFVLLDSLNRKALEVYSNKTNIRTPNFKRFQKKCITFDNHYVGSLPCIPARRDLHTGRINFLHRSWGPLEPFDESFPELMKNNGVYSHIITDHHHYFADGGATYHQRYSSWELVRGQAIDRWKAEVKPDIEDLKKKYHSIQHHRKNYMINREYINKEDEYCTPQVFSLAEDFLDKNKNHDNWFLQIECFDPHEPFHAPDRFRKLYPNDYDG

SEQ ID NO: 81422 - protein, 137 aa, Unknown
  Bacterial polypetide isolated from the Sargasso Sea
MVGVSSIKKEISTNIKRRPSTIVMKYMQEFGYRVIPVNPFSAGEKVHGEIVVAKLNDIKIPVDIVDVFRPSKEATAVAEEAIKIGAKVFWLQYGIENDEAKKNVESKNIFYVSNKCIKQEYQRLFLKVSPVFPALKN

SEQ ID NO: 81423 - protein, 324 aa, Unknown
  Bacterial polypetide isolated from the Sargasso Sea
FRVREPKDGEESYDGGYPDEEFPEQVHGHFAAEIGWTIGPTILMAAIAIFSVGALLSLDDVEAAPDEAVYPEMEVLVVGQQWWWEFQYYLDGVDGAEQPDFVTANEIVVPVGQDIRIHTTSRDVLHSFWIPRLNGKKDSVPGRTSPWVLQSNEIGRFAGQCTEFCGLSHAYMRMYAVSLTQENFQIWVDNQMRTREPLQEGDENYEGEQVFLLNCARCHVINGVTSRDISGSVQLDSMALYGNIEEYRNHSDGTLSQGKYTGSANLTSGAAPNLTHFATRSSYSGSFFQLYPDAQEMADAGNYLDLAGSDYARGTLEAWLRNSP

SEQ ID NO: 81424 - protein, 263 aa, Unknown
  Bacterial polypetide isolated from the Sargasso Sea
QTSHPEESKRYQYHHPTETWHRQPNYADFAEAHDEEGASRKAAKKNIHQELLDERVQIREYFGERGVTLTAEEAKDVQILYRSGVEMEDAVAQVLAEKEPATKPTADQDDTDNSGSEDEDDAASAADAAPKAQPKTQPKPQPKKKGKGKGKGKGNGAQKAKQGSVEQALTELKEEGKAKKAKSAEKAQKSASKEERKAAAIERRAAAKKKAAAEKKEAAEKAAAEKKAAAEKAAAEKKAAAEKEAAAAKKKAAAEKKAQGAWG

SEQ ID NO: 81425 - protein, 158 aa, Unknown
  Bacterial polypetide isolated from the Sargasso Sea
MKYHREDYPHWSDLDGNGLNTRHDLLATQSTVKPSFSRDGKTVTRGRWVSPWTGQIYLDPFALDVDHTVPLGYAHARGGKYWDRYQREMFANDVRNLQVVEKGLNKEKGSAGITEWLPPTNQCQYILRFYRIMKTYHLKYFTKEEPRALALVAQCQRG

SEQ ID NO: 81426 - protein, 164 aa, Unknown
  Bacterial polypetide isolated from the Sargasso Sea
CRIEGCDLVLMLGDNFYPEGLKTLDDPLFTKGFLDIYRELKISFFTVLGNHDVKGNVQAQLYQSRFHRFWSMPNYSYSFETGPVRFHAINTNCHLNEWYQLYQSFDEPSMDNLGKPWNVVFGHHPFIPREVMGIPIWFSNSSGIYCLSRKPIFIFRVTTIISTS

SEQ ID NO: 81427 - protein, 258 aa, Unknown
  Bacterial polypetide isolated from the Sargasso Sea
MLAINEQDGRIVGVVPAVKLTSWILGERLCALPYCDVGFPLADSPDIEAYLLAHLKEKHVNAKYFEVRSCHAQQTADNSFLAGKKVQMRLPLPDSSDILLKSFKSKLRSQIKKADKNGLTSKGGNSPELVSDFYTVYVTNMRDLGSPAHSLEWFLNIARGYNTACYISVVYHDDAPIGAGIVLKNNNKASIPWASTVREFNKLAPNMKLYWNVLAHCADNGIREFDFGRSTFNEGTFKFKKQWGAEPYLLDWYHYPRS

SEQ ID NO: 81428 - protein, 169 aa, Unknown
  Bacterial polypetide isolated from the Sargasso Sea
MAQVTVEQLAETVGASVDRLLSQMKDAGLPHAGADEAVSEEDKQTLLMHLKKSHGERAAAPKKITLKRKSVSTLRAGGAGKRTVSVEVRKKRTYVKREDAEGAEPEADISADVAVESADQVAAPEPIVAEVAAPADTVSDTDDPELLRQRAASRRKAEEQARQLELEAT

SEQ ID NO: 81429 - protein, 226 aa, Unknown
  Bacterial polypetide isolated from the Sargasso Sea
EHFKYINEQACLLAIKAKDLSKKNVLIAGSLPSQSDTYVEDQRNSNEIEKDFLDQATIINPYIDFFYLDVLSSGKELDIASNVAAKLKKPILAGVHLKKNCLLPSGEAITEVVQKYKNENWLGLIGACVSPEIVEKSIEELKEINLPFGFKANLWEIEEPGPQRTFNTAKYDEIGTNPNIAFGKRDKYDPKLFYEFSEKIKEKGATILGGCCETTPSHIEAIAKLK

SEQ ID NO: 81430 - protein, 180 aa, Unknown
  Bacterial polypetide isolated from the Sargasso Sea
ELGYEIYTFCKKTNCEKLWSDILEVGKKYGLKISSMQAMNIRRIEAGILDCGSDFSIYDNPYEVGLGNFIELKKKFFIGKDKLVNLPKHKLLFGFISTAIIPKGGFIMHDAKKRSVGMVTTGTYSPQFKSGIGYVKFSKKIEWEGKKFFVKNEENNFYECEIKDLPFFDKSKNLPREILI

SEQ ID NO: 81431 - protein, 223 aa, Unknown
  Bacterial polypetide isolated from the Sargasso Sea
MQDINTFLFDLDGTLVDSVPDLAKALNLMLSEYNLPTYEEAKVRHWVGNGARVLVERGLSGNTKINHAFNQVEVDIALDKFLFCYRTLETKSTVLYDGVAATLKTLKAHGCTLALVTNKPSEFIEPILTSFSLLPLFSITIGGDTLLEKKPSPLPLMHACEKLGVLPSECVMVGDSKNDILAAKAANIKSIGLTYGYNYGESIATYQPDWVFDSFSDILSLRA

SEQ ID NO: 81432 - protein, 235 aa, Unknown
  Bacterial polypetide isolated from the Sargasso Sea
QISKLKIDRGMYVTALTHEGNTFMDGILFRLSEKCFWFVQPDGDMHTWLLAHKQNHKIEINEPNSRVLQIQGPNSYKILNQLTEGEIDSKFSYFSAGFFKINSQLVYISRTGWTGELGYEIYTFCKKTNYKKLWSDILESGKNYDLKISSMQAMNIRRIEAGILDCGSDFSIYDNPYEVGLGNFIDLKKKFFIGKDKLVNLPKHKLLFGFISNAIIPKGGFIIYDTKKKPVGLVT

SEQ ID NO: 81433 - protein, 110 aa, Unknown
  Bacterial polypetide isolated from the Sargasso Sea
TLVAMGRAIDNLPEHPDYLLVDGNHLPKTNFEEKCVVRGDSISYSIAAASVIAKVKRDKLMSELSLEYPGYGWETNAGYGTKTHQEALLIHGVTKHHRKSFSPIRNMLTK

SEQ ID NO: 81434 - protein, 211 aa, Unknown
  Bacterial polypetide isolated from the Sargasso Sea
RVLITTFTKKDAEKITDFLNENQINSRYMHSDIETLERIELIKELRIGNFDVLVGINLLREGLDIPECGLVAILDADKEGYLRSQVSLIQTIGRAARNINGRAILYADFKTKSIEKALEETTRRRIKQINFNKINRIEPKSTSRKIEELIDKGENKRKKVMDIEGTKEKTITELKKEMLECAENLNFEEAATIRDKIKILEEKELGINEKF

SEQ ID NO: 81435 - protein, 247 aa, Unknown
  Bacterial polypetide isolated from the Sargasso Sea
MLDVGRATNVRLHQINTNYSDIKNIFISHFHFDHIIGLPDLLLTSRLWQNDNKINIYGPKGIKKHCKGIIALYIDDQTYREKLGKILSENMECSLNRKLSLDSKINIEPFLVNHGHIEESYGYKISINNKKIVYSGDTSYSEKLVEMSKGADLLIHEIAHASDLLQKKNPRLKKIMDSHTTISELVNILNKTRPKLTVLTHALIFFETEENILNRIKEDYDGEVIFAKDLMSIDVGKEIYIFNHISK

SEQ ID NO: 81436 - protein, 164 aa, Unknown
  Bacterial polypetide isolated from the Sargasso Sea
MKFLKLIPILFIFFGNVPYKNEVHAEIKNPEDFRVLSNESKKLSISNVEYFIKEGDKYIKNGDFEKAKEFYLDARKLAKQLASFYSDLNSSFKGIDARIPNEMQRKGKQTLQILAESNERLASFYIKTDKPEVAVPLLVETIRIMSPNSPEGKEAYEKLIQLGL

SEQ ID NO: 81437 - protein, 140 aa, Unknown
  Bacterial polypetide isolated from the Sargasso Sea
MQKLTILFDLDGTLVDSAPDLMNAHNYVMNKFGYETKTKEDIRNLAGKGASVMIGRSIWGQAKKEFSKVIDEKIKKQMVKEFIDYYGKNIAIESKLIKGVKEFLEWSKKNKIQMGICTNKQEHLAINLLKEIKIYDYFEY

SEQ ID NO: 81438 - protein, 209 aa, Unknown
  Bacterial polypetide isolated from the Sargasso Sea
MGQYKAIISSSNTVNDTIDIALDQTNPKFITKITLKPINSLESVEIRREIKLINNSIDKKTYNVSKDMSLRGGTANDVLRRLPGIELDESGNISLRGDGSVNLLINGNQSSLSGINGSTLLDGLPASAIEKVEIINNPSAKYDPDGNSGIINIVLSKKKEQGLNIISNLNLGSGDLNNGNVIDGNISANYWSGKLYLNTSYSSRHLRGY

SEQ ID NO: 81439 - protein, 295 aa, Unknown
  Bacterial polypetide isolated from the Sargasso Sea
MKKNINLGVIGIDHGHIFDMLDEMLKEGCKCEYFWTEGDPLTLKEFNSKYPNIKRKENKKEILNDSSIDMILISSIPVDRADHSIDALKAGKDVMVDKPGCTTLDQLNNLKNTVKETGKIWSVNFSERFHVAAVAKAEELVNEGKIGKVKQTIGTGPHRQGNYERPDWFYNRQSYGGIIADIGSHQIHQFLVFTNSNQAKINHALVENTTKKDMPGFQDFGEVNLTGNGGHGYIRLDWFTPDALPTWGDGRLLILGDKGFIEIRKYTDLAKSEKGNHLFLANNDEVKHIDCSNVK

SEQ ID NO: 81440 - protein, 213 aa, Unknown
  Bacterial polypetide isolated from the Sargasso Sea
MLGYQLHEEGVAHGCLPLEEDLPIAPIQTEKKGVVKFGVIGDTGTANLDQQEVADSLAKICRKDGCDLVLMLGDNFYPEGLKTLEDPLFTKAFLDIYRELKIPFFPVLGNHDVKGNVQAQLYQSRFHRFWSMPNYSYSFETGPVRFHAINTNCHLNAWYRLYQSFDEPSMDNSGKLWNVVFGHHPVYSQGSHGDTDLIQQFIWNLLFEQKVDF

SEQ ID NO: 81441 - protein, 85 aa, Unknown
  Bacterial polypetide isolated from the Sargasso Sea
MSEKRITEENRYAGLALAEEELVARVAWCYYHDGLTQNDIGERLGLPRLKISRLLEKGRQSGVIRVQINSRYERCLALETELQQR

SEQ ID NO: 81442 - protein, 214 aa, Unknown
  Bacterial polypetide isolated from the Sargasso Sea
MREDAAVIDELQDMLYANGDRALLVVLQGMDTSGKSGVIRNVFALTSPLGLQVEAFKAPSKTELAHDYLWRIHEAVPRKGRIGIFDRSHYEDVLVVKVRGFAPADVVEQRYEQINAFEKHLSENKVTVLKFMLHVGFEEQGIRLQERITEAHKRWKFNPGDLEDRKLWPDFMDAYETAVERCSTDHAPWYVVPADSRTRRNAMIARVVRGALED

SEQ ID NO: 81443 - protein, 276 aa, Unknown
  Bacterial polypetide isolated from the Sargasso Sea
QERQVAAEEAEQERLAAERLAEQERQAAEKAEQERLAAEKAEQERLAAEKAEQERQVAAEEAEQERLAAERLAEQERQAAAQAEQERLAAEEQERLAAAQAEQERLAAEKAEQERLAAEKAEQERKAAEKAEQERLAAEEAEQERLAAAEEAEQERLAAEKAEQERLAEQERQAAAQSEQERQERQAEQKRLAAEKAAAEKAAAEEPAAKEPGPGLAAEPEREPEPGPGAPETQVEPPAEQQQPKSEAEEPVVIPELAAKLNKLLDEFKNINKKLI

SEQ ID NO: 81444 - protein, 267 aa, Unknown
  Bacterial polypetide isolated from the Sargasso Sea
GRAEAERAPLAPMSHIREDGAVAAETAEAERAEAERVEAERVEALRAAADRAAQAERAAAERAAAEKAAAERAAERAASVKAEMERAEAERAEAERAERAEAERAEAERAEMERVEAERAEAERAEAERAADAERAEAEKVAKAVAEHEEKVAAENAAAEKAAAEKVAATAENAAAERAETKHESAVSGPTAPHLAPAPAPASQSPASRQSGTPQTRLSRAEQSIEATIKAAFCEADGLDSIGKGDEAIRVRALALESASEQLRRAS

SEQ ID NO: 81445 - protein, 139 aa, Unknown
  Bacterial polypetide isolated from the Sargasso Sea
MQKLTILFDLDGTLVDSAPDLMNAHNHVMKKFGYETKTTEDIRNLAGKGASVMIGRSIWGQAKKEFSKVIDEKIKKQMVKEFIDYYGKNIAIESKLIKGVKEFLEWSKKNNIQMGICTNKQEHLAINLLKEIKIYDYFE

SEQ ID NO: 81446 - protein, 205 aa, Unknown
  Bacterial polypetide isolated from the Sargasso Sea
MKYIFDLIVIGGGHAGVEAALVAKRSGLDVALVTLDKTKTGRMSCNPAIGGIGKSHLTKEIDALGGYMAEATDLSGIQFRTLNKKKGPAVQATRAQTDKNLYEKAIQEKIKKENIQVFDDEIKDFATKKTIIEKAISENNEYVAKAFVLTTGTFLNGAILIGHTKQEGGRIDEKKSTGLEKFFENNELQLGRLKTGTPPRLSAKT

SEQ ID NO: 81447 - protein, 172 aa, Unknown
  Bacterial polypetide isolated from the Sargasso Sea
MVSCSVINSTKRGLLMDVFLYKEDLSIAPIQTEKKGVVKFGVIGDTGTANLDQQEVADSLAKICRIEGCDLVLMLGDNFYPEGLKTLEDPLFTRAFLDIYRELEVPFFPVLGNHDVKGNIQAQLYQSRFHRFWIMPNYSYSFETGPVRFHAINTNCHLNAWYRLYQSFDEHS

SEQ ID NO: 81448 - protein, 146 aa, Unknown
  Bacterial polypetide isolated from the Sargasso Sea
AEDPDSDISLYLNCPGGLVTSGMAIYDTIQYLKPDVQTICIGQATSMGAVLLAAGAVGKRQALPHARIMIHQIMGGFSGQAEDIDIQAKEIIRMTDVLNEVLAHHTGRKIEQIAEDTQRDFYFSSDEAKEYGIIDDVMQNRKLKAV

SEQ ID NO: 81449 - protein, 181 aa, Unknown
  Bacterial polypetide isolated from the Sargasso Sea
FEDIIKDDFYNQAKLIDPFFDFFYFDVLSSIKEINVATQSIEEFNKPYLIGVHISEGTKLPSGEKISDLIDKLKNQKLLGVILSCVSPENYKLNLNEIKSLGVPFGFKLNGYLKTAPLSNNNKTSNKNDFLQPNEFLGKRKDLSPNKMLEFVKEFKNTGATILGGCCETTPAHIKSFASLK

SEQ ID NO: 81450 - protein, 293 aa, Unknown
  Bacterial polypetide isolated from the Sargasso Sea
FPRGIAIDKNGNIYIGDGSNYLIRKITSAGVVTTLAGSGSRGSANGTGTSASFKSPGAVAVDNDGNVYVADGDNHLIRKITPVGVVTTLAGSGSSGSANATGTSASFNYPYGIAVDNDGNVYVADTDNHLIRKITPVGVVTTLAGSGSAGAANATGTSASFRFPRGIAIDKNGNIYVTDLGNHLIRKITPGGVVTTLAGISGSSGSANGTSTSASFNDPTDSAVDNDGNVYVADYGNHLIRKITPGGVVTTLAGISGSDGSANGTGSSALFNNPRAVAVDNDGNVYVADYGNH

SEQ ID NO: 81451 - protein, 158 aa, Unknown
  Bacterial polypetide isolated from the Sargasso Sea
METLSTEKSFGGVQGVYRHASSVTGCDMTFAVYLPPQAEHGPVPVLWYLSGLTCTHANVMEKGEYRRVAAELGIAIICPDTSPRGDEVPDEDDWQFGSGAGFYVDATLAPYDANYRMYSYVLEELPAVIAANFPVDMSREGIFGHSMGGHGALVMALR

SEQ ID NO: 81452 - protein, 257 aa, Unknown
  Bacterial polypetide isolated from the Sargasso Sea
DGSHMLFIAAGMGGGTGTGAAPVIAKLAREKGILTVGVVTKPFHFEGTQRMKLAEKGIEELQQYVDTLLTIPNQNLFRIANEKTTFSDAFKMASTSACGACSALQGATRLRRACATRFTASRWASCCLPACWPRGCMRQPSNARRTPAPARFSAGPSAAARQRRRMPHAPAPSASPARSRYGSRCLRHALVAATRWRSRSPCRAPAAAGSASTADSVRHPTARWPPLVPACRSRHPCPWLAQQDPSHCATPMTFCRA

SEQ ID NO: 81453 - protein, 176 aa, Unknown
  Bacterial polypetide isolated from the Sargasso Sea
MVAGAGGLGSWAIHALCGGVADSGSDGEGLRLLVVDPDMSVERHNLNRQVLYSEEDIGLPKATTAAGKIRGALPGATVVPLVDKLGLVHLQVMGEPDGCPAQSEPLQVEEIDLPGGFATNLVVNEPVDNVLEEVFSEMAVALACVDNLRARSLLGAIAAKAGVPMINAGAQGFNGQ

SEQ ID NO: 81454 - protein, 130 aa, Unknown
  Bacterial polypetide isolated from the Sargasso Sea
MDKKKYLENYFNDLRNIINFDNEKIKNLVAVSDILLKTNNLGKKTIIFGNGGSAAIASHFSVDLTKNARVRCVNYNESDLLTCFSNDFGYEKWVEKCIEYYGDEKDVAILISAGGNSQNMLNGAKKAKEK

SEQ ID NO: 81455 - protein, 302 aa, Unknown
  Bacterial polypetide isolated from the Sargasso Sea
EGCTDINYIEYDTLATLDDGSCVTLIVEGCTDSLYLEYDSTANTDDGSCSTLKVEGCTDINYQEYDATANVSNQDLCLTSNISGCTDSTAFNYNAIATVDDGSCIPVVVGCLNSLATNYNSSANTDDGSCTFNEGCTDINYIEYDTLATQDDGSCVTLIVEGCTDSLYLEYDSTANTDDGSCSSLKVEGCTDINYQEYDATANVSNQDLCLTSNISGCTDSTAFNYNAIATVDDGSCIPVVVGCLNSLATNYNSSANTDDGSCTFNEGCTDINYIEYDTLATQDDGSCVTLIVEGCTNLSAK

SEQ ID NO: 81456 - protein, 315 aa, Unknown
  Bacterial polypetide isolated from the Sargasso Sea
FKQPGSGYNETMETGVKAAMAGGYTTVCLMSDDEMPLDSPENIEHIAEKSANLPISILPVGSLSVNHEGKELCEFSQMVKKGAIAFSDNESPVHNSQFLRYALEYSKMNNVPVINYSRDNDLSAGGVVNESILSTKLGLKGFPDISEAIIVFRDLTIAEKVNARIHLAMVSTKKSISIIRDFQKKGVQATADVTPHHIFFNENAISNYNSNAKVYPPLRSEEDRKEMIKAIRNKVVTCICSDHNPHSSEDKEKDIKHAPFGTVSLESAFSAIYTELSNNKFSISDIIKLFTQGPKEAMNLNVEMIEEGNNANLTV

SEQ ID NO: 81457 - protein, 186 aa, Unknown
  Bacterial polypetide isolated from the Sargasso Sea
MGTVGADCFSVNLDNYIGNSSVIVKFESYNAGTNGNNLFIDNINIDGTANAAPPTADFNANSTAICEGGTVQFNDLSFTGVTSWDWDFGDGNTSTIQNPSHTYSSSGTYSVTLTVTNSVGTDTYTLTNYITVSILDDATINPVSSLCVSDPSITLSAANSGGLWSGNGVNSNGVFNPSSAGTGTHT

SEQ ID NO: 81458 - protein, 275 aa, Unknown
  Bacterial polypetide isolated from the Sargasso Sea
TENRNTGLGWQSGLSLTSGAQNTFVGANCASSATTGNYNTALGDTALGTCTTGENNTAVGKSALAASTTSSNNTAVGYNTLVANTTGAANAAVGAYALDANTTGNYNSALGNNALGAITTGDNNTALGYQALSTVTTTSGSTAVGYQAAKVNAMASMTAVGYQAAVANTTGNNNTAIGYQALDANTTGHTHTAVGSGALGANTTGSHSTAVGYLALGANDAGVGNVAVGYAALDANTTASYNTAVGYNALTDNTTGANNTCIGESAGANITTGGY

SEQ ID NO: 81459 - protein, 58 aa, Unknown
  Bacterial polypetide isolated from the Sargasso Sea
MTIQKKDSIIFDLDGTLVDSAPDLHACANRLLSKYNQPSISLKESQSFIGDGVRNFVK

SEQ ID NO: 81460 - protein, 199 aa, Unknown
  Bacterial polypetide isolated from the Sargasso Sea
MSWNPDNKDKDPWGNRGNDQGPPDLDEVVKKMQDGIGKIFGGGGSGGKTSPEGKGATVVLVGILLLLLLGYEMVYRIDPAERGVVMRFGKYVTSLQPGPHIRFPRPIEQVVKVNVERIQTITSESSMLTGDENIVDVEVAVQYRIKDATNYLFKIADPDVSVNRVTESAIRDIIGQSTLTFVITEGRAQIATDAQKLIQ

SEQ ID NO: 81461 - protein, 185 aa, Unknown
  Bacterial polypetide isolated from the Sargasso Sea
VTGKSGRFSEQVIVHFSKKIREKISINDKILIKSFGVGLKINNFKDVFCKSLSPQLFNKMNIKNKNNKMIIPVTHIIPEHLIGAGSGLTSESGSLHIQTTDSSEMKKYKLDKIKLGDIIYIENYDSSYQHGFLRNAWAVGIIGQTNGPRAGYGPGITILMSSKKNNAKAKLESSANIINYIKFIK

SEQ ID NO: 81462 - protein, 169 aa, Unknown
  Bacterial polypetide isolated from the Sargasso Sea
MHRKSLKNCRKVSKSWQECIDNRNILWNKIVKKKSGNKTFRLACKNGHSKMVEMLIQKPEKFKIDLNAKDGDGNTAFLVACKNGHSKIVEMLMQKSVEFNIDLNAKSKIGRTAFHLACYNGNSKIAEMLMQKSAELNIDLNAKDGFGGKTAFHLACSYGQSKIAEMLMQ

SEQ ID NO: 81463 - protein, 64 aa, Unknown
  Bacterial polypetide isolated from the Sargasso Sea
MVRSVNKIVSNVIFDLDGTLVDSAPSLCKAANHLLQKLGRRSVSVEKYQTFIGKGYVQTKLSSF

SEQ ID NO: 81464 - protein, 287 aa, Unknown
  Bacterial polypetide isolated from the Sargasso Sea
MPTILQLRRGTTAENAAYTGAAGEITVDTTLNKVLLHDGSTAGGNTTVGSLQGNIQLGKTAAGEIDTSSGNLTIDSAGGTITLDDNVTISGNLTVSGTTTTVDSTTVNIQNAFVFEGATDDAHETTLTTIDPTGDRTISLPNVSGTLPVLAAASTTQITSTPEEINLVDGGTTAGTTAVAGGDGIVTNDNGTMRQTTVDTFDTYLSATTKTLTNKTLTSAVLNTGVSGSAVLDEDNMASDSATQLATQQSIKAYVDSQNTAQDLDLTTDSGTIDVALGSKTLTNRWV

SEQ ID NO: 81465 - protein, 274 aa, Unknown
  Bacterial polypetide isolated from the Sargasso Sea
GNVWFVESNVGQIAKFNPMSEIFTEFENELWPDGARTMSWGMDYSSDGTMWYTDGSFDTIWRFDTINETYDAIAFPPSEVGSLPQQLAIHGSNIIVNDFTGSKITFFDLSHNIDEIEYSSIVAPIPNSFTGDFAIDSENNLWYTNWVPDTTGLLLKFNIEQYKQDSYLASTGMDIPLEGYFDVYDFPTDLTTANGLSVDENDNVWIVDTSSSFFFKFDPNEETFTKFITSTPQKSAYGNSTGIIKSPISRPYWSETDIKGNLIFNEQTSNQLAV

SEQ ID NO: 81466 - protein, 261 aa, Unknown
  Bacterial polypetide isolated from the Sargasso Sea
MTSADKFGVIFSIAFAAAMIALMGGLLQADTAPAAPSVAAPAQTYSPPPAPAAAPAPTPSMAPQAAPQTSSSENLKYTIRGGIVDSISQDEHHNAVKIMMDSRLDGQLTITVTDDAITPFEDGAYFVTIDGEEVEFTQVGKRLTIDFMANSQKIMIFGEGYKSGGGHSMGHSEDSKEHEAMMAAEKEAEEKAAHEAMMAEKAAADKAAADKAAADKAAADKAAADKAAADKAAADKAAADKAAAEKAAAEKAAAEAAAAKA

SEQ ID NO: 81467 - protein, 648 aa, Unknown
  Bacterial polypetide isolated from the Sargasso Sea
MFACQPGNEGQPFVLTLAHMNDTHSQFDPVNAELKGPIFGKQGETDTLYTRFGGYPRLLTMAKSFQADALAKNQPILLLHGGDAWQGSGYFKLNEGMANAELLSQFGLDAMALGNHEFDLDNQKLARFIQGVNFPVLAANLDTRDDPDLRHAANLKPFVIYAFDGNQKSPVSDLNNLPQGKQLVAVMGLVLEDMANISPNVGKLRFGNEITSAQATVDLLRQHGINQIVALTHIGNQRDLALAAKVNGIDAIVGGHSHSLLGDFRNIGWGNTGEYAALVTNPDGVGMTCVVQAGSYAQAIGLAQVSFDAQGRVIACKGQNQLLASRDFFADPARNQALDEARGKQAAKFIDAQPNLVTVDEDPRLRGIIDSHYKPALEQAFGPVIATLPAALQNARRPGDNGSDSHGSDVAPLVAEGQYYWANTPAVQALTGGPVHFALLAVGGVRADLPAGELREGDAALTLLPFKNQLSVLTLTGAEVRALLTETITATLPASAHAGKFPYGGHLRYTFTETTPGKRGALTQLQWQDADGQWQDLVDATRYRVVMNAYSANGNDGWQALARAQAQHAERQDLAWQDGKLTAFPVERVEQSGDQLSARYAAGHQLDCKASGMDCGTDAASFVQYVREQRPTLTALAQETVTLVRAAQ

SEQ ID NO: 81468 - protein, 823 aa, Unknown
  Bacterial polypetide isolated from the Sargasso Sea
MSVSPPIFRLSLIALACLSALPHTAFADDTPSARDQNIERITVYGRQNSVVKNSGLATKSDMSLMETPAAVVIVDQELINSQGVDNLQDLIRNISGVTQAGNNYGIGDNLVIRGLGANYTYDGMYGGAGLGNTFNPTRSLTNVESVEVLKGPATGLYGMGSAGGVINLIEKKPQFESKHKFTTEVGQWDTYSLAIDSTGGITDDLAYRLVAKTARSEGYRDLGADRDEVFGSLKWVLSDSQDLMLSGAYIKDAIAVDSIGHPIRIYNADSVGGKTAGEVTWQDLINDPKGLGIQLTDEQRQQLAASLASGDGLTPYSFGDAGLISPMAKDNEGEELRFKLTHNIYFTDNLFLNQQLQYRDYTTGFARQTGAYNYVYWKRKIKIGGVPTDVINEDPRAPLVENGVLYPFAARRQEYRQLDAEETSWQYFADLRYDFQIGNIDNELLVNANYEDRDIRLEQFSIYDADQVIKNKQGEVIYRGSLPYIYDIRNPNWGTGKFEDYDPLKTANYNKKVSAWGLGVQHVGYLGYGFTTRVGVAFNEIKQSYEHLGVDERYSASQASPTPEEDSKDNGVTYNLGLTYMPIDDLSFFVNHSKGRTAYSILGSITGENTDREDSESVSNDLGMRFKAFDDQMLASLVFFKSSRTNVPYNNPDYNAGVSGADVPVYFYDGSEDTQGVELDLNAHLNDNWRINLNGMYQDARDKQNPNDKANYDTRQKGVPYVTASAWVTYGADWFALSSPIDLSLGAKYVDDRSTHSTDFGIPDGYVPSYTLVDSAISYATDSWKLQLNINNLFNKDYYSKAMFLGGMPGEERNVKLQYSYSF

SEQ ID NO: 81469 - protein, 247 aa, Unknown
  Bacterial polypetide isolated from the Sargasso Sea
MNSIYIIICIVTYFLFLYVISFLTGKNDANESFFLGNKSSPWYIVAFGMIGTSLSGVTFISVPGWVESSQFSYMQMVLGYMLGYAFIGTVLMPLYYKLNLTSIYTYLEERFGKLSYKTGSMFFIISRTVGASFRLYIVARVLHLSIFENWGAPFFLTVLITISLIWLYTFRGGIKTIIWTDTLQTFFMLLALIISVFLIGKDLGLNYANIIPFISQSEYSKIFFWQGDQHFLRRFFTGAFIAIVMTG

SEQ ID NO: 81470 - protein, 336 aa, Unknown
  Bacterial polypetide isolated from the Sargasso Sea
MKKTLKLGVIGIDHGHIFDMLDEMIKEGCSCNCFWTDGNPLTLQEFNKKYPNIKRKENKEEILNDSSVDMVLISSIPVDRAGHSIDALKAGKDVMVDKPGCTTLDQLNNLKKTVKETGKIWSVNFSERFHVAAVAKAEELVNEGKIGKVKQTIGTGPHRQGNYERPDWFYNRQSYGGIITDIGSHQIHQFLVFTNSNQAKINHALVENTTKKDMPGFQDFGEVNLTGNGGHGYIRLDWFTPDALPTWGDGRLLILGDKGFIEIRKYTDLAKSEKGNHLFLANNDEVKHIDCSNVKLPYFSNLITDVLNRTETACPQEITYLSMELAIKAQEQAEKK

SEQ ID NO: 81471 - protein, 408 aa, Unknown
  Bacterial polypetide isolated from the Sargasso Sea
MFLLLLFLITFSQLSANPQKNYQSFNDGQSFIKNQIQKKINKNKAKNVIVIVGDGYGITTNYINRLNQGQINGGLGDEFVLPHEELDHLALIKTYTTNGQTPDSAGTSTAIHSGIKTKSGIIGLTDSSIRGDCMSKRTEVESISDIFKKLDKSVGVVTNTRITHATPAALYAHSFDRNWEDDSKVPKDCSQDDIALQLINSDIDLALGGGKRHFLPLEIVSQKGKRTDSRNLIEEFKNSGGIYLNNENDFQNYKINTKKRLIGLFADSHFPYLAKEENKPSLLDLSNLAIEYLNKNKNGYYLLIEAGRIDHGHHAGKLNYVLRQTQQFNKLIQNIIQKVNLQETLLIVTADHAHSLGVNGYCGRGSKVNGICYRINPKESKHPSKPNLGLDGKPFSVCNYLNGTWKCF

SEQ ID NO: 81472 - protein, 723 aa, Unknown
  Bacterial polypetide isolated from the Sargasso Sea
MENTYQDLITDIQSKNPKISEKLEGGKKFKIKSDFKPAGDQPEAIRKLVQSANKGEFNQVLLGVTGSGKTFTMAKVIEATNRPALILAPNKTLAAQLYGEMKGFFPDNAVEYFVSYYDYYTPEAYVPRSDTYIEKEASINEQIDRMRHSATRSLLERDDVLIVASVSCIYGLGSVEAYSKMTLTLERNNDYNREQLIKSLVALQYKRNDQNFYRGTFRARGEYLEIFPSHLEDRAWRLSLFGDKLEKIEEFDPLTGDQVRELNLVKVYANSHYITPKPTIEQAIIKIRKELESTLKKHKSENKLLEAQRLEERTKFDLEMIEATGTCAGIENYSRFLSGRKPGEPPPTLFEYFPDNTLIFVDECHVTVPQLNGMFKGDRSRKSTLAEYGFRLPSCMDNRPLKFEEWDLMRTQTVFVSATPGPWELEQTKGKFIDQVIRPTGLIDPPVEVKPAKNQVDDLMHECKKTIEKNHRVLVTTLTKKMAEDLTEYLHENGIKVRYLHSDIDTLERIEIMRDLRLGVFDVLVGINLLREGLDIPECALVGILDADKEGFLRSETSLIQTIGRAARNLDGKVILYADKETKSIKKAIKETERRRNIQLAYNKKNKISATSIKKEISDILESVYEKDYVKIGTGANVGGNLKKHIKALNKQMKEAAGNLEFEEAAKIRDEIRKLESTELEVTLNPKVKKYSKNNKMYPKGRSTMGMPGTRAQKGKKKWKQIK

SEQ ID NO: 81473 - protein, 336 aa, Unknown
  Bacterial polypetide isolated from the Sargasso Sea
MTKTINLGVLGIDHGHIFDMLDEMLKEGCSCNYFWTEGSPLTLDEFSKKYPQIKRVDNKNDILNDNTIDMVLISSIPKDRANLSIDAMRAGKDVMVDKPGCTTLEQLNNLKQTVKETGKIWSINFSERFHVAAVTKAEELVAEGKIGKVKQTIGTGPHRQGNYERPDWFYDRDSYGGIITDIGSHQIHQFLIFTNSNEAKVNHALVENTTRKEFAGFQDFGEVNLTGNGGHGYVRLDWFTPDALPTWGDGRLFILGDKGFIEIRKYTDLAKSEKGNQLFLANNNEVKHIDCSNENLPYFANLIQDVLNRTDTACPQELTYLSMELAIKAQELAEKK

SEQ ID NO: 81474 - protein, 604 aa, Unknown
  Bacterial polypetide isolated from the Sargasso Sea
MKYIFDLIVIGGGHAGVEAALVAKRSGLNVALITLDKTKTGRMSCNPAIGGIGKSHLAKEIDALGGYMAEATDLAGIQFRTLNKKKGPAVQATRAQTDKILYEKAIQEKLKKEKIEIFDDEIKDFRTHRTRIEKAISENNEYEAKAFVLTTGTFLNGTILIGHTKQEGGRIDEKKSTGLEKFFEKQELTLGRLKTGTPPRLSSKTINYSLLEPQPGEETEAYMSYLGKKNKHPKQTCCYITQTNENTHEIIEKNIKKSAMYSGLISGVGPRYCPSIEDKIVRFSEKKHHQIFVEPEGLESDWVYPNGVSTSLPKEVQEEYIHTIKGFEKAEILQYGYAVEYDYIDPRNLNITLATKKNPNLFLAGQINGTTGYEEAGAQGIVAGINASLYVKNEEPWIPQRQNSYMGVLVDDLTRLGVSEPYRMFTSRAEHRLLLRQDNADERMFEIAKKFNIISKEREEIFLKKQKEKEKIKKKLQETKIMVSGLKKTAEELCKRNDFTEEEVKKITKLKEKNFTEVYFDIRYSGYIDKQQRELDKMKNLEEYSLGLVFDYKEVVGLSGELQERLNKEKPKNLFEASSIEGITPAALNVLTIHLKKIDAIRAT

SEQ ID NO: 81475 - protein, 589 aa, Unknown
  Bacterial polypetide isolated from the Sargasso Sea
MCWPAWANGERQSQPLDLFQQAESLPDGFADHFFGVPLAVRILLDGQQLGEGEIVLGKDTSVQLLTLTDSYESELSERDRQHWSQILSSPHQLGPCQQKCEDGVLALEYSLENSQLSVLTANVEKGRLSTRYHSLPEGGSYGALLRHQLNLSQGEGEQRSGRYNLTAQGSMGEWSPLLEGELSQSGDGQGTLHHIQQLYAEHEGAGRFYRLGYFSPYAQGLVRQPALFGGRTPTVLGVMLGDSDTLLIEQGQASATPVYVTPSRPGMVEIYRDGQLINSQQVIAGLQALDTRVLPAGIYEVELRVLEDGQVTERRRETIYKPMNWQNPDETWRFNLFAGQQTRLLSNWDESDVSSLSSGVMVNHLLAPSVIVGASSQYIDERWQNGLSADWGLTEQWRLLGNLMTTQGIGHGFDLQLLHHYGSGSLVVGHQRQYLSQSEASDSNTAQSTLSLQQRLSDSHSANLYVSHQPGYGTGADLGWRYNGELFSQNMSWSLTVFDRPGSISTAYARDRGGMLSLSMNLGGERSLLAIGVGSRTSRSGGQERNGSLSYQQLLEWGALQSIGASLTSDSYGVGTAGYARFEGEQLSG

SEQ ID NO: 81476 - protein, 194 aa, Unknown
  Bacterial polypetide isolated from the Sargasso Sea
MLVGAGNAPSIEERGDSKKGETLVATCSACHGIDGNSLAGLWPSIAGQNYKYLLKQLRLVKSGDRQIDQMIGQLDNLSDQDLKDIASFYSIQNNTIGKVEEDKLELGKKLYYAGNLEKGIPACTACHSPRGLGNGPAAYPLLSGQQPDYVEKALKDYRSGERLNDDPSKIMIAIAYKLDDTEIEALSSFVHGLH

SEQ ID NO: 81477 - protein, 346 aa, Unknown
  Bacterial polypetide isolated from the Sargasso Sea
MLVGIFIILHVGSRWLGTAFHLAEREVAEWSMPTASLIAPLFFGWSGLETGIHVTWWLAMGLIVLFLPYFPYSKHIHIFLAPMNLAFASREANGKLMEPVESSNPGASNLDELPWKNIFDSYVCIMCTRCHEVCPAHESGTPLSPSALEINKRYFINENSSELAGGKLKLDLLHEAISNDAVWSCTTCMACVEVCPVGNEPMQDIIQIRRKLVFDANMPDELSDALRSLDEQGNSFGESSRKRTRWTRDLDFQIKDASKEAVEYLWYVGDFASFNQNCTEKTRKFAKVLNAAGVDFGILMKDEKSAGNDARRVGEEGLFDALAEDNIQTLENCDFQHIPDYRSAYV

SEQ ID NO: 81478 - protein, 705 aa, Unknown
  Bacterial polypetide isolated from the Sargasso Sea
EDLGKFPDLNVAESLQRITGVAIDRSGGEGQAVTIRGFGPQFNTVLVNGRQIATDSAGREFNFDVLAADQITGADIYKSNSALLQEGGIGGTVNVTTARPFDFGGLHVIGSVKGMYESLSEEVSPSASFLVSNTFNDDKLGVLFAITNQQRKLQNNQILTAGWRGGQTISNPQDGVLFDNAYIPRNWDQVVDEQDRERTNASLVLQYAPSDDITVTVDGLISKFEVDSTVRDLASWFEPDRVGSATIDEATGTLLTFSQDVGLGAPSGNPASDFVSHTRNSRDVTNKAFGINVDWQVNESLKAKFDVSRSTAENDRAGRDRFNVVGIINSYSFDGTGGVPTVQHDGFDNGSLPDPSLARLHYNEMGNQFTNEDEITEAKADFEYVPDKGPVERINFGAYRQEREKSSFQIFGSQCQFCGYGTEAPTDVIDFEAYQANNYFPGLIDTFYTYDGDKMLDYLADQGFPVTPTLQNNRYTINEDITSLYMDFTIGFDLADMPVTVNMGARYSETDIDVSAVQSFVTDVVPTSDATLFANVFGPATNITQGTSYSNLLPSLNVKLELQENMVLRFAAYDSITRPTMSQLSPATTFNEPRRQNLTASGGNPALKPFQSENWDISYEWYYNDANLFSFAVFSKEVDDFIVTLTGAETYTMSDRNGPDFACTTCTDQTDEELVGSSEVYTVTRPQNGESATVTGYEIGVTHMF

SEQ ID NO: 81479 - protein, 429 aa, Unknown
  Bacterial polypetide isolated from the Sargasso Sea
MVVSGFIHSVYAEEISALEELTVSARPIGLQSAENLSLPISILDGLDLRNSQDSTIGETLSNIPGVTTDRFSPLASRPVIRGLAGSRVLILENGVGAMDVTTISADHAVTIEPIQAETIEIFRGPSTLLYGSEASGGLINVVTNRIPEIVPEFRNTFHSSYGDNQNEKLFSIQSEGGQDKWAYHLDSTKRHAREYSSSKKQIENSDYETFNFNVGTSYVDTWGFLGASIGYFESTHGVPLNPDDPSELPFLETEQNRFDLSGKIIEPWSGVEVVTLQAGYNDYTHTEFEDVGEAGTVFDNEEFSTRIEVTHAQVGKLKGAFGTQFGFRNLSAVGEEAFIPKTKTNSVAAFILEEITLTDSTYLEIGGRYEHKEDNPNNASEVTNDMFSISTGLNWNSDQICHWVSILVEANVVRQQMYLLQMVLMSQQE

SEQ ID NO: 81480 - protein, 495 aa, Unknown
  Bacterial polypetide isolated from the Sargasso Sea
MIDKSLRLILGNQLFPLEIQKIEDTETIFMCEDSGLCTYEKHHKSKIALFFNAMRSFRDSLERSKIKNIYYDFNNRFNDTFIEKLADEIRKNNFTKIKFFEIEDKPFEKEILGLVNELEIKYEILKTPMFIDTRQSFKEYIGDKTFILQANYYKKVRKEMDLLLEDGKPLGGKWSFDDENRKKLPKGYIIPELPTIKKRDDSEEISNFINTEFKDHPGIINNIFPFTSEQALDWLNVFFDERFKDFGPYEDAIFMGEHFQLHSALSSSMNLGIITPQQVVTEARNYAEENDIPLNSLEGFIRQIIGWREFIRGIYQNFSEKMIDANYWNHQRKLSDAWYTGETGIEPLDDAIKGAQEFGYTHHINRLMVLASIMNMSRIHPSEIYKWFMEMFVDSSEWVMVPNVFGMGTFADGGIFATKPYICGSSYILRMSNFKKGDWCEIVDGLYWKFIEDNKEFFASNPRLSLMIRALDKLDKDRKLRIFKAADIFIEEKTL

SEQ ID NO: 81481 - protein, 412 aa, Unknown
  Bacterial polypetide isolated from the Sargasso Sea
MNYEKSRNFADFLDQQDGLSEYREQFNYPKDSSGKELIYFCGNSLGLQPKTVSSYLEKELSVWAEKGVIGQETRWIAFHERLEKSTAKLVGALPSEVVVMNALTVNIHFLLVSFYQPSEKRYKIMIEKDAFPSDHYAIQSQIRFHGYDPEQALVELVPRKDEKILRNDDILSSIQDHGDQLSLIYLGGVNYYTGQAFDMGEISKAGKAQGAIVGFNLAHSVGNLPLRLHDWDIDFSAWCTYKYLCAGPGSPSGVFIHERHHDWDGPRFLGWWGHNKDSRFQMPSVFDPILTSEGWQVSNAPVMGMAPLLASMEIYDKVGMNAIRSKGKELSSYMEYLIKEYIAEVDIITPKARGCQLSIVVPGGKDVFDYLARQGVVCDWRNPDVIRVAPHPLFNTFTEVFEFVKILKKAIA

SEQ ID NO: 81482 - protein, 487 aa, Unknown
  Bacterial polypetide isolated from the Sargasso Sea
MSISLFSVLFIATFITYDTQFAQKIIDQSYQYIVSVFGPSYLILTLFCFFFLIFLCISRFGDYRLGGDDAETEFNYLSWIGMLFCSGIGGGIIYWSGVEWSYYVGNPPFNIEPYSQQSFSLATAYGLFHWGISAWSIYGIPAIALSIAFYKYKLNSLRLSSSLSGLGISNIETTSFGRFIDLIFILATVGAAGGTIGSYIPMLSSGFTEIFNLNNGLYLDILVICLCVSLFGYSVYKGLDKGIRNLSNFNLMLALLFLLIIVFSTNFLGLLETSFSGLVFSVVNFWDMSTLGINEESKFAEEWTIFYWAWWVAFGPLVGLFIARISKGRTIRQVVLGMLFFGTLGTWLFYMILGGFAMNLELSGEFSVLQSMNSVGHADTAIAVVKNLPFEILMVFIFCLITIIFVTTSYDSMSYVISYHVMKTSNANKEPGKKLRLFWAIILGILPAALVLYSDHSVALDIILITSLPLMLIYPLMAISIYRELIQ

SEQ ID NO: 81483 - protein, 453 aa, Unknown
  Bacterial polypetide isolated from the Sargasso Sea
MAGDHHVHTHYSVKWDNSVFPPAPILGGDAKYSIPLNAQMASHYGLSWMVITDHGGPNRAKLALEQAYPELVASRKALPHILQFYGMEFDVPGNSPGGRHASFIMPHRATEAEQLYQIESRYNGRQGVPPGPEKAEDAFMLQALKAMNELPDKPLLLVNHPARLATGFRQYNKVTPAQLRDWQDTAPDVVIGMTGAEGHQAATLNPDGSTDPNAIRGEYPDYPTMGGYDQMTARLGGVWDSLLSEGRNWWVTGVSDSHGHYTDGWADFWPGQYAKTYVYADKNYDSIFAALKAGQVFVTTGDLIDALFVEVAVKNSAKTATAGQTLTVKPDDELVLRVRFRDPDSNNGGGYNPEVERVDVIQGVIIGPASERNTDEAPNTKVAKRFYAKDWSSKEGYSSFELPLGKVSTSQYLRLRGTNNKNELEPEPDAKGENPWSDLWFYSNPVFIQVDQN

SEQ ID NO: 81484 - protein, 279 aa, Unknown
  Bacterial polypetide isolated from the Sargasso Sea
MLNLSWNYLPFYLSGRMGIETLPEDTKMLLDYSPDIEIYGRLAEPEYSDFEKTLCGSAGFNAAQLTSHGVNTCPNTVVHEIGHVYLADHDLAHRNTDNIAKFKRATDSPCDGGYTVMTWQSSPDTKLYYSSPEVIVNGSVCGDESLSFVVSRNGDLSKSASVKVFIDNAVTLLDSDFIDVKFAAGESTKSVVVSIIDNASTAENSSLVAELVTPRLLKVTGSTMAITINNDDVLPVVTPPTTSTTPTTPTTPEPESSSGGGSLGYISLVFLALARRLRK

SEQ ID NO: 81485 - protein, 322 aa, Unknown
  Bacterial polypetide isolated from the Sargasso Sea
MLNLSWNYLPFYLSGRMGIETLPEDTKMLLDYSPDIEIYGRLAEPEYSDFEKTLCGSAGFNAAQLTSHGVNTCPNTVVHEIGHVYLADHDLAHRNTDNIAKFKRATASPCDGGYTVMTWQSSPDTKLYYSSPEVIVNGSVCGDESTMNNAKQISLAAPFVANIMDEMDVIGDVWLGDTPVIVSESDESLSFVVSRNGDLSKSASVKVFIDNAVTLLDSDFIDVKFAAGESTKSVVVSIIDNASTAENSSLVAELVTPRLLKVTGSTMAITINNDDVLPVVTPPTTSTTPTTPTTPEPESSSGGGSLGYISLVFLALARRLRK

SEQ ID NO: 81486 - protein, 698 aa, Unknown
  Bacterial polypetide isolated from the Sargasso Sea
MFLEEAGDMEDQIEESLLLLENDPSNQEAVNTAFRGFHTIKGGAGMIGFEELQQYTHQVESLLSDVRGGEKSTSPELISALLGSIDCLRSFCKDLEGIESYDQEGVAASLEEIQKLSGTSVYTGEPQTEVDLEPTNPIEISESNESGFSRFLIELRFPEELLQEGGDPLLLLKDLHELGECIVTAHVHSIPQLEILDPSKLYIHWSVLLNTEKSEEELENVLMFFLEEEGVTIRRIQGPPKETKAKQKINQGEDQPVQEDAQETKDLPSKQNKETVQPQTQKIEKPAQPRPQVQKKKDSGGSIHVSNFKLDKLMNLVGETVINQARLKELGQEFRILNRKLGDRYQQIIDDSDIVVRELQDQVMNIRMVPIKGAFLPLQRIVRDYSVKSGKKIKLEISGGETELDKTVSEKLGGPLKHLIRNAMDHGIELQEERAKNGKTPEGKIELKAFHSEGHVFIEVQDDGAGIDAEKIKDIARSKQLLDDETELSEEEAFQLLFLPGFSTSESISDISGRGVGMDAVRQDIESLRGVIFIKSELGQGSTFQIKLPLTLAIIEGMLVQIENQIFTIPLLSVLETLKTLGHQHKTLQKQGEVIELRGEYLPKLNLSRIFNLQKVDPPNLDPLVVVVEQAGERYGLLVDKILDQQQVVIKSMEENFFQIPGIAGATILGDGGVSLILDLPGLLKIALQNRQEPLELS

SEQ ID NO: 81487 - protein, 429 aa, Unknown
  Bacterial polypetide isolated from the Sargasso Sea
MKYIFDLIVIGGGHAGVEAALVAKRSGLDVALVTLDKTKTGRMSCNPAIGGIGKSHLTKEIDALGGYMAEATDLSGIQFRTLNKKKGPAVQATRAQTDKNLYEKAIQEKIKKENIQVFDDEIKDFATKKTIIEKAISEKNEYVAKAFVLTTGTFLNGAILIGHTKQEGGRIDEKKSTGLEKFFENNQLQLGRLKTGTPPRLSSKTINYEILTPQPGDEAEAYMSFLGEKNKHPKQTNCYITQTNEKTHKIIEDNIKKSAMYSGLISGVGPRYCPSIEDKIVRFAEKKHHQIFVEPEGLGSDWVYPNGISTSLPKEVQEEYIRSIKGFESAEILQFGYAVEYDYIDPRNLHKTLATKKNPNLFLAGQINGTTGYEEAGAQGMVAGINASLYVKKEDCWIPQRQNSYMGVLVDDLTRLGVSEPYRMFTSRA

SEQ ID NO: 81488 - protein, 297 aa, Unknown
  Bacterial polypetide isolated from the Sargasso Sea
MLELLSSHACHGGEQRIYRHDSQTVGLPMRFSVYLPPQALQANANVPALFYLAGLTCTEETFPVKAGAQRFAAQHGIALIAPDTSPRGAGVPGESAAWDFGVGAGFYVDATQQPWAKHYRMYSYVRDELRETVLANLPVDGARLGIFGHSMGGHGALMLALRNPEIYRSVSAFAPIAAPSQCPWGVKAFSGYLGEDREGWRKYDSSELVAHASRKFKEGILVDQGLADQFLAEQLNPDVFEAACKAAGQPLTLRRHAGYDHGYYFISTFIEDHIAHHARVLNAAATDSRHTPPPTAP

SEQ ID NO: 81489 - protein, 422 aa, Unknown
  Bacterial polypetide isolated from the Sargasso Sea
MNNIFDLVVIGGGHAGVEAVLAGKRMGHNVALITLDKTKTGRMSCNPAIGGIGKTHLAKEIDALGGYMAEATDLSGIQFRTLNKKKGPAVQATRAQADKELYEKTIQAKLEKEQIDVFEDEVIDFEEKNGEIFAAVGKNKEYKAKAFVLTTGTFLNGAILIGNIKREGGRIDEKKASGLENFFEKQDLMLGRLKTGTPPRLAKETINFEALEEQPGDQEVCYMSFLENKNAHPKQVSCFITKTNKKTHNIIKKNIKKSAMYSGLISGVGPRYCPSIEDKIMRFSSKDSHQIFVEPEGLESNWVYPNGISTSLPGEVQEEYIRSIEGFENAKILQQGYAVEYDYIDPRNLEKTLRLKNFKNLFLAGQINGTTGYEEAGAQGMVAGINASLLVQKKTEWIPQRQNSYMGVLVDDLTRFGVSEPY

SEQ ID NO: 81490 - protein, 288 aa, Unknown
  Bacterial polypetide isolated from the Sargasso Sea
NPLCVGLDPYLDKIPPLFQNGTMKPSDPRTAPAVETFLRAVIDVIVGKVAIIKPQSAFFEQLGWRGIKALDAIIQYARDKDILVLMDAKRGDIGTTAKAYAETYLSKEALLPSDALTVNPFLGKDTLEPYLTEVKDNNRGLFILVKTSNPGSGDYQNVLVKDIPLYEFIGNSLRSIASEFVGSATGWSSIGIVVGATYPEQADRLREILPNVPFLIPGYGAQGGAADDAVTAFVKGSNGYEGGIVNSSRGILFSDGSYTSNPKIWESTLCTSVQHAVDGLIDALARKP

SEQ ID NO: 81491 - protein, 212 aa, Unknown
  Bacterial polypetide isolated from the Sargasso Sea
MGKGIVEQKQELIEINISIEQRDKDVINASKIVNENINKVVEIAKSLGIKEDDIVTKEFSISPVERWIQKKDEYGEWGESEIIAYEVNNSILLSSEKIDVITEFINQSTVQTGNTLRINHINFSAKDQKENKIESREKAIEDALYKASFYEKRLEIKLGDIIHFQELSGPSVNQNDKNLPMMRMAAEAMPSASIYAGDSEIITEIYLGFKIN

SEQ ID NO: 81492 - protein, 247 aa, Unknown
  Bacterial polypetide isolated from the Sargasso Sea
STDKFSDIGASGFQSNINTLAANDVVPDCSSLTDKFCPSRKISIGEVSYIVDKLVSKSLIGSNLFDASPFQAGWESSGGEVEDAASTAVSNPNSGNDACTGKDNSNAKLDSTLDIQRFLSDNGFNPGPIDGVSGSKTKAAIKAFQTKNGLLSDGIVGSKTKAAMRSYTGCEAANTCKARDNTGANLDSVSDIQTYLSNNGFNPGIIDGKMGSYTREAIKAFQRKVGLIPDGVVGSRTKSSMRSYTGC

SEQ ID NO: 81493 - protein, 336 aa, Unknown
  Bacterial polypetide isolated from the Sargasso Sea
MKKKLNLGVIGIDHGHIFDMLDEMIKEGCSCNYFWTDGDPLTLQEFNKKYPNIKRKENKKEILNDSSIDMILISSIPVNRAGHSIDALKAGKDVMVDKPGCTTLDQLNKLKNTVKETGKIWSINFSERFHVAAVAKAEELVNEGKIGKVKQTIGTGPHRQGNYERPDWFYNRQSYGGIITDIGSHQIHQFLVFTNSDQAKINHALVENTTKKDKPGFQDFGEVNLTGNGGHGYVRLDWFTPDALPTWGDGRLLILGDKGYIEIRKYTDLAKSEKGNHLYLANNDEVKHIDCSNVKLPYFSNLINDVLNRTETACPQVLTYFSMELAIKAQEQAEKK

SEQ ID NO: 81494 - protein, 315 aa, Unknown
  Bacterial polypetide isolated from the Sargasso Sea
MYRKAIILGIKGTKLTNDEKLILKHGKPWGIILFSRNISNLTQLSSLIKDIKFIIKDKNYPIIIDEEGGKVSRLKKIIDLSLFSQNYFANIYKKDKKNFYHIYKIYIDTVSNIFNKVGININTVPVLDIYRSSSHSIIGNRSFSNDPKIVTEMGNHCIALFRKNKIATVMKHIPGHGMAKSDSHYKTSIITSNKKDLINKDFKPFKNCRTFFAMTAHLIYKSFDEKYTATHSSIIINEVIRNTIGFKGILISDDISMKALKFSLKENAIKALDSGCNLVLHCNGNTGEMRKLLKIVPTIDKFTQKKTSLFYNFLG

SEQ ID NO: 81495 - protein, 158 aa, Unknown; identical to SEQ ID NO: 81425
  Bacterial polypetide isolated from the Sargasso Sea

SEQ ID NO: 81496 - protein, 336 aa, Unknown
  Bacterial polypetide isolated from the Sargasso Sea
MKKVLNLGVIGIDHGHIFDMLDEMIKEGCSCNYFWTDGDPLTLQEFNKKYPNIKRKENKEEILNDSSIDMILISSIPIDRAGHSIDALKAGKDVMVDKPGCTTLNQLNNLKNTVKKTGKIWSINFSERFHVAAVAKAEELVNEGKIGKVKQTIGTGPHRQGNYERPDWFYNRQSYGGIITDIGSHQIHQFLVFTNSNQAKINHALVENTTKKDMPGFQDFGEVNLTGNGGHGYIRLDWFTPDALPTWGDGRLLILGDKGFIEIRKYTDLAKSEKGNHLFLANNDEVKHIDCSNVKLPYFSNLINDVLNRTETACPQEITYLSMELSIKAQEQAEKK

SEQ ID NO: 81497 - protein, 259 aa, Unknown
  Bacterial polypetide isolated from the Sargasso Sea
MNIKINKNTKTPKIEAALFDLDGTLLNSKEQIPVSIQNKIKEISKIIPVSIISGRIFSSVLEYSEQLGLISPQISDNGAIIFDPKLDNKIIFRKSLDSDIAYKVFELLDKNKFEYFSSAEGRTMNNTMSNKTSSNVNIITCFYEDARPYLESSDFIDTSKISLVHSSGSMEEEYISFMPKDVNKGVALKKYSRLLGIDQSKIFAIGDGMNDLEMLEEAGISVAMGNSVKEVFEVSKYATNKYEDNGTEIVLDWIIRGLS

SEQ ID NO: 81498 - protein, 222 aa, Unknown
  Bacterial polypetide isolated from the Sargasso Sea
MKEKDTIIFDLDGTLVDSAPDLHACANRLLKRYHQPTISLKQSQKFIGDGVRQFVKLAWLQSNREMDESQLTKLQDEFLLDYQNQPAQLSETYPGVRETLDQLSHFGYKMAVCTNKPQIAAETLLKNLGLRDYFSQIAGGDFYSVKKPNKLHLLNLLNDLGKSTSSAVMIGDNEHDADTSKAAETMFIMCTYGYARIPLKDIHFDFKIDKFSELLTLEVFRR

SEQ ID NO: 81499 - protein, 420 aa, Unknown
  Bacterial polypetide isolated from the Sargasso Sea
GINARFDGKIFYDNIIAFNCPPGVSCYDGHAGNDYYMPTNAPILAAADGYVVWSAFSPGADPCPGGISPNGDLGLIIIYHYNDYFTCYLHLSPPLNVAVGETVAAGDTIGFNGMTGCATSPHLHFEVRKENYFFDQQLPWVVDPYGWWGNYEDPIISLRGHESVWLWKSDWIVDDGDLGFQRFHGANWAYRNTGYNDDSWTAPAANDEDDSFHYAIWTPELAGSGEYNIDVYIPNISNLVTAAQYEIIIKDSAGINTKNIVTVDQTINSNSFSTIATVDLQAGSNCAVILRDIVDSTSTGLYVSFDAVRFVNTQQVGIGGEDNQSMTPNRIVVYPSYPNPFNSSTTILYEVLQENMVEVSIFDISGNHVYTLTNELKSPGKYSVLWGGEGNNNQVVPSGLYYCVVTANGFRDTQKIVLLK

SEQ ID NO: 81500 - protein, 223 aa, Unknown
  Bacterial polypetide isolated from the Sargasso Sea
MQEINTFFFDLDGTLVDSVPDLATALNQTLNDYQLPTYNEQTIRHWVGNGARVLVERGLSGNAKIRHHYTSNEIDAALEKFLFYYRTLETKSTVLYDGVFSTLHALKEQGFTLALITNKPSEFIEPILSSFSIFSLFSLTIGGDSLPEKKPSSLPLLHACEKLGVSPSQCVMVGDSKNDIVAAKAANIKSIGLTYGYNYGESIAKYKPNWVFDDFEEILTFAS

SEQ ID NO: 81501 - protein, 336 aa, Unknown
  Bacterial polypetide isolated from the Sargasso Sea
MTKTINLGVLGIDHGHIFDMLDEMLKEGCSCNYFWTKGSPLTLDEFSKKYPKIKRVDNKSDILNDDTIDIILISSIPKDRANLSMDAMKAGKDVMVDKPGCTTLEQLNNLKQIVKETGKIWSINFSERFHVAAVAKAEELVAEGKIGKVKQTIGTGPHRQGNYERPNWFYDRNSYGGIITDIGSHQIHQFLVFTNSSEAKINHSLVENTTKKDFAGFQDFGEVNLTGNGGHGYVRLDWFTPDALSTWGDGRLFILGDKGFIEIRKYTDLAKSEKGNQLYLANNDEVKHIDCSNVKLPYFANLIQDVLNRTDTACSQELTYLSMELAIKAQELAEKK

SEQ ID NO: 81502 - protein, 367 aa, Unknown
  Bacterial polypetide isolated from the Sargasso Sea
YNLGIKELRSLLGDKAMLTLIVFAFTISVYSSATVLPGSLHLAPIAIADMDQSQLSNRIVNSFYRPWFLPPEMITADEMDAGLDAGRYTFAVNIPPDFQRDVLAGRQPDIQVNVDATRMSQAFTGNSYIQNIISGEVNSFVARYRDNSEPPVALEMRMRFNPNLEPARFGAVMAIINNITMLAIVLTGSALIREREHGTIEHLLVMPVTPFEIMMAKIWSMGLVVLVVSGLSLMLMVKGVLGVPIEGSIPLFMLGVALSLFATTSIGIFMGTLARSMPQLGLLMILVLLPLQMLSGGSTPRESMPQAVQDIMLTMPTTHFVSLAQAILYRGAGFGIVWPQFLTLLAIGSAFFLIALLRFRKTIGTMA

SEQ ID NO: 81503 - protein, 536 aa, Unknown
  Bacterial polypetide isolated from the Sargasso Sea
MLSRRYLAMWCAVILLAACAALAAAHHISWFWIIVPVALVALGLFDLTQQRHAILRNYPLWGHFRFLFEFIRPEIRQYFVEDDTDEKPFSRAQRSIVYQRAKNDVDSRPYGTELDVKAVAHEWISHSLAPTTIASHDFRIVVGPDRAQPYSMSIFNVSAMSFGSLSANAIMALNLGAKKGNFAHDTGEGSMSKYHREHGGDIIWEIASGYFGCRNDDGTFSAEKFAKQAAEPQVKMIEVKLSQGAKPGHGGVLPAAKITPEIAETRGVPMGRDCISPATHSEFSSPRSLLEFVDRLRTLSGGKPTGFKLCIGHPWEFFGIAKAMLETGILPDFIVVDGAEGGTGAAPLEFTDHVGVPLQEGLLLVHNTLVGIGLRQRIRIGASGKMITAFDITKTLAIGADWVNAARGFMFAVGCIQAQTCHTGRCPTGVATQDPVRQRALVVPDKADRVFNFHHNTLHALKEIIQAAGLKHPAELRAHHIVRRVSSHEVQLMSELLKYLDPNDLLNGNYRYTLYEKYWPMAQSDSFAPKVELAAT

SEQ ID NO: 81504 - protein, 485 aa, Unknown
  Bacterial polypetide isolated from the Sargasso Sea
MLNAVTAIVLIIITFSILGGIISSFTEDDSIDSNGKILWFKPTGVVVDSVVNSAPSFDSLLLGDTSTEQHELKDLLKVLNSAAEDESLAAVYVNVSELGMYYASAFEIANAVKNIRDNGKRVIAYAENFGNQAYLISSQADTVMVNEYGSVSAFGFARKREFYKDLYENINLNFNVFVAGDFKSGPEPYTRNSMSEEDKLAWNEFANPLWLKMTQMMESGRNLNDGTIQDYGDKLWEMSIDNPEIAQIALELGMVDMVVSREDLRHWMYKQFPNENNDKNELPDSISIYEYLSLVDEEQNSSENKIAIVNVEGTIVTGEASYNVAGSDTIVKNIRNAIKDTSVKALVLRVNSPGGDVWASELITNALDEFKSSGRPIVTSMGDIAASGGVWVTTLSDEIWAKNETITGSIGVYGIIPTLDGIYEWAGIQVDGVTSTKAGEWDERLPMPEYVTTAIQAGIDHTYNKFVSKVAENRMVPDKEILSIA

SEQ ID NO: 81505 - protein, 422 aa, Unknown
  Bacterial polypetide isolated from the Sargasso Sea
MDAISTSALLIFLLVLILISAYFSGSETAMMTLNRYRLRHLASNGHKGAQRALQLLDRPDKLIGVILIGNNLVNILAAQVATIIGMRLYGEMGLAIATGVLTLLVLVFAEVTPKTLAALHPEPIAFPSSFLLRWLLVILSPLVRIMNIITSSLLRLIGVHSVKTNEALSQEELRTVVHEAGALIPRHQEMLLSILDLEKVTVEDIMVPRSDIYAINVNDDFKFINRQVIQSPHTRVLVYRDTIDDAVGFIHLRDALRLQSKEQFSKSSLLRAVKELYFIPEGTPLNVQLANFQHNKERIGLVVDEYGDIQGLVTLEDILEEIVGDFTTSMLPTASEEINQQQDGSYLIDASITIRDLNKEMKWDFPTDGPKTLNGLILEYLEDIPSENTSLRLAGYPLEVIEVADNMVKTVRIIPQHYQPPR

SEQ ID NO: 81506 - protein, 226 aa, Unknown
  Bacterial polypetide isolated from the Sargasso Sea
MNYLQQERLDALSVNYVLGGMRGKARQRFQRLLMQQQQARESVWRWEQHLNPLAESLTAVEPDESLWQKLQQRLGWQKADVVQLKPKGSWLHPANWVAVAAAASLALVLLLPPLATAPVELAVIQTKEAKALWLVSKQGDTVVLQASAAVLADPAHDYELWMLPTSGQSPISLGLLPQSGKVSYPWPKAATGLVVAVLAVSLEPKGGSPTGQPTGAVLHTSELMTL

SEQ ID NO: 81507 - protein, 1452 aa, Unknown
  Bacterial polypetide isolated from the Sargasso Sea
MKAVWHRGAVDADGKTGDGAGIHVEIPKDFFIEKIQVTGHDYDNSEICVGMIFLPRNDYSAQESCKTIVESELTKNNFSIYGWRQVPVNSKVLGEKALQTMPEIIQVLFKPNDPNLLDKNLERKIYEIRKRIENKAFDASLNNFYICSISSKSIIYKGLYLAESISDFYLDLRDSRFISRYAIFHQRFSTNTAPSWSLAQPFRAIAHNGEINTYKGNKNWMKVHEQEMSSPLFEDIENLKPVIQKGVSDSAALDNVFELLNKSGQSAPLAKLMLVPDAWSKKNKTLSKSHQQLFNFLNSTMEPWDGPAAIAATDNEWVIAANDRNGLRPLRYAITKDKMVFAGSETGMIDLNEKKILTKGRLGPGEIIGVRIEKGKVFSNSQIKDYLAKEFKHFNSQIIDLDEKLSISNEKHNFDGESLRRRQYTFGISLEDLELILHPMAEDAKEATGSMGDDTPLAVLSDKYRPLYHFFRQNFSQVTNPPIDSLRENKVMSLKTRFGNLGNILDFDTLTKENIYVLNSPILSNSQFNKFTNFFGKNSVTIDCSFSQDDNLENSINRIQKESEIAVRQGITQLILSDKNLSSERLPMPMLLCVGAINTFLIQKKLRGYVSINVQSGEAIDTHSFATLIGVGATTVNPYLAFDSLYQRYEKKLFGQFSFDECVQRYINSVNAGLLKIMSKMGISVLSSYRGGCNFETVGLSRTVVNEYFPGVTSKISGIGLVGIEKKIREIHKEAFESTETILPIGGIYRYRKNGETHQYQGKLIHLLQSAVGSNSYEAYKKYADGIYNLPPINLRDLVDFRKKKLGPSINLSEVEPIEKILKRFGSGSMSHGALSKEAHETLAIGMNRIKGASCSGEGGEDAERFKVMDSGDSANSRVKQIASARFGVTVNYLNNCNEIEIKMAQGAKPGEGGQLPGFKVTKEIARLRHSTPGVTLISPPPHHDIYSIEDLAQLIYDLKQTNPKARVGVKLVASSGIGTIAAGVAKAKADIILISGHNGGTGATPQTSVKYVGIPWEMGLTEANQVLTLNNLRHKVTLRTDGGIKTGRDVVIAAMMGAEEYGVATTALVAMGCIMVRQCHSNTCPVGVCTQDEKLREKFTGTPDKVVNLFTFIASEVREILAELGFKSLNDIIGRTDLLMQVNKASPNLDDLDLNPLFVQADPGNNKRYCESLEINKVPETLDQEIWPEIEKSLDNSEKVEKEFIIKNTNRAVGTRISHHLYKKYGYEKLDENFLTLNFKGSAGQSFGAFSSKGLKLNLKGDANDYVGKGLSGATISIKLSDESNLISNENTIIGNTVLYGATSGKLFAAGQAGDRFAVRNSGATTVIEGCDSNGCEYMTGGTVVILGNVGDNFAAGMTGGMAFIYDKSNEFEKKVNPDSVVWQNVETDYWTSYLKELILEHSKETGSLISKNIFENFEVEIKNFVQVCPKEMINKLKNPITFKSKIKEVS

SEQ ID NO: 81508 - protein, 122 aa, Unknown
  Bacterial polypetide isolated from the Sargasso Sea
MKAYTYSSVALAVTISLLAGCGGGSGSSNTPPVVTTPTTPTTPVTTEPEWEAGVYEPQSQYLAKCETPRSGIDPFTNRAYPDTQGTAMDEKLWLRTWTNDTYLWYDKVDDNDPANFSVLGYF

SEQ ID NO: 81509 - protein, 366 aa, Unknown
  Bacterial polypetide isolated from the Sargasso Sea
MNVMNIKRIAAAISCSLMTVVAHAAVLPATQTDSQWFKDSAANVAAKAQVETKKTAKNVILFVGDGMSISTLTAARILQGQQQTGNQGGEENFLSFEQFPHTALVKTYNTNQQTPDSAGTMTAMATGVKTKAGIISISDTSLRGNCLSSKGNELVSLVDLANAKGLSTGIVTTARLTHATPAAAYAKSPERDWEGDFNLPAEAVANGCTDIASQLVMRDEANSLSVALGGGRSYFLPKEVTDGENKAGKRKDGKDLTKAWVENFSKAAYVWDKKGFDAIDAANTDHLLGLFNPSHMEYEADRADDVGGEPSLSEMTAKSLEILKKNDKGFLLIVESGRIDHGHHAGNASRALTDAVELSNAVKAAV

SEQ ID NO: 81510 - protein, 522 aa, Unknown
  Bacterial polypetide isolated from the Sargasso Sea
VGYQALDAVTTGTNNTAVGYQSLSACTGDSNTAVGRLSLEQCITGDHNTAVGRYAIGALTTGNKNVAIGDYALDAVTTGNYCVALGYQALSANTASNNVAVGNDALLLNTTGQDVVAVGINALDANTTGSQNTALGSFALSANTTADYNTAVGAQAMEASSTGAQNVAVGYQALHDLTTGSYNVALGMYANENGTTCNGAIAIGHGALKNPTDGSYAVAIGFEAMKSTTTGTNNTMVGYRVGHNNTTGGNNTGLGHGALYSITEASYNTAIGQNACSSITDGGANNTAVGAGALTYVTDGDNNVAVGYDALKADTTGSNNTAVGKDTLLVNTTGERNVAVGLFAGKAVTTGNNNAFIGYNTGTASSPSGNITTESNYVVLGDDNIANLMCADTSISSSDARDKTDIEDFNHGLSWINKLRPVTYRWDKRSWYNDDPNTPLDESVRDGSKKTSPLHIGFLAQEHLEVEKAHGFGDGRDNMLITNLTEDGERYGLKYERLVPVLVNAIKELSAEVEQLKSQINN

SEQ ID NO: 81511 - protein, 823 aa, Unknown
  Bacterial polypetide isolated from the Sargasso Sea
MPVLQPVFRLSLIALACLSALPHTAYADDTPSARDENVERITVYGRQNSVVKNSGLATKSDMSLMETPAAVVIVDQELINSQGVDNLQDLIRNISGVTQAGNNYGIGDNLVIRGLGANYTYDGMYGGAGLGNTFNPTRSLTNVESVEVLKGPATGLYGMGSAGGVINLIEKKPQFESKHKITTEVGQWDTYSFAIDSTSGITDDLAYRLVAKTARSEGYRDLGADRDEVFGSLKWVLSDSQDLMLSGAYIKDAIAVDSIGHPIRIYNADSVGGKTAGEVTWQDLINDPNGQGIQLTDEQRQQLAASLASGDGLTPYSFGDAGLISPMAKDNEGEELRFKLTHNIYFTDNLFLNQQLQYRDYTTGFARQTGAYNYVYWKRKIKIGGVPTDVINEDPRAPLVENGVLYPFAARRQEYRQLDAEETSWQYFADLRYDFQIGNIDNELLVNANYEDRDIRLEQFSIYDADQVIKNKQGEVIYRGSLPYIYHIRNPNWGTGKFADYDPLKTANYNKKVSAWGLGVQHVGYLGYGFTTRVGVAFNEIKQSYEHLGVDERYSASQASPTPEEDSKDNGVTYNLGLTYMPIDDLSFFVNHSKGRTAYSILGSITGENTDREDSESVSNDLGMRFKAFDDQMLASLVFFKSSRTNVPYTNPDYNAGVSGAEVPVYFYDGSEDTQGVELDLNAHLNDNWRINLNGMYQDARDKQNPNDKANYDSRQKGVPYVTASAWVTYGADWFALSSPIELSLGAKYVDDRSTHSSSFGIPDGYVPSYTLVDSAISYATDSWKLQLNINNLFNKDYYSKAMFLGGMPGEERNVKLQYSYSF

SEQ ID NO: 81512 - protein, 600 aa, Unknown
  Bacterial polypetide isolated from the Sargasso Sea
TGSGNSGFGYDSLQANTAGDYNTAVGYQALNGNITGSNNTAFGYKSIFSNQTASGLTAIGYQALYSNTTGDYNTAVGYQALNANTTGKENTATGYLALYSNTTGEYNTAMGYQTLYTNTSGGYNTAFGQRALNKNETGNYNTAVGMYALYENQTGSNNSAIGQLAMRLNTTGSYNNAFGKYSLYSNTIGISNNAVGYKSLYSNTEGNYNTAVGHFSLYSNTTAEKNTAIGYKSLYTNSTGEFNTASGYESLYKNTSGKDNTASGYQAMYSNTTGSYNTASGVLALSANTTGNYNTATGLEALYSNTTGDSNTASGLQVLHSNTTGDSNTASGVQALFSNTTGSQNTATGVKALYSNTTGDYNTASGYRALYKNTTGIRNTASGYQALYSNTTGKENTSSGYRALYKNTTGIRNTASGYVSLYSNTTGKYNTASGYRALYKNTTGSYNNALGSNVLYNNTTGDSNNAMGYKALYSNTTGDYNTASGHFALYKNTTGDYNTASGSYSLYSNTTGYYNTASGYRALYSNTTGVRNSAMGLDALYSNTTGSQNTAIGMSALYSNTTGSYNTASGYYALYKNTTGFKNTALGQLALGLNTTGSYN

SEQ ID NO: 81513 - protein, 194 aa, Unknown
  Bacterial polypetide isolated from the Sargasso Sea
MSKTTPKGSHLEALLASTFTVAIAEIGDKTQLLALLLAARFKNKTAIILGILLSTLFNHFAAAWLGQWAINWVSPDVARYLVAASFFAIALWVLIPDKVDAEESRFYKMGPFIATFILFFIAEMGDKTQIATVVLAAKYDALAMVVAGTTLGMLLANVPVVIAGHFSAEKLPMKWIHRGCAILFALLGVATLVL

SEQ ID NO: 81514 - protein, 294 aa, Unknown
  Bacterial polypetide isolated from the Sargasso Sea
MNEFIITFRECLEASLIIGIIYTILDKNNLIAEKKVLWYGVAASIGASAIVGVLLTSINDRVGNTSYEKLFEAIFMYITAGILFYVIFWLAKHVSDRKEIEKSVKEAIAGSGFALFLLVFFSILREGFETALFLIASVTNTGSFSYLGFSIGAILAIFIGYAVVVQGKKVNLRSFFKATTLLLVLFASGMIAYGTHEFESYLVKNETIDKNNVPRVWNILQPKSSLDNNENEIFYTYDESKGKYYHLLHDKGNVGVFMKGFFGYNSDPNYVELILWILSMLFGIRMWSSFYRAS

SEQ ID NO: 81515 - protein, 206 aa, Unknown
  Bacterial polypetide isolated from the Sargasso Sea
MIALVGPPNSGKTTLFNRLTGLRQKVANYPGVTVEKHLGMVNLDDGRQVSLVDLPGVHGFSARTLDERVTRDVLEGKIEGMRSPDALILIVDVTRLEAQLMLVEPVLDMDLPTLLVLNMVDELEARGGSIDQEALAERLGVDVVRTSARTGRGVEEVLAYLRDLADGDTSVENIERELSNFAGSQPLPVIDAFAARRRLVRSVVQD

SEQ ID NO: 81516 - protein, 485 aa, Unknown
  Bacterial polypetide isolated from the Sargasso Sea
RNGAGKSTLMSIIYGFYHVDKGEMFIDGNPFKPHGSQDAIAAGVGMVHQHFMLVNNFTVLENVILGAENGWHLGKSLAAAEKLLGELARDYGLEVPLHEKVEDLPVGLQQRVEILKALYRGARILILDEPTGVLTPQEADHLFEVLKKLRDQGATIILITHKLREILAITDQVSIMRRGEMVAHVATKDTDKEQLAELMVGRKVRLKVDKGPTQPGDAKLKVDGLSYVDDAKVERVKSVSFEVRAGEVVGIAGVSGNGQSELLSLLGGILKPSKGSFTITGGGQAHEVSVSHPADPERVRNFGLGHVPEDRHKMGLINRFEAKEAFILGYHRRPQYNKGWLQNKEAILQDCQAKMDKWDVRPPHPEHKTANFSGGNQQKLVIAREVEQDPDVLLIGQPTRGVDIGAIEYIHQQIIAMRDKGKAVLLVSVELDEIMSLSDRILVIADGRIVGELDAAKADERTIGLMMANIVPDEVAASQSQGATS

SEQ ID NO: 81517 - protein, 145 aa, Unknown
  Bacterial polypetide isolated from the Sargasso Sea
MYIQLRNQLIPSKNTLLYKPIYIILFYLLLFSEVIFSQINSRYDTFDWIVYRKPGIIKSFTEGISYVYIATETAGIFRYSLYGNQFEYPITRAQGLSSNSTTAIHFDKKTGILWVATDKTIDYSFNAEGNWISRSLDNYNLLSGV

SEQ ID NO: 81518 - protein, 343 aa, Unknown
  Bacterial polypetide isolated from the Sargasso Sea
MHITHNTFVNTIDNVRFVRDGNNAHFTNNLYVNSMSQGQTRNAGNTSIALNSPGGHGKMTTKYQWECADSTMLANGTCWDNNARNIHFENNAWYDTQELLDLMAWNGDDGWCWALQGADGTDSTDADGNVVQLCDTMLAVSAQSRWMDDSTTAQMANGVSETNNIHADDLGWALDPAYINAQILRSKDWLDNGKHDTYTTHFWMHQADNSHILVEWPLPMDFSYSTTSAAYTHASGGFPVGNLNVFPDKKAEWLAQLSTDTEGSTLNPTEFTLSQNYPNPFNPSTEISFTLYQSDNVELSIYNMLGQKVRTLTNEIKNAGTHTLKWNGLDEMRTKRINRYLSI

SEQ ID NO: 81519 - protein, 532 aa, Unknown
  Bacterial polypetide isolated from the Sargasso Sea
RASCVVLDGDLNYVGNAIDTVGHINRTLEVTDNGEDMLIGSTWNGHGFTHWNSTVPGVIQHTFVDTFGVFDEVPGCWYPIGSAMGADSAYVAWCDDYADTTFGTTALWVSSLDFSPDQSELLVGALTAGWGGPLGGTNWVFEMEDLTFPVDLVGNWHDWEDTGEGVTDGPRGAAWDADGNIYLADFYSNGIFHYAYSADDDDDMEEPYTYSSTLLDFGDTLGGVVQGSDGAWQNSPHGVVVAPDGHVWVNVYGGHGRMEILASGDTVHYKGIYVLDPATGQHADFSPIEILTFPDGTSDSLTAESASSGGGRGIEIDHDGNILSSHYKTLYKINYMTGEGMAMWVGESSLTEAVSDANGNIFVSYVLAGERPCVVLDGDLNYVGNAIDTVGHINRALEVTDNGEDMYIGSTWNGHGVTHWNSTVPGVIQHSFVDTFGVFDEVPGCWYPIGSAMGADSAYVAWCDDYADTTFGTTALWVSSLDFSPDQSELLVGALTAGWGGPLGGTNWVFEMEDLTFPVDLVGNWHDWEDTG

SEQ ID NO: 81520 - protein, 640 aa, Unknown
  Bacterial polypetide isolated from the Sargasso Sea
ISLSNYKEIESSEEIMPSERIDHTFVYERLDATIGDGSFRLKTMVSGNQVSEIKHYIKIPETFTRRFEEMRSANNTIASTASMAMFLLYGFGGVIIGLFLMMRKRWVVWKQAILWGTFVAVFGALGEINFWPLMWMYYPTALSQQSFFIQNTFSMVANTLLMSIIYSLSFMAAETLTRRAFPQQINFWKLWSKGASNSIQVLGRTVGGYLIVGFDLAFVITFYLLTKKMFGWWDPASTLFDPDVIATPFPWISSVSRALGAGFWEECLFRAVPIAGAALIGDRLGRRKQWIIIGFVIQSLIFAAAHANYPSYPAYARLVELIIPSIIFGLLYLQFGLLPAIISHFIYNALLMSIPIFSSTAPGIWFDQLMVFVLCLIPVWILIIGRIKEKNWVELDNKFYNSSFKALPLRKARSRKSSIKISKYSSNNKKIMIAFGVLGIVLLILFKTDINAPGLELNRNKAITIAEKYLSDNGIELGDEWNRLISVNPSGPGKQNRFVWQTTDEEIYNFLMGDYIDTPGFSVRFAKFDGDLNERAEEYIVDLNYKGIPKRINHKIPENQKGSELIEEEARQLALNTILKHYNLSESVLELISAEPSKMPARTDWEFVFKDIAPNKIYDGDKRLRVIINGDNIKTHEKFI

SEQ ID NO: 81521 - protein, 701 aa, Unknown
  Bacterial polypetide isolated from the Sargasso Sea
MIGLTSFQLFPIFDQHPAPPGSPWFRNDDVMWDLVSVDSLTEYYGTIANLVELFASGPFPLYQGKTERISMAEIHSYDPLEGLNSSSHVAPALFKLKSIVQIIYEKDYRFAQPPKTPTLSASAGDGFVMLSWDDDADKLTRDPFLGNVNDFEGYKLFRSTDKYFSDAEVITDGYGTPMFLKPIYQCDLVDEYQGFTDYGLVNGTAYNLGDNTGIKHYFRDENVQNGRTYYYAIVAYDYGAPEIGPGISPSENNTVIDIDEYDNIRGIGKNIAIVTPQADPAGYVNPEILLDSLNNRMYGSGTIVPEISSKEQIRPGNEYHVTFNFDTVFNDLNRPLFYTNPGFKVLNKSTNQEVYYESPVYDITGQPNFSGSNLLYNEEDLYWYMNPVVISDVFDGIQLNINQPHTIPTLDSANTGWIGTSSGDMNITITTRESKIVPWDCEIVFTSDMSYTSQVEGPFGIYDEFDNRLWFPNRIILGQSFPFYVVNKTILDENGNYTLMDLVVQDYAGPDWELDQEFNLSNDRVLVGELDSLNGWKGTSFIIDFINVDNDFYPQPGSRYSISWNRNFWSTDTFKFVVDSINTVSAENLKNDLDNIRVVPNPYVGTNAMEQAVINPFLNQPRKIMFANVPSNCVITIFTPSGVKVKTINKNDSSGGMVHWDLLNEEGLEIAAGMYLYHVQPHFADKSLNKYEHVGKFAVIK

SEQ ID NO: 81522 - protein, 89 aa, Unknown
  Bacterial polypetide isolated from the Sargasso Sea
KGACITGSLHMTVQTAMLIKTLVKLGAKVRWASCNVFSTQDHAAAAIADEGIPVYAIKGESLEDYWNFTDKILDWGNGKGPNLILDDGG

SEQ ID NO: 81523 - protein, 265 aa, Unknown
  Bacterial polypetide isolated from the Sargasso Sea
PGAVVKNYDRQQQQQASARRAAEQREKQAQQQAEELREKQAAEQERLKQLEQDRLQAQEAAKEAKEQQKQAEEAAAKAAAAAKAKADAQAKEAQEAAAKAAADAKAKADAQAKAAEAAAAKAAADAKKQAEAEAAKAAADAQKKAEADAAKKAQQDAEKKAQQQAEKKAQQEAAKQAAAEKAAAEKAAEKAAAQKAAAEKAAAEKAAAAEKAAAEKAAAAKAAAAEKAAADKAAKAAAAKAAAAKKAAAAKEANGVDDLLGDLSS

SEQ ID NO: 81524 - protein, 184 aa, Unknown
  Bacterial polypetide isolated from the Sargasso Sea
MIQHINALQMKIDINAGNITSNAAAISSNDGDIANNAADIASNDDGIANNAADIARNDDGIAKNAADIASNDDGIANNVANIASNDDGIANNVANIASNDDGIANNVAKIASNKDGIADNAANIASNDDGIAKNVANIASNHDAIANNMANIVASNNYVIAKNAASNDDGIANNNSGNMFAPDI

SEQ ID NO: 81525 - protein, 203 aa, Unknown
  Bacterial polypetide isolated from the Sargasso Sea
MGEDSGYPSDCQISGGDSGYPSDCQISGGDSGYPSDSRISGGDSGYPSECQISGGDSGYPSDCQISGGDSGFPSDCQISGGDSGYPSDCRISGGDSGYPSDCQIPGGDSGYPSDCQISGGGSEYPSDCQISGGDSGYPSDCQISGGDSGYPSDCRISGGDSGYPSDCRISGGDSGNPSDCRISGGDSGYPSDCQISGGDSGYP

SEQ ID NO: 81526 - protein, 310 aa, Unknown
  Bacterial polypetide isolated from the Sargasso Sea
KETDSIDDDDTTLDEEEPEDSPKPSDSIEETGLETSSAVNQSLDLVPIDTSKDTSKDTSKDTSKDTSKDTSKDTSKDTSKDTSKDTSKDVIDEVLDKLSQQNNENTGPKHDVSNPVSNLSSESDSTHFPSLSDDPSESQVKENTANIVVHDITLPVDVETGDSQLALPPPQPAKEPVYDNANPIKDDTKDTVSTEKAEKMKTLLTLASDVKGKPDISVVKKEEIQSPTSSIPSFSLTGLYPQMKTETPTTPTTPTTPTTPTTPTTPVTSTTNPPSTTNPVTSTTNHVTNPVTNPVTNPVTTSTTNPGQAL

SEQ ID NO: 81527 - protein, 278 aa, Unknown
  Bacterial polypetide isolated from the Sargasso Sea
VIPGIPPAAGSPIPGIPGPVIPGIPPAAGSPIPGIPGPVIPGIPPAAGSPIPGIPPAAGSPIPGIPPAAGSPIPGIPPAAGSPIPGIPPAAGSPIPGIPGPVIPGIPPVAGSPIPGIPGPVIPGIPPAAGSPIPGIPGPVIPGIPPVAGSVGAGAPPAAPGIGAICIPAAALFGSNSKFFGPKSIPLSAISDEAASTKLSNIPPPKGSPIPGAPPIGSPNGSLANGSAKGSANPNVSIGIGGSNGAVIGPVIGAIAPGPIGPGIPPGPGIPGSPSIPN

SEQ ID NO: 81528 - protein, 225 aa, Unknown
  Bacterial polypetide isolated from the Sargasso Sea
MYAQSSEIGVLYQFKSSSGLVWKTFGQDKVQPKYEGEVSNGSPDGFGVLSYPFSYGKSVVGEWKIGKEWFTEHYNKEGTLLGKYIKGEWILKWGVLFHHSKKGGIEGWYEIGDEKKDRKYIGDITNLQPNGQGTETSPEGEKYEGEWKDGKKEGQGKFIQVDGSKYVGEWINGERNGYGTLTSTNGTKYVGKWKDGEKNGQGIFTSSGGSRYVGEWINGERNGYG

SEQ ID NO: 81529 - protein, 267 aa, Unknown
  Bacterial polypetide isolated from the Sargasso Sea
SDNLSVSTFTIDTTGPTLSEVTAITTPSSDNSSSYTFSSDDSGTITYGGSCSSSTSSASSGNNTITFNALADGSYSDCTIIVTDNASNASNTLTVSTFVIDTTGPTLNEVTAVSTPSDTSTPSYTFYSNEAGTITYGGSCSSSTSSASASNNAITFTALDDGTYDNCTIAVTDSSGNTSDNLSVTSFTIAVPPVLAEVTAVSTPTSDNTPDYTFSSNESGTISYGGACGSSSSSSAISGNNTVTLTQSDNSTALDDGTYDNCTIAVT

SEQ ID NO: 81530 - protein, 186 aa, Unknown
  Bacterial polypetide isolated from the Sargasso Sea
NTIRPSRHCGACQDGRILSIPAGLIAVTTGHLHRMRGIENHRPAKLPHDRHGTHVRHQIVVAEGRPAVGYKQHLPSSRFGLLHHLPHFLWRKELAFFQIYNHRGARGHLDQICLATEKRRNLDHVHHLRCSACLRFVMNIRQYRHIHFFADGFQNLQPLFQSRPPATFTGSPVRLIIAGLKNIGYP

SEQ ID NO: 81531 - protein, 414 aa, Unknown
  Bacterial polypetide isolated from the Sargasso Sea
MEECAYEAEGVWVTFRVDMSYEIINEEDGVHIAGSFQGWDPALTVMSDEDDDMVYELMYDILEPAGTTIEYKFVNGNAWGDDEGIAANRSLVVPSEDTVLTVVCFGSFQPCPDPPDSVTVTFVVDMSNEEVSANGVHIAGSMQGWDPAASEMTDADGDGKYEIEFQLATGTSVAYKFVNGNAWGSEETVPDDCVTDGNRTLDVPNFDRPYEVCYGSCEACPAPAVYADVVLTVVDEGNGFEDVEFKGEFSAWDLVQAYDDGTNGDETADDGVWTAVIENVLGPETYEWGAIENDGSEWGIWLLDIIGLPNQEFTVGEDGTVSGSTSMTIPDQGSLITKTVVFSVDMTEWLDEDGATGMPVFSVARGDTMQVRGGFNGWNCDDPTDCVLTRTPGTNIFSLAVAVEGYIDNDNEYK

SEQ ID NO: 81532 - protein, 823 aa, Unknown
  Bacterial polypetide isolated from the Sargasso Sea
MILPTQAYELKLAPHPAPFSILKFTGMDRVSQLYRYEIEFTSPAAGIPMDQVLGRPAKFIADPVDPDMNYLRKMFGENAAQFSAKPMAYTVHGVITQFGELETSADETRYRVVLEPTLADLDRGVTSRLFQKQSVEEIVTDTLRHYGYRAGVDFQFQLRGQYKRREYVTQYHETTFAFIQRICAEEGIWFRWEQKKDRAVVVFGDDLDAYARKQRTVPYRRDSGLESVGADAIKALGREMKRVPEAVRLHDYNHRQAGVSLLVEENTARDDKTTNAVDYHWGEHYETPEEGKRVARLRHEAYLAEQITFKGTGNPFWLEAGEVMRVEPNPVDAKHGVFVTLVESHGGRNESYQLSFEGIPSDRVWRTSVASVSRPVVDGILPARITSPGNYKYAYLTEQGWYVIKLPFDLDEWSPGGTSRPVRFAKPYSGDNYGHHFPLIDGAEVAIVFTDGHPDRPVMIGAMHDSLHPDLVNNLNHTRNIVRTAAQNEMRMEDKEGVEHIHLTTPFQTSELNLGHMVDENRKERGQGAELRSDGPVAVRGKGVFITAKVQSAADGKQLAMDDGVSQLQGAHQLTQSLASAADAAGAITADVSEQQTTSAELKDLNSPAVFVTAPAAIGLATNSGIQLAARNSIAATAGKDLSVSILRRLTAAVGESISLFAQKLGIKLVANRGPVDIQAQNDAMSLLSKGDMTISSVGGTTKIQSGQAIVLESGGAFIRIADGNVTIGGPGDLILKVITMQKQGASSLSDSIPTPPGPSSLYDEQFTLVDKNTGKIMPHTPYKIESASGEMIEGVSDELGRTVRVASAKAEGLKIFKGGIDE

SEQ ID NO: 81533 - protein, 569 aa, Unknown
  Bacterial polypetide isolated from the Sargasso Sea
QRYCSINSTTDSTPDYTFSSTEAGIISYGGACGSSSSSSAISGNNTVTLTQSDNSTALDDGSYDNCTIAVTDNNSNTSNNLSVSSFTIGASTPALTQITAVTTPTSDTTPDYTFYSTLAGTINYTGSCSSSSNTSATADNNTVTFNALSEGTYSDCKISVTATSSGLTSDNLSVDNFTIDTTAPTLAEVTVVTTPANDSTPDYTFSSDEAGTITYGGSCSSSDTSADADNNTVTLNILSDGTYSDCTILVTDNASNASSSLSVTSFTIDTTAPTVSEVTAVTTPSNDNTSSYTFSSNEAGTISYGGSCSSSTSSASSGNNAITFNALPDGTYSNCTIIVTDNASNASNTLTASTFIIDTTAPTLSEVTAVSTPTSDTTPNYTFSSNEAGTITYGGSCSSSTSSASASDNTVTFSTLSVGSYSDCTISVSDSSSNASNALSVSSFTIETTAPTVSSTSPSDNQSSVGVSDNISVTFSESMDNTTVTSNTSNTSCSGTLQLSSDDFSSCFQMSSSYADSSDNITFYLDPSLTLLYSTTYKIRITTSVSDIAGNTMANQYSQTYGLPRLPQL

SEQ ID NO: 81534 - protein, 262 aa, Unknown
  Bacterial polypetide isolated from the Sargasso Sea
EYQNILTLNSNHAVTIVGCGEVTQGYYNEGNRDDKHEEEFPIGTKYWIIKNSWGPTWGEPYDGGVFGTGGYFRLKRYSSDEKLTDSNTSPGPSPGNPRGWRSTNSLGSHAFQQDLFDYVGRTGPLRINLLAVSITIRKTLIPYSPLTQSIGGCTDIGQVCEVVKDDDKYGGESCRASTGNSSDCKLTPTDTSANPPIVGKCTTVANNATCTYIPEHFEHYYKTGLCLRDNIDQNKLKCYPQEELEEGIVEKQPCTENRYDRR

SEQ ID NO: 81535 - protein, 121 aa, Unknown
  Bacterial polypetide isolated from the Sargasso Sea
APLEEKSCNTNIRVTGFKKIKQTDDDLFKALQQGPVSVGIDASGLQFYDSGIYEPSQVVHLDHAVLLVGAGITDDGTKYWIIKNSWGTTWGECGYFRLKRYPDCIKYSLGICRLASRPDVE

SEQ ID NO: 81536 - protein, 143 aa, Unknown
  Bacterial polypetide isolated from the Sargasso Sea
IDNVSEQYDQSKTPNNIALPLYGRIAAGLPIEALRDETETIDVPQSLLSTGDYYALEVAGDSMIDAGIFDGDIAIIQRAESADNGTIVVALIDDTEVTLKRIRRKGESIALEPENPNHETRIFGPGRVNVQGRIAGIIRKYDC

SEQ ID NO: 81537 - protein, 306 aa, Unknown
  Bacterial polypetide isolated from the Sargasso Sea
CPDYTSKIREEVFKLKAKPIDIELDRSGWNPIRDISCCLKLISILKRIKVNYVLAYYCKPVIYGLIASYFANIKNRFALIEGLGFAFTKDPNKLSYKRFILKFILLFLYKISLLFAKKVFFLNKDDREEFVKYSLVRKSKTKITGPIGLDLSNWKYLPYRETGKIMFLFVGRFLKEKGLYEFANSAKKIKTNFPQCEFIILGSPDNNPGGISNETIKSWESEGFIKNPGFCEVLPWLEKTSVFVLPSYREGFPRSTQEAMIVGRPVITTNVPGCRETVIDGKNGFLVPPGDNIALERAMMKFIEDP

SEQ ID NO: 81538 - protein, 269 aa, Unknown
  Bacterial polypetide isolated from the Sargasso Sea
MGGLAGVSICTDEPPKFIIIEYMNGGDSKPKVLVGKGLTFDSGGISIKPAAKMDEMKYDMCGSAVVLGVFKSLALLQPKVNVVGIIPSTENLSGGKAYKPGDVLTAYNGKTIEVLNTDAEGRVILADGLSYASKHYDPEYILDFATLTGAVLIALGHIATGIMGTDNGLMDKIKTSSKTTGEKVWELPLWKEYCKQVESDIADVKNIGAPMQAGTIAGAAFLKEFVGGNIPWAHFDIAGTAWGVKPDSTHPKGSATGWGIRLVLDMLDI

SEQ ID NO: 81539 - protein, 261 aa, Unknown
  Bacterial polypetide isolated from the Sargasso Sea
KYHKLVEETHKDFVKAGAEVIVTTTFTTRKTRLRDNGIEDKFKSLNIKAGEIAQKVKKNYPNILIAGGLPPQNFTYEADERSKDEIYSNFKEQAKLLNPFIDFFYFDVLSSINEIEIAIEAISEFEKPYLIGVHISEGSELPSGEKISDVNKIKKDKLLGIILACVSPENYELNSEELKKLNVPFGFKINGFLTTKPKTGYMTSYKKSKSGNPNEFLGQRRDLNPENLAILASKFKKNGATILGGCCEIGPRHILALSKIK

SEQ ID NO: 81540 - protein, 102 aa, Unknown
  Bacterial polypetide isolated from the Sargasso Sea
MANNAHRPYFMHGLSHWLGLDVHDVGHYDVDRSRLLEPGMVLTVEPGLYIAVDADVPPQYRGIGVRIEDDIVITEDGNENLTAGVVKKADDIEALMAAARRS

SEQ ID NO: 81541 - protein, 136 aa, Unknown
  Bacterial polypetide isolated from the Sargasso Sea
SINTNVNENEKYLPFLGRIAAGNPIEAITRSFEQISVPNYLVNNKDEHFTLEVTGDSMIDAGIYDGDIVVIRKTEIAKSGDIVVALIDQNEVTLKRFRSLKNSIALEPANNNYKIRLFGEDRVKIQGRLVGLIRKF

SEQ ID NO: 81542 - protein, 214 aa, Unknown
  Bacterial polypetide isolated from the Sargasso Sea
MDGGLVDIGHDNQQGGFHFDNESPQQRFWLEPYAIATALVTNAQMEAFIADGGYRNASLWMAEGWGLVQEQGWDAPRYWHPEGLEFTLRGMQPRLPQAPVRHLSWFEAEALARWLEARLPSEAEWECAAKAHRKQHQWFGSLWQWTSSAYGPYRGFRPAPGAVGEYNGKFMSSQMVLRGSSFLTPKGHERLSYRNFFGPHCRWQPAGLRLARDL

SEQ ID NO: 81543 - protein, 343 aa, Unknown
  Bacterial polypetide isolated from the Sargasso Sea
MAAVRQRSIALIAPLEPEDLVLQGMADASPPKWHLGHTTWFFETFVLAPHRAGWQAMPEPWPTLFNSYYEAAGPRHPRPQRGLLSRPTIGEVLHWRERVDAELQQWLHHDSPADEVLDLIELGLQHEQQHQELLLMDLLDGFHRNPMAPAYSLEAPDAPLTEEQQPWLAIDAGLVTIGHDARQNAFHFDNESPQQRCWLEPYAIAAGLVSNATMEAFIDDGGYRTASLWMAEGWALAQEQGWQAPRYWRPDGLEFTLKGQQPRQAQAPVRHLSWFEADALARWLEARLPSEAEWEWAARSHGEGHQWFGSLWQWTTSAYAPYRGFRPAAGAVGEYNGKFMSSQ

SEQ ID NO: 81544 - protein, 125 aa, Unknown
  Bacterial polypetide isolated from the Sargasso Sea
HIVHITNYSGIIANSETQLEKAVQIQPVSVAIQANLQTFQLYKSGIYNDTNCSDELDHGVLLVGYGYDKKYKMKYWIIKNSWGESWGEQGYMRMIKDIDDPSGLCGIAMDPSIPIINHSLSWVEI

SEQ ID NO: 81545 - protein, 287 aa, Unknown
  Bacterial polypetide isolated from the Sargasso Sea
THKLDYISDLGVDAIWLSPIFTSPMKDMGYDVSDYKNIDPLFGNLEDFDELIEKASKKELKVIIDQVLSHSSDQIALFQESRKSQTSSKSDWYVWADPKEDGSPPNNWLSMFGGSAWEWEPLRDQYYLHNFLPSQPDFNFHNLEVQDWLLDSSKFWLERGVKGFRLDTVNYYFHDNKLRDNPPSPINFERPPTNLYYMQNQIHSINQKENLKFIERFRNLLDEYPETTCVGEIGDSHRGLEIMSEYTKGKRLHMAYSFELLGDKFSPEHMIKTLEGFFNLKDDSWPC

SEQ ID NO: 81546 - protein, 190 aa, Unknown
  Bacterial polypetide isolated from the Sargasso Sea
MYYRNGGGRRDFNINPTGSTNSARKGYGSDELGDVHRIAPMVKLLWQLPTQRNIIFELKAAWHDMNYNQSYSGISTADFNADPMQQYVALQFGEYNTEQFTYYGKVRAELNSNISNTFTLYYNYFTRDWFKFDKAGGDAGDEFNSKAYTGSGRNIAKGLATGAVTYVNNDRQYGAYGVMNETDFSFNTNF

SEQ ID NO: 81547 - protein, 555 aa, Unknown
  Bacterial polypetide isolated from the Sargasso Sea
MRQLFPYLFLSLLLSCSQEEICLDADLVLTNSKIYTLDTENNIAESVAIKDDSIIFVGTDEEAKSYKCNAKVINLSNAFIYPGFIDSHVHLKATGYRELSLNLQGSKSLKEMLTSVQIYANSLEAGEWVIGRGWIEKKWPEGRFPTIEELDQISKDKPILLERADGHAVIVNSYALSLANINQATQDPFGGKINRDKEGNPNGVLVDKASLLVENLVPKKTYKQEKLALEAGLDVNARMGWTQVHDAGSPLKDFEILKTIEEEDKLPIRVHLYVENTKDAQTFLDIGPFLDDQYWLTARGIKLVADGAIGSRGAVFFRKYEDYDTQGLLILKKEDTMPTLIKALKKGIQIETHAIGDLGNKIVLDWYEEAFQAIENEDRLINTPRWRIEHSQNVRPEDQIRFRDLEVIASMQPSHAIGDLHFAHKRLGYERLSNAYPWRNLLDLGVVIAGGSDAPVEIGDPRIEFKAAISRKDLDGFHDVGWHLEQAVTREEALKMFTIWASYAVFEEDIKGSIEVGKLADFTIFSKDLMTIPEEEIMSSEVLMTIVDGRVVYSR

SEQ ID NO: 81548 - protein, 138 aa, Unknown
  Bacterial polypetide isolated from the Sargasso Sea
MVTGAGGVFKQILVDSGVGAALGNMLADSGLPIVALAFILAAAVRVIQGSATVAMLTACGLVLPMLEPLGLNGAQLAAVTIAIGGGAIVLSHVNDSGFWLANRYLGLTEKQTLQTWTVMETIIGTTGGVMAMIIYSFL

SEQ ID NO: 81549 - protein, 138 aa, Unknown
  Bacterial polypetide isolated from the Sargasso Sea
MTVHCDVVSAEEKIYSGLVEMLIATGTEGELGIQYGHAPLLSELKPGAVRIIKQGGSEEILYVSGGYLEVQPNLVTLMADTAVRAKDVDEAAALEAQKQAEKALANKTGEFEYSRAAAELAEAAAQLRTIQKLRKHLR

SEQ ID NO: 81550 - protein, 297 aa, Unknown
  Bacterial polypetide isolated from the Sargasso Sea
RRAGNDSDVDGNALKVTGILSGTSGTATAVNASGDTVLTNSYGTLTIRADGSYSFNANGADAQKLAAGQLANVVFTYTATDGTESRTSTLTITITGTNDAPVLQADVGAVNEDAILTVDAASGVLANDSDVDGNALKVTGILSGTSGTATAVNASGDTVLTNSYGTLTIRADGSYSFNANGADAQKLAAGQLANVVFTYTATDGTESRTSTLTITITGTNDAPVLQADVGAVNEDAILTVDAASGVLANDSDVDGNALQVTGILSGTSGTATAVNASGDTVLTNSYGTLTIRADGSY

SEQ ID NO: 81551 - protein, 312 aa, Unknown
  Bacterial polypetide isolated from the Sargasso Sea
DAILTVDAASGVLANDSDVDGNALKVTGILSGTSGTATAVNASGDTVLTNSYGTLTIRADGSYSFNANGADAQKLAAGQLANVVFTYTATDGTESRTSTLTITITGTNDAPVLQADVGAVNEDAILTVDAASGVLANDSDVDGNALQVTGILSGTSGTATAVNASGDTVLTNSYGTLTIRADGSYSFNANGADAQKLAAGQLANVVFTYTATDGTESRTSTLTITITGTNDAPVLQADVGAVNEDAILTVDAASGVLANDSDVDGNALKVTGILSGTSGTATAVNASGDTVLTNSYGTLTIRADGSYSFNAN

SEQ ID NO: 81552 - protein, 322 aa, Unknown
  Bacterial polypetide isolated from the Sargasso Sea
QVTGILSGTSGTATAVNASVDTVLTNSYGTLTIRADGSYSFNANGADAQKLAAGQLANVVFTYTATDGTESRTSTLTITITGTNDAPVLQADVGAVNEDAILTVDAASGVLANDSDVDGNALKVTGILSGTSGTATAVNASGDTVLTNSYGTLTIRADGSYSFNANGADAQKLAAGQLANVVFTYTATDGTESRTSTLTITITGTNDAPVLQADVGAVNEDAILTVDAASGVLANDSDVDGNALKVTGILSGTSGTATAVNASGDTVLTNSYGTLTIRADGSYSFNANGADAQKLAAGQLANVVFTYTATDGTESRTSTLTI

SEQ ID NO: 81553 - protein, 250 aa, Unknown
  Bacterial polypetide isolated from the Sargasso Sea
MDDQKHLIGFENGIYDLNKSVFRGGLPSDYVSLSTQLNLPVPKSMIPIGIEDILEIVKEVENYDELNDGLNDFLEKVFPTDGVREYTMRFLSSCLSGEVREEKFYFWTGSGGNGKSKLVDLIEMALGDYSRSMDVGYLTTKKGSSSSASPELESIKHARFVWMSEPERTDTIYVGKLKLMSGGDKMTTRGLYKETTQFKPQFKIILMCHELPKLGGDDGGIWRRIEVVEYISKFTDDPRPSPANPHQYKA

SEQ ID NO: 81554 - protein, 308 aa, Unknown
  Bacterial polypetide isolated from the Sargasso Sea
TVTEGLGSDGSASFDLSLTSGTSVPNGSVTLVTVRGLPDELAFNKGAKLDNGDWLLVEEDIYEDPKATPLVQSDLKLIAVDDDYSGSFSLSSWAVTTDLLGGTGSSISQSTYLVGTVQAQTDSSNLFAVTSGVTGDEDDGRDEGTSGIPLTIRYALDDSDGSEAIKIQLKVHNDDINSPTSNSDADKLKFTYLDGSTTKTLDVTSASSEGDYKIFELTGLSSFDDPKVTTLNVIPAKDYASSSTNQFLEVHVLAVLTDGTDTKTESVGPIQINVEEKADAVEMGYHSLTNKNDNDVNTTSIFSKTDST

SEQ ID NO: 81555 - protein, 269 aa, Unknown
  Bacterial polypetide isolated from the Sargasso Sea
MEQRRCQSSADYVARRGCMHMVFLGNPGTGKTAVAQLVACVLAEIGVLRKGHLVVAKKADLLGRYSNHVSRNTRAIVESAIGGVLLLDEAYALLQGEAELGREVLNVLVDLCYAHKDDLVVILAGYTHTMADLFEANPGLASRFPHKFAFDDYTVDELYSIANGMLVQASFVCADEEARNALKRLVTPIACETPCGNARSVENRIAAAITAQSSRLRYEQQRRRRQQGGEPPPTEREHSGDERSAADLFELTSADFDEAREVADRASAV

SEQ ID NO: 81556 - protein, 291 aa, Unknown
  Bacterial polypetide isolated from the Sargasso Sea
NNLVELGFAEASDQVEISTITNDAPTVFPLGETIVTWTATDSSGNSASATQTITVVDTTAPVIITPENVTSNATSKLNNIVELEQISVIDSISTVQITNNAPSYYEFGETIVTWTATDSSGNSASATQTITVVDTTAPVITTPQNIIVDAVNTETLLEIGLATIDDIIDDSPIITNDAPTVFPLGETIVTWTATDKFGNTSSSLQTISVQTCGNDPLSYNLIVGSEEDDILIGTALSDLIFANGGDDIISGDKGNDCILAGDGDDIIFGNQGNDHISGQGGNDIIKGQSGE

SEQ ID NO: 81557 - protein, 246 aa, Unknown
  Bacterial polypetide isolated from the Sargasso Sea
TVDAASGVLANDSDVDGNALKVTGILSGTSGTATAVNASGDTVLTNSYGTLTIRADGSYSFNANGADAQKLAAGQLANVVFTYTATDGTESRTSTLTITITGTNDAPVLQADVGAVNEDAILTVDAASGVLANDSDVDGNALKVTGILSGTSGTATAVNASGDTVLTNSYGTLTIRADGSYSFNANGADAQKLAAGQLANVVFTYTATDGTESRTSTLTITITGTNDAPVLQADVGAVNEDAILTV

SEQ ID NO: 81558 - protein, 254 aa, Unknown
  Bacterial polypetide isolated from the Sargasso Sea
LELNSDSTESLTLPPVTPIPNDFQKPTILVPEDVLVQATGPLTDVNIGEALATDESGISSLSNNAPSSFPLGINTIIWTAVDGAGNMAIASQTVTIQDTIPPKISPLEHITLEAKSSERNLVNIGIPEISDEVGVSSITNDAPEVFPLGETIVTWTATDVIGNVSTLSQSIQLIDTIPPRIAFTDNITLEASSLSENTIELIVPEHSDEVGVSSITNDAPEVFPLGETIVTWTATDSSDNVSLMTQTITFVDET

SEQ ID NO: 81559 - protein, 236 aa, Unknown
  Bacterial polypetide isolated from the Sargasso Sea
MQTEITPESEKIEDIKTPLQPVIPIPNDFQKPLILVPEDILVEATGPLTSIDIGEAMATDESGIYSLTNNAPSSFPLGINTIIWTAVDGAGNMAIASQTITIQDSTSPKISAMDDISLEAKSSSQNLVTLTIPEIYDEVGVMSVTNDAPEVFPLGETIVTWTATDVIGNISNLSQSIILVDSTAPRIAFSEDLIIEASSLEQNTLELVTPETSDDVEISSVTNDAPEVFPLGENIV

SEQ ID NO: 81560 - protein, 244 aa, Unknown
  Bacterial polypetide isolated from the Sargasso Sea
DAQKLAAGQLANVVFTYTATDGTESRTSTLTITITGTNDAPVLQADVGAVNEDAILTVDAASGVLANDSDVDGNALQVTGILSGTSGTATAVNASGDTVLTNSYGTLTIRADGSYSFNANGADAQKLAAGQLANVVFTYTATDGTESRTSTLTITITGTNDAPVLQADVGAVNEDAILTVDAASGVLANDSDVDGNALQVTGILSGTSGTATAVNASGDTVLTNSYGTLTIRADGSYSFNANGA

SEQ ID NO: 81561 - protein, 232 aa, Unknown
  Bacterial polypetide isolated from the Sargasso Sea
MEGLVLQVSSMARKKNNESGYTTRRKALKPKTENQTEYIRIISENDVTFCTGPAGTGKTAVAVGLACDYLLDKRVEKIIVTRPVIESGRGLGFLPGTFEEKIHPYLVPVLEEMQYRLNSNRVQAYREEGKIEVVPLEYMRGRNFHNCFMILDEAQNATFEQLKMFITRIGWDSKAVINGDIEQTDLANKDRGGLEEFLERLEGIQGVGIAELTEDDIIRNKIISRILDALYD

SEQ ID NO: 81562 - protein, 284 aa, Unknown
  Bacterial polypetide isolated from the Sargasso Sea
RVACRGPPTSESPGVDGPTSESPAVDERTTESPGVDEPTSESPAEDQLTSESPAVDGPTSESPAVDERTTESPGVDEPTSESPAVDEPTSESPSVDGPTSESPGMDEPTSESPAVDGPTSESPAVDGPTSESPGMDEPTSESPGVDEPTSESPGVDEPTSESPGVDQPTSESPGVDGPTSESPAVDERTTESPGVDGPTSESPGVDEPTSESPGVDEPTSELPGVDGPTSESPGVDEPTSESPGVDEPTSELPGVDEPTSLSPGVDGPTSLSPGVDGPTSESPG

SEQ ID NO: 81563 - protein, 263 aa, Unknown
  Bacterial polypetide isolated from the Sargasso Sea
MQTEITPESEKIEDIKTPLQPVIPIPNDFQKPVILVPEDILVEATGPLTSIDIGEAMATDESGIYSLTNNAPSSFPLGINTIIWTAVDGAGNMAIASQTVTIQDSTSPKISAMDDISLEAKSSSQNLVTLTIPEIYDEVGVMSVTNDAPEVFPLGETIVTWTATDVIGNISNLSQSIILIDSTAPRIAFSEDLIIEASSLEQNTLELVTPETSDDVEISSVTNDAPEVFPLGETIVTWTATDSSGNSSSQSYTITFVDTHYSL

SEQ ID NO: 81564 - protein, 287 aa, Unknown
  Bacterial polypetide isolated from the Sargasso Sea
MITHSVERIGEMSCNPAIGGIGKSHLAKEVDALGGLMARAADKAGIHYRVLNSTKGQAVRATRVQTDRDLYRQAIQELINGQRNLTVIESSVEDVIIEQEEVRSILTDKGEVIVADRLVLTTGTFLGGVMHTGLEQKPGGRVGDPSSIKLAERLRKLPLPVGRLKTGTPPRLHKDTIDWSKLSPQPGDLPTPLLSYVSSNKDRPKQVECFMTRTNKETHKIIRGSLDKSPMYSGIIEGVGPRYCPSIEDKVVRFSERDSHQIFAEPEGLNSDLIYPNGISTSLPKEA

SEQ ID NO: 81565 - protein, 199 aa, Unknown
  Bacterial polypetide isolated from the Sargasso Sea
MSAQEIVTPQPVEAEVIIETRGLSRVYPGVIALDNVDYRVYRNKVNVLIGENGAGKSTMMKMLAGVETPSSGQIILEGSPVSLNSTHQAEKQGISIIFQELNLFPNMNVMDNIFMANEFFQKGRINEKYQYELAKSLLERLELDVDPYTPLGELGIGHQQLVEIARALSKDTRVLIMDEPTSALSQSEVKVLFNVIGQL

SEQ ID NO: 81566 - protein, 203 aa, Unknown
  Bacterial polypetide isolated from the Sargasso Sea
MTNSYGTLTIRADGSYSFNANGADAQKLAAGQLANVVFTYTATDGTESRTSTLTITITGTNDAPVLQADVGAVNEDAILTVDAASGVLANDSDVDGNALQVTGILSGTSGTATAVNASGDTVLTNSYGTLTIRADGSYSFNANGADAQKLAAGQLANVVFTYTATDGTESRTSTLTITITGTNDAPVLQADVGAVNEDAILTV

SEQ ID NO: 81567 - protein, 286 aa, Unknown
  Bacterial polypetide isolated from the Sargasso Sea
HIAFEYTITDGLNSATGGVTGTVTPVNDAAVITGTDTGGVVEDETNPTLTETGTLSVTDVDGADEAKFLAGNGVASTGALGSLTITEGGTWTYNVDNSKVQYLGEGETKVETFVVKSVDGTEHTVTITITGTNDAPVLQADVGAVNEDAILTVDAASGVLANDSDVDGNALKVTGILSGTSGTATAVNASGDTVLTNSYGTLTIRADGSYSFNANGADAQKLAAGQLANVVFTYTATDGTESRTSTLTITITGTNDAPVLQADVGAVNEDAILTVDAASGVLANDS

SEQ ID NO: 81568 - protein, 282 aa, Unknown
  Bacterial polypetide isolated from the Sargasso Sea
MTNSYGTLTIRADGSYSFNANGADAQKLAAGQLANVVFTYTATDGTESRTSTLTITITGTNDAPVLQADVGAVNEDAILTVDAASGVLANDSDVDGNALQVTGILSGTSGTATAVNASGDTVLTNSYGTLTIRADGSYSFNANGADAQKLAAGQLANVVFTYTATDGTESRTSTLTITITGTNDAPVLQADVGAVNEDAILTVDAASGVLANDSDVDGNALKVTGILSGTSGTATAVNASGDTVLTNSYGTLTIRADGSYSFNANGADAQKLAAGQLANVVF

SEQ ID NO: 81569 - protein, 313 aa, Unknown
  Bacterial polypetide isolated from the Sargasso Sea
MYYKSSDGRRLSIVGSGIGLSVSRALVEAMSGHIKLESSVGKGSTFIMSLPAELTSAPAALPQAQYPALTILLVEDVPLNAEIAINLLEQRGHQVILAETGEDALALLETEDDIDLVLLDMQLPDMSGDQVARFIRAEPSLARLPVVVLSANVRKAEQQLKDVRVDGALAKPINTNKLDQILHQLFGAPAPKEITAEKALDQQILDQQTLDDYLQSLGKATMLRSVQLFVQLLPGYINKMVETAVQQDVTEFQEAAHKLKGAAASVGLLWVQHQAKLMEQATELHGMEKQLINFHITIERHLATLQEYIEAWA

SEQ ID NO: 81570 - protein, 318 aa, Unknown
  Bacterial polypetide isolated from the Sargasso Sea
SFASIEVLSNVDLNLYNGEIHALLGENGAGKSTFAKILAGVYRPTRGSIKIKDKAVEIPSPIIAQDLGIALIHQEPISFPHLSVAENLVMGQKDNGLLGWINWAEMIGHAREQMKILGVEIDVNRPMQGLSIADQQMVEIARAIASDARLIIMDEPTAPLTPKEVETLFTIAKRLKEEGRTIIFISHRLEEVRMICDRVTIFRDGERITTETIDKLSDEDVIRLMIGRPLGKYMRKHKTTIGDVALSVNNLTLEGAFNDISFEVRKGEIVGIGGLVGAGRTDVARAVFGIVPAQRGTIKINETPVVISSPADAIQLGV

SEQ ID NO: 81571 - protein, 317 aa, Unknown
  Bacterial polypetide isolated from the Sargasso Sea
  misc_feature (7)..(7): Xaa can be any naturally occurring amino acid
LKVTGIXSGTSGTATAVNASGDTVLTNSYGTLTIRADGSYSFNANGADAQKLAAGQLANVVFTYTATDGTESRTSTLTITITGTNDAPVLQADVGAVNEDAILTVDAASGVLANDSDVDGNALKVTGILSGTSGTATAVNASGDTVLTNSYGTLTIRADGSYSFNANGADAQKLAAGQLANVVFTYTATDGTESRTSTLTITITGTNDAPVLQADVGAVNEDAILTVDAASGVLANDSDVDGNALQVTGILSGTSGTATAVNASGDTVLTNSYGTLTIRADGSYSFNANGADAQKLAAGQLANVVFTYTATDGTESR

SEQ ID NO: 81572 - protein, 278 aa, Unknown
  Bacterial polypetide isolated from the Sargasso Sea
ADAQKLAAGQLANVVFTYTATDGTESRTSTLTITITGTNDAPVLQADVGAVNEDAILTVDAASGVLANDSDVDGNALKVTGILSGTSGTATAVNASGDTVLTNSYGTLTIRADGSYSFNANGADAQKLAAGQLANVVFTYTATDGTESRTSTLTITITGTNDAPVLQADVGAVNEDAILTVDAASGVLANDSDVDGNALKVTGILSGTSGTATAVNASGDTVLTNSYGTLTIRADGSYSFNANGADAQKLAAGQLANVVFTYTATDGTESRTSTLTIT

SEQ ID NO: 81573 - protein, 239 aa, Unknown
  Bacterial polypetide isolated from the Sargasso Sea
KLFNEDETELFEAANKQNAFTFWNHPYRKQEPYGVVKPMDIHKELIRKGLLHGIEVVNRNKLSVDALQIALDYNLTIMGNSDIHGIIDWEYEVNNGGHRPVTLVFTKEKNTNGIREALFNRQTVVWHKNTLIGRKEWLLPLINASLEVVSLEYKTNVSAYKRDLAFVTIKNHSDVRFILKNKSKFDFFTNSDVIEIPANESIELEVITKGKLEMFNLNFEVQNAIFAPRKHPVISLKIK

SEQ ID NO: 81574 - protein, 304 aa, Unknown
  Bacterial polypetide isolated from the Sargasso Sea
QKDLLLPGYVEEWTKAHPGGGDVVGVTGDGTNDAPALRAADVGLAMGSGTDVAKSAADIVILDDKFSSIVGAIKWGRCVYDNIRKFIQFQLTVNVVALLVVFIGAATQKGTPLNAVQMLWVNLIMDTMGALALGTEQPTDELLKRPPYKRDALLISWPMMRNILVQSGFQLIVLFLLLYLGADWYGVEEGTHCQTFGKQHGGSDRWWWDEDGNKNKNGGTVGCPSFLNGELKDGSDVPSDLSCSSKSGSCYDEKYSGFDEVNGYTYEEACLACTEYDYTHFTIIFNAFVFCQVFNEFNARSILN

SEQ ID NO: 81575 - protein, 248 aa, Unknown
  Bacterial polypetide isolated from the Sargasso Sea
TGTNDAPVLQADVGAVNEDAILTVDAASGVLANDSDVDGNALKVTGILSGTSGTATAVNASGDTVLTNSYGTLTIRADGSYSFNANGADAQKLAAGQLANVVFTYTATDGTESRTSTLTITITGTNDAPVLQADVGAVNEDAILTVDAASGVLANDSDVDGNALKVTGILSGTSGTATAVNASGDTVLTNSYGTLTIRADGSYSFNANGADAQKLAAGQLANVVFTYTATDGTKSRTSTLTITITGTN

SEQ ID NO: 81576 - protein, 203 aa, Unknown; identical to SEQ ID NO: 81566
  Bacterial polypetide isolated from the Sargasso Sea

SEQ ID NO: 81577 - protein, 289 aa, Unknown
  Bacterial polypetide isolated from the Sargasso Sea
TVDAASGVLANDSDVDGNALQVTGILSGTSGTATAVNASGDTVLTNSYGTLTIRADGSYSFNANGADAQKLAAGQLANVVFTYTATDGTESRTSTLTITITGTNDAPVLQADVGAVNEDAILTVDAASGVLANDSDVDGNALKVTGILSGTSGTATAVNASGDTVLTNSYGTLTIRADGSYSFNANGADAQKLAAGQLANVVFTYTATDGTESRTSTLTITITGTNDAPVLQADVGAVNEDAILTVDAASGVLANDSDVDGNALKVTGILSGTSGTATAVNASGDTVLT

SEQ ID NO: 81578 - protein, 216 aa, Unknown
  Bacterial polypetide isolated from the Sargasso Sea
MTNSYGTLTIRADGSYSFNANGADAQKLAAGQLANVVFTYTATDGTESRTSTLTITITGTNDAPVLQADVGAVNEDAILTVDAASGVLANDSDVDGNALKVTGILSGTSGTATAVNASGDTVLTNSYGTLTIRADGSYSFNANGADAQKLAAGQLANVVFTYTATDGTESRTSTLTITITGTNDAPVLQADVGAVNEDAILTVDAASGVLANDSDV

SEQ ID NO: 81579 - protein, 318 aa, Unknown
  Bacterial polypetide isolated from the Sargasso Sea
QISNELSIIDILVNGLDSPSISYQKQSIEIISSNNSCDFEISLEDSEIYKIHHIDTLDYKKYTFRNPIIYKDQESFRLKISTIQSNSCPSFQHYVNLTVDKYPTKHSLIPANISELKSNFFEVSDIGFDGIIINETFSATECYPTPNDCEAYENQVFGQDAHNIIQGDFNGDGYEDFAVAWALFPHTIDPDQKVNAPINIYLNNGKGRFEEDLNIYSDNNQPTHPFAYRMIAEDLNDDGIDDIFAGSMGIQFRSEDYSENYINPYPHLLLLSNPEGKFADASNQIEDKNDGKGQLLYFAHDASAGDPDGDGDIDIYAC

SEQ ID NO: 81580 - protein, 519 aa, Unknown
  Bacterial polypetide isolated from the Sargasso Sea
MSEDATSPLSSRSGTPQPFLEVVGVHKRFTGVHALRGVSLSFERGQIYHLLGENGCGKSTLIKIISGAQPPDEGELVIEGVRHARLSALESLAAGIETVYQDLSLLPNMNVAENVALTAELATHAGRLARTFDRRALARTAARALESVGLPGDAQFQATLIEQLPLATRQLVAIARAIASEAKFVIMDEPTTSLTQKEVDNLIAVLANLRAQGVTVLFVSHKLDECYAIGGEVIVLRDGQKMAQGPIAQFTKAQISELMTGRHLSNERYREGAFSQEVVLDVRGFTGIGQFSNVSFALHGGEILGITGLLDSGRNELARALAGVAPAQSGQVMLDGKAISLRTPSHAKHHRIGYVPEDRLNEGLFLDKPIRDNVITAMISSLRDRFGQIDRTRAQALAEQTVKDLQIATPGVDKPVQSLSGGNQQRVLIGRWLAIDPRVLILHGPTVGVDVGSKDIIYRIMQRLSQRGIGIILISDDLPELLQNCDRILMMKKGRVASEYQADMLSEADLYRALLSEAA

SEQ ID NO: 81581 - protein, 659 aa, Unknown
  Bacterial polypetide isolated from the Sargasso Sea
VTDTIVKDANAPAVSSVGIADGRYKAGETVSFTLTFTEALVLSSANSNYSLTIDVGGTTRQAVLTGHAGAVLTFSYTVQAGEDTTGTGVSVASDGLSLLNGATIKDAGNNDATLNFTGVANSAAQVDTTAPVIAVVTDPAQAVFVNAANYQIKGTHSEIGLTINLYTDTGNDGTADGGVLVSAIVDTAGNWSLLQPLTADSAHNYVVVAEDAAGNISAAVDVPTITEDSIAPGAAVITSPAAALAVNTVNQVISGTHAEDGVTVELFADTDNDGVADNSTVLANAVVGSAATGTWSLTASLTQNVANNFVVVVKDKAGNISTVTDVPTITQDSVAPVVTVTTLATADSTPALAGTVNDNTATLSLVVNGQTYVPTNSGNGNWALADNQISALTDGVYDVSVSATDAQGNIGTDASVNELTIDLLPPSGYSVVIQQSRIDAANQNAMSFVFAGAEVGSTYTYVISDGTNSVTGTAVVTAANQQIGSINVTGLAEGTLQLSVSLTDTVGNTGAAATATVVKLYNATPVISGTAATSVNEDSSYSFTPAATDADTGTTFTFSISNKPVWATFNTATGALSGTPGNEHVGITSGIVISVSDGTATASLPAFAITVVNTNDAPVVSSAAVTVATQGAAYSYSFAGTDVDVGDTLTRSVLTKPAW

SEQ ID NO: 81582 - protein, 584 aa, Unknown
  Bacterial polypetide isolated from the Sargasso Sea
VLWPMVLGALLFSASITPAFLLSGFYLVRHLDEALFYLQDSIRQEKLLNQNMQETIRQLNFEIEERKKAFQAKRRAVDELRREITERRKTQQELEEQSLLIRSIVDSSPDLFYYRDETGRFVSCNKMFEVIMGKSAKELIGHYPAELYDAESTPIAILTDQEISASREELTLDVDYQTPDGRMLWFEMRKVPFFDKQGRYIGLLGFGRDITSRKLAEQALEKAYQDKGKFIATLSHELRTPLNGIVGLTRRLLESPLSTEQRSWSNTIFSSAETLGNIFNDIIDLDKIDRQDLDIVYQSVQLCDFVHDICNFAHLICQQKGLTFIEPEAVPDQLYVRLDPTRVRQVLWNLINNAVKFTARGSVQLGVSLSTDNPPELSFSVTDTGIGIIEAEQQRIFDMYYKSSDGRRLSIVGSGIGLSVSRALVEAMSGHIKLESTVGKGSIFIVSLPAQLTSAPVAVPQVVYPALTVLLVEDVPLNAEIAINLLEQRGHQVILAETGEDALALLDTEDDIDLVLLDMQLPDMSGDQVARFIRTESALARLPIVVLSANVRKAEQQLRDVRVDGALAKPIIPTCWIRFYTSCS

SEQ ID NO: 81583 - protein, 488 aa, Unknown
  Bacterial polypetide isolated from the Sargasso Sea
DIGMITQNPRYSLHPMLRVGDQISNVFRAHNKVSSKEAWSHAVDMLKLVGINDPERRVKAYAHELSSGMAQRVLIAMALSSSPKLLLADEPTSGLDVTIQAQFLDQMWDACRQTKSAVLLVTQDLGIVANYCDRVLIMYEGQIVEDSDVFTFFKSPKHDYSKRILQLQREAQEAGDAVATNIDQKSDALMKVNSLIKEFPIRGSKSRVHAVDNATFELRSGECLGLVGESGSGKTTIGRCVLRLEQPTSGEIIFRDERLDTLSLKDFQEKRSNLQIVFQDPLDSLNPRWTVEQVLKEPLDLHTKMTEQEKMSRISELLNLVGLEASMRQALPREMSAGRQQRTSIARAIASNPDFIVLDEPTSALTPETTAEIIRLLMDLSTSLGISYLFISHDLTTIKYICHRVVVLYLGQIVEVGTKEQVFNDPKHPYSRALLAAHLFPDTSDRRVDRDVRESLEGEIPSPVTENLPKGCYLYGRCSHQLDQCRDM

SEQ ID NO: 81584 - protein, 377 aa, Unknown
  Bacterial polypetide isolated from the Sargasso Sea
MRYIYIFFTLLISSCGSGGTSQISNELSIIDIIVNGLVSPSISYQKQSIEIISSNNSCNFEISLEDSDIYNIHHINTLDYKKYTFRNPIIYKDQESFRLKISTIQSNSCPSFQHYVNLTVDKYPTKYSLIPENISELKSNFFEVSDIGFDGIIINETFSATECYPTPNDCETYENQVFGQDAHNIIQGDFNGDGYEDFAVAWALFPHTIDPGQKVNAPINIYLNNGKGRFEEDLNIYSDNNQPTHPFAYRMIAEDLNDDGIDDIFAGSMGIQFRSEDYSENYINPYPHLLLLSNPHGKFDDASNQIEDKNDGKGQLCNFAHDASAGDPDGDGDIDIYACNILNINDGLGNFKIHEYINLDWQRENQFGNPMTSLWQI

SEQ ID NO: 81585 - protein, 317 aa, Unknown
  Bacterial polypetide isolated from the Sargasso Sea
EFGFAEASDQVEISTITNDAPTVFPLGETIVTWTATDFSGNSASATQTITVVDTTAPVVENLDSLTFEATAQNANLVEIPLITASDNTEIISITNDAPVLFEFGTTIINWSVVDIIGNQSVVEQQIEIIDTTLPTITSPVDVEVEATSMENNLVEFGFAEASDQVEISTITNDAPTVFPLGETIVTWTATDSSGNSASATQTITVVDTTAPVIITPENVTSNATSKLNNIVELEQISVIDSISTVQITNNAPSYYEFGETIVTWTATDSSGNSASATQTITVVDTTAPVITTPQNIIVDAVNTETLLEIGLATIDDI

SEQ ID NO: 81586 - protein, 236 aa, Unknown
  Bacterial polypetide isolated from the Sargasso Sea
WTATDSSGNTSSITQTIIFVDETSPLITTNDQILEATISGGTDLTIEMPIVDDIQNTNITNDAPEVFPLGETIVTWTATDSSGNSASATQTVTVVDTTSPVLIAPESMEIEARGLVTNIEDFGNIVAEDISGIAAITNDAPEVFPLGETIVTWTATDDYGNSVSNTQSIMIIDTTSPSISAPSDLQIEANHIEQNIVDLTGVRVSDQVEVSSITNDAPEVFPLGETIVTWTATDSS

SEQ ID NO: 81587 - protein, 250 aa, Unknown
  Bacterial polypetide isolated from the Sargasso Sea
RPLTVTDGQVTVTQTFTITVANTNDAPTIDSTAVTSVDEDSAYSYTATGADVDSGDTLTLSASAPSWLTFTPSTGVLAGTPTNDEVGSHSVTITVTDAAGATGTQTFSITVANTNDAPSITSTAPTSVDEDSAYSYTVTTSDVDVGDSVSLTGTTIPSWMAFDAETGVLSGTPSNSDVGSHSVTITAEDDAGATATDTFSITVANTNDAPTIDSTAVTSVDEDSAYSYTATGADVDSGDTLTLSASAPSW

SEQ ID NO: 81588 - protein, 293 aa, Unknown
  Bacterial polypetide isolated from the Sargasso Sea
ATQTVTVVDTTSPTIEQPENVIFEAENQSNNILELPMIVLFDNTEIISITNDAPSSFEFGKTTVTWTVVDIVGNTSTMSQEVHIIDTTSPTISAPSNVQVEATSMENTIVDYDFAQVSDQVEVSSITNDAPEVFPLGETIVTWTATDSSGNSASATQTVTVVDTTSPTIEQPENVIFNATSKSKNVIDLETVSALDSISDVKINNNAPSYYSFGETIVTWTATDSSGNSASATQTVTVVDTTGPTLHAPENITIDTVTINTMLEIGLASVSDIIDDSPSITNDAPEVFPLGET

SEQ ID NO: 81589 - protein, 305 aa, Unknown
  Bacterial polypetide isolated from the Sargasso Sea
IVTWTATDSSGNSASTTQTITVVDTTVPIITTPSDIEIEIIDNSGMKLDIGAATSDDTVDLQPLITNDAPEVFPLGETIVTWTATDSSGNSASATQTITVVDTTAPVLISPESVTREAINNEANPVRIGMSEAIDIVEVSSITNDAPEVFPLGETIVTWTATDSSGNSASATQTITVVDTTLPTIFTPSNVQVEATSMESTIVDYGFAQASDQIEVSSITNDAPEVFPLGETIVTWTATDSSGNSASATQTITVVDTTAPVIEQPENVISEAENLSNNTVELQMIVSSDNTEIISITNDAPSFLN

SEQ ID NO: 81590 - protein, 315 aa, Unknown
  Bacterial polypetide isolated from the Sargasso Sea
PWTITITGTNDAPVLQADVGAVNEDAILTVDAASGVLANDSDVDGNALQVTGILSGTSGTATAVNASGDTVLTNSYGTLTIRADGSYSFNANGADAQKLAAGQLANVVFTYTATDGTESRTSTLTITITGTNDAPVLQADVGAVNEDAILTVDAASGVLANDSDVDGNALKVTGILSGTSGTATAVNASGDTVLTNSYGTLTIRADGSYSFNANGADAQKLAAGQLANVVFTYTATDGTESRTSTLTITITGTNDAPVLQADVGAVNEDAILTVDAASGVLANDSDVDGNALKVTGILSGTSGTATAVNASGDTV

SEQ ID NO: 81591 - protein, 306 aa, Unknown
  Bacterial polypetide isolated from the Sargasso Sea
GLTAATASCHGADAQKLAAGQLANVVFTYTATDGTESRTSTLTITITGTNDAPVLQADVGAVNEDAILTVDAASGVLANDSDVDGNALKVTGILSGTSGTATAVNASGDTVLTNSYGTLTIRADGSYSFNANGADAQKLAAGQLANVVFTYTATDGTESRTSTLTITITGTNDAPVLQADVGAVNEDAILTVDAASGVLANDSDVDGNALKVTGILSGTSGTATAVNASGDTVLTNSYGTLTIRADGSYSFNANGADAQKLAAGQLANVVFTYTATDGTESRTSTLTITITGTNDAPVLQADVGAV

SEQ ID NO: 81592 - protein, 247 aa, Unknown
  Bacterial polypetide isolated from the Sargasso Sea
MTIVGNQSTLLQEVEVVDTTSPTITAPSNVQVEAISMENTIVDYGFAQASDQVEVSSITNDAPEVFPLGETIVTWTATDSSGNSASTTQTITVVDTTSPIIEQPENVIFNATSKSKNVIDLQSLSATDSISDLKITNDAPSYYSFGETIVTWTATDSSGNSASTTQTITVVDTTAPKLNAPENITIDTESIDTILEIGLASVSDIIDDSPSITNDAPEVFPLGETIVTWTATDKFGNISSSTQIISV

SEQ ID NO: 81593 - protein, 288 aa, Unknown
  Bacterial polypetide isolated from the Sargasso Sea
FPVSRDIQNVQLTNDAPEVFPLGETIVTWTATDTSGNSASETQIISVVDTSLPNIISPNDVQVEATSIDANNVEFGIAEASDLVEISTITNDAPEVFPLGETIVTWTATDTSGNSASATQIISVVDTTAPVIEQIESLNFEAISQSVNILELSMIDVYDNTKIISITNDAPESFEFGNTVVTWTVSDISGNMSTSKQEIHVIDTTIPIITVPNDVQVEATSIDANNVEFGIAEASDLVEISTITNDAPEVFPLGETIVTWAATDTSGNSAYSTQIISVVDTTAPVIEQ

SEQ ID NO: 81594 - protein, 274 aa, Unknown
  Bacterial polypetide isolated from the Sargasso Sea
MKNAEAAIEAFARRGLRTLSIAYTDINKAPSALGDVAPERDLTLLGIMGIKDPIRPETAEAVRLLRGAGVTVRMVTGDNAITAEAIAREAGILEDGDDGLVLEGPVFRKMSDDEKEAIAMKIRVLARSSPSDKLVLCNLQRKLGEVVAVTGDGTNDAPALKDADVGFALGIAGTEIAKEACDIVILDDNIKSMAKAVLWGRNVYQSIRKFLQFQLVVNVVAVSLNLIAAIGGIDELPLAAVPLLWVNMIMDSMGALALATEPPSPQLMKRKPFG

SEQ ID NO: 81595 - protein, 302 aa, Unknown
  Bacterial polypetide isolated from the Sargasso Sea
QTITVVDTTSPVLIAPESIIQEAINHEANPVRIGISEYTDIMEVTSVTNDAPEVFPLGETIVTWTATDFSGNSASATQSITIIDTTLPTITSPVDVEVEAKSMENNLVEFGFAEASDQVEISTITNDAPTVFPLGETIVTWTATDSSGNSASATQTITVVDTTAPVVENLDSLTFEATAQNTNLVEIPLITASDNTEIISITNDAPVLFEFGTTIINWSVVDIIGNQSVVEQQIDIIDTTLPTITSPVDVEVEAKSMENNLVEFGFAEASDQVEISTITNDAPTVFPLGETIVTWTATDSSG

SEQ ID NO: 81596 - protein, 279 aa, Unknown
  Bacterial polypetide isolated from the Sargasso Sea
ETIVTWTATDDYGNSISNTQSITVLDTISPVIMAPSDFQLEASHIENNIIDLIGVRASDDVEVISITNDAPEVFPLGETIVTWTATDSSGNSASDSQQISVIDTTTPSIIAPNDIQVEIYDKLGVEIDTGIPTSDDVIDSQPTVTNDAPEVFPLGETIVIWTATDFSGNSASATQTITVVDTTSPVLIAPESIIQEAINHEANPVRIGISEYSDIMEVTSITNDAPEVFPLGETIVIWTATDSSGNSASATQSITIIDTTLPTITSPVDVEVEATSMEN

SEQ ID NO: 81597 - protein, 448 aa, Unknown
  Bacterial polypetide isolated from the Sargasso Sea
MTATDSSGNSASATQTITVVDTTAPVVENLDSLTFEATAQNANLVEIPLITASDNTEIISITNDAPVLFEFGTTIINWSVVDIIGNQSVVEQQIDIIDTTLPTITSPVDVEVEATSMENNLVEFGFAEASDQVEISTITNDAPTVFPLGETIVTWTATDSSGNSASATQTITVVDTTAPVIITPENVTSNATSKLNNIVELEQISVTDSISTVQITNNAPSYYEFGETIVTWTATDSSGNSASATQTITVVDTTAPVITIPQNIIVDAVNTETLLEIGLATIDDIIDDSPIITNDAPTVFPLGETIVTWTATDKFGNTSSSLQTISVQTCGNDPLSYNLIVGSEEDDILIGTALSDLIFANGGDDIISGDKGNDCILAGDGDDIIFGNQGNDHISGQGGNDIIKGQSGEDFVFGGLGLDVIDGGDDIDTCKVIDEQNYDIVIKCESNE

SEQ ID NO: 81598 - protein, 421 aa, Unknown
  Bacterial polypetide isolated from the Sargasso Sea
FAEASDQVEVISITNDAPTTFPLGETIVTWTATDSSGNSSSATQIITVVDTTAPIVENLDSLTFEATTQNDNLIEIPLIIASDNTEIISITNDAPISFEFGTTIINWSITDITGNQSVVEQQIDIIDTTLPTIMTPADVEVEATSMENNLVEFGFAEASDQVEVISITNDAPTTFPLGETIVTWTATDSSGNSSSATQIITVVDTTAPVIVTPENVLSNATSKLNNIVELEQISATDSISTVQITNNAPSYYEFGETIVTWTATDSSGNSSSATQTITVVDTTAPVITPPQNIIVDAENTETFLEIGSASITDIIDDNPIITNDAPEVFPLGETIVTWTATDRFGNSSFSLQTISVQTCGNDPLSYNLIVGSEQDDILIGTTLSDLIFGNGGDDIISGDKGNDCIIAGDGDDIILEIKEMT

SEQ ID NO: 81599 - protein, 546 aa, Unknown
  Bacterial polypetide isolated from the Sargasso Sea
NDSVGGYPIYPEGIIFDEENNFYIVDYRNNRIIHYNESGVALSMFGQMGNDNGHFKFPKDVAISNDGYLFVTDTQGHRIQKFSTPLVQSSIIIEEEQKLQTEISPESEKIEDTKTPLQPIIPIPNDFQKPVIMVPEDILVEATGPLTSINIGEAMATDESGIYSLTNNAPSSFPLGINTIIWTAVDGAGNMAIASQTVTIQDSTPPKISSIDDISLEAKSTSQNIVTLTIPEISDEVGVMTVTNDAPEVFPLGETIVTWTATDVIGNISNLSQSIILVDSTAPRIAFSENLVVEASSLEQNTIELIIPETSDDVEVISITNDAPEVFPLGETIVTWTATDSSGNSSYQSYTITFIDTVIPEILISDQTFEATIFGGTNIPLEFPEIIDIQNTELTNDAPEVFPLGETIVTWTATDSSGNSSSATQTITVVDTTSPVLIAPEDLIIEAESTLTQIENLGEFTAEDISGITTVTNDAPEVFPLGETIVTWTATDDYGNSISNTQSITVLDTISPVIMAPSSFEIEASHIENNIIDLIGVRASDDVEVI

SEQ ID NO: 81600 - protein, 340 aa, Unknown
  Bacterial polypetide isolated from the Sargasso Sea
MKQLSFGGTNIPLEFPEIIDIQNTELTNDAPEVFPLGETIVTWTATDSSGNSASTTQTITVVDTTSPVLIAPENLIIEAESTFTQIENLGEFVAEDISGITTVTNDAPEVFPLGETIVTWTATDDYGNSISNTQSITVLDTISPVIMAPSDFQLEASHIENNIIDLIGVRASDDVEVISITNDAPEVFPLGETIVTWTATDSSGNSASDSQQISVIDTTIPSIIVPNDIQVEIYDKLGVEIDIGIPTSDDVIDSQPTVTNDAPEVFPLGETIVTWTATDFSGNSASATQTITVVDTTSPVLIAPESIIQEAINHEANPVRIGISEYTDIMEVTSITNDAP

SEQ ID NO: 81601 - protein, 455 aa, Unknown
  Bacterial polypetide isolated from the Sargasso Sea
EKIEDIKTPLQPVIPIPNDFQKPVILVPEDILVEATGPLTSIDIGEAMATDESGIYSLTNNAPSSFPLGINTIIWTAVDGAGNMAIASQTVTIQDSTSPKISAMDDISLEAKSSSQNLVTLTIPEIYDEVGVMSVTNDAPEVFPLGETIVTWTATDVIGNISNLSQSIILVDSTAPRIAFSEDLIIEASSLEQNTLELVTPETSDDVEISSVTNDAPEVFPLGETIVTWTATDSSGNSSSQSYTITFVDTIIPEILISDETFEATIFGGTNIPLEFPEIIDIQNTELTNDAPEVFPLGETIVTWTATDSSGNSASTTQTITVVDTTSPVLIAPENLIIEAESTFTQIENLGEFVAEDISGITTVTNDAPEVFPLGETIVTWTATDDYGNSISNTQSITVLDTISPVIMAPSDLQLEASHIENNIIDLIGVRASDDVEVISITNDAPEVFPLGETI

SEQ ID NO: 81602 - protein, 218 aa, Unknown
  Bacterial polypetide isolated from the Sargasso Sea
RNSSEIHAVVITGAGDDWFSAGLMNPAIRAAMTKDEVIAYVVDGNRIFDELEALPQITIAAINGKIVAGASELALACDIRIAGDHSSLMLPEAKWGGFPGAGAPHRLPMAVGHSHALELIATGKEIDAAEMLRIGFVNHLHPQGKVHAAADALARTIAANGPLATRGAKRIARARQEPGFRAAREMSDTLRHALEWSHDVDEGIAAAKEGRPAKFTGR

SEQ ID NO: 81603 - protein, 55 aa, Unknown
  Bacterial polypetide isolated from the Sargasso Sea
MSNKNPGNFANDREKASEAGKKGGQNSGGNFANDREKASEAGRKGGQNSHGGGRA

SEQ ID NO: 81604 - protein, 190 aa, Unknown
  Bacterial polypetide isolated from the Sargasso Sea
MIKDFILPDIGEGVVECELVEWLVQEGDTIAEDQPIADVMTDKALVQIPAPFAGVVTKLYYAKGDIAKVHAPLYAVQIEADDAALVAASQPEVQASTQASANQACVAGTSVEEFLLPDIGEGIVECELVEWLVQEGDTVVEDQPIADVMTDKALVQIPAIKAGKIVKLHYRKGQLAKVHAPLFAIEVEGG

SEQ ID NO: 81605 - protein, 225 aa, Unknown
  Bacterial polypetide isolated from the Sargasso Sea
SNFKEQNSFIPIIIISGHGTVDMAVNAIKKGAYDFIEKPFNSDKLTITCKRAIESALLIKENTKLKSFINPKTPLIGKSNFIQEIKKNITKISQSNSRILISGMVGVGKKLIAQKIHQNSKFNKSLCTLIDLKNTEEKDLELFFSDSIKQISNNIIAQSNNTTLILENVDYLNINYQKKLLFLLENNNLFKNNNIHLNQKIISTTSKNLLEEVNKGNFIKILYDR

SEQ ID NO: 81606 - protein, 286 aa, Unknown
  Bacterial polypetide isolated from the Sargasso Sea
LIIPNDSQQYTPDAARNRAFVDKIEPGSTAKIFSMLYALENTEYKDDNSISIGDGSLTVDKHTIHDVHAKDNKILFSDILKLSSNVAISKLALDFPITSYINKLNDFGLGESTAIGFPGEVFGGIGHYNIKQGSFDQAALSYGYGMSLSVLQLGRAYLRIANNDSMKQVFLINDNHHDSNEHHPLVSDAAIKRLVAMMEKVTQKGGTGYRANIGKIKVAGKTGTAYISNSNGYSENFISSFAGFAPSLDPHYVVVVVLWEPNYANHFGGKSAAPIFANVMKHLLVF

SEQ ID NO: 81607 - protein, 242 aa, Unknown
  Bacterial polypetide isolated from the Sargasso Sea
DGIELLSNFKEQNPLIPIIIISGHGTVDMAVNAIKKGAYDFIEKPFNSDKLTITCKRAIESALLIKENTKLKSLVNPKTPLIGKSNFIQEIKKNITKISQSNSRILISGMVGVGKKLLAQNIHQNSKFNKSLCTFIDLKNTEEKDIELFFSDSMNQISNNIIAQSNNTTLILENIDYLNINYQKKLLFLLENNNLFKNNNIQLNQKIISTTTKNLLEEVNKGNFIKILYDRLSTIHIDIPPN

SEQ ID NO: 81608 - protein, 246 aa, Unknown
  Bacterial polypetide isolated from the Sargasso Sea
KVLSNVNIGLALVLLAFVVLAGPTYNIIMSYGENLIYYFQDIIRLSSWNRPDDLQWYRDWTIFYWAWFISWSPFVGMFIARISKGRTIREFLSVVMFVPLLFCTIWFTSFGETAIFQFQEGIGSLSEPVSDISLVLFYMLDNLLFPVVSSIFSLFMLVLFFVTSSDSGSLVIDTITSGGKDNTRKIQRVMWAIIQGLVATVLLVAGGSYALSAIQSGSISMALPFVFILIAATISLLRGVYVELYN

SEQ ID NO: 81609 - protein, 94 aa, Unknown
  Bacterial polypetide isolated from the Sargasso Sea
MNSPHSSPTTPRFATHCTAPMKITRLTTFIVPPRWCFLKIETDEGITGWGEPVLEGRAHTVAAAVDELADYLVGKDPRHIEEHWTVLYRGGFYR

SEQ ID NO: 81610 - protein, 652 aa, Unknown
  Bacterial polypetide isolated from the Sargasso Sea
IRQFYITAIRTGRESATSGTTAGTIGQALNGTYGELTVAADGSYSYAATRSGADALAAGVSAIDYFTYTVRDHTSSPNDTDTAELAITVTGVGPLGVNDTASVDENASLNANNASSTGVLANDDDNAAYDSESLAVTNISSDSTGNSGNATQGVLGTYGTLTVAADGTYTYTANTAAAEALDAGDSETDVFTYTVKDDDDVNSSTATLTITVNGVDDNPVGNNDAGAINEDKTLTVSTGSGVLSNDTDADASSSLTVSAISGGTVGQAVNGTYGVLTLSSDGSYTYVANGRSEDGLAADATATDTFTYTVSDGAGTTDTADLVVTVTGVGPQAVADTGSVNEDATLTVNEASGVISNDDDNASYDVESLAITGITHGVTGNSGNAAQAVTGTYGELTMAADGSYEYVANQSAADALDPGDQVTDVFTYTLKDDADKNASTATLTITVTGINDDITAVNDTDAVNAGASISRGTSDAQELDQDDTDSDADDVPGSLTITAIRTGQKTGSGDTKTLGQEFTTTYGTVTINADGSYSYAANRPDALSLANEATVVDYFTYTVTDQAGDTDTGQLAITVTGTTVVPPTGNNDTGYILEDSQLQVTDGTSAVTGTDSNNNNESGDHSGDVLLNDTDPDNDPLTVSAIAGGTLGNAVS

SEQ ID NO: 81611 - protein, 458 aa, Unknown
  Bacterial polypetide isolated from the Sargasso Sea
MNEEHGLRRGLTNYGDRDFAAYLRRSFAHSMGLSREMLEKAIIGIAMTPSGFNNCHQMMPDLVEAVSRGVLAAGALPRPFPTTSLGEVFLSPTSMVYRNLMSMDTEEMVRAQPMDAVVLIGGCDKTVPAQLMGAASADLPSIQLVTGPMSTGHHRGERLGACTDCRRFWSRYRAGEINKDEIDRVEIRLASTAGTCAVMGTASTMAIIAEVLGMSLPGTAAIPAVAADRLVAAEESGKAAVSMLNNPIKPSEIITEKSVENALRVLMAVSGSTNAVLHLAAVAGRRGIRISESRLNDISEETPVLVDLKPVGKGYMEDFHAAGGVGGVLRELKSLLHLDTMNILGQTLEDRLSEPLEWVDRKVIRSFDDPISPQGGLITLSGNIAPQGAIFKRAAATPSLFESEGRAVVFENLEDLANRIDDPELDITEGDIMVLKNAGPVAAGMPEAGYLPIPKKLA

SEQ ID NO: 81612 - protein, 531 aa, Unknown
  Bacterial polypetide isolated from the Sargasso Sea
MIKDFILPDIGEGVVECELVEWLVQEGDTIAEDQPIADVMTDKALVQIPAPFAGVVTKLYYAKGDIAKVHAPLYAVQIESDEAAPVAASQPEAHAATQTSVSQACVAGTSVEEFLLPDIGEGIVECELVEWLVQEGDTVVEDQPIADVMTDKALVQIPAIKTGKIVKLHYRKGQLAKVHAPLFAIEVEGGVSAPVSHVQEASAAAVNTAVPAACAAVSSEPARQGKALASPAVRRMARALDIDLSRVPGSGKHGRVYKEDITRFQAQGGAVPAVAPVAAAPTVAQSTVSTAVASAARGDIVEPIRGVKAVMAKMMVESVSTIPHFTYCEEFDLTDLVALRESMKAKYSSDEVKLTMMPFFMKAMSLALTQFPVLNSQVNADCTEITYKARHNIGMAVDSKVGLLVPNVKDVQDKSILEVAAEITRLTNAARSGRVAPADLKEGTISISNIGALGGTVATPIINKPEVAIVALGKLQTLPRFNEKGEVEARQIMQVSWSGDHRVIDGGTIARFCNLWKQYLEQPQDMLLAMR

SEQ ID NO: 81613 - protein, 531 aa, Unknown
  Bacterial polypetide isolated from the Sargasso Sea
MIKDFILPDIGEGVVECELVEWLVQEGDTIVEDQPIADVMTDKALVQIPAPFAGVVTKLYYAKGDIAKVHAPLYAVQVESDEAAPASQPEVHTATQTSVSQACVAGTSVEEFLLPDIGEGIVECELVEWLVQEGDTVVEDQPIADVMTDKALVQIPAIKAGKIVKLHYRKGQLAKVHAPLFAIEVEGSVSAPVSHAQEASAAVNTAAPAACAAVSSEPARQGKALASPAVRRMARALDIDLSRVPGSGKHGRVYKEDITRFQAQGGAVSAVAPVAVAPTQSGVTQSTVSNVVASSARGDIVEPIRGVKAVMAKMMVESVSTIPHFTYCEEFDLTDLVALRESMKAKYSSDEVKLTMMPFFMKAMSLALTQFPVLNSQVNADCTEITYKARHNIGMAVDSKVGLLVPNVKDVQDKSILEVAAEITRLTTAARSGRVAPADLKEGTISISNIGALGGTVATPIINKPEVAIVALGKLQTLPRFNAKGEVEARQIMQVSWSGDHRVIDGGTIARFCNLWKQYLEQPQDMLLAMR

SEQ ID NO: 81614 - protein, 225 aa, Unknown
  Bacterial polypetide isolated from the Sargasso Sea
MILACTPTKIHVILECKQDFDVSDSKLKREFEEFGPIKNARVVKDADGKSRGYGFVEFNSESDMKEAYNRADGMKINGRRVVVDVERGRTVKNWKPRRLGGGLGGTRKGGKDVNITHSGRADNPGGGYRGGGGDRGGGYRGGGDRGGYGGGSYRDNDRPSYRDGGYRGGGYRGGGGRDYDSRDRDRDRDDRGGGRYRDYDRPSDDDRGRDRYDRHDRYDDRYDRY

SEQ ID NO: 81615 - protein, 197 aa, Unknown
  Bacterial polypetide isolated from the Sargasso Sea
LPFRAEQEDVIELFAQFGEVANCALPLERDTGRKRGFAFVEMADEAVEDAAIEGLQGAELMGRPLRINKAEPRGSAPRGGGGGYRGGGGGYGGGGGRDGGGGYGGGGGGYRGGGGGYGGGGGRDGGGGYGGGGYRGGGDAGDRPSGARGWEDRSYGARDSGGEGGGGYDDGRSRRRRGSSGGGGGGDDYSGYGGAEG

SEQ ID NO: 81616 - protein, 135 aa, Unknown
  Bacterial polypetide isolated from the Sargasso Sea
MKDDQYSLLKEKIKSNDFNSVFVLLDENTHKYCLEIFINKSEIDNYKKIVIKSGEENKNIDTCITIWKELNSQKADRKSLIINLGGGVLTDIGGFVASTYLRGIEFINVPTTLLGMVDAAHGGKTGIDFLSLKNQ

SEQ ID NO: 81617 - protein, 283 aa, Unknown
  Bacterial polypetide isolated from the Sargasso Sea
SSTTTYTVTATKTSTGCTSTDDVKVTVNKTAPTASITNNTGTSEINCNTKSISVTAKGGGTYKWSNSLGTSAGATISAAGTYTVTVTSSSTGCTDTESIKITKDVSAPTADAGSDFTKTCTSNANGKAIGATAVSGETYSWSPTTGLSSSTAANPTADPSSTTTYTVTATKTSTGCTSTDDVKVTVNKTAPTASITNNTGTSELNCNTKSISVTAKGGGTYKWSNSLGTSAGATISAAGTYTVTVTSSSTGCTDSESIKITKDVSAPTADAGSDFTKTCTSNA

SEQ ID NO: 81618 - protein, 253 aa, Unknown
  Bacterial polypetide isolated from the Sargasso Sea
KITTISLSKPETFDISTKEKINLFKQKIKEQLVEKKIIDKDTPIDNIKITLESPTGTIENFQNRKEQEPKKLKITISSDSDIPEVDIIEAAFKAMLKTVDKKNKRKRRQLKNDLEKTKINVKSIIQDQDQGQDQGQDQGPSQDKEAVIKGTDINLENSYDYGFDNDYGFDNDYGNKYDYGNEDDYGNEYDYGNEGDYGNEGDYGNEGDYGNEGDYGNEGDYGNEGDYGNDFGLGNDFGLGNDFGLGNDNSTKT

SEQ ID NO: 81619 - protein, 297 aa, Unknown
  Bacterial polypetide isolated from the Sargasso Sea
YVKVTVNKTAPTASITNNTGTSELNCNTKSISVTAKGGGTYKWSNSLGTSAGATISAAGTYTVTVTSSSTGCTDSESIKITKDVSAPTADAGSDFTKTCTSNANGKAIGATAVSGETYSWSPTTGLSSSTAANPTANPSSTTTYTVTATKTSTGCTSTDNVKVTVNKTAPTASITNNTGTSELNCNTKSISVTAKGGGTYKWSNSLGTSAGATISAAGTYTVTVTSSSTGCTDSESIKITKDVSAPTADAGSDFTKTCTSNANGKAIGATAVSGETYSWSPTTGLSSSTAANPTANP

SEQ ID NO: 81620 - protein, 61 aa, Unknown
  Bacterial polypetide isolated from the Sargasso Sea
MSEFNYDLGILGLGYVGLPLAIYSIEGGLKVFGYDINSEKVSKLNNGESPIEDISDETLKN

SEQ ID NO: 81621 - protein, 261 aa, Unknown
  Bacterial polypetide isolated from the Sargasso Sea
ATISAAGTYTVTVTSSSTGCTDSESIKITKDVSAPTADAGSDFTKTCTSNANGKAIGATAVSGETYSWSPTTGLSSSTAANPTADPSSTTTYTVTATKTSTGCTSTDDVKVTVNKTAPTASITNNTGTSEINCNTKSISVTAKGGGTYKWSNSLGTSAGATISAAGTYTVTVTSSSTGCTDSESIKITKDVSAPTADAGSDFTKTCTSNANGKAIGATAVSGETYSWSPTTGLSSSTAANPTANPSSTTTYTVTATKTSTG

SEQ ID NO: 81622 - protein, 244 aa, Unknown
  Bacterial polypetide isolated from the Sargasso Sea
MQSNVEFDAWKYIPEGDVVKVADFDWRPYKRWCAVNEYWDGAACRDCPVATRSRGGDVTMCCAADEFWNGQACGACPTGSIGMQYVMCTCATDEFWNGTACQTCPTGSFSAGGSATTTSCTSCEADEFWNGTACQTCPTGSFSAGGSATTTSCTSCEADEFWNGTACQTCPTGSFSAGGSATTTSCTSCEADEFWNGTACQTCPTGSFSAGGSATTTSCTSCEADEFWNGTACQTCPAGEYSLG

SEQ ID NO: 81623 - protein, 326 aa, Unknown
  Bacterial polypetide isolated from the Sargasso Sea
MPELPPFLFYSLEVIGGILLLFLGGDQFVKGSVTIATLCRIPQLVIGLTVVAFGTSAPELFVSVSSILQNADDLAVGNVVGSNIFNILVVLGCSALVFPLRVENRLVRRDMPVLLAISSAAWGMASAGRMTWQAGVALLIGLIINTVWEIRTAQEDHQETDGTSDLERTRSGFNRRLTIALLQLAVGITLLVLGSKTLVSGASSAAAFLNVPTAVIGLTIVATGTSTPELITSVVATLKGKTDLAVGNVVGSCLLNLLMVLGGCAAISGEAGLQVTGELISEDLPVMMIATLVCLPIFWSRRSISRIEGGILLTTYIIYLTDNVLP

SEQ ID NO: 81624 - protein, 244 aa, Unknown
  Bacterial polypetide isolated from the Sargasso Sea
MLKKRIIPCLDVKDGRVVKGINFVDLIDAGNPVDQAKFYSENGADEICFLDISASLENRDTLINIVKKTAEEVFIPLTVGGGIKSIDNIQSLLKAGADKVSINSAAITDPNIIKKSSNYFGSQCIVVAVDVKKNKNSWLVYSHGGTKNTGIDAIEWLRKVEQLGAGEILLTSMDRDGTKLGFDLDILAEANKILGIPVIASGGVGSIHHFYEGVKDGGADALLAASVFHFNEFSIMEVKNYLKK

SEQ ID NO: 81625 - protein, 167 aa, Unknown
  Bacterial polypetide isolated from the Sargasso Sea
MFDKVLIANRGEIAVRINRACQELGISTVAVHSEADKESMHVRIADESVCIGPNPVNKSYLNAHAIISACEITGAQAVHPGYGFLSENASFAKMLEDHKLTFIGPKFSHIEMMGDKIEAKKIMKKFGVPTVPGSEGEVKSESDALTASDEIGYPVLLKAQCWRWGRG

SEQ ID NO: 81626 - protein, 179 aa, Unknown
  Bacterial polypetide isolated from the Sargasso Sea
MVEKVLIANRGEIALRIVRSCRELGIATVAVFSTVDKKALHVQLADEAVCVGDSLSNKSYLNIPNILAAATSRGVDAIHPGYGFLAENDKFAEMCNDHGIVFIGPSPKAIRSMGDKSTAKETMEAVGVPTVPGSKGLLSNVDEAYKLADDIGYPVIIKATAGGGGRGMRLVENSDNLEK

SEQ ID NO: 81627 - protein, 142 aa, Unknown
  Bacterial polypetide isolated from the Sargasso Sea
MLVANRGEIASRVFRTAKKMGLRTVAIYTEADRHSPYVGDADLSVKIESSYLDSDAIISAAKKSGAEAIHPGYGFLSENHEFAMRVQNEEIVWVGPDPQSIQIMGDKIEAKKHAIKANLPILESVNDASSVKNIGYPLMIKA

SEQ ID NO: 81628 - protein, 300 aa, Unknown
  Bacterial polypetide isolated from the Sargasso Sea
MKKILIANRGEIACRIINSCKKLKFHSIAVYSDIDKNSKHVRKADESIHIGASKAQESYLNADKIIEAAKKLKADAIHPGYGFLAENEKFAQKVIDSGIIWIGPKPNTIVSMGNKDIARDLALKSNLPICPGLNNKDLEKEDLEKKCNEIGFPILVKASAGGGGIGMQIVNDYGELIKSIEKTKNLAKKAFGNSDVFLEKFIKNARHIEIQIFGFGKKKAVHFFERDCSIQRRFQKIIEESPAPKIDEKILNEMAQSAVNFASNQNYEGAGTIEFIYDVDEKKFYFLEMNTRIQVEHPGN

SEQ ID NO: 81629 - protein, 124 aa, Unknown
  Bacterial polypetide isolated from the Sargasso Sea
MFKKILIANRGEIAVRIIRACKEWGISTVAIHSDVDRESMHVRLADESICVGPHQPTFSYLNIPAIMSAIELTGAEAVHPGYGFLSENFEFAKMLEENNIKFIGPSSKLIKMMGDKIQAKKVAK

SEQ ID NO: 81630 - protein, 221 aa, Unknown
  Bacterial polypetide isolated from the Sargasso Sea
MTEARASETARSEETRSTSPRASLVGGDEDGSETGRDVAAGAREETSRAREEDESEEDESEDEEDEDESSSSEGYGFGRESPDMLALMTRLAAQKLGTTTDAVESAPIERALESFDLKGVAQYIRSGSAKNIVVMTGAGISVSAGIPDFRSESGLYARLGEYDLPYPQAIFELNYFRQKPGPFYKLAADLYPGLYAPTPTHHFIKLLHDKGLLLRCFTQNI

SEQ ID NO: 81631 - protein, 345 aa, Unknown
  Bacterial polypetide isolated from the Sargasso Sea
IANRGEIAVRVIRACKEWGIATVAIHSDVDRDGMHVRLADESICVGPHQPSLSYLNIPAIMSAIELTGAEAVHPGYGFLSENYEFAKILEENNIKFIGPSSDLIKMMGDKIQAKKVAKEYGLPVIEGSDGGIKDLGEAKKICENVGFPVLIKASGGGGGKGMKIVKKLDEFESLFLTAKQEAKKFFNNDEVYIEKFFQNPRHIEVQVLSGKNRTVHLHERDCSVQRRHQKLIEETPSPVLDDVIRKDLFDKTVSMVNKIGYEGAGTVEFIYEDRKFYFLEMNTRVQVEHPVTEMVTGIDIIKEQIWIAFSGDTALKQSDVNPRGHAIECRINAEDPSNNFQPSPR

SEQ ID NO: 81632 - protein, 161 aa, Unknown
  Bacterial polypetide isolated from the Sargasso Sea
MANVTPIKKILIANRGEIARRIMRTAHDMGISTVAIFADGDSNAPFVHEADTAISLEGKTTAETYLDVDKVINACKRSGADAVHPGYGFLSENEDFAQAIIDAGIKWIGPSPKVIGLMGDKLSAKSLMQEAGVPTLPAIEIQKDTDIKASAAEIGYPVLVK

SEQ ID NO: 81633 - protein, 177 aa, Unknown
  Bacterial polypetide isolated from the Sargasso Sea
MVEKVLIANRGEIALRIVRSCRELGIATVAVFSTVDKKALHVQLADEAVCVGDSLSNKSYLNIPNILAAATSRGVDAIHPGYGFLAENDKFAEMCNDHGIVFIGPSPKAIRSMGDKSTAKETMEAVGVPTVPGSKGLLSNVDEAYKLADDIGYPVIIKATAGGGGRGMRLVENSDNL

SEQ ID NO: 81634 - protein, 231 aa, Unknown
  Bacterial polypetide isolated from the Sargasso Sea
MVANRGEIACRVFATARRMGIPTVAVYSSPDASSKHVQMADESRHVGPAASSESYLAMDRILEACVETGADAVHPGYGFLSENTKFCDLLEKHGVTFVGPKQHALEVMGAKIASKRIATEAGINVVPGFVGEVRDEAHMLEIAREIGYPVMIKASAGGGGKGMRVAYNDTEAREGYHLSIQEARASFGDDAMLVEKFVEEPRHIEIQVLADSHSNAVYLNERECSIQRRTK

SEQ ID NO: 81635 - protein, 98 aa, Unknown
  Bacterial polypetide isolated from the Sargasso Sea
MFKKILIANRGEIAVRIIRACKEWGISTVAIHSDVDRDSMHVKLADESICVGSHQPVNSYLNIPAILSAIELTNAEAVHPGYGFLSENSNFAKILEEK

SEQ ID NO: 81636 - protein, 294 aa, Unknown
  Bacterial polypetide isolated from the Sargasso Sea
MFKKILIANRGEIAVRIIRACKEWGILTVAVHSDVDRESMHVRMADESVCIGSHQPSNSYLNIPALMSAIELTNADAVHPGYGFLSENANFARILEENKINFIGASSKHIEMMGDKIQAKRIAKENGLPVIEGSEGGVKDVSEAKELCKKIGFPVLIKASGGGGGKGMKIVYKEEEFETLFSTAKSEAQKYFGNDEVYIEKFFQNPRHIEVQILAGKNRAVHLHERDCSVQRRHQKLIEETPSPVLNNEIRKDLFERTVKMVAKIGYMGAGTVEFIYEDGKFYFLEMNTRVQVE

SEQ ID NO: 81637 - protein, 94 aa, Unknown
  Bacterial polypetide isolated from the Sargasso Sea
MFKKILIANRGEIALRILRACRELDIKTVAIHSEADAEAMHVRLADESVCVGPAPAKNSYLNIPSIITAATITNSDAIHPGYGFLSENINLQNF

SEQ ID NO: 81638 - protein, 147 aa, Unknown
  Bacterial polypetide isolated from the Sargasso Sea
MFDKILIANRGEIALRVHRACKELGIRTVAVHSTADSDAMHVRLADESVCIGPPPANESYLNIPAIITAATVTNADAIHPGYGFLSENANFASIVEEHDICFIGPTADHIALMGDKIASKNKVDELGIPVVPGSKGAIENIKDAHAM

SEQ ID NO: 81639 - protein, 208 aa, Unknown
  Bacterial polypetide isolated from the Sargasso Sea
MTFRKLLIANRGEIAVRIARACHELGVRSVAIYSEADKYSLHVKKADEAYRISQDPLSGYLNPHHIVNLAVETGCDALHPGYGFLSENAELAAICEQRGIAFVGPSADAISAMGDKTRARQTAIAAGVPVTPGSEDNLIDVEDAVRQAATIGYPVMLKATSGGGGRGIRRCDNEKELRQNYERVISEATKAFGSAEVFLEKCIINPRH

SEQ ID NO: 81640 - protein, 200 aa, Unknown
  Bacterial polypetide isolated from the Sargasso Sea
MFNKVLVANRGEIALRVIRACREMGIKSVAVHSTADSDAMHVRMADESVCIGPAAGTSSYLSMPAIIAACEITGAEAIHPGYGFLSENAKFVQIVEDHGIKFIGPTAEHIRIMGDKITAKETMRELGVPCVPGSDGGVPDVNTAKKIGTDIGYPVIIKATAGGGGRGMKVANSESEMEQAFMTARAEGKAALETMRFTSR

SEQ ID NO: 81641 - protein, 237 aa, Unknown
  Bacterial polypetide isolated from the Sargasso Sea
MFKKVLIANRGEIAVRVIRACKEWGIGTVAVHSDVDADSMHVRLADESVCIGSHQPQNSYLNIAAIMSAVDVTGAEAIHPGYGFLSENHNFAEIVEKHKIKFIGPKAEIIKKMGDKIQAKIIAKEKGLPVIEGSDGGVGDLKQAKQICKKIGYPVLIKASGGGGGKGMKIVEDESKLGEMYSLARLEAKKYFGNDEVYIEKYFKNPRHIEVQVLSGKNRTVHLNERDCSVQRKHQKL

SEQ ID NO: 81642 - protein, 265 aa, Unknown
  Bacterial polypetide isolated from the Sargasso Sea
MFDSILVANRGEIALRIMRTAQAMGIQTIAIYVEADKDAPHVRFADKAILLPDGGYLDIDAVLDAAQKSNAGAIHPGYGFLSENSEFAKRVIKEKIVWVGPSPKVISVMGDKLKAKELAIKASVPTLPMTSNEKEVKKIGYPLLIKAAAGGGGKGMRVVTDKKDLQESLEGAKREALSGFGDERVFIERYVEKSRHIEIQILGDSHGNVIHLGERECSIQRRHQKIIEESPSPRITEEIRFAMGNAAVDLAKKIKYESAGTVEFL

SEQ ID NO: 81643 - protein, 202 aa, Unknown
  Bacterial polypetide isolated from the Sargasso Sea
MFKKILIANRGEIAVRIIRACKEWGISTVAVHSDVDRESMHVRMADESVCIGSHQPANSYLNIPALMSAIELTNADAVHPGYGFLSENANFAKILEENKINFIGASSKHIEMMGDKIQAKRIAKENGLPVIEGSEGGVKDIIEAKELCKKIGFPVLIKASGGGGGKGMKIVYKEEEFETLFSTAKSEAKKYFGNDEVYIEKF

SEQ ID NO: 81644 - protein, 270 aa, Unknown
  Bacterial polypetide isolated from the Sargasso Sea
MFKKILIANRGEIACRVIKTARKMNIKTVAVYSDADRYSEHVRLADEAFHLGASSASESYLRSDLIIKACKETNCDALHPGYGFLSENANFVGDLNKAGIIFIGPSKSAIASMGDKIESKKIAQSANVNTVPGHIGIIKDKTEAIKIAAEIGYPVMIKASAGGGGKGMRIAFSKDEVSESFERAESEALNSFGDKRIFIEKFITEPRHIEIQILADNYGNIVYLGERECSIQRRNQKVIEEAPSPFLDEQTRKKMGDQAVQLSRKSLLFK

SEQ ID NO: 81645 - protein, 150 aa, Unknown
  Bacterial polypetide isolated from the Sargasso Sea
MFKKILIANRGEIALRVLRACRELGIKTVAIHSDVDENAMHVRMADESICVGPASAQSSYLNIPAIITAATLTDADAIHPGYGFLSENQRFAEIIEEHNIKFIGPKSEHIKMMGNKIDAKKIMDETGVPTVKGINDLSDQNTIEEFIKKV

SEQ ID NO: 81646 - protein, 130 aa, Unknown
  Bacterial polypetide isolated from the Sargasso Sea
MINKVLIANRGEIALRVLRACKKLGIKTVAVHSTADRQLAHVKLADESVCIGGPNPRESYLNMPSIISAAELTNSDAIHPGYGFLSESEMFAEIIETNKFKFIGPSSKVLNKMGDKIKAKNAMKDFGVPC

SEQ ID NO: 81647 - protein, 102 aa, Unknown
  Bacterial polypetide isolated from the Sargasso Sea
MFNKILIANRGEIAVRVLRACKELGIQTVAVYSSVDKNAMHVKLADESVCIGPASSLKSYLNIPAIISACEVSGADAVHPGYGFLSENFGFVEKLRSTMVLN

SEQ ID NO: 81648 - protein, 173 aa, Unknown
  Bacterial polypetide isolated from the Sargasso Sea
MFDSILVANRGEIALRIMRTAQAMGIQTIAIYVEADKDAPHVRFADKAVLLPDGGYLDIDTVLDAAQKSNAGAIHPGYGFLSENSEFAKRVIKEKIVWVGPSPKVISVMGDKLKAKELAIKASVPTLPMTSNEKEVKKIRYPLLIKAAAGGGGKGMRVVTDKKDLQESLEGAK

SEQ ID NO: 81649 - protein, 135 aa, Unknown
  Bacterial polypetide isolated from the Sargasso Sea
MFDSILVANRGEIALRIMRTAQAMGIQTIAIYVEADKDAPHVRFADKAVLLPDGGYLDIDAVLDAAQKSNAGAIHPGYGFLSENSEFAKRVIKEKIIWVGPSPKVISVMGDKLKAKELAIKASVPTLPMTSDEKE

SEQ ID NO: 81650 - protein, 140 aa, Unknown
  Bacterial polypetide isolated from the Sargasso Sea
MLVANRGEIASRVIRTAKKMGLKTVAIYTEADRHSPYVIDADLSVKIESSYLDSDAIISAAKTTGAGAIHPGYGFLSENHDFATKIQDEGIIWVGPNSDSIQIMGDKIEAKKHAIKSEMPILESVNDAASAKDIGYPIND

SEQ ID NO: 81651 - protein, 189 aa, Unknown
  Bacterial polypetide isolated from the Sargasso Sea
MLEKVLIANRGEIALRILRACKELGIKTVAVHSQVDRDLMHVRLADESVCIGPNSATDSYLNIPTIISAAEVTDSVGIHPGYGFLAENADFAEQVEKSGFRFIGPRAETIRLMGNKVSAIEAMKKAGVPTVPGSDGPLTDDDERTLKLAKQIGYPVMIKAASGGGGRGMQVVHSEAALLKAVQITQSEA

SEQ ID NO: 81652 - protein, 321 aa, Unknown
  Bacterial polypetide isolated from the Sargasso Sea
DDSQKHVFLADESVCIGPPESLKSYLNIPSIISAAEVTDAMAIHPGYGFLAENGDFAEQVEQSGYIFIGPKSETINLMGNKISAKEVVSEVGIQCIPGSDGELDDDIEKVHKLADQIGYPVLIKAAAGGGGKGMRVAHTKGALQHTIDLTKTESKAAFGDDTIFLEKLLEEPRHIEFQILADHHGNAVCLGDRDCSMQRSHQKIIEEAPAPKIPKKLREEMFKKCIAFCKHIDYRGAGTLEFLYENGEFYFIEMNTRLQVEHPVTEMITGVDIVKEQIKIAMGLPLSIKQEDIVEKGHAIECRINAEDPKTFMPSPGMIDL

SEQ ID NO: 81653 - protein, 249 aa, Unknown
  Bacterial polypetide isolated from the Sargasso Sea
MFNKILIANRGEIALRIMGTCRRMGIRTVAVFSEADSDALHVKEADESCFIGEAAPAKSYLRIDKILYAAKEKGCEAIHPGYGFLSENDEFASKCLNSGITFIGPSAEAIKLMGEKHKAKSVMEKSGVPVVPGYFGEEQSTQCLLKEADKIGYPLMVKAVLGGGGKGMRVVQKKEDFGSALLSVENEARKAFGDSRVMLECFVKKSRHIEFQVLGDQHGNTVHLFERDCSVQRRHQKIIEESPSLFFDN

SEQ ID NO: 81654 - protein, 246 aa, Unknown
  Bacterial polypetide isolated from the Sargasso Sea
MFKKILIANRGEIAVRIIRACKEWGISTVAVHSDVDRDSMHVKLADESVCIGSHQPVNSYLNIPALLSAIDLTKAEAVHPGYGFLSENVKFARILEENKIKFIGASSKHIEMMGDKIQAKKIAKENGLPIIEGSEGGIKDITDAKDLCKKIGFPVLIKAAGGGGGKGMKIVNKEEEFEALFSTAKSEAMKYFGNDEVYIEKFFQNPRHIEVQILSGKNRTIHLHERDCSVQRRHQKLIEETPSPVL

SEQ ID NO: 81655 - protein, 223 aa, Unknown
  Bacterial polypetide isolated from the Sargasso Sea
MNKNKITKLLIANRGEIAIRVMRAATELGIKTVAIYSQEDKYALHRHKADESYKVGNGKNPIDDYLDIDDIIRIALGANVDAIHPGYGFLSENPELVEACDLAGITFVGPPKKVMEKLGSKVEARKLAAKAKVKVMPATNPLPISEAKIKLLAKKISYPLMVKATWGGGGRGMRAVYTEDELISNVNSARREAEAAFGNGQIYLEKLVVQPRHVEVQYWAINT

SEQ ID NO: 81656 - protein, 192 aa, Unknown
  Bacterial polypetide isolated from the Sargasso Sea
MLIANRGEIALRIARAARELDVRTVAVVAPSDDGHALHAVSTDEVVAVASYNDASEVVRAARTTNCDALHPGYGFLSESVTLAAACEGAGVMFVGPSTAALATLGDKVAARSLAQSLGVPVAPASDEPCGDAEAVRAAMRTHGVAYPIMLKAVGGGGGRGMRPVATDAELDAAFAACVREASASGASGGVFV

SEQ ID NO: 81657 - protein, 226 aa, Unknown
  Bacterial polypetide isolated from the Sargasso Sea
MYKKILIANRGEIALRVIRACHELGLKSVAVYSSADKDSLHVKFADEAICIGPPDSRESYLNIPNIISAGEITNADAVHPGYGFLAENADFSNICKENGFSFIGPTGDIINAMGDKAQAKKTMKEAGLPIIPGNEGVLDNVDETKVLASKIGYPVMLKASAGGGGRGMRLVTKESELEHAYSTASGEAQNAFNNGDLYIEKFIEEPRHIEIQLLADAHGNAVSLGE

SEQ ID NO: 81658 - protein, 200 aa, Unknown
  Bacterial polypetide isolated from the Sargasso Sea
MFKKILIANRGEIAVRIIRACKEWGISTVAVHSDVDRESMHVKLADESICIGSHQPTNSYLNIPALLSAIDLTKAEAVHPGYGFLSENANFAKILEENNIKFIGASSKHIKMMGDKIHAKKIAKENGLPIIEGSNGGVKDITEAKNLCKKIGFPILIKAAGGGGGKGMKIVQKEDEFETLFSTAKSEAKKYFGNDEVYNE

SEQ ID NO: 81659 - protein, 265 aa, Unknown
  Bacterial polypetide isolated from the Sargasso Sea
LHVRESDKAVFIGESSADKSYLNYKKIVQVAIENKVDAVHPGYGFLSENPNFAMELKKKKIKFIGPSVFSMKSMSLKNDARSMMEKAGVPVLPGFSADALSYEQIVKKCNNIGFPLIIKASAGGGGKGMHVISKREEIKSKLAGAKREALSSFGNDSILIEKYLENPRHIEVQILADNHNNIYTLSDRDCSIQRRHQKVIEEAPAPNIKPEVRKEMALQAKNVAKNISYSGAGTIEFLFEKDRFYFMEMNTRLQVEHPVTELILD

SEQ ID NO: 81660 - protein, 95 aa, Unknown
  Bacterial polypetide isolated from the Sargasso Sea
MTFHKLLIANRGEIACRIIKTAHEMGISCVAVYTEADSNSPFVRMADEAVKLSDTYLNGKEIIDAAIKTGAEAIHPGYGFLSENAKFCRDVSKAN

SEQ ID NO: 81661 - protein, 238 aa, Unknown
  Bacterial polypetide isolated from the Sargasso Sea
MTFLRELVESGEITEEQARRRMENMRRRAAESLNSEHGERHHGERDNDKRGEGIRARLDEAGKKLRELVESGEITEEQARRRMENMRRRAAESLNGEHSERQHDDHEHRDRHHDGHENGDRNHDGHENEDRHHDGHEHRGRHHDGHENEDRNHDGHEHRDRHHDGHENGDRHHDGHEHRDRHHDGHENEDRHHDGHEHRGRHHDGHENEDRHHDGHEHRGRHHDGHENGDRHHDDYAS

SEQ ID NO: 81662 - protein, 137 aa, Unknown
  Bacterial polypetide isolated from the Sargasso Sea
MKKILIANRGEIACRIIKSCKKLNLHSIAVYSDADEKSKHVKLANEAVHIGNSKAQESYLSSKNILSAALKYNADAIHPGYGFLSENAEFAQNVIDSGLVWIGPKPNSITSMGNKDIARELAIKSNLPICTGLKMMN

SEQ ID NO: 81663 - protein, 120 aa, Unknown
  Bacterial polypetide isolated from the Sargasso Sea
MINKILIANRGEIAVRIIRACKELDIKTVAVHSNVDSDSMHVKLADESVCIGPHNPINSYLNIPNLVSALEISGADAIHPGYGFLSENFKFANTLEQHKIKFIGPKADVIKKMGDKIQAK

SEQ ID NO: 81664 - protein, 87 aa, Unknown
  Bacterial polypetide isolated from the Sargasso Sea
MFKKILIANRGEIAVRIIRACKELNIPTVAIHSDVDVDSMHVRLADESICVGSHKPENSYLNIAAIMSAADVTGADAIHPGYGFLSE

SEQ ID NO: 81665 - protein, 236 aa, Unknown
  Bacterial polypetide isolated from the Sargasso Sea
MFKKILIANRGEIAVRIIRACKEWGIPTVAVHSDVDRDSMHVRMADESVCIGSHQPANSYLNIPNLMSAIELTNSDAVHPGYGFLSENSNFAKILEDNKIGFIGASSKHIEMMGDKIQAKRIAKENGLPVIEGSEGGVTEINQAKELCKKIGFPVLIKASGGGGGKGMKIVHIEEEFENLFSTAKSEAQKYFGNDEVYIEKFFQNPRHIEVQILAGKNNVVHLHERDCSVQRRHQK

SEQ ID NO: 81666 - protein, 168 aa, Unknown
  Bacterial polypetide isolated from the Sargasso Sea
MFKKILIANRGEIAVRIIRACKEWGIATVAIHSDVDRDSMHVRLADESVCIGSHQPSSSYLNIPAIMSAIELTNAEAVHPGYGFLSENSEFAKILEDYKIKFIGPSSKLIKMMGDKIQAKLIAKKYGLPVIEGSDGGVSDIVEAKKIVKNIGYPILIKAAGGGGGKGM

SEQ ID NO: 81667 - protein, 164 aa, Unknown
  Bacterial polypetide isolated from the Sargasso Sea
MFKKILIANRGEIALRILRACRELGIKTVAVHSDADDSAMHVKMADESICVGPPSAQSSYLNIPAIITAATLTNVDAIHPGYGFLSENQRFAEIIEEHKIKFIGPSSKHINMMGNKIEAKKIMEKNGIPTVPGLNDFTNEKVIKTFIKKVGLPIIIKAASGGGG

SEQ ID NO: 81668 - protein, 201 aa, Unknown
  Bacterial polypetide isolated from the Sargasso Sea
MFKKILIANRGEIAVRVIRACKEWGISTVAVHSDVDRESMHVRLADESVCIGSHQPANSYLNIPAILSAVDLTNAEAVHPGYGFLSENANFAKILEENNIKFIGASSKHIKMMGDKIQAKKIAKENGLPVIEGSEGGIKNVSEAKQLCKNIGFPVLIKASGGGGGKGMKIVQKEEDFETLFSTAKSEAQKYFGNDEVYIEK

SEQ ID NO: 81669 - protein, 235 aa, Unknown
  Bacterial polypetide isolated from the Sargasso Sea
MFKKILIANRGEIAVRVIRACKEWGISTVAVHSDVDRNSMHVRLADESVCIGSHQPANSYLNIPALMSAIELTNAEAVHPGYGFLSENANFAKVLEKNKIRFIGASSKHIEMMGDKIQAKKIAKENGLPVIEGSEGGIEKVSDAKKLCEKIGFPVLIKASGGGGGKGMKIVKKPEDFETLFSTAKSEAKKYFGNDKVYIEKFFENPRHIEVQILAGKNRVVHLHERDCSVKEGIK

SEQ ID NO: 81670 - protein, 141 aa, Unknown
  Bacterial polypetide isolated from the Sargasso Sea
MFKKILIANRGEIAVRIIRACKEWGISTVAVHSDVDRESMHVRMADESVCIGSHQPINSYLNIPALMSAIEITNSEAVHPGYGFLSENANFARVLEDNNIKFIGASSKHIEMMGDKIQAKKIAKENGLPVIEGSEGGVKDI

SEQ ID NO: 81671 - protein, 266 aa, Unknown
  Bacterial polypetide isolated from the Sargasso Sea
MLDKVLIANRGEIALRIQRACRELGIKTVAVHSTADSSQKHVFLADESVCIGPPESLKSYLNIPSIISAAEVTDAMAIHPGYGFLSENGDFAEQVEQSGYIFIGPRSETINLMGNKISAKEVVSEVGIQCIPGSDGELDTDIEKVHKLADAIGYPVLIKAAAGGGGKGMRVAHTKGALQHTIDLTKTESKAAFGDDTIFMEKLLEEPRHIEFQVLADHHGNAVCLGDRDCSMQRSHQKIIEEAPAPKIPKKLREDMFEKCIAFVNT

SEQ ID NO: 81672 - protein, 155 aa, Unknown
  Bacterial polypetide isolated from the Sargasso Sea
MFDKILIANRGEIACRVMSTAKRLGIKTVAVYSQPESRARHVQMADEAYCVGPAPSSESYLNVERILEVIKQSGAQGVHPGYGFLSENAAFCEAVEAMGVAFIGPPSGAISAMGDKIESKQIAIDAGINTIPGYQGVIKDEEESVLIARDTVGYP

SEQ ID NO: 81673 - protein, 199 aa, Unknown
  Bacterial polypetide isolated from the Sargasso Sea
MFKKILIANRGEIAVRVIRACKEWGIQTVAVHSNVDKESMHVRLADESVCIGSHQPANSYLNIPAIMSAIELTGAEAVHPGYGFLSENTEFAKILEENKIKFIGPSSKLIKMMGDKIEAKKIAKKYGLPVIEGSEGGVSDLNHGKEISKKIGFPVLIKAAGGGGGKGMKIVNDEKNFDLSFSTAKTEALKYFGNDEVYI

SEQ ID NO: 81674 - protein, 140 aa, Unknown; identical to SEQ ID NO: 81650
  Bacterial polypetide isolated from the Sargasso Sea

SEQ ID NO: 81675 - protein, 94 aa, Unknown
  Bacterial polypetide isolated from the Sargasso Sea
MIKKILIANRGEIAVRIIRACKELNIKSVAVYSSADKDAMHVQLADESVCIGPAKAADSYLNIPSLLSAYELTGADSIHPGYGFLSENYEFVKI

SEQ ID NO: 81676 - protein, 114 aa, Unknown
  Bacterial polypetide isolated from the Sargasso Sea
MFKKVLIANRGEIAVRVIRACKEWGIGTVAVHSDVDSDSMHVRLADESVCIGSHQPQNSYLNVAAIMSAVDLTGAEAIHPGYGFLSEILNLLILLRNMASSLLVQVQILLKRWG

SEQ ID NO: 81677 - protein, 97 aa, Unknown
  Bacterial polypetide isolated from the Sargasso Sea
MFKKVLIANRGEIAVRVIRACKEWGIGTVAVHSDVDADSMHVRLADESVCIGSHQPQNSYLNMAAIMSAVDVTGAEAIHPGYGFLSENYKFAEIVEK

SEQ ID NO: 81678 - protein, 128 aa, Unknown
  Bacterial polypetide isolated from the Sargasso Sea
MLVANRGEIASRVFRTAKKMGLRTVAIYTEADRHSPYVGDADLSVKIESSYLDSDAIISAAKKSGAEAIHPGYGFLSENHEFAMRVQNEEIVWVGPDPQSIQIMGDKIEAKKHAIKANLPILESVNDA

SEQ ID NO: 81679 - protein, 330 aa, Unknown
  Bacterial polypetide isolated from the Sargasso Sea
VCSDADKFAKHVFLADESYYLGESTADKSYLDKEKIIEAMHKTGSEAVHPGYGFLSENASFAKMVEDNGFVFIGPSSESINLMGDKISSKKIAERAGVSIVPGFLGEVISKDHALGLVQEIGFPVLIKASAGGGGKGMRVVENEDDLEQALISSQNEAEKSFGDKRVFIEKFIVQPRHIEIQIISDKHGNCLYLGERECSIQRRNQKVIEEAPSSFVDCDLRIKMGEQAVSLAREVDYFSAGTVEFIVDKNKNFYFLEMNTRLQVEHPVTELITGLDLVELMIKVAYGDRLGFDQNNVELKGWALECRIYAEDPFRNFLPSTGRLRTYKP

SEQ ID NO: 81680 - protein, 246 aa, Unknown
  Bacterial polypetide isolated from the Sargasso Sea
MFSKILIANRGEIACRIISTAKKMGIKTVSVFSDADKFSKHVRLSDESMYIGKSASNESYLNIDAIINAAKESKAEAIHPGYGFLSENADFVDAVSKLGICFVGPSKKAISLMGDKIESKMLANKANVSTVPGFIGEVSSFKHAQEIANSIGYPVMIKASAGGGGKGMRVASNPEEVQDSLERAKSEAQSSFGDDRIFIEKLIQKPRHIEIQILADNFGNIIHLGERECSIQRRHQKVIEEAPSPF

SEQ ID NO: 81681 - protein, 93 aa, Unknown
  Bacterial polypetide isolated from the Sargasso Sea
MFKKILIANRGEIAVRVIRACKEWGIATVAIHSDVDRDGMHVRLADESVCVGPHQPSLSYLNIPAIMSAIELTGAEAVHPGYGFLSENYEFAK

SEQ ID NO: 81682 - protein, 313 aa, Unknown
  Bacterial polypetide isolated from the Sargasso Sea
EIAVRINRACQELGISTVAIHSEADSDSMHVRIADESVCIGPNPVNKSYLNTHSIIAACEITGAQAVHPGYGFLSENSSFAKMLEDHKLTFIGPKYSHIEAMGDKIQAKKIMKEFGVPTVPGSDKAIENEKDAINISKEIGFPVLIKASAGGGGRGMKVVSDEKELSDSLPIIKQEALSFFGNDAVYIEKFIDSPRHIEVQVICDMHGNFLHLHERDCSVQRRNQKVIEEALAPGIDEKKKEKLFSTCINAMQKMGYLGLGTLEFLYENGEFYFMEMNTRLQVEHPITEMLTRIDLVREQICVASGKRFFISR

SEQ ID NO: 81683 - protein, 282 aa, Unknown
  Bacterial polypetide isolated from the Sargasso Sea
MKLLVANRGEIAIRLLRGAAELGIPTVAVYSKDDVQSLHTGKAHEAYEIDGVGPAGYLNIDKIVAIAKASGADAVHPGYGFLAENADFARRCEAEGITFIGPRPENIELFGDKARARQAAVAADVPVTRGIDRAVTREEAQDFFEILGSGRAMMIKAIAGGGGRGSRVVMAADEVAQTFERCQAEAELAFGNPDVYVEEFITRARHVEVQILGDLHGGVAHLGERECSIQRRFQKVIEIAPAPALDVDLRDTIIEAAVRCADSVGYSNAGTFEFLVDASGAA

SEQ ID NO: 81684 - protein, 257 aa, Unknown
  Bacterial polypetide isolated from the Sargasso Sea
MSLKTYAIITDVHGNSSSLKEAIKIINKRDDVDQIICLGDYFALGPDPMGCFKLLESLSNCVFLRGNHERYLIENLWTHERPNLEGMSPDDPICKEIVQNEKWTAEMIGKRGRNFCNKTRIAERQIIDNTLVEFTHAWYQRDEIPPTMDEAIAWKNHISKANNKIKRFIFVHGHTHLPRIEEKENLKILCQGATGLPFDQDPRGSIAFLKIGREFNWEIIRYEYDRERSIDMLEDIKPPFYKNLQNTIRYATIRNDI

SEQ ID NO: 81685 - protein, 165 aa, Unknown
  Bacterial polypetide isolated from the Sargasso Sea
MFDSILVANRGEIALRIMRTAQAMGIQTIAIYVEADKDAPHVKFADKAVLLPDGGYLDIDAVLDVAQKSNAGAIHPGYGFLSENSEFAERVIKEKIVWVGPSPKVISVMGDKLKAKELAIKASVPTLPMTSNEKEVKKIGYPLLIKAAAGGGGKGMRVVTDKKDL

SEQ ID NO: 81686 - protein, 259 aa, Unknown
  Bacterial polypetide isolated from the Sargasso Sea
MFKKILIANRGEIAVRIIRACKEWGISTVAVHSDVDRDSMHVRLADESVCIGSHQPANSYLNIPALMSAIELTNADAVHPGYGFLSENANFARILEQNKINFIGASSKHIKMMGDKIQAKKIAKENGLPVIEGSEGGVKDVSEAKELCKKIGFPILIKSSGGGGGKGMKIVYKEEEFETLFSTAKSEAQKYFGNDEVYIEKFFQNPRHIEVQILAGKNRVVHLHERDCSVQRRHQKLIEETPSPVLNDEIRKDLFERTV

SEQ ID NO: 81687 - protein, 185 aa, Unknown
  Bacterial polypetide isolated from the Sargasso Sea
MFKRILIANRGEIACRVISTAKRMGIETVAVYSDADVQSPHVGFATQACHIGSSRAKDSYLSIEKIIEAARLTQSDAIHPGYGFLSERAEFADACDDAGIVFIGPSASAIRAMGDKSAAKSLMMEAGLPLTPGYHGGDQGTTFLADQANQIGFPVLIKASAGGGGKGMRRVDSLEEFDSALESCR

SEQ ID NO: 81688 - protein, 206 aa, Unknown
  Bacterial polypetide isolated from the Sargasso Sea
MFNKILIANRGEIALRVIRACREMGIKSVAVHSTADSDAMHVRMADESVCIGPAAGTASYLSMPAIIAACEITGAEAIHPGYGFLSENAKFVQIVEDHSLVFIGPTAEHIRIMGDKITAKDTMKDLGVPCVPGSDGGVPDVNTAKKIGAEIGYPVIIKATAGGGGRGMKVAKTEGEMEQAFMTARAEGKAAFGNDEVYIEKYLTTP

SEQ ID NO: 81689 - protein, 155 aa, Unknown
  Bacterial polypetide isolated from the Sargasso Sea
MFKKILIANRGEIAVRVIRACKEWGISTVAIHSDVDRESMHVKLADESVCVGPHQPSNSYLNIPAIMSAIELTNAEAVHPGYGFLSENFNFAKILEENNIKFIGPSSKLIKMMGDKIEAKKIAKENGLPVIEGSDGGVSNIEEAKKICNEIGFPV

SEQ ID NO: 81690 - protein, 200 aa, Unknown
  Bacterial polypetide isolated from the Sargasso Sea
MIKKILIANRGEIACRVIRTARKLGIKTIAVYSEVDQNALHVDMASEAICIGSALAADSYLNINSIMDAIEETGADAVHPGYGFLSENAEFAERLNTSGITFIGPKPHAIRVMGDKIESKLFAENAGVPTVPGHTEAVSDVADAKEIANEVGYPVMLKASAGGGGKGMRVVQEEGQIEEGLRACTAEATNSFGDDRVFVE

SEQ ID NO: 81691 - protein, 148 aa, Unknown
  Bacterial polypetide isolated from the Sargasso Sea
MIKKLLIANRGEIALRILRACKELDISTVAAYSESDRDLMHVKMADESICIGPAESSKSYLNIPSLISAMELCGADGIHPGYGFLSENGDFAEQVEKSDFQFVGPSSEIIRLMGNKVSAKKFAKEMGLPVVPGTDRPINKNLKEEAIR

SEQ ID NO: 81692 - protein, 236 aa, Unknown
  Bacterial polypetide isolated from the Sargasso Sea
MFNKILIANRGEIAVRVLRACKELGIQTVAVYSSADKNAMHVKLADESVCIGPASSLKSYLNIPAIISACEVSGADAVHPGYGFLSENFGFVEKLEAHGIKFIGPKSEHIKMMGDKILAKESANNLGLPIIPGSPGEISNTKEGLEVASTLGYPIIIKASSGGGGRGMIKVFKEEDLDESLKKASTEAEKSFNDKRVYIEKYLQNPKHIEIQVIGDEYNNIVHLGERDVQCKEEIK

SEQ ID NO: 81693 - protein, 314 aa, Unknown
  Bacterial polypetide isolated from the Sargasso Sea
SWEQCRQLDVDAVHPGYGFLSENADFARAVIDNGIIWVGPNPDVISSMGSKIAARSIAASAGLPLIPGFADIAQQDDGTLAEAASEIGYPVLLKASAGGGGKGIRIVHSPGHFSESLTEARTEAMRSFGDDAIIVERYIERPRHVEVQLMGDKNGALLELGTRDCSIQRRYQKLIEEAPAPNLRPETEAGLRSAALALGRSIGYDNAGTVEFVVDVDNGDYFFLEVNTRLQVEHPVTEQVTGLDLVELQLVAATGGSLPVTQEDVTFHGHAIEVRINAEDPANNYAPQTGRVETIRIPHDQDGVRWDGAFDREG

SEQ ID NO: 81694 - protein, 167 aa, Unknown
  Bacterial polypetide isolated from the Sargasso Sea
MKKKIKKILIANRGEIAIRIAKTCRKLKIKTVGIYSKQDESSLHLDYMDEKYFLSDDPLKGSYLEKKKIVKICKELKVDAVHPGYGFLSENYLFSSLLEKNNIIFIGPPAKAVKEMGDKISSKKIAIKAKVNCIPGLNKEIKNYNQAIKISNDIGFPVMIKASAGGG

SEQ ID NO: 81695 - protein, 204 aa, Unknown
  Bacterial polypetide isolated from the Sargasso Sea
MFKKILIANRGEIALRIIRTCKEMGIKSVAVYSTADAESLHVKFADEAVCIGPSQSIHSYLKPSNIIAAAEITNADAIHPGYGFLSENSKFSKMCTEHDIKFIGASSDMISKMGDKSSAKATMKKAGVPTIPGSDGIIQNLKTAKITAKKIGYPIMLKASSGGGGKGMRAVNNEIELEKSWESAKQESMAAFGDDSMYIEKFIE

SEQ ID NO: 81696 - protein, 259 aa, Unknown
  Bacterial polypetide isolated from the Sargasso Sea
MFKKILIANRGEIAVRIIRACKEWGISTVAVHSDVDKESMHVRLADESICIGSHQPANSYLNVPALMSAIELTKAEAVHPGYGFLSENANFAKILEESNIKFIGPSSKLIKMMGDKIQAKKIAKEYGLPVIEGSDGGVSNITKAKEICKKIGFPVLIKAAGGGGGKGMKIAFEEKNFEELFLAAKSEAKKYFANDEVYIEKFFQNPRHIEVQVLSGKNRTVHLHERDCSVQRRHQKLIEETPSPILSDDLRKDLFEKTV

SEQ ID NO: 81697 - protein, 295 aa, Unknown
  Bacterial polypetide isolated from the Sargasso Sea
AVYSDVDSDSPHVLMADEAIEIGPANPSESYLNFDKIVNAAKDTNSDAIHPGYGFLSENGEFAKYVSESGLIFIGPDSDTIKSMGDKAESKQMMMEAGVPTIPGSDGELTGNIDAMAREIGYPLMVKAAAGGGGKGMRIVNQAEELDSAIEAAKNEARNSFGNDTLIIEKYLDNPRHIEVQILGDKKGNIIHLYERECSIQRRHQKIIEESPSPAITNKLRNKMGEAAVKAAKVANYHNAGTVEFLYQDGEFYFLEMNTRLQVEHGVTEMVCGIDIVKWQIRIAEGASLDIKQKD

SEQ ID NO: 81698 - protein, 101 aa, Unknown
  Bacterial polypetide isolated from the Sargasso Sea
MFKKILIANRGEIALRVIRACHELNIKTVAIYSSADELSLHVKFADEAVCIGPPSSKDSYLNIPRIIAAGEITNADAIHPGYGFLSESAEFSKICSENGFH

SEQ ID NO: 81699 - protein, 234 aa, Unknown
  Bacterial polypetide isolated from the Sargasso Sea
MSRVLVANRGEIARRIIKACHGLGYQAVTVHSEVDAQLAHVKEADHSIEIGPAPAKESYLNIQAILDAAIKMDCDFLHPGYGFLSENAEFAEAVIKAGIRWIGPRPETIKTMGDKARARSIVAAVGVPIVPGSKRLEPGMANRTLEAARDIGLPLLVKASAGGGGIGMRRVDSINDVEKIVEATQVMAENVFGDRAVFLEKFIPKSRHIEIQIFGFEDGSCIHVFERECSLQRR

SEQ ID NO: 81700 - protein, 184 aa, Unknown
  Bacterial polypetide isolated from the Sargasso Sea
MFKKILIANRGEIAVRVIRACKEWGISTVAVHSDVDRDSMHVRLADESICIGSHQPINSYLNIPALMSAIELTNAEAVHPGYGFLSENVNFSRVLEENNIKFIGASSKHIKMMGDKIQAKKIAKENGLPIIEGSDGGIKDINEAKHLCKKIGYPILIKASGGGGGKGMKIVYKEEEFEGLFLTA

SEQ ID NO: 81701 - protein, 85 aa, Unknown
  Bacterial polypetide isolated from the Sargasso Sea
MTFHKLLIANRGEIACRIIKTAHEMGITCVAVYTEADSRSPFVKMADEAVKLSDTYLNGKEIIEAAKQTGAEAIHPGYGFLSENA

SEQ ID NO: 81702 - protein, 240 aa, Unknown
  Bacterial polypetide isolated from the Sargasso Sea
MITKLLIANRGEIALRILRAAKELKIPTVAAYSEADKDLMHVKMADESICIGPADSAQSYLNIPAIISAMELSGADGVHPGYGFLSENADFAEKIEKSGFDFVGPSASVIRMMGNKVSAKEFALQAGLPIVPGSTGPIDQDTQKKAEEIGYPVIIKAASGGGGRGMRIVHSPEELENAIELTQQESAAAFGDSTVYLEKFLESPRHIEVQVLADRHGNVVHLGDRDCSLQRRHQKVIEEA

SEQ ID NO: 81703 - protein, 262 aa, Unknown
  Bacterial polypetide isolated from the Sargasso Sea
MFKKILIANRGEIAVRVIRACKEWGISTVAIHSDVDRDSMHVRLADESICVGPHQPSNSYLNIPAIMSAIELTNSEAVHPGYGFLSENTEFAKILEDNNIKFIGPSSSLISKMGDKIQAKKIAKQYGLPVIDGSEGGVSDVKEAKKLSKNIGFPVLIKAAGGGGGKGMKIVNNENDFENLFLTAKLEAKKFFGNDEVYIEKFFQNPRHIEVQVLSGKNRTVHLHERDCSVQRRHQKLIEETPSPVLTDTVRSDLFNKTVKMV

SEQ ID NO: 81704 - protein, 268 aa, Unknown
  Bacterial polypetide isolated from the Sargasso Sea
MARGPGRLSMSPEWMQGAPSPYSKVLVANRGEIAVRVLQAASEAGLSSVAVYSESDSGSLHVETADESVLLEGDGLDQTYLNGSAIIEAARSTGADAIHPGYGFLSERADFAREVESAGIRWIGPSAYAIETMGDKISARTLMIESGVPVIPGDEIPIEEGADHLGALASAAAKVGYPLLIKASAGGGGKGMRSVSVPKNLRSEFEAAAREASAAFGDGTVYIERLLTSARHVEIQVLCDAHGGAIHLNERDCSLQRRYQKVIEEAPS

SEQ ID NO: 81705 - protein, 191 aa, Unknown
  Bacterial polypetide isolated from the Sargasso Sea
MFKKILIANRGEIAVRIIRACKEWGISTVAIHSDVDRESMHVRLADESICVGPHQPTFSYLNIPAIMSAIELTGAEAVHPGYGFLSENFEFAKILEENDIKFIGPSSKLIKMMGDKIEAKKVAKEYGLPVIEGSEGGIKDFNEAKKICQKIGFPVLIKASGGGGGKGMKIVTRLEDFETLFLTAKQEAKKF

SEQ ID NO: 81706 - protein, 166 aa, Unknown
  Bacterial polypetide isolated from the Sargasso Sea
MFKKILIANRGEIALRVLRACRELGIKTVAIHSDVDENAMHVRMADESICVGPASAQSSYLNIPAIITAATLTDVDAIHPGYGFLSENQRFAEIIEEHNIKFIGPKSEHIKMMGNKIDAKKIMDETGVPTVKGINDLSDKNKIEKFINKVKYPIIVKAASGGGEKE

SEQ ID NO: 81707 - protein, 310 aa, Unknown
  Bacterial polypetide isolated from the Sargasso Sea
MFKKILIANRGEIAVRIIRACKEWGISTVAVHSDVDRDSMHVRMADESVCVGSHQPANSYLNIPALMSAIELTNSDAVHPGYGFLSENPNFARILEENKISFIGASSKHIEMMGDKIQAKRIAKENGLPVIEGSEGGVKEIKEAKELCKRIGFPILIKASGGGGGKGMKIVHKEEEFETLFSTAKSEAKKYFGNDEVYIEKFFQNPRHIEVQILAGKNRAVHLHERDCSVQRRHQKLIEETPSPVLNDEIRKDLFKKTVNMVEKIGYMGAGTVEFIYEDGKFYFLEMNTRVQVEHPVTEMVTGIDIIKEQ

SEQ ID NO: 81708 - protein, 89 aa, Unknown
  Bacterial polypetide isolated from the Sargasso Sea
MFKKILIANRGEIAVRVIRACKEWGIATVAVHSDVDKNSMHVRLADESVCIGPHQPANSYLNIPAIMSAIELTKAEAVHPGYGFLSENF

SEQ ID NO: 81709 - protein, 251 aa, Unknown
  Bacterial polypetide isolated from the Sargasso Sea
MVANRGEIAVRVLQAAREAGLSSVAVYSETDSGSLHVETADESVLLEGEGLDQTYLNGSAIIEAARSTGADAIHPGYGFLSERADFAREVESAGIRWIGPSAHAIETMGDKISARTLMIDSGVPVIPGDEIPIEEGADHLGALASAAAKVGYPLLIKASAGGGGKGMRSVSVPKNLRSEFEAAAREASAAFGDGTVYIERLLTRARHVEIQVLCDAHGGAIHLNERDCSLQRRYQKVIEEAPSPAVDHATR

SEQ ID NO: 81710 - protein, 197 aa, Unknown
  Bacterial polypetide isolated from the Sargasso Sea
MFKKILIANRGEIAVRVIRACKEWGIATVAIHSDVDRDGMHVRLADESVCVGPHQPSLSYLNIPAIMSAIELTGAEAVHPGYGFLSENYEFAKILEENNIKFIGPSSDLIKMMGDKIQAKKVAKEYGLPVIEGSDGGIKDLDEAKKICENVGFPVLIKASGGGGGKGMKIVNKLEKFESLFLTAKQEAKKFFNNDEV

SEQ ID NO: 81711 - protein, 262 aa, Unknown
  Bacterial polypetide isolated from the Sargasso Sea
MPPFQGGLAGFLSYDLCSVLENIPYEPSTAAFPLLALGLYDVVVSFDHQQKKAWIISHGTFEPDLVKRQSKAKERLEYIHNKLFDTAPVKVQESTWDKLPITPAFSKKEYLEAIQQAKNYILEGDIFEVNLTQHFDAQLPEGVKAFDLYCRLRKLNPAPFAAFLQLGYQAIASGSPERFLQLQDNHLQARPIKGTAPRGQTKAQDAQFAQQLQQSTKDQSENVMIVDLMRNDFSRVCDKDSVKVSKLCGLESYANVHHLVSV

SEQ ID NO: 81712 - protein, 135 aa, Unknown
  Bacterial polypetide isolated from the Sargasso Sea
MFKKILIANRGEIAVRIIRACKEWGISTVAIHSDVDRDSMHVRLADESICVGPHQPTLSYLNIPAIMSAIKLTGAEAVHPGYGFLSENFEFAKILEENEIKFIGPSSNLIKMMGDKIEAKKVAKEYGLPVIEGSE

SEQ ID NO: 81713 - protein, 274 aa, Unknown
  Bacterial polypetide isolated from the Sargasso Sea
MFKKILIANRGEIAMRLIRTCKEMGIQTVAVYSKADEESLHVRFADEAVCIGPASSAESYLKSANIIAAAEITNADAIHPGYGFLSENSKFSKICQEHKIKFIGASPEMIDKMGDKASAKATMKKAGVPTIPGSEGIVDSLEDAQKIAQKIGYPIMLKATAGGGGKGMRIVPKAKDLLKAWEDARQESKASFDNDDMYIEKFIENPRHIEIQIIGDSKGEAAHLSERDCSIQRRHQKLIEETPSPFMTEKLRNEMGEAAVKAAKAVKYEGAGTI

SEQ ID NO: 81714 - protein, 300 aa, Unknown
  Bacterial polypetide isolated from the Sargasso Sea
LRVLRACRELGINTVAIHSDVDENAMHVRMADESICVGPASAQSSYLNIPAIITAATLTDVDAIHPGYGFLSENQRFAEIIEEHNIKFIGPKSEHIRMMGNKIDAKKIMDETGVPTVKGINDLSDKNKIEDFIKKVKYPIIVKAASGGGGKGMRIVTEEDDLNKAINEAKIEAKKSFNDENVYLEKFLTSPKHIEIQVLCDSFGNVVTLGERDCSIQRKHQKLIEESPSSVLTNENREKISELCRKSMKEIGYEGVGTLEFLYENNEFYFMEMNTRLQVEHPVTEMVTGIDLVKEQILVA

SEQ ID NO: 81715 - protein, 187 aa, Unknown
  Bacterial polypetide isolated from the Sargasso Sea
MTFSGVLIANRGEIAIRIARAAQDLGLRTVAVYSQDDAASLHTQVADEAVQLEGLGARAYLNIEGVIAAAQASGCDAIHPGYGFLSEQAEFATACANAGIKFIGPTAEHLGLFGDKARAREAAIAANVPVLQGIDRAVTLAEAQAFVGQHPGGIIIKALAGGGGRGTRAVTNAADLAEIFARCQSEA

SEQ ID NO: 81716 - protein, 196 aa, Unknown
  Bacterial polypetide isolated from the Sargasso Sea
MFNKILIANRGEIALRIISTCRRMGIRTVAVYSEADSDALHVKEADESYFIGEAAPAMSYLRIDKILDATKEKGCEAIHPGYGFLSENAEFARQCLNSGITFIGPSAEAIRLMGEKHKAKNVMEKAGVPVVPGYFGEEQSMQCLLKEADKIGYPLMVKAVLGGGGKGMRVVQKKEDFGSALVTVENEGRKAFGDSR

SEQ ID NO: 81717 - protein, 177 aa, Unknown
  Bacterial polypetide isolated from the Sargasso Sea
MFKKILIANRGEIAVRIIRACKEWGIQTVAIHSDVDKESMHVKLADESLCVGSRQPVDSYLNIPSILSAIEVTKSDAVHPGYGFLSENYNFAKILKDNNIKFIGPSPEIIKMMGDKIEAKNTAKKYGIPVIEGSEGGVASLEKGKNIAKKIGYPILIKAAGGGGGQGMKVVKSENEF

SEQ ID NO: 81718 - protein, 202 aa, Unknown
  Bacterial polypetide isolated from the Sargasso Sea
MVEKVLIANRGEIALRIVRSCRELGIATVAVFSTVDKKALHVQLADEAVCVGDSLSNKSYLNIPNILAAATSRGVDAIHPGYGFLAENDKFAEMCNDHGIVFIGPSPKAIRSMGDKSTAKETMEAVGVPTVPGSKGLLSNVDEAYKLADDIGYPVIIKATAGGGGRGMRLVENSDNLEKMFKAAQGEAEAAFGNDGLYMEKF

SEQ ID NO: 81719 - protein, 267 aa, Unknown
  Bacterial polypetide isolated from the Sargasso Sea
AQKSNAGAIHPGYGFLSENSEFAKRVIKEKIIWVGPSPKVISVMGDKLKAKELAIKASVPTLPMTSNEKEVKKIGYPLLIKAAAGGGGKGMRVVTDKKDLQESLEGAKREALSGFGDERVFIERYVEKSRHIEIQILGDSHGNVIHLGERECSIQRRHQKIIEESPSPRITEEIRFAMGNAAVDLAKKIKYESAGTVEFLFDDKSGEFWFLEVNTRLQVEHPVTEEVTGIDLVAEQIKIARGEELQYSQEDIEWTGSSIEARLYAEN

SEQ ID NO: 81720 - protein, 172 aa, Unknown
  Bacterial polypetide isolated from the Sargasso Sea
MFDKVLIANRGEIALRVLRACKDLGIKTVAIHSSADKDLMHVRLADESVCIGPPNPTESYMNIPAIISAMEVTNSDAVHPGYGFLSENADFAEQVERSGFSFIGPSAETIRLMGDKVSAIKIMREAGVPTVPGSDGPVSDHPEHSMKLAQEIGYPVIIKATAGGGGRGMRVV

SEQ ID NO: 81721 - protein, 316 aa, Unknown
  Bacterial polypetide isolated from the Sargasso Sea
KKVLIANRGEIALRVIRTCKEMGIKTVAVYSKADEESLHVKFADEAVCIGPAPSSESYLKISNIIAAAEITNADAIHPGYGFLSESAKFSKICGEHKIKFIGPSPEMIEKMGDKATAVSTMQKAKVPTIPGSGGAVDDVEIAFKIAVKIGFPVMIKASAGGGGKGMRAVFKRNDFKKNWSSAKQEAKAAFGNDDMYIEKLIQEPRHIEIQIIADQYGNVSHLSERDCSIQRRHQKLTEETPSPFMIKSLRNKMGNAAVKAAKFIDYEGVGTVEFLVDSQRNFYFMEMNTRIQVEHPITEQVIDYDLIQEQIKVAAG

SEQ ID NO: 81722 - protein, 137 aa, Unknown
  Bacterial polypetide isolated from the Sargasso Sea
MFKKILIANRGEIALRVLRACRELGIKTVAIHSDVDESAMHVRMADESICVGPASAQSSYLNIPAIITAATLTDVDAIHPGYGFLSENQRFAEIIEEHKIKFIGPRSDHIKMMGNKIDAKKIMDDAGVPTVKGLNDL

SEQ ID NO: 81723 - protein, 290 aa, Unknown
  Bacterial polypetide isolated from the Sargasso Sea
MFKKVLIANRGEIAVRIIRACKEWGIGTVAVHSDVDSDAMHVRLADESVCIGSHQPQNSYLNVSSIMSAVDLTGAEAIHPGYGFLSENAKFADIVSKHGIKFIGPSSDIISKMGDKIEAKKIAKKYGLPIIQGSEGGVKSVEEAKSLCKEIGYPVLIKAAGGGGGKGMKIVKEEKYLNELFLTAKNEAKKYFGNDELYIEKYFMHPRHIEVQIMSGKNKTVHLGERDCSVQRRHQKLIEETPSPVLTPEQRKDLLEKTVKMVEQIGYEGAGTEEFIYENGNFYFLEMNHS

SEQ ID NO: 81724 - protein, 93 aa, Unknown
  Bacterial polypetide isolated from the Sargasso Sea
MGIGKLLIANRGEIALRIIRSCREMGISTVAVYSTVDRNALHVQLADEAVCVGDPPSGRSYLNIPNIIAAATSRGADAIHPGYGFLAENDRFA

SEQ ID NO: 81725 - protein, 108 aa, Unknown
  Bacterial polypetide isolated from the Sargasso Sea
MFKKILIANRGEIAVRIIRACKEWGISAVAVHSDVDRESMHVKLADESVCIGSYQPLSSYLNIPAIMSAIELTGAEAVHPGYGFLSENANFAKILGDNKIKFIGPSPK

SEQ ID NO: 81726 - protein, 120 aa, Unknown
  Bacterial polypetide isolated from the Sargasso Sea
MFKKVLIANRGEIAVRVIRACKEWGIKTVAVHSDVDSESMHVRLADESVCIGSHQPQNSYLNISSIMSAVDLTGAEAIHPGYGFLSENAKFSEIVNKHGIKFVGPSADIISKMGDKFEAK

SEQ ID NO: 81727 - protein, 215 aa, Unknown
  Bacterial polypetide isolated from the Sargasso Sea
MFKKILIANRGEIAVRVIRACKEWGISTVAIHSDVDRESMHVKLADESVCVGPHQPANSYLNIPAIMSAIELTNAEAVHPGYGFLSENSSFAKILEENKIKFIGPSSNLIKMMGDKIQAKKVAKENGLPVIEGSDGGVSNIEEAKQICKRIGFPILVKAAGGGGGRGMKIIYDEGKFEELFLSAKSEAKKFFANEEVYIEKFFEDPRHIEVQVLS

SEQ ID NO: 81728 - protein, 241 aa, Unknown
  Bacterial polypetide isolated from the Sargasso Sea
MFKKILIANRGEIALRVLRACRELGIKTVAIHSDVDENAMHVRMADESICVGPASAQSSYLNIPAIITAATLTDVDAIHPGYGFLSENQRFAEIIEEHNIKFIGPKSEHIKMMGNKIDAKKIMDETGVPTVKGINDLSDKNKIEEFIKKVKYPIIVKAASGGGGKGMRIVTEEDDLNKAINEAKIEAKKSFNDENVYLEKFLTSPKHIEIQVLCDSFGNVVTLGERDCSIQRKHQKLMKKV

SEQ ID NO: 81729 - protein, 284 aa, Unknown
  Bacterial polypetide isolated from the Sargasso Sea
IALRILRACRELDIKTVAIHSEADEKAMHVRMADESVCVGPASAQSSYLNIPAIITAATISNADAIHPGYGFLSENKRFAEIIEEHNIKFIGPKSEHIEMMGNKIAAKKIMKENKVPTVPGLNDLTDMKKVLKFIDDIKLPIIIKAASGGGGKGMRVVNKIEDLEESINAAKIESKKSFNDDTVYLEKFFVNPKHIEIQVLADSNGNVLTLGERDCSIQRKHQKIIEESPSIVLTNAEREKISNLCVKAIKSIKYEGVGTLEFLYENNNFYFMEMNTRLQVEHP

SEQ ID NO: 81730 - protein, 246 aa, Unknown
  Bacterial polypetide isolated from the Sargasso Sea
MVKKVLIANRGEIALRIIRACRELGIETVAVYSKVDEISLHTRFADEAICIGPNESSKSYLNIPSILAAAELTASDAIHPGYGFLAENSKFASICKENNIKFIGSDAEIINMMGNKSLAKDTMKSVGVPVIPGSDGNVDTYEEAKFLCSSIGYPVIIKAVSGGGGKGMRLVNDESELEKSFDMAKVEADAAFSDSNVYIEKYLDKPRHIEIQILCDNFGNIIPLGERECSLQRRHQKILEESPSCI

SEQ ID NO: 81731 - protein, 137 aa, Unknown
  Bacterial polypetide isolated from the Sargasso Sea
MFKKLLIANRGEIACRIASTARRMGIRTVAIYSDVDRDGLHLEACDEAVAIGGTSSAESYLEMDKVLSAAIETASDAIHPGYGFLSENPVFAKKCAAAKIIFVGPPATAIEVMGSKSKAKKLMGSAGVPLVPGYHGE

SEQ ID NO: 81732 - protein, 245 aa, Unknown
  Bacterial polypetide isolated from the Sargasso Sea
MFKKILIANRGEIAVRVIRACKEWGISTVAIHSDVDRDSMHVRLADESICVGPHQPSNSYLNIPAIMSAIELTNSEAVHPGYGFLSENAEFAKILEDNNIKFIGPSSSLISKMGDKIQAKKIAKKYGLPVIDGSEGGVSDIKEAKKLSKNIGFPVLIKASGGGGGKGMKIVNNENDFENLFLTAKLEAKKFFGNDEVYIEKFFQNPRHIEVQVLSGKNRTVHLHERDCSVQRRHQKLIEETPSPV

SEQ ID NO: 81733 - protein, 95 aa, Unknown
  Bacterial polypetide isolated from the Sargasso Sea
MKKILIANRGEIACRIIDSCKKLKFHSIAVYSDIDKNSKHVRKADESIHIGASKAQESYLNADKIIEAAKKLKADAIHPGYGFLAENEKFAQKVI

SEQ ID NO: 81734 - protein, 125 aa, Unknown
  Bacterial polypetide isolated from the Sargasso Sea
MFKKILIANRGEIAVRVIRACKEWGIKTVAVHSDVDADSMHVRLADESVCIGSHKPQNSYLNISAIMSAVDLTGSEAIHPGYGFLSENPKFAEIVNKHGIKFIGPGSSIIKKMGDKIEAKKMQKN

SEQ ID NO: 81735 - protein, 211 aa, Unknown
  Bacterial polypetide isolated from the Sargasso Sea
MLERLLIANRGEIAIRIARTASDMGIKTVSVFSEDDHLSLHTRHSESAINLGQAGVAAYLNAENLIQVAKETGCNAIHPGYGFLSESAEFSKLCAEAGIRFVGPSPATLSQFGDKAQARNLAIASEVPVLKGTNQATTLEEANAFYDSLGVGTAVMIKALAGGGGRGMRPVREKAELEEAYARATSEAQKAFGSGDLYLEEMLYPAKHVEV

SEQ ID NO: 81736 - protein, 251 aa, Unknown
  Bacterial polypetide isolated from the Sargasso Sea
MFKKILIANRGEIAVRVIRACKEWGISTVAVHSDADKESMHVRLADESICIGSHQPVNSYLNIPSIMSAIELTNADAVHPGYGFLSENSSFAKILEENNIKFIGPSSKLIKMMGDKIEAKKIAKENGLPVIEGSDGGVSNIKEAKEICKKIGFPVLIKASGGGGGKGMKIVNDESNFENLFYMAKSEAQKYFGNDEVYIEKFFQNPRHIEVQVMSGKNRTVHLHERDCSIQRRHQKLIEETPSPILNDEIR

SEQ ID NO: 81737 - protein, 221 aa, Unknown
  Bacterial polypetide isolated from the Sargasso Sea
MLVANRGEIASRVIRTAKKIGLKTVAIYTEADRHSPYVMDADLSVKIESSYLDSDAIISAAKTTGAGAIHPGYGFLSENHDFATKIQDEGIIWVGPNSDSIQIMGDKIEAKKHAIKAEMPILESANDAASAKDIGYPLMIKAAAGGGGKGMRIVDDESQLDESIKLAKQEAMNAFGDDRIFIERYIERSRHIEVQIIADKHGNVLHLGERECSIQRRHQKI

SEQ ID NO: 81738 - protein, 223 aa, Unknown
  Bacterial polypetide isolated from the Sargasso Sea
MFKKILIANRGEIACRVIETCDKLGIETVAVYSDADSRALHVMKAKEAINIGPAPSSESYLVIEKIINACKKTGADAVHPGYGFLSENSAFVNQLEREGITFIGPPSEPIRVMGDKIESKIFAEKSGVNIIPGHQEIIKDSQEALEVSKKIGFPVMIKASAGGGGKGMRIAKVEADVEDAFNSSVNEAKSSFGDDRIFIEKFIEKPRHIEIQVLADKHGNVVH

SEQ ID NO: 81739 - protein, 154 aa, Unknown
  Bacterial polypetide isolated from the Sargasso Sea
MSRKPAMFEKILIANRGEIALRIQRACRELGVKTVVVYSEADKEAKYVKLADEAVCIGPAPSNLSYLNMPALISAAEVTDAEAIHPGYGFLSENADFAERVEQSGFTFIGPRPETIRMMGDKVTAKQTMIKTGVPCVPGSEGACRKIRKRSENA

SEQ ID NO: 81740 - protein, 280 aa, Unknown
  Bacterial polypetide isolated from the Sargasso Sea
MFKKILIANRGEIALRVIRTCKEMGIKTVAVYSQADVNAMHVRMADESVCIGPAESSKSYLSIPSIISACEITGCEAVHPGYGFLSENAKFAEILSDHGIKFIGPSVNHINIMGDKINAKNQMEKFNVPCVPGSRGAIADLEEARLAAKEIGFPVLLKAAAGGGGIGMKIVSSDQQLEKLFIQAKSEAKKSFNDDTMYIEKYLEAPRHIEIQVFGDGKGKAVHLRERDCSLQRRHQKVLEETPSPAVEHDEIDKIGTICSNAISKMKYEGAGTIEFLYEN

SEQ ID NO: 81741 - protein, 120 aa, Unknown
  Bacterial polypetide isolated from the Sargasso Sea
MLVANRGEIASRVIRTAKKMGLKTVAIYTEADRHSPYVMDADLSVKIESSYLDSDAIISAAKTTGAGAIHPGYGFLSENHDFATKIQDEGIIWVGPNSDSIQIMGDKIEAKKHAIKAEMQ

SEQ ID NO: 81742 - protein, 273 aa, Unknown
  Bacterial polypetide isolated from the Sargasso Sea
MFKKVLIANRGEIAVRVIRACKEWGIGTVAVHSDVDADSMHVRLADESVCIGSHQPQNSYLNISSIMSAVDLTGAEAIHPGYGFLSENAKFSEIVNKHGIKFIGPSADIISKMGDKIVAKKIAKKYGLPVIEGSEGGVKSLSEAKSISKEIGYPILIKAAGGGGGKGMKIVAEESELENLFLTAKTEAKKFFGNDELYIEKYFKNPRHIEVQIMSGKNKTVHLGERDCSVQRRHQKLIEETPSPVITNEQRKDLLDKTVKMVEQINYEGARYC

SEQ ID NO: 81743 - protein, 165 aa, Unknown
  Bacterial polypetide isolated from the Sargasso Sea
SIAKGYAIDMINDFLKDHDNYLIDIGGELSVKGSNKGELWNIGLQDPKFISNKPIYIISTNNWYSIATSGEYRNYKIKDNKKISHTINPKSLNSIENNLLSVTVINDNDIPITAFADALATAFNAMGYKSAYDYANKSDIAALFVIEEEGDINIIKTEKWYNLNL

SEQ ID NO: 81744 - protein, 296 aa, Unknown
  Bacterial polypetide isolated from the Sargasso Sea
TNRYKSEAVAAEASRAEALKAKEKTKDDLRGAEKSFDNAMLQSKEADENLIKAEETRNQTQALEVDARAALSSAEGEANAISAEVAALAKILERDTMEGGQVIDRLQVEHGFEKALGAALADDLRSPQVQEDGPSGWVSLDELTIQQDLPDGVTPLTHHVSVPEVLNRRISQIGLVDADEGPKLQRLLKPGQRLVSTEGDLWRWDGFRAWSEDAPTATSLRLEQLNRLEELKQLNERANVQLEAAKAAHESLTKRLATDTDSDKAARDRVKEADSDLSDAQRAQNRAEAELSLAIN

SEQ ID NO: 81745 - protein, 226 aa, Unknown
  Bacterial polypetide isolated from the Sargasso Sea
MQGAPSPYTKVLVANRGEIAVRVLQAARESGLSSVAVYSESDSGSLHVETADESVLLEGEGLDQTYLNGSAIIEAARSTGADAIHPGYGFLSERADFAREVESAGIRWIGPSAHAIETMGDKISARTLMIESGVPVIPGDEIPIEEGADHLGALASAAAKVGYPLLIKASAGGGGKGMRSVSVPKNLRSEFEAAAREASAAFGDGTVYIERLLTRARHVEIQVLCD

SEQ ID NO: 81746 - protein, 266 aa, Unknown
  Bacterial polypetide isolated from the Sargasso Sea
CKEWGIGTVAVHSDVDSDSMHVRLADESVCIGSHEPRNSYLNIPAIMSAVDVTGAQAIHPGYGFLSENYKFAEIVQKHGIKFIGPGSEIIKKMGDKIEAKKIAKENGLPVIEGSDGGVKNSKDAKIICKNIGYPVLIKASGGGGGKGMKIVEDENKLDELFSLARLEAKKYFGNDEVYIEKYFKNPRHIEVQVLSGKNRTVHLNERDCSVQRKHQKLIEETPSPVLDEKTRSDLLNKTVKMVQAIGYEGAGTVEYIYENGKFYFLK

SEQ ID NO: 81747 - protein, 274 aa, Unknown
  Bacterial polypetide isolated from the Sargasso Sea
MFKKILIANRGEIAVRIIRACKEWGIPTVAVHSDVDRESMHVRMADESVCIGSHQPANSYLNIPALMSAIELTNADAVHPGYGFLSENSNFARILEENKINFIGASSKHIEMMGDKIQAKRIAKENGLPVIEGSEGGVKDVSEAKKLCKKIGFPVLIKASGGGGGKGMKIVYEEEEFETLFSTAKSEAQKYFGNDEVYIEKFFQNPRHIEVQILAGKNRVVHLHERDCSVQRRHQKLIEETPSPVINNEIRKDLFERTVKMVEKIGYMGAGTVE

SEQ ID NO: 81748 - protein, 158 aa, Unknown
  Bacterial polypetide isolated from the Sargasso Sea
MFKKILIANRGEIAVRIIRACKEWGISTVAVHSDVDKESMHVKLADESVCIGSYQPLSSYLNIPAIMSAIELTGAEAVHPGYGFLSENANFAKILGDNKIKFIGPSPKLIKMMGDKIEAKKIAKQHGLPVIEGSEGGISNIQEAQEICDKIGFPILIK

SEQ ID NO: 81749 - protein, 326 aa, Unknown
  Bacterial polypetide isolated from the Sargasso Sea
CDEAISLGSDPLKGSYLNIKKIIDLAKNLKIDAVHPGYGFLSENYEFARKLQAKNIHFIGPPHNAIKAMGDKIESKKIAKKAGVNCIPGVNKEIKNLSEANEYADIIGFPIMIKASAGGGGKGMRIAKNKKDFQGLITLAKEEAKNAFGDDRVFLEKYIEIPRHIEIQILGDKFGNIVWIGDRECSIQRRHQKIIEEAPSSFIDDITRKKMGEQSILLAKEVGYYSAGTVEFVMDKNRNFYFLEMNTRLQVEHPVTEETANIDLVEEMINVANGKKIKIKQENVRINGWSFESRLCAENPLKDFLPSAGRISAFRIHSKDVRLDSG

SEQ ID NO: 81750 - protein, 242 aa, Unknown
  Bacterial polypetide isolated from the Sargasso Sea
MASRFEKFSERARKVLSLAQEEAQRFNHNYIGTEHVLLGLTRVNEGTATKVLAGLGVDMEKVKSAVEYIIGEGDPSSTGDIGLTPRAKKVIELAVDEARRMTHQYIGTEHLLVGLLREGEGVAAGVLESLGVNLEQVRSEITNITERTTHSTSPSGSPQSTSKTPTLDQLGIDLTDKARENKLDPTVGRQQEIERVTQILSRRTKNNPVLIGEPGVGKTAIVEGLAQKIASNDVPGTLQGKG

SEQ ID NO: 81751 - protein, 155 aa, Unknown
  Bacterial polypetide isolated from the Sargasso Sea
MFKKILIANRGEIAVRIIRACKEWGISTVAVHSDVDRESMHVKLADESICIGSHQPANSYLNIPALLSAIDLTNSEAVHPGYGFLSENANFAKILEENKIKFIGASSKHIEMMGDKIQAKKIAKEKGLPIIEGSEGGVKNVSEAKNSQNKLDFQF

SEQ ID NO: 81752 - protein, 86 aa, Unknown
  Bacterial polypetide isolated from the Sargasso Sea
MLDKVLIANRGEIALRILRACKELGIKTVAVHSTADKNLKHVLLADESICIGKASATESYLNIPRIIAAAEVTNSIAIHPGYGFLA

SEQ ID NO: 81753 - protein, 319 aa, Unknown
  Bacterial polypetide isolated from the Sargasso Sea
MADESICVGPASAQSSYLNIPAIITAATLTDVDAIHPGYGFLSENQRFAEIIEEHNIKFIGPKSEHIKMMGNKIDAKKIMDETGVPTVKGINDLSDKNKIEDFIKKVKYPIIVKAASGGGGKGMRIVTEEDDLNKAINEAKIEAKKSFNDENVYLEKFLTSPKHIEIQVLCDSFGNVVTLGERDCSIQRKHQKLIEESPSSVLTNENREKISELCRKSMKEIGYEGVGTLEFLYENNEFYFMEMNTRLQVEHPVTEMVTGIDLVKEQILVANGEKLTIKQEDIKLKGSSIECRINAEHPEKFIPSPGKITQYHQPGGLG

SEQ ID NO: 81754 - protein, 103 aa, Unknown
  Bacterial polypetide isolated from the Sargasso Sea
MFKKILIANRGEIALRVIRTCKEMGIKTVAVYSQADVNAMHVRMADESVCIGPAESSKSYLSIPSIISACEITGSEAVHPGYGFLSENARFAEILGDHGIKFI

SEQ ID NO: 81755 - protein, 132 aa, Unknown
  Bacterial polypetide isolated from the Sargasso Sea
MKKILIANRGEIACRIIDSCKKLKFQSIAVYSDIDKNSKHVRKADESIHIGASKAQESYLNVDKIIEAAKKLKADAIHPGYGFLAENEKFAQKVIDSGITWIGPKPNTIVSMGNKDIARDLALKSNLPICPG

SEQ ID NO: 81756 - protein, 231 aa, Unknown
  Bacterial polypetide isolated from the Sargasso Sea
NEDVRKKNANIRYITPLFDGELTVTGMAYDNSWNGADQVPARAIESGLIDRLGSIDTDVGGESSRYSLSANYTSDGINASFYAIDTDLTLFSNFTYFLDNPETGDQFEQADDRQIYGGEIFTTVPLAVTDGSTITMGAQWRFDDIENVGLYRTRNLQRVGTIREDAIKSSSYSLFAQSNILLTDALSLSLGGRYDYLDVDVTSDLAANSGEESDGLFTLKAALKYAVTDDI

SEQ ID NO: 81757 - protein, 119 aa, Unknown
  Bacterial polypetide isolated from the Sargasso Sea
MLDKVLIANRGEIALRIQRACRELGIKTVAVHSTADDSQKHVFLADESVCIGPPESLKSYLNIPSIISAAEVTDAMAIHPGYGFLAENGDFAEQVEQSGYIFIGPKSETINLMGNKISA

SEQ ID NO: 81758 - protein, 219 aa, Unknown
  Bacterial polypetide isolated from the Sargasso Sea
MFKKILIANRGEIACRVIQTCKKMFIKTVAIYSDADENALHADLADEAICIGGSSSAESYLVIEKIIDACKKTKADAVHPGYGFLSENEEFAKALEENSIAFIGPNHKAIVSMGDKIESKKIAEEASVNVIPGYTKAIKDEKEAVNIAKEIGYPVMLKASAGGGGKGMRVVNNDDECIDGFQRAKNESKASFGDDRIFAEKFITEPHHIEIQILANKKG

SEQ ID NO: 81759 - protein, 206 aa, Unknown
  Bacterial polypetide isolated from the Sargasso Sea
MSQPVTKDGKGRINVSKQKNVLIANRGEIAVRIARAAKGLGINPISIFAPADSDSLHTKLTPRAVELTGKATDPVSAYLDLEQIVSIAKENECELVHPGYGFLSENAVFAKKCSEQGIEFIGPEHRVLELFGDKVQARQLAESLSIPTIPGSKDALDSVGAAKEVARAIGYPIMLKASSGGGGRGMRAVANEKEMEEAFERCASEA

SEQ ID NO: 81760 - protein, 133 aa, Unknown
  Bacterial polypetide isolated from the Sargasso Sea
MKKILIANRGEIACRIINSCKKLKFHSIAVYSDIDKNSKHVRKADESIHIGASKAQESYLNADKIIEAAKKIKADAIHPGYGFLAENEKFAQKVIDSGIIWIGPKPNTIVSMGNKDIARDLALKSNLPICPGL

SEQ ID NO: 81761 - protein, 274 aa, Unknown
  Bacterial polypetide isolated from the Sargasso Sea
KVIDAVRQSGAEAVHPGYGFLSENAAFADALEAEGIVFIGPRNRAIAAMGDKIESKKLAAEAGVNTVPGYVGILADDIEAVKVAGDIGYPVMIKASAGGGGKGMRVAYNETEVKEGFKSAVNEAISSFGDDRVFIEKFVEKPRHIEIQIIADSRGNTLYLGERECSIQRRHQKVVEEAPSPFLDPETRKLMGEQSVLLAKAVDYCSAGTVEFIVDKNKDFYFLEMNTRLQVEHPVTECITGLDLVELMIRVASGEELPFRQADVTLKGWAIETR

SEQ ID NO: 81762 - protein, 305 aa, Unknown
  Bacterial polypetide isolated from the Sargasso Sea
YIDEDKKSPHVNFADHAIKIQTNYMDMDAIINIAKSYSIDAIHPGYGFLSENASFARRVQSNKIIWIGPTPTVIKKMGDKLQAKEIAKKVNIPTLDTVEKVSLAKKIGFPLMIKAAAGGGGKGMRIVKDSASLKDAASAAKREALSGFGDDRIFFERYIEKSRHIEVQILGDDKNVVHLGERECSIQRRHQKIIEESPSRRLSEELRLNICEDAKRIAQAIKYTSAGTVEFLLDDKTGEYWFLEVNTRLQVEHPVTEEVTGIDIVQEQINIANKKSISFLNNDDADLGHSFGHSIEVRIYAENPE

SEQ ID NO: 81763 - protein, 139 aa, Unknown
  Bacterial polypetide isolated from the Sargasso Sea
MFKKILIANRGEIAVRIIRACKEWGISTVAIHSNVDRESMHVKLADESICVGSHQPANSYLNIPAILSAIELTNSEAVHPGYGFLSENFNFAKILEDNKIKFIGPSSNLIKKMGDKIQAKIIAKENGLPIIEGSEGGIK

SEQ ID NO: 81764 - protein, 157 aa, Unknown
  Bacterial polypetide isolated from the Sargasso Sea
MFNKILIANRGEIACRIIQTAHRMGIRCVAVYSDADANARHVAMADEAFNIGPAASADSYLKADTIIDIARQSGARAIHPGYGFLSENTGFAEACEANGIVFIGPPSSAIAAMGSKSAAKAIMKKAGVPLVPGYHGKDQSPDLLRAEAEKCGFPLLL

SEQ ID NO: 81765 - protein, 175 aa, Unknown
  Bacterial polypetide isolated from the Sargasso Sea
MLDKVLIANRGEIALRILRACKELGIKTVAVHSTADKNLKHVLLADESICIGKASATESYLNIPRIIAAAEVTNSIAIHPGYGFLAENADFAEAVEKSGFIFIGPKAETINLMGDKVSAINAMKKAGVPCVPGSDGPLTDDVERNKAIAKRIGYPIIVKAAGGGGGRGMRVVRSE

SEQ ID NO: 81766 - protein, 232 aa, Unknown
  Bacterial polypetide isolated from the Sargasso Sea
MIEKVLIANRGEIALRVMKTCKTLGIKTVAVYSDEDVNSLHVKTADESYYIGEAAPAKSYLNQEKILEVMLSSGTDAIHPGYGFLSENDDFARLCEKNKINFIGPSADSMNLCGDKMRCKAAMLKAEVPTVPGSPGIVDDAEQAEKIANEIGYPVLLKSVYGGGGRGIRLVTNDKELKEGFATVTSESIAAVGKSAIIVEKFLEKTRHIEYQMCRDKHGNAVHLFERECSIQ

SEQ ID NO: 81767 - protein, 280 aa, Unknown
  Bacterial polypetide isolated from the Sargasso Sea
RGHVDAVHPGYGFLSENATFTKLLKQNDIVFIGPSFSAIHAMGDKIKSKEIAKSAKVNIVPGFMGEINDSKHAIKISKEIGFPIMIKASAGGGGKGMRIAYDEKDVEESFNRASSEAKKSFGEGRMFIEKYVQNPRHIEIQIIADNHGNIVSLGERECSIQRRNQKVIEEAPSSFLDDILRKEMSTQSIKLSAKVGYTSAGTVEFIVDNNRNFYFLEMNTRLQVEHPVTELITGIDLVEEMIKIAAGEKLSFTQKDIKLKGWSLESRIYAEDPYKDFLPS

SEQ ID NO: 81768 - protein, 138 aa, Unknown
  Bacterial polypetide isolated from the Sargasso Sea
MLDKVLIANRGEIALRIQRACRELGIKTVAVHSTADESQKHVFLADESVCIGPPESLKSYLNIPSIISAAEVTDAMAIHPGYGFLAENGDFAEKVEQSGYIFIGPKSETINLMGNKISAKEVVSEVGIQCIPGSNGEL

SEQ ID NO: 81769 - protein, 301 aa, Unknown
  Bacterial polypetide isolated from the Sargasso Sea
AIGANSASTGAFTTTTASTKVDITGSAGLVLQNDETITNSTDGTVLINGVVAAGDGGGAGVFQSNGDFDVTIQTGNSTTGTITMTDGSNGNIALTPNGSGEVDISKVDIDAGAIDGTAIGANSASTGAFSTLSASGATDINNTLNINNTVSLDGSANELRFYEGSNYVGFEAPSLSGDQIWVLPTADGNSNQVLSTNGSGTLSWADVSASTVTVSDNENTSETNALIFTSGGDLDGGSMGLESDGDATYNPSTGVIGATGFSGATITASTKVDITGSAGLVLQNDETITNSTDGTVLINGV

SEQ ID NO: 81770 - protein, 120 aa, Unknown
  Bacterial polypetide isolated from the Sargasso Sea
MFNKVLIANRGEIALRILRACKDLGVKTVAIHSSADKDLMHVRLADESVCIGPPNPTESYLNAPAIISAMEVTNSDAVHPGYGFLSENSDFAEQVERSGFTFIGPSPETIRLMGDKVPPS

SEQ ID NO: 81771 - protein, 228 aa, Unknown
  Bacterial polypetide isolated from the Sargasso Sea
MFKKILIANRGEIALRVLRACRELGIKTVAIHSEVDEGAMHVRMADESICVGPASAQSSYLNIPAIITAATLTNVDGIHPGYGFLSENQRFAEIIEEHNIKFIGPHSNHIKIMGNKIDAKKIMDENNVPTVPGLNDISDKNYIDNFIKNVDFPIIVKAASGGGGKGMRVVTKSNEILNAITSAKAEAKKSFNDDNVYLEKYLTTPKHIEIQILADMHGNVVTLGERDV

SEQ ID NO: 81772 - protein, 233 aa, Unknown
  Bacterial polypetide isolated from the Sargasso Sea
MVEKVLIANRGEIALRIVRSCRELGIATVAVFSTVDKKALHVQLADEAVCVGDSLSNKSYLNIPNILAAATSRGVDAIHPGYGFLAENDKFAEMCNDHGIVFIGPSPKAIRSMGDKSTAKETMEAVGVPTVPGSKGLLSNVDEAYKLADGIGYPVIIKATAGGGGRGMRLVENSDNLEKMFKAAQGEAEAAFGNDGLYMEKFIKKPRHVEIQILADRSGNVVHLGERDCSVQR

SEQ ID NO: 81773 - protein, 145 aa, Unknown
  Bacterial polypetide isolated from the Sargasso Sea
MLKKVLIANRGEIALRIIRACKDLGISTVAIHSTADTNSMHVRMADESICIGPPKASDSYLSIPNIIAACEVTGADAVHPGYGFLSENPKFAQILSDHKITYIGPSAHHIKLMGDKITAKKTMEDLGVPCVPGSNGIINNLSEAK

SEQ ID NO: 81774 - protein, 310 aa, Unknown
  Bacterial polypetide isolated from the Sargasso Sea
MGAKAYLDIGNIISIAKDCNCDAIHPGYGFLSENSEFAEKCSQNNIEFIGPSQSLLALFGDKARARQAAIEAGVPIVQGTEKASSLEDCQEFFKSLGDNAAIMIKALAGGGGRGTRIVTKLEELEEAYLRCQSEAKNAFGNDELYVEELIQHARHIEIQIIGDREGNILAIGDRECSVQRRHQKIIEIAPSFDLPEKTRLAIQEAAEKLAKSVGYYSLGTFEFLVDSKSNGQERFAFIEANARLQVEHTVTEEVTGVDLVQSQIEIANGTSLKELELDETPQAIGYAIQARINMETIESDGTVKPTTGEL

SEQ ID NO: 81775 - protein, 195 aa, Unknown
  Bacterial polypetide isolated from the Sargasso Sea
MFKKILIANRGEIACRVIQTCKKMGIKTVAIYSDADENALHADLADEAICIGGSSSAESYLVIEKIIDACKKTKADAVHPGYGFLSENEEFAKTLEENSIAFIGPNHKAIVSMGDKIESKKIAEEASVNVIPGYTKAIKDEKEAVKIAKEIGYPVMLKASAGGGGKGMRVVNNDDECVDGFQRAKNESKASFGDD

SEQ ID NO: 81776 - protein, 121 aa, Unknown
  Bacterial polypetide isolated from the Sargasso Sea
MPVEKLLIANRGEIAIRIARAAEELGIPSVAIYSTDDHSSLHTKMASESHALEGSGVSAYLNIEHIVDTAIATGCDAVHPGYGFLAENADFAAALENAGLTFVGPEASQLALFGNKVSARE

SEQ ID NO: 81777 - protein, 102 aa, Unknown
  Bacterial polypetide isolated from the Sargasso Sea
MFKKILIANRGEIAVRIVRACKEWGIQTVAIHSNVDKDSMHVRLADESVCIGSHQPSSSYLNIPAIMSAIELTNAEAVHPGYGFLSENANFAKILEENKIKF

SEQ ID NO: 81778 - protein, 120 aa, Unknown
  Bacterial polypetide isolated from the Sargasso Sea
MIKKILIANRGEIACRVIKTAKQLGIKTVAVFSEADKDSLFVSQADESYCIGKPEPSESYLNINKIISIAKKSKSDAIHPGYGFLSENEEFVKKLKKEKIIFIGPNPKAIKKMGDKIESK

SEQ ID NO: 81779 - protein, 287 aa, Unknown
  Bacterial polypetide isolated from the Sargasso Sea
MFKKILIANRGEIAVRIIRACKEWGIHTVAVHSDVDRESMHVRMADESVCIGSHQPANSYLNIPALMSAIELTNADAVHPGYGFLSENANFARILEENKINFIGASSKHIEMMGDKIQAKRIAKENGLPVIEGSEGGVKDVSEAKELCKKIGFPVLIKASGGGGGKGMKIVYKEEEFEALFSTAKSEAQKYFGNDEVYIEKFFQNPRHIEVQILAGKNRAVHLHERDCSVQRRHQKLIEETPSPVLNDEVRKDLFERTVKMVAKIGYMGAGTVEFIYEDGKFYFLEM

SEQ ID NO: 81780 - protein, 98 aa, Unknown
  Bacterial polypetide isolated from the Sargasso Sea
MFKKILIANRGEIAVRVIRACKEWGISTVAIHSDVDRESMHVKLADESICVGPHQPSNSYLNIPAIMSAIELTNAEAVHPGYGFLSENHRFAKILEDN

SEQ ID NO: 81781 - protein, 143 aa, Unknown
  Bacterial polypetide isolated from the Sargasso Sea
MLKKVLIANRGEIALRIIRACKDLKISTVAIHSTADTNSMHVRMADESVCIGPPKAGDSYLSIPNIIAACEISGADAVHPGYGFLSENPKFAQVLSDHKITYIGPSSKHIELMGDKITAKKTMKQLGVPCVPGSDGVIKNFKE

SEQ ID NO: 81782 - protein, 200 aa, Unknown
  Bacterial polypetide isolated from the Sargasso Sea
MYKKILIANRGEIALRIIRACHELGIKSVAVYSTADKSSLHTKFADEAVCIGPPQSSESYLSIPSIISAGEITNSDAIHPGYGFLSENADFSQICSDNNFAFIGPKPDIINAMGDKSEAKKTMKSAGVPVIPGNEGILSNPSEARRIANDIGYPVMLKASAGGGGRGMRLVHKESEIEMLLRQQALRLEVHFIMVICILR

SEQ ID NO: 81783 - protein, 329 aa, Unknown
  Bacterial polypetide isolated from the Sargasso Sea
AATLTDVDAIHPGYGFLSENQRFAEIIEEHKIKFIGPKSDHIRMMGNKIDAKKIMDDSGVPTVKGINDLSDKSKVLKFIEEVKYPIIVKAASGGGGKGMRVVKEDDDLEKSIKEAKIEAKKSFNDENVYLEKFLTSPKHIEIQVLCDSFGNVVTLGERDCSIQRKHQKLIEESPSSVLTNEEREKISELCTQAMKEIGYEGVGTLEFLYENNEFYFMEMNTRLQVEHPVTEMVTGIDLVKEQIQVANGEKLKIKQDDIKLNGNSIECRINAEHPESFILSPGKITQYHQPGGLGVRVDSAVYDGYSIPSHYDSMIGKIITYGSTRSEAL

SEQ ID NO: 81784 - protein, 276 aa, Unknown
  Bacterial polypetide isolated from the Sargasso Sea
MFKKILIANRGEIAVRIIRACKEWGISTVAVHSDVDRDSMHVKLADESVCIGSHQPANSYLNIPALLSAIDLTNAEAVHPGYGFLSENSKFAKILEENKIKFIGASSKHIEMMGDKIQAKKIAKEHGLPVIEGSDGGVKDISDAKDLSKKIGFPVLIKASGGGGGKGMKIVHKVEDFETLFSTAKSEAKKYFGNDEVYIEKFFQNPRHIEVQILSGKNGTVHLHERDCSVQRRHQKLIEETPSPVLNDEIRKDLFEKTVSMVNKIGYEGAGTVEFI

SEQ ID NO: 81785 - protein, 126 aa, Unknown
  Bacterial polypetide isolated from the Sargasso Sea
MFNKILIANRGEIALRIISTCRRMGIRTVSVYSEADSDALHVKEADESCFIGEASPAMSYLRIDKILDATKEKGCEAIHPGYGFLSENAEFASKCLNSGITFIGPSAEAIRLKGEKHKAKSVMEKA

SEQ ID NO: 81786 - protein, 220 aa, Unknown
  Bacterial polypetide isolated from the Sargasso Sea
MDKDYDGIITTSLENAVNWSRKFSLFQYPFVTACCGMEYMAAACSHYDISRFGAEIPRFSPRQADLLWVVGTITHKMSPVLKTIYDQMADPKWVIAFGTCASTGGFYQNYSVLQGIDRLIPVDLYIAGCPPRPEAVLDGLIELQNNIQKEGPKPNGIAPSAIRHRDQKVDQLNRYFEISKKEVVENVQNPKSNRISKPGFTYSEDYVNTNPHIGYDSPEM

SEQ ID NO: 81787 - protein, 189 aa, Unknown
  Bacterial polypetide isolated from the Sargasso Sea
MFKKVLIANRGEIALRILRACRELRIKAVAVHSDIDRNLKHVRLADESVCIGPANAAKSYLNIPAIIAAAELTNCDAVHPGYGFLAENADFSEQVENSGFAFIGPRAKNIRIMGDKVSAIAAMKKAGVPCVPGSNGPLSKTQKDNLAMAKSIGYPVLIKAAAGGGGRGMRVVRKEGDLIQFIEYTKAEA

SEQ ID NO: 81788 - protein, 257 aa, Unknown
  Bacterial polypetide isolated from the Sargasso Sea
MSLKTYAIITDVHGNSSSLKEAIKIINKRDDVDQIICLGDYFALGPDPMGCFKLLESLSSCVFLRGNHERYLIENLWAHERPNLEGMSPDDPICKEIVQNEKWTAEMIGEKGRNFCNNTRIAERQIIDNTLVEFTHAWYQRDEIPPTMDEAIAWKNHISKANNKIKQFIFVHGHTHLPRIEEKGNLKILCQGATGLPFDQDPRGSIAFLKVGMEFNWEIVRFEYDRKRSIDMLEDIKPPFYKNLQNTIRYATIRNDI

SEQ ID NO: 81789 - protein, 264 aa, Unknown
  Bacterial polypetide isolated from the Sargasso Sea
EAVHPGYGFLSENPNFVNQLEKKGIIFIGPSSKVISSMGDKIEAKKIAENANVSCVPGFLGEVVGLKHAKEIASKIGYPVMVKASAGGGGKGMRIAANEKDLESGLERAMSEAKSSFGDDRVFIEKYIEEPRHIEIQIVSDVYGNTIYLGERECSIQRRHQKVIEEAPSPFLDEKTRQAMGEQAIELAKKVGYFSVGTVEFIVDKNKQFYFLEMNTRLQVEHPVTEFVTGIDLVEQMFRIASKEKLKLNQSDIDLKGWSIEARI

SEQ ID NO: 81790 - protein, 186 aa, Unknown
  Bacterial polypetide isolated from the Sargasso Sea
MCANRGEIAVRVFRAGTELGMNTVAIFSEADRLATHRYKADESYCVNPGETPVGAYLGFEGIIDIAKAHGVQAIHPGYGFLSENAAFAKRCEEEGIAWVGPRSETIMQMGDKVIAKQLAKECGLPLVPGTEDSTDSVEEAQAFAEEFGMPIMLKAAFGGGGRGMRVVRTMSELPEAFTRASSEALA

SEQ ID NO: 81791 - protein, 250 aa, Unknown
  Bacterial polypetide isolated from the Sargasso Sea
MVANRGEIAVRVLQAAREAGLSSVAVYSESDSGSLHVETADESVLLEGEGLDQTYLNGSAIIEAARSTGADAIHPGYGFLSERADFAREVESAGIRWIGPSAHAIETMGDKISARTLMIESGVPVIPGDEIPIEEGADHLGALASAAAKVGYPLLIKASAGGGGKGMRSVSVPKNLRSEFEAAAREASAAFGDGTVYIERLLTRARHVEIQVLCDAHGGAIHLNERDCSLQRRYQKVIEEAPSPAVDHAT

SEQ ID NO: 81792 - protein, 120 aa, Unknown
  Bacterial polypetide isolated from the Sargasso Sea
MFKKILIANRGEIALRVLRACRELGIKTVAIHSDVDENAMHVRMADESICVGPASAQSSYLNIPAIITAATLTDVDAIHPGYGFLSENQRFAEIIEEHNKKFIGPRSEHIKMMGNKMMQK

SEQ ID NO: 81793 - protein, 263 aa, Unknown
  Bacterial polypetide isolated from the Sargasso Sea
KVISSLGNSMSDGLHVPDRADGMGCLPVEGSSDKVALIRNHELHPKHLSAQPQSIQMHTSELAYDNYHSGVALPGGTTTMVYNLTTKMVEREFISLVGTVRNCSGGITPWGTWLTCEESVDRPHGPNGDVVNKDHGYIFEVPANADSLIEAKPLKAMGRFNHEAACVDPKTGIVYLTEDQGDSLLYRFVPNEYANLAAGGQLEALVVKNKPQFDTRNWSSTTMPLATWFDVEWIVLDNPESPNDDLRARGYEKGAALFARGEG

SEQ ID NO: 81794 - protein, 88 aa, Unknown
  Bacterial polypetide isolated from the Sargasso Sea
MFKKILIANRGEIAVRIIRACKEWGISTVAIHSNVDRESMHVKLADESICVGSHQPANSYLNIPAILSAIELTNSEAVHPGYGFLSEN

SEQ ID NO: 81795 - protein, 176 aa, Unknown
  Bacterial polypetide isolated from the Sargasso Sea
MFKKILIANRGEIAVRIIRACKEWGIATVAIHSDVDRESMHVRLADESICVGPHQPTLSYLNIPAIMSAIELTGSEAVHPGYGFLSENFEFAKILEENDIKFIGPSSNLIKMMGDKIEAKKVAKEYGLPVIEGSEGGIKDINEAKKICEKIGFPVLIKASGGGGGKGMKIVNKEEE

SEQ ID NO: 81796 - protein, 314 aa, Unknown
  Bacterial polypetide isolated from the Sargasso Sea
YVDADKDAPFVKQADEAIKISDGGYLDIDAIINAAKISKAEAIHPGYGFLSENALFAKKIQKEKLIWIGPGSEIISKMGDKLEAKELAIQSGIPTLPKTSDPKKINKIGFPLLIKAAAGGGGKGMRVVYSKTEFKDALAAAQREALSGFNDDRVFIEKYIEKSRHIEIQILGDSFGNIIHLGERECSIQRRYQKIIEETPSSRISVEVRKNMCDAAVNLAKNLQYTSAGTIEFLYDDKTDEFWFLEVNTRLQVEHPVTEMVTGIDLVAEQISIAQGNKISISQKDLVFKGHAIEARLYAEDPENNSYQIWKNDA

SEQ ID NO: 81797 - protein, 219 aa, Unknown
  Bacterial polypetide isolated from the Sargasso Sea
MQGAPSPYTKVLVANRGEIAVRVLQAASEAGLSSVAVYSESDSGSLHVETADESVLLEGEGLDQTYLNGSAIIEAARSTGADAIHPGYGFLSERADFAREVESAGIRWIGPSDHAIETMGDKISARTLMIESGVPVIPGDEIPIEEGADHLGALASAAAKVGYPLLIKASAGGGGKGMRSVSVPKNLRSEFEAAAREASAAFGDGTVYIERLLTRARHV

SEQ ID NO: 81798 - protein, 176 aa, Unknown
  Bacterial polypetide isolated from the Sargasso Sea
MLDKILIANRGEIALRIQRACRELGIKTVAVYSKADAKQKHVLLADESVCIGPPESANSYLNMPSIISAAEVTDSMAIHPGYGFLAENGDFAEQVEESGYSFIGPKSETIKLMGNKINAKDAVKEVEINCIPGSDSSLGEDMDKIYQLADEIGYPVLIKAAAGGGGKGMRIAHTKA

SEQ ID NO: 81799 - protein, 289 aa, Unknown
  Bacterial polypetide isolated from the Sargasso Sea
IFIPSSTSKSFRNHFINAAKKYVKDLKLNKKKSLIIDIGSNDGVALKPFLEMGYKNILGIEPAKNLAKLANKNKIKTINSFLEKKNLRKFKKNADLILASNVFAHSDKLKEMAECMFKLLGKNGTIIIEIQYLMNTLKDLTFDNIYHEHYNYWSLTSLVNFFNQFQATIYRSEKIDTHGGSLRIYIKKNKKVKIEKSVKNTLMEEKKFGIKKFKTYQDFGEKVYKIRENVIKNIKKLKNKNKLIIGYGAPAKATTALNFFGITNEIDFIIEDNKLKHNKFIPGVKIPIK

SEQ ID NO: 81800 - protein, 227 aa, Unknown
  Bacterial polypetide isolated from the Sargasso Sea
KILIANRGEIAVRVIRACKEWGISTVAVHSDVDKESMHVRLADESICIGSHQPVNSYLNIPALMSAIELTNAEAVHPGYGFLSENSSFAKILEENNIKFIGPSSKLIKMMGDKIQAKKIAKEHGLPVIEGSDEGVANIEKAKEICKKIGFPVLIKAAGGGGGKGMKIAFDEKNFEELFLTAKSEAKKFFGNDEVYIEKFFQNPRHIEVQVLSGKNGTVHLHERDCSV

SEQ ID NO: 81801 - protein, 296 aa, Unknown
  Bacterial polypetide isolated from the Sargasso Sea
FNATFVAMSDVAVKLKNGYLDANEIIDAAKKAGADAIHPGYGFLSENSIFARRVIRNNIIWIGPTPHVINVMGDKIKAKELAIKANVPTLEKAENIKDSKRLGFPLLIKAAAGGGGKGMRIVDNKNELKDAVAAAKREAKAGFGDERVFIEKYIKKSRHIEIQILGDQHGNVIHLGERECSIQRRYQKIIEESPSPKLDHELRKQIGNAAVKLAKEIKYQSAGTVEFILDDDTNEFWFLEVNTRLQVEHPITEEVTGVDLVRAQINIAKNEYLELKQNDIEFNGHAVEVRLYAENP

SEQ ID NO: 81802 - protein, 112 aa, Unknown
  Bacterial polypetide isolated from the Sargasso Sea
MIQKILIANRGEIACRIARTVSSMGMQTVAVYSDIDEGSLHVASCDEAVNIGNSPATESYLNIDSIIKAALATDSDAIHPGYGFLSENAAFAKACLKAGIIFIGPSVSILNP

SEQ ID NO: 81803 - protein, 144 aa, Unknown
  Bacterial polypetide isolated from the Sargasso Sea
MFKKILIANRGEIAVRIIRACKEWGISTVAIHSDVDRESMHVRLADESICVGPHQPAFSYLNIPSIMSAIELTGAEAVHPGYGFLSENFDFAKMLEENNIKFIGPSSSLIKMMGDKIEAKKVAKEHGLPIIEGSDGGIKDINEA

SEQ ID NO: 81804 - protein, 144 aa, Unknown
  Bacterial polypetide isolated from the Sargasso Sea
MKKILIANRGEIACRIIDSCKKLKFHSIAVYSDIDKNSKHVRKADESIHIGASKAQESYLNADKIIEAAKKLKADAIHPGYGFLAENEKFAQKVIDSGITWIGPKPNTIVSMGNKDIARDLALKSNLPICPGLNNKDLEKEDLE

SEQ ID NO: 81805 - protein, 120 aa, Unknown
  Bacterial polypetide isolated from the Sargasso Sea
MFNKILIANRGEIALRVIRACKEMGITSVAVYSTPDVDSMHVRMADESICIGPASSIESYLSIPAIISACEISGADAIHPGYGFLAENSKFAQILSDHKITFIGPDPSHISQMGDKISAN

SEQ ID NO: 81806 - protein, 211 aa, Unknown
  Bacterial polypetide isolated from the Sargasso Sea
MLKKILIANRGEIACRIIRTAKKMGIRTVSICSDPDINSPHVNLADEYVNIGGNTSSESYLRVNKIIDAVKKTNAEAVHPGYGFLSENVKFRDEIQKIGKIFIGPPSEAISSMGDKIESKKIAKSAGVSVVPGGLEVIPNIKEALNQAKIIGYPLMIKASAGGGGKGMRIAFNDEELKTNFGSAVNEAKSSFGDDRVFIEKIRRIPKTYLK

SEQ ID NO: 81807 - protein, 128 aa, Unknown
  Bacterial polypetide isolated from the Sargasso Sea
MFKKVLIANRGEIAVRVIRACKEWGIKTVAVHSNVDSDAMHVRLADESVCIGSHQPQNSYLNISSIMSAVDLTGAEAIHPGYGFLSENAKFSEIVNKHGIKFIGPSAEIISKMGDKIEAKRIAKKYGL

SEQ ID NO: 81808 - protein, 127 aa, Unknown
  Bacterial polypetide isolated from the Sargasso Sea
MFKKILIANRGEIAVRIIRACKEWGIQTVAIHSDVDKESMHVKLADESLCVGSRQPVDSYLNIPSILSAINLTNADAVHPGYGFLSENYNFSKILKDNNIKFIGPSPENIKMMGDKIEAKNTAKNTE

SEQ ID NO: 81809 - protein, 120 aa, Unknown
  Bacterial polypetide isolated from the Sargasso Sea
MFKKVLIANRGEIAVRVIRACKEWGIGTVAVHSDVDSDSMHVRLADESVCIGSHQPQNSYLNIPAIISAIDVTGAEAVHPGYGFLSENYKFADMIQKHGIKFIGPRADIIKKMGDKIEAK

SEQ ID NO: 81810 - protein, 282 aa, Unknown
  Bacterial polypetide isolated from the Sargasso Sea
ADETAMHVRMVDESVCVGPASAQSSYLNIPAIITAATISDVDAIHPGYGFLSENKRFAEIIEEHGIKFIGPKSEHIEMMGNKIAAKKIMEENKVPTVPGLNDLSDIKRVYDFIDTIKLPVIIKAASGGGGKGMRVVNKLEDLEESINAAKIESKKAFNDDTVYLEKFFVNPKHIEIQVIADSNGNVLTLGERDCSIQRKHQKIIEESPSTVLTNIDREKISSLCVKAVKSINYEGVGTLEFLYEKNDFYFMEMNTRLQVEHPVTEMITGQDLVKEQIKVANG

SEQ ID NO: 81811 - protein, 237 aa, Unknown
  Bacterial polypetide isolated from the Sargasso Sea
MFNKILIANRGEIALRIIRACNELSIKTVAIYSSADQYSLHVKFADEAICIGPYTSTESYLNISRIISAAELTNSDAIHPGYGFLSENPQFAQICKDNNFIFIGPSSNTIESMGKKANAKSSMLKAGVPVIPGSKGIIKDVKQLKNTANEIGYPIILKASSGGGGRGMRVVRNETELESAFKTASSESQIAFNDPDMYLEKFVENPRHIEIQILADNYGNVVHFGERECSIQRRHQK

SEQ ID NO: 81812 - protein, 239 aa, Unknown
  Bacterial polypetide isolated from the Sargasso Sea
MFRKILIANRGEIACRVIDTCNKLGIDTVAVYSEADSRALHVIKAKESVNIGLAPSSESYLVIEKIINACKTTGADAVHPGYGFLSENASFVNQLEREGITFIGPPSEPIRVMGDKIESKIFAEKSNVNIIPGHQEIIKDSEEALEISKKIGFPVMIKASAGGGGKGMRIARAEEDVEDAFNSSVNEAKSSFGDDRIFIEKFIEKPRHIEIQILADNHGNVIHLGERECSIQRRNQKII

SEQ ID NO: 81813 - protein, 236 aa, Unknown
  Bacterial polypetide isolated from the Sargasso Sea
MFDKILIANRGEIALRIQRACREMGIKTVAVHSVVDADAMHVRLADESVCIGPAPATNSYLNIPAIITAAAITNADAIHPGYGFLSENANFASIVEEHGFCFIGPTADHIALMGDKIASKAKVKELGIPVVPGSKGAVKDIQDAKSMAAEIGYPVLIKASAGGGGRGMKIVQEKSELEIAIQQAGTEALAAFGDDAVYMEKFLEKPRHIEIQVVGDGSGQVVHLGERDCSLQRRHQ

SEQ ID NO: 81814 - protein, 97 aa, Unknown
  Bacterial polypetide isolated from the Sargasso Sea
MFKKILIANRGEIALRVLRACRELGIKTVAIHSDVDENAMHVRMADESICVGPASTQSSYLNIPAIITAATLTDADAIHPGYGFLSKNQRFAEIIEE

SEQ ID NO: 81815 - protein, 243 aa, Unknown
  Bacterial polypetide isolated from the Sargasso Sea
MANNLLKSNNEKCELYPLEVNYCYKCHNCQLSVSVDPKKMFSNYLYTSSTSKSFRNHFIQAAKNYIKNLKLNKKKSFIIDIGSNDGVALKPFKDLGFKNVLGIEPAKNLAKLANKNKIKTFNGFLEKKNLKKIKKNADLILASNVFAHSDKLKEMAECMLKLLSKKGVIIIEVQYLMNTLKDLTFDNIYHEHYNYWSLTSLINFFNQFDAKIYKSERIDTHGGSIRIYVKKDKKVKVESSVKK

SEQ ID NO: 81816 - protein, 236 aa, Unknown
  Bacterial polypetide isolated from the Sargasso Sea
MFNKVLIANRGEIAVRIIRSCIEMGINTVAIHSTADSDAMHVKMADESICVGGSKSLDSYLNIPAIITATELTGAEAIHPGYGFLSENYKFARILEEYNITFIGPKSEHIKTMGDKVSARKLISKTGIPLVPGSDGPIKNLKDLKLISKDIGFPLIIKASAGGGGKGMKVVKEISELESAYNLTKSEAEVNFGNDEIYAEKFLKNPKHVEFQIFADNYQNVIHLGERDCSIPKKTS

SEQ ID NO: 81817 - protein, 107 aa, Unknown
  Bacterial polypetide isolated from the Sargasso Sea
MVANRGEIAVRVLRAAKESGLRGVAVYSDPDTGSLHVENADQAVHLPGTTLADTYLNGDAIIEAARSTGAQAIHPGFGFLSERADFANAVKAAGLIWIGPPSRCNRY

SEQ ID NO: 81818 - protein, 225 aa, Unknown
  Bacterial polypetide isolated from the Sargasso Sea
MSRITKILIANRGEIAVRVIRTARNLGYRTVAVYSNADAGALHVSEADQAVCIGPAAIGESYLVGEKILDAAKLTGADAIHPGYGFLSENAEFSKACGAMDIAFIGPPPDAIELMGSKRLSKIAMIKAGVPCIPGYQGVEQSEDTLIAKAAEIGFPLMVKASAGGGGRGMRLVFRQSELAEHIRIARSEAENAFGSGELIMERAIVEPRHIEIQVFADEHGKAIF

SEQ ID NO: 81819 - protein, 225 aa, Unknown
  Bacterial polypetide isolated from the Sargasso Sea
MVEKVLIANRGEIALRIVRSCRELGIATVAVFSTVDKKALHVQLADEAVCVGDSLSNKSYLNIPNILAAATSRGVDAIHPGYGFLAENDKFAEMCNDHGIVFIGPSPKAIRSMGDKSTAKETMEAVGVPTVPGSKGLLSNVDEAYKLADDIGYPVIIKATAGGGGRGMRLVENSNNLEKMFKAAQGEAEAAFGNDGLYMEKFIKKPRHVEIQILADRSGKVVHLG

SEQ ID NO: 81820 - protein, 266 aa, Unknown
  Bacterial polypetide isolated from the Sargasso Sea
MFNRILIANRGEIALRVIRACRELGIETVAVYSEADRDAPYLNLADEAVCIGPAKAADSYLRIDRVISAAEIGNVQAIHPGYGFLSENAHFAEVCRSCDIDFIGPTPESMERVGDKNSARSLAREADVPTVPGSPGLLSGEQEALKVAKEIGFPVLLKATAGGGGKGMRVAANDLALSTAWQQASAEAEAAFGNAGIYIEKYVEKPRHVEIQVLGDQHGTMLHLWERDCSTQRRHQKLIEESPSPRLPQETREAMTAAAVRWQRLP

SEQ ID NO: 81821 - protein, 199 aa, Unknown
  Bacterial polypetide isolated from the Sargasso Sea
MPGTTHPRRDTQNVHRIHSITTTRNAYVIKKILIANRGEIAVRIVRACAEMGITSVAVYTDPDRYALHVKRADESYNVGSDPLAGYLNPRQLVNLAVETGCDALHPGYGFLSENAELAKICAERGIKFIGPAAEVITRMGDKTEARRSMIAAGVPVTPGTEGNLADLDEALREAERVGYPVMLKATSGGGGRGIRNCNN

SEQ ID NO: 81822 - protein, 133 aa, Unknown
  Bacterial polypetide isolated from the Sargasso Sea
MFKKILIANRGEIAIRIIRACNEMGIKTVAVFSKADKNSLHVKFADEAICIGEGPAVESYLNIPRIIAAGEITNADAIHPGYGFLAENAKFSKICKENGFTFIGPDAEIIDLMGDKVNARNAAKDVGVSIIPG

SEQ ID NO: 81823 - protein, 95 aa, Unknown
  Bacterial polypetide isolated from the Sargasso Sea
MTFHKLLIANRGEIACRIIKTAHEMGIFCVAVYTEADSNSPFVRMADQAIKLSDSYLNGDEIINAAKQTGAEAIHPGYGFLSENAKFARAVQKEG

SEQ ID NO: 81824 - protein, 151 aa, Unknown
  Bacterial polypetide isolated from the Sargasso Sea
MFKKILIANRGEIAVRVIRACKEWGIATVAVHSDVDRDSMHVRMADESVCIGSHQPANSYLNIPALMSAIEITNAEAVHPGYGFLSENANFARVLEENNIKFIGASSKLIEMMGDKIQAKKIAKENGLPVIEGSEGGIKDIQEAKELVKKL

SEQ ID NO: 81825 - protein, 189 aa, Unknown
  Bacterial polypetide isolated from the Sargasso Sea
MIKKVLIANRGEIAIRIAKSCKKLGIKTVAVYSKDDSDSLHLTYCDESYLLGNDPLKGSYLNIEKLIEISKKLNVDAIHPGYGFLSENSDFVKKLNKEKITFIGPSYKAIELMGDKIESKKIAKQAGVNCIPGYEHAIKNVREGLIEAIKIGYPVMIKASAGGGGKGMRIAKNKHEFEELLTAAKNEAL

SEQ ID NO: 81826 - protein, 235 aa, Unknown
  Bacterial polypetide isolated from the Sargasso Sea
MFKKILIANRGEIAVRVIRACKEWGIQTVAIHSDVDRESMHVRLADESVCIGTHQPINSYLNIPAIISAIELTGAEAVHPGYGFLSENSEFAKILEDYKIKFIGPSSKLIKMMGDKIQAKKIAKEYGLPVIEGSDGGVKDKEEAKNICKKIGFPVLIKASGGGGGKGMKIVNQDSEFENLFATAKSEAQKYFGNDEVYIEKFFQNPRHIEVQVLSGKNRTVHLHERDFQSKKTSK

SEQ ID NO: 81827 - protein, 95 aa, Unknown
  Bacterial polypetide isolated from the Sargasso Sea
MVEKVLIANRGEIALRIVRSCRELGIATVAVYSTVDKKALHVQLADEAVCVGDSLSNKSYLNIPNILAAATSRGVDAIHPGYGFLAENDKFAEMW

SEQ ID NO: 81828 - protein, 189 aa, Unknown
  Bacterial polypetide isolated from the Sargasso Sea
MFNKILIANRGEIALRVQRACRELGIKTVAIYSEADAHAKYVKLADESVCIGPPMSIDSYLNIPAIISAAELTNVEAIHPGYGFLSENADFAERVQQSGFVFVGPNADTIRLMGDKVSAKKKMIDSKVPVVPGSEGVLPEDERAIIQTATAVGYPVLVKAAGGGGGRGMRVVFSEDDLLSAVATTKHEA

SEQ ID NO: 81829 - protein, 131 aa, Unknown
  Bacterial polypetide isolated from the Sargasso Sea
MFKKILIANRGEIAVRIIRACKEWGISTVAVHSDVDRESMHVRLADESICIGSHQPVNSYLNIPAIMSAIELTNSEAVHPGYGFLSENSNFAKILEENKIKFIGPSSKLIKMMGDKIQAKKNCQRVWITCN

SEQ ID NO: 81830 - protein, 165 aa, Unknown
  Bacterial polypetide isolated from the Sargasso Sea
MVEKVLIANRGEIALRIVRSCRELGIATVAVFSTVDKKALHVQLADEAVCVGDSLSNKSYLNIPNILAAATSRGVDAIHPGYGFLAENDKFAEMCNDHGIVFIGPSPKAIRSMGDKSTAKETMEAVGVPTVPGSQGLLSNVDEAYKLADDIGYPVIIKATAGGGG

SEQ ID NO: 81831 - protein, 196 aa, Unknown
  Bacterial polypetide isolated from the Sargasso Sea
MTFHKLLIANRGEIACRIIKTAHEMGIACVAVYTEADSHSPFVKMADEAVKLSDTYLNGKEIIEAAKQTGAEAIHPGYGFLSENAKFSRDVLKADLIWVGPSSKVITSMGDKLKAKDIAEKAGVPTLPMTTDPKKANTIGYPILIKAAAGGGGKGMRIVESKKDLKGIIAGAQREAKTGFGDDRVFIERYVASSRH

SEQ ID NO: 81832 - protein, 218 aa, Unknown
  Bacterial polypetide isolated from the Sargasso Sea
MSKQKNVLIANRGEIAVRIARAAKGLGINPISIFAPADSDSLHTKLTPKAVELSGKATDPVSAYLDLDQIVSIAKENGCELVHPGYGFLSENAVFAKKCSEHGIEFIGPEHRVLKLFGDKVQARQLAESLSIPTIPGSKDALDSVGAAKKVAQGIGYPIMLKASSGGGGRGMRAVTNEKEMEEAFERCASEAKSSFGDERLFLEKLIERPRHIEIQIL

SEQ ID NO: 81833 - protein, 278 aa, Unknown
  Bacterial polypetide isolated from the Sargasso Sea
SAQSSYLNIPAIITAATLTDVDAIHPGYGFLSENQRFAEIIEEHNIKFIGPKSEHIKMMGNKIDAKKIMDETGVPTVKGINDLNDKNKIEDFIKKVKYPIIVKAASGGGGKGMRIVTEEDDLNKAINEAKIEAKKSFNDENVYLEKFLTSPKHIEIQVLCDSFGNVVTLGERDCSIQRKHQKLIEESPSSVLTNENREKISELCRKSMKEIGYEGVGTLEFLYENNEFYFMEMNTRLQVEHPVTEMVTGIDLVKEQILVANGEKLTIKQEDIKLKGSS

SEQ ID NO: 81834 - protein, 289 aa, Unknown
  Bacterial polypetide isolated from the Sargasso Sea
MFKKILIANRGEIAVRIIRACKEWGISTVAVHSDVDRESMHVKLADESVCIGSHQPANSYLNIPALLSAVDLTNAEAVHPGYGFLSENANFAKILEENNIKFIGASSKHIEMMGDKIQAKKIAKENGLPVIEGSEGGVSDISQAKELCKKIGFPVLIKASGGGGGKGMKIVHKEQEFETLFSTAKSEAKKYFGNDEVYIEKFFQNPRHIEVQILAGKNRTVHLHERDCSVQRRHQKLIEETPSPILNNEIRKDLFDKTVQMVSKIGYEGAGTVEYIYEDGKFYFLEMNT

SEQ ID NO: 81835 - protein, 346 aa, Unknown
  Bacterial polypetide isolated from the Sargasso Sea
MNILIFGGQTSAESYLIVSKIIDALKSSNADAVHPGYGFLSENVQFRDEVHKVGKIFIGPPSQAISLMGDKIESKKIAKEAGVSIVPGGLNIIKNLDKAIIEAKKIGYPLMVKASAGGGGKGMRIAFNEKELKENFNSAINEAKSSFGDERVFIEKFIEFPKHIEIQILGDQFGNFIHLGERECSIQRRHQKVIEEAPSPFVDENLRQKMVDQSIKLAKAVGYYSAGTVEFVVDKNKNFYFLEMNTRLQVEHPVTELTTGVDLVEQMIRIAYGDKIKIQQKDINFSGSAIECRIYAEDSAKNFLPLIGRLTRYIEPLRKQIKIDSGVVEGSENSMFYDPMISKLCT

SEQ ID NO: 81836 - protein, 249 aa, Unknown
  Bacterial polypetide isolated from the Sargasso Sea
MFKKVLIANRGEIALRILRACRELDIKTVAIHSEADETAMHVRMADESVCVGPASAQSSYLNIPAIITAATISNADAIHPGYGFLSENKRFAEIIEEHNIKFIGPKSEHIEMMGNKIAAKKIMEENKVPTVPGLNDLSDMKKVLEFIDKIKLPVIIKAASGGGGKGMRVVNQLEDLEESINAAKIESKKSFNDDTVYLEKFFVNPKHIEIQILADSNGNVLTLGERDCSIQRKHQKIIEESPSIILTNV

SEQ ID NO: 81837 - protein, 136 aa, Unknown
  Bacterial polypetide isolated from the Sargasso Sea
MFKKILIANRGEIAVRIIRACKEWGISTVAVHSDVDKNSMHVRLADESVCIGSHQPANSYLNIPAIMSAIELTNSDAVHPGYGFLSENSDFAKILEDYKIKFIGPSSKLIKMMGDKIQAKLIAKKYGLPVIEGSDG

SEQ ID NO: 81838 - protein, 85 aa, Unknown
  Bacterial polypetide isolated from the Sargasso Sea
MFKKILIANRGEIAVRIIRACKEWGISTVAVHSDVDRDSMHVRLADESVCIGSHQPQNSYLNIPALMSAIELTNAEAVHPGYGFL

SEQ ID NO: 81839 - protein, 171 aa, Unknown
  Bacterial polypetide isolated from the Sargasso Sea
MPTQSRIKTFNKLLIANRGEIALRIIKTAKQLGLKTVAVYSRVDFESPHVSFADQSVCIGDGPVADSYLNHKKIISAAINSGSQAIHPGYGFLSENAKFAKSCMQNDLIFVGPSAASIELMSDKAHAKNLLEKAGVPCIPGFEEKGLRFKEVLRKAMNIGFPVMVKAAARW

SEQ ID NO: 81840 - protein, 298 aa, Unknown
  Bacterial polypetide isolated from the Sargasso Sea
KILIANRGEIAVRIIRACKEWGIQTVAIHSDVDKESMHVKLADESVCVGSHQPANSYLNIPAILSAIEITNSEAVHPGYGFLSENFNFASMLEENNIKFIGPSSKLIKMMGDKIEAKKIAKKYGLPVIEGSEGGISDLESGKKLAKAIGFPILIKAAGGGGGKGMKIVRSEKEFDNLFLTAKSEAKKFFANDEVYIEKFFQNPRHIEVQVLSGKNHTVHLHERDCSVQRRHQKLIEETPSPVLTDEIRKDLFDRTVNMVSKIGYEGAGTVEFIYEDGKFYFLEMNTRIQVEHPVTEMV

SEQ ID NO: 81841 - protein, 95 aa, Unknown
  Bacterial polypetide isolated from the Sargasso Sea
MLRKIVIANRGEIALRILRACKELNIKTVATYSVADREQKHVYLADESVCIGPAISTESYLNIPAVISAAEVTDAIGIHPGYGFLSENADFAEQV

SEQ ID NO: 81842 - protein, 221 aa, Unknown
  Bacterial polypetide isolated from the Sargasso Sea
MVEKVLIANRGEIALRIVRSCRELGIATVAVFSTVDKKALHVQLADEAVCVGDSLSNKSYLNIPNILAAATSRGVDAIHPGYGFLAENDKFAEMCNDHGIVFIGPSPKAIRSMGDKSTAKETMEAVGVPTVPGSKGLLSNVDEAYKLADDIGYPVIIKATAGGGGRGMRLVENSDNLEKMFKAAQGEAEAAFGNDGLYMEKFIKKPRHVEIQILADRSGNV

SEQ ID NO: 81843 - protein, 255 aa, Unknown
  Bacterial polypetide isolated from the Sargasso Sea
MTQKRILIANRGEIALRIIRSAKEMDLYTIAVYSDADEDALHTKRADESYYLGGSLPAESYRNLKKLVKAAEATNADLVHPGYGFLAENADFARAIEKKGITWIGPKPETIKSMGDKIESRKLVSKIGLNPVPGQLKPSRFQREAVKDAESFGYPVALKAAHGGGGKGLRIVHNEKELLENFDIVKRESEAYFGSDQIYVEKFIKPARHIETQILADKYGNVLYLGERDCSLQRRNQKLIEESPPEWLSDYGREK

SEQ ID NO: 81844 - protein, 300 aa, Unknown
  Bacterial polypetide isolated from the Sargasso Sea
VFASVSCTAATCDTPDDPIGRTASDCAGKTTTQTGCNVTCDDGYYESGGGTEGAKTCTADADASTSSFPDLPTCTAATCATPDDPIGRTASDCAGKTTTQTGCNVTCDDGYYESGGGTEGAKTCTADADASTSSFPDLPTCTASTCDTPDNPPGRTASDCEGKTTTQTGCKVTCDDGYYESGGGTVGLKTCTADADASTSSFPDLPTCTAATCATPDDPIGRTASDCAGKTTTQTGCNVTCDDGYYESGGGTEGAKTCTADADASTSSFPDLPTCTASTCDTPDNPPGRTASDCEGKTTT

SEQ ID NO: 81845 - protein, 272 aa, Unknown
  Bacterial polypetide isolated from the Sargasso Sea
MFDKVLIANRGEIAVRINRACQELGISTVAIHSEADADSMHVRIADESVCIGPNPVNKSYLNAHAIISACEITGAQAVHPGYGFLSENASFAKMLDDHKLTFIGPKHKHISMMGDKIEAKKIMQEYGVPTVPGSKGAVVDLGDAIKTSKDIGFPVLLKASAGGGGRGMKVVNDEKELADALPVIKQEALSFFGNDSIYIEKFIDSPRHIEIQVICDSHDNFLHLHERDCSIQRRNQKVIEEALAPEIDQAKKEKLFKICIDAMAKMGYLGLG

SEQ ID NO: 81846 - protein, 118 aa, Unknown
  Bacterial polypetide isolated from the Sargasso Sea
MFNKILIANRGEIAMRIIRTCKEMGIKTVAIYSKADEESLHVRFADEAVCIGPSASSDSYLKSANIIAAAEITNADAIHPGYGFLSENSKFSKICEEHKIKFIGASPEMMKKWRQIVC

SEQ ID NO: 81847 - protein, 156 aa, Unknown
  Bacterial polypetide isolated from the Sargasso Sea
MYKKILIANRGEIALRIIRACHELGLKSVAVYSTADKSSLHTKFADEAVCIGPPQSSESYLSIPSIISAGEITNSDAIHPGYGFLAENADFSKICSDNNFAFIGPKPDIINAMGDKSEAKKTMKSAGVPVIPGSEGILSDPNEARRIASEIGYPVM

SEQ ID NO: 81848 - protein, 230 aa, Unknown
  Bacterial polypetide isolated from the Sargasso Sea
MQKLEKVLIANRGEIALRILRACKELGIKTVAVHSTADRELMHLGLADESVCIGPAAGAQSYLNIPAIISAAELTGATGIHPGYGFLAENADFAEQVENSGFAFIGPTASVIRLMGDKVSAKEAMIKTGVPVVPGSDGPLPEDEEEALRIAREVGYPVIIKAAGGGGGRGMRVVHKEEDLIKSAKLTRTEAGAAFGNPMVYLEKFLGNPRHVEVQVLSDGQGNAIHLYDR

SEQ ID NO: 81849 - protein, 322 aa, Unknown
  Bacterial polypetide isolated from the Sargasso Sea
ADSVHPGYGFLSENHEFAELIVANGLNWIGPSPEIIQAMGDKLSAKDMLDKAGVPMLPSIEIRPETDISDAAKTIGYPVLVKASAGGGGKGMRVVESPDTLVAAVESAQREAKNAFGDDKVFLEKWLESVKHVEVQIVGDKHGNILHCFERECSIQRRHQKIIEEAPSPAVDEKLRDALGKSAVEAAKTLNYFSTGTVEFLLSEREFYFLEVNTRLQVEHPVTEEILGIDLVREQIRVAENKKLSFSQGDLQICGHAIEARVYAEDPQKKFLPSPGKIQTWAPSFSDNVRFDSGVEEGSFVSPEFDPMIAKVICHAPTEKKL

SEQ ID NO: 81850 - protein, 133 aa, Unknown
  Bacterial polypetide isolated from the Sargasso Sea
MTERIKTFDSVLVANRGEIAVRILTVAKQLGLRTVAVYSEVDRGALHVKLADKAIKIGEGPADESYLSIPKIISIAKQEKVGAIHPGYGFLSENPDFARECHKEKINFIGPSPETIMKMGNKAEAKNFVSSIK

SEQ ID NO: 81851 - protein, 208 aa, Unknown
  Bacterial polypetide isolated from the Sargasso Sea
MFKKILIANRGEIAVRIIRACKEWGIETVAVHSDVDKNSMHVRLADESVCIGSYHPASSYLNIPAILSAIELTNAEAVHPGYGFLSENSEFAKILEDYKIKFIGPSSKLIKMMGDKIQAKKIAKEYGLPIIEGSEGGVSDINEAKKIIKNIGFPVLIKAAGGGGGKGMKIVNNEEEFNDLFLTAKLEAKKFFGNDEVYIEKFFQNPRH

SEQ ID NO: 81852 - protein, 251 aa, Unknown
  Bacterial polypetide isolated from the Sargasso Sea
MIKKILIANRGEIACRIIKTANKMGIKTVAVYSEADKYSDFVNMADESYFIGPSAPNESYLVIKKIIEIAKKSKSDAIHPGYGFLSENYNFVKALEKEKIKFIGPNKNAITKMGDKIESKNLALKLNLNVIPGHTEAVRDPKKAIKIAEKIGFPVLLKASAGGGGKGMRIVNKRQELESNLKAAQSEALNSFGDDRVFIEKYITNPRHIEIQILCDKHGNQVHLGERECSIQRRYQKVIEECPSSFVDEKL

SEQ ID NO: 81853 - protein, 183 aa, Unknown
  Bacterial polypetide isolated from the Sargasso Sea
MLEKVLIANRGEIALRVLRACKELGIKTVAVHSTADRELKHVRLADEAVCIGPPPSAQSYLDVPSIISVAELTNADGIHPGYGFLSENADFAEQVEKSGFTFIGPTAETIRLMGDKVSAKQQMQRTGVPTVPGSDGALPDDPDEVIRIAREIGFPVIVKAAAGGGGRGMRVVHNEEVLLSSVQ

SEQ ID NO: 81854 - protein, 237 aa, Unknown
  Bacterial polypetide isolated from the Sargasso Sea
LIANRGEIAVRIIRACKEWGISTVAIHSDVDRESMHVRLADESICVGPHQPTFSYLNIPAIMSAIELTGAEAVHPGYGFLSENFEFAKILEENDIKFIGPSSNLIKMMGDKIEAKKVAKEYGLPVIEGSDGGIKDINEAKKICEKIGFPVLIKASGGGGGKGMKIVNKQEEFENLFLTAKQEAKKFFGNDEVYIEKFFQNPRHIEVQVLSGKNRTVHLHERDCSVQRRHQKLIEETP

SEQ ID NO: 81855 - protein, 143 aa, Unknown
  Bacterial polypetide isolated from the Sargasso Sea
MKPQTASGLFQKILIANRGEIACRIIRTCQNLGISTVAVYSETDRDALHVRLADDAFHIGKATPEDSYLNHERILETAIQCQADAIHPGYGFLSENDVFAEACLSKGIHLIGPRPESIREMGSKSSAKQLMQEAGVPVVPGYH

SEQ ID NO: 81856 - protein, 269 aa, Unknown
  Bacterial polypetide isolated from the Sargasso Sea
KVDIDAGAIDGTAVGATSASTGAFTTVTASTSLDITGSAGLILENDETITNATNGTVKINGEVSAGTGSGSGIFKSDGDYDVILKTGNSTTGSITITDASNGDITLAPNGSGKVIATTALDITGSTGLILENDETITNSTDGTVLINGIVSGGSGSADGVFQSNGNYDVILKTGNSTTGSITIADGSNGNIAITPNGSGEVDISKVDIDAGAIDGTAVGATSASTGAFTTVTASTSLDITGSAGLILENDETITNATDGTVKINGIVSA

SEQ ID NO: 81857 - protein, 219 aa, Unknown
  Bacterial polypetide isolated from the Sargasso Sea
MFDKVLIANRGEIAVRINRACQELGISTVAIHSEADTESMHVRIADESVCIGPNPVNKSYLNSHAIIAACEITGAQAVHPGYGFLSENASFAKMLDDHKLTFIGPKFSHIEMMGDKIEAKKIMKKFGVPTVPGSEDEIKNELDAIKTSEKIGFPVLLKASAGGGGRGMKVVSNEKELKKALPIIKQEALSFFGNDSIYIEKFIDSPRHIEIQVICDTSW

SEQ ID NO: 81858 - protein, 123 aa, Unknown
  Bacterial polypetide isolated from the Sargasso Sea
MKKILIANRGEIACRIINSCKKLKFHSIAVYSDVDKNSKHVKKADESIHIGGAKAQDSYLSSDKIIEAAKKVKADAIHPGYGFLAENDKFAQKVIDAGIVWIGPKPNTIVSMGNKDIARDLAL

SEQ ID NO: 81859 - protein, 101 aa, Unknown
  Bacterial polypetide isolated from the Sargasso Sea
MYKKILIANRGEIAVRVIRACKELEIKTVAVFSDADRNSLHVNMADEAYNIGGPLPNESYLIGDNIIKVAKKAKCDGIHPGYGFLSEKAEFAEKCKKNKID

SEQ ID NO: 81860 - protein, 216 aa, Unknown
  Bacterial polypetide isolated from the Sargasso Sea
MFKKVLIANRGEIAVRIIRACKEWGINTVAVHSDVDSDSMHVRLADESVCIGSHQPQYSYLNISSIMSAVDLTGAEAIHPGYGFLSENAKFSDVVSKHGIKFIGPSPDIISKMGDKIVAKKIAKKYGLPIIEGSEGAVKNLNEAKSICKNIGYPILIKAAGGGGGKGMKIVEEESQLENLFLTAKSEAKKFFGNDELYIEKYFKNPKTYRSSNNVR

SEQ ID NO: 81861 - protein, 287 aa, Unknown
  Bacterial polypetide isolated from the Sargasso Sea
MIKKILIANRGEIACRVIRTARKLNINTVAVYSDADKDSLFVKQADESYHIGGSQPAESYLDINKIINIAKKSKADAVHPGYGFLSENAAFVKRLAKEKIKFIGPNPNAIKKMGDKIESKNLAIKLKLNVIPGHTAPVKNSKEALKISNKIGYPVLLKASAGGGGKGMRIVRKNSELEENFNAAKSESKKSFGDDRVFIEKYIEQPRHIEIQILCDKHGNQVHLGERECSIQRRYQKVIEECPSPFVDKAMRNEMAAQALTLAKEVKYDSAGTVEFVVDANKNFYFL

SEQ ID NO: 81862 - protein, 155 aa, Unknown
  Bacterial polypetide isolated from the Sargasso Sea
MFKKILIANRGEIAVRIIRACKEWGISTVAVHSDVDKESMHVRLADESVCIGPHQPASSYLNIPALMSAIELTNAEAVHPGYGFLSENPDFARILEKNNITFIGPSSKLIEMMGNKIKAKKIAKENGLPVIEGSEGGVSDIKKANELCKKIGFPV

SEQ ID NO: 81863 - protein, 294 aa, Unknown
  Bacterial polypetide isolated from the Sargasso Sea
MFKKVLIANRGEIAVRVIRACKEWGIGTVAVHSDVDSESMHVRLADESVCIGSHQPQNSYLNIPAIISAIDVTGAEAVHPGYGFLSENYKFADMIQKHGIKFIGPRAEIIKKMGDKIEAKRIAKQNGLPVIEGSESGVKNVDEAKSICKKIGYPVLIKASGGGGGKGMKIVENDNKLGELFSLARLEAKKYFGNEEVYIEKYFKNPRHIEVQIISGKNRTVHLNERDCSVQRNHQKLIEETPSPVLDEKTRSDLLNKTVKMVEALGYEGAGTVEYIFENGKFYFLEMNTRVQVE

SEQ ID NO: 81864 - protein, 242 aa, Unknown
  Bacterial polypetide isolated from the Sargasso Sea
MLKPAKKLQKVLIANRGEIALRILRACKEEGIKTVAVYSTADTELMHVKLADESICIGPPLATNSYLKVSNIIAAAEVTGADGIHPGYGFLAENADFAEQVEKSGFAFIGPKAETIRLMGDKVSAKDAMIAAGVPTVPGSDGPLPEDEETALRIGREVGYPVIIKAAGGGGGRGMRVVHKEEDLIEAAKQTRSEAGAWFGNPMVYLEKYLTNPRHVEVQVLSDGQGHAIHLGDRDCSLQRRH

SEQ ID NO: 81865 - protein, 192 aa, Unknown
  Bacterial polypetide isolated from the Sargasso Sea
MFNKILIANRGEIACRVIKTAKQMGIKTVAVFSDADRNALHVQMADEAVNIGPPPANQSYIDIEKVISAVKKSNAQAVHPGYGFLSENAKFAKSLSDIGVTFIGPPENAIESMGDKITSKKIAQEAGVNTVPGYMGVIKDEDEALSISEKIGYPVMIKASAGGGGKGMRIAWNNSEVKEGFQSSKNEAASSL

SEQ ID NO: 81866 - protein, 278 aa, Unknown
  Bacterial polypetide isolated from the Sargasso Sea
MKKILIANRGEIAIRIARTCNDLGIKTVGIFSEDDINSLHLSKMDESFMIDEKGASAYLNIKKVIAVAKREKVDGIHPGYGFLSENPAFAKAAKQAKIKFIGPSEKCLTIFGDKSEAKKLALKLDIPVVRGTQGKTSLKQASSFFKDLKQNSSIVLKAIAGGGGRGMRVVNSEADLKDAMSRASSEAKSAFDSSDLYMEEYLKNYRHVEIQVLGDGKGQATHMHERECSTQRRHQKIIEIAPAPGIKKELKEKMFDASVALIKASKYEGLATVEFLGY

SEQ ID NO: 81867 - protein, 131 aa, Unknown
  Bacterial polypetide isolated from the Sargasso Sea
MFNKILIANRGEIAVRVLRACKELGIQTVSVYSSADKNAMHVKLADESVCIGPASSLKSYLNIPAIISACEISGADAVHPGYGFLSENFGFVEKLEAHGIKFIGPKSEHIKMMGDKILAKESANNLVLPII

SEQ ID NO: 81868 - protein, 240 aa, Unknown
  Bacterial polypetide isolated from the Sargasso Sea
MFKKILIANRGEIAVRIIRACKEWGIQTVAIHSDVDKESMHVKLADESVCVGSHQPANSYLNIPAILSAIEITNSEAVHPGYGFLSENFNFASMLEENNIKFIGPSSKLIKMMGDKIEAKKIAKKYGLPVIEGSEGGISDLESGKKLAKEIGFPILIKAAGGGGGKGMKIVRSEKEFDNLFLTAKSEAKKFFANDEVYIEKFFQNPRHIEVQVLSGKNHTVHLHERDCSVQRRHQKLIEE

SEQ ID NO: 81869 - protein, 243 aa, Unknown
  Bacterial polypetide isolated from the Sargasso Sea
MTRNIQKILIANRGEIASRIIRTAHKLGFFTVAIYSEADRNALHVQQADEAVFVGPADPTSSYLHSEKVINAAIQTQADAIHPGYGFLSENADFARACEKAGLTFIGPNADAIALMGSKRLSKIAMLQANVPCIPGYEGSDQSDEALIENAQNIGFPLMVKASAGGGGKGMRLVHEASDLAAHISTARSEALNAFGNDELILERALIAPRHIEIQIFADGCGNTLYLGERDCSIQRRHQKVIE

SEQ ID NO: 81870 - protein, 445 aa, Unknown
  Bacterial polypetide isolated from the Sargasso Sea
MFKKILIANRGEIAVRVIRACKEWGISTVAVHSDVDRESMHVRMADESVCIGSHQPSNSYLNIPALMSAIEITNSEAVHPGYGFLSENSNFARILEQNNIKFIGASSKLIEMMGDKIQAKKIAKEHGLPVIEGSEGGVKDINEAKLLCKKIGFPVLIKASGGGGGKGMKIVYKEKDFETLFSTAKSEAMKYFGNDEVYIEKFFQNPRHIEVQILAGKNRTVHLHERDCSVQRRHQKLIEETPSPVLNDEIRKDLFDKTVKMVNKIGYQGAGTVEFIYEDGKFYFLEMNTRVQVEHPVTEMITGIDIIKEQIWIAFTGETALKQTDINPRGHAIECRINAEDPSKNFQPSPGTIVMCHQPSGFRTRVDGAIFQGYKVTPFYDSMVCKLICHGRNRKEAIQRMNRSLDEFVIEGITTTIPLHKKLLNHKKFINSDFNVSWLDKEKII

SEQ ID NO: 81871 - protein, 445 aa, Unknown
  Bacterial polypetide isolated from the Sargasso Sea
MFKKILIANRGEIAVRVIRACKEWGIPTVAIHSDVDRDSMHVRLADESVCVGTHQPLNSYLNIPAIMSAIELTGAEAVHPGYGFLSENSDFAKILEDYKIKFIGPSSKLIEMMGDKIQAKKIAKEYGLPVIEGSDGGVKDKKYAKEICEKIGFPVLIKASAGGGGKGMKIVYKESEFDDLFATAKSEAQKYFGNDEVYIEKFFQNPRHIEVQVLSGKNRTVHLHERDCSVQRRHQKLIEETPSPILTDDIRKDLFERTVNMVSKIGYEGAGTVEFIYENEKFYFLEMNTRVQVEHPVSEMITGIDIIKEQIWIAFTGNTALKQSDVVPRGHAIECRINAEDASKNFQPSPGTIGMCHQPSGFRTRVDGSIFQGYKVTPYYDSMVCKLICHGRNRTEAIQRMRRSLDEFVIEGITTTIDLHKKLLDHPKFIKSDFNVSWLDKEKII

SEQ ID NO: 81872 - protein, 242 aa, Unknown
  Bacterial polypetide isolated from the Sargasso Sea
MLDKILIANRGEIALRIQRACRELGIKTVAVHSTADDSQKHVFLADESVCIGPPESLKSYLNIPSIISAAEVTDAMAIHPGYGFLAENGDFAEQVEQSGYIFIGPKSETINLMGNKISAKEIVGEVGIQCIPGSDGKLDDDIEKVHKLADEIGYPVLIKAAAGGGGKGMRVAHTKGALQHTIDLTKIESKAAFGDDTIFLEKLLEEPRHVEFQVIADHHGNAVCLGDRDCSMQRNHQKIIEE

SEQ ID NO: 81873 - protein, 366 aa, Unknown
  Bacterial polypetide isolated from the Sargasso Sea
MFKKVLIANRGEIAVRIIRACKEWGIGTVAVHSDVDSDAMHVRLADESVCIGSHQPQNSYLNISSIMSAVDLTNAEAIHPGYGFLSENAKFAEMVTKHGIKFIGPSADLISKMGDKIEAKRIAKKYGLPIIEGSEGGVKSFSEAKSICKDIGYPVLIKAAGGGGGKGMKIVEEESQLENLFLTAKNEAKKYFGNDELYIEKYFKHPRHIEVQIMSGKNKTVHLGERDCSVQRRHQKLIEETPSPVLTNEQRKDLLEKTVKMVEQIGYEGAGTVEFIYENGKFYFLEMNTRVQVEHPVTEVQTGIDIVKEQLWVAFTGETALNQNDIDPRGHSIECRINAENPALDFQPSPGTISVCHQPSGFRTRV

SEQ ID NO: 81874 - protein, 455 aa, Unknown
  Bacterial polypetide isolated from the Sargasso Sea
MFEKILIANRGEIALRIQRACRELGVKTVVVYSEADKEAKYVRLADEAVCIGPAPSNLSYLNMPALISAAEVTDAEAIHPGYGFLSENADFAERVEQSGFTFIGPRPETIRMMGDKVTAKQTMIKTGVPCVPGSEGALPDDPKEIVKIARAIGYPVIIKAAGGGGGRGMRVVHTEAALVNAVNMTREEAGRAFGNPQVYMEKFLENPRHIEIQVLSDAYKNAIWLGERDCSMQRRHQKVIEEAPAPGIPRRLIDRIGDRCADACKKMGYLGAGTFEFLYENGEFYFIEMNTRVQVEHPVSELITGVDIVQEQIRIAAGEKLTLRQRDIQFRGHAIECRINAEDPFKFTPSPGRITSWHTPGGPGVRVDSHAYNGYFVPPNYDSMIGKLITYGATREQAISRMRIALSEMVVEGIQTNIPLHRELMIDSKFVEGGTSIHYLENRLAQKQQVAPEEA

SEQ ID NO: 81875 - protein, 370 aa, Unknown
  Bacterial polypetide isolated from the Sargasso Sea
AIHPGYGFLAENGDFAEQVEQSGYIFIGPKSETINLMGNKISAKEIVGEVGIQCIPGSDGKLDDDIEKVHKLADEIGYPVLIKAAAGGGGKGMRVAHTKGALQHTIDLTKIESKAAFGDDTIFLEKLLEEPRHVEFQVIADHHGNAVCLGDRDCSMQRNHQKIIEEAPAPKIPKKLRDEMFKKCIAFCKHIKYRGAGTLEFLYENGEFYFIEMNTRLQVEHPVTEMITGIDIVKEQIKIAMGLPLSIKQEDITEKGHAIECRINAEDPKTFMPSPGKIDLWHPPGGPGIRVDSHIYTGYEIPPYYDSMIAKVIAFANTRESAITRMGVALSEMIIEGIETNRDLQIEIMQHNAFKDGGTNIHYLEKRLGL

SEQ ID NO: 81876 - protein, 401 aa, Unknown
  Bacterial polypetide isolated from the Sargasso Sea
MLEKVVIANRGEIALRILRACKELGIRTVAVYSKPDRDLMHVRLADEAVCIGPASSADSYLNIPALISAAEVTDADAIHPGYGFLAENADFAESVERSGFTFIGPKADTIRLMGNKVAAIEAMKKAGVPTVPGSNGPIGDDDEASLAMAEQIGYPVIIKAAAGGGGRGMRVVDEAKQLLNAITLTRSEAKNAFGDATVYMEKFLQQPRHVEVQVLADGAGHAIHLGDRDCSLQRRHQKVVEEAPAPGIPQHLKEEVAERCVNACKEINYRGAGTFEFLYENEGFYFIEMNTRVQVEHPVTEMVTGVDIVKEQLRIAGGEGLQIQQSDVQFQGHAIEVRVNAEDPVRFTPCPGKVTYFHAPGGNGVRVDSHIYSGYTVPPYYDSLIGKLITWGGNRETAFSR

SEQ ID NO: 81877 - protein, 143 aa, Unknown
  Bacterial polypetide isolated from the Sargasso Sea
MFKKVLIANRGEIAVRIIRACKEWGIGTVAVHSDVDSDAMHVRLADESVCIGSHHPQNSYLNISAIMSAVDLTGAEAIHPGYGFLSENAKFSEIVKKHGIKFIGPSAEIISKMGDKIEAKRIAKKFGLPIIEGSEGGVKSLSE

SEQ ID NO: 81878 - protein, 439 aa, Unknown
  Bacterial polypetide isolated from the Sargasso Sea
MFKKVLIANRGEIAVRIIRACKEWGIGTVAVHSDVDSDAMHVRLADESVCIGSHQPQNSYLNISSIMSAVDLTGAEAIHPGYGFLSENAKFAEIVSKHGIKFVGPSADLISKMGDKIEAKRIAKKYGLPIIEGSEGAVKSFSEAKSICKEIGYPVLIKAAGGGGGKGMKIVEEEGQLENLFLTAKSEAKKYFGNDELYIEKYFKHPRHIEVQIMSAENKTVHLGERDCSVQRRHQKLIEETPSPVLTDKQRKDLLEKTVKMVEKIGYEGAGTVEFIYENGKFYFLEMNTRVQVEHPVTEVQTGIDIVKEQLWIAFTGKTALKQSDIDPRGHSIECRINAENPALDFQPSPGLISVCHQPSGFRTRVDGSIFQGCKITPYYDSLIAKVICKGRNREEAIQRTLRSLDEFVLEGITTTIDLHKKILNHKKFFNSDFDTNWL

SEQ ID NO: 81879 - protein, 164 aa, Unknown
  Bacterial polypetide isolated from the Sargasso Sea
MFKKILIANRGEIAVRVIRACKEWGIDTVAVHSDVDKDSMHVKLADESVCIGSHNPANSYLNIPAILSAIELTNADAVHPGYGFLSENYEFAKMLEDYNIKFIGPSSKLIKMMGDKIQAKKIAKDYGLPIIEGSDGGITDIEEAKKLCNKIKYPVLIKAAGGGG

SEQ ID NO: 81880 - protein, 191 aa, Unknown
  Bacterial polypetide isolated from the Sargasso Sea
MFKKLLIANRGEIACRIAATARRMGIRTVAIYSDVDRDGLHVEACDEAVAIGGTSSADSYLEIDKVLSAAIETESDAIHPGYGFLSENPVFAKECAAAKIIFVGPPATAIEVMGSKSKAKKLMESAGVPLVPGYHGEEQEVSYLSQKANEIGFPVLVKASAGGGGRGMRIVESLDDLETAVNSSKREAKAA

SEQ ID NO: 81881 - protein, 132 aa, Unknown
  Bacterial polypetide isolated from the Sargasso Sea
MLSKLLIANRGEIALRILRAAKELKIPTVAAYSEADKDLMHVKMADESICIGPADSSQSYLNIPAIISAMELSGSDGVHPGYGFLSENPDFAEKVEKSGFDFVGPSASVIRMMGNKVSAKEFPLKSGLPIVP

SEQ ID NO: 81882 - protein, 369 aa, Unknown
  Bacterial polypetide isolated from the Sargasso Sea
MFKKILIANRGEIAVRIIRACKEWGIATVAVHSDVDRESMHVRMADESVCIGSHQPTNSYLNIPALMSAIELTNADAVHPGYGFLSENANFAKILEENKIKFIGASSKHIEMMGDKIQAKKIAKENGLPVIEGSEGGVRDVNEAKDLCKKIGFPVLIKASGGGGGKGMKIVHKKEEFETLFSTAKSEAQKYFGNDEVYIEKFFQNPRHIEVQILAGKNNVVHLHERDCSVQRRHQKLIEETPSPVLNDEIRKDLFEKTVNMVSKIGYMGAGTVEFIYEDGKFYFLEMNTRVQVEHPVTEMVTGIDIIKEQIWIAFSNETALKQSDINPRGHAIECRINAEDASKNFQPSPGVINMCHQPSGFRTRVDGA

SEQ ID NO: 81883 - protein, 286 aa, Unknown
  Bacterial polypetide isolated from the Sargasso Sea
MSEIKTFKSLLVANRGEIASRIIKTANDIGLKTIAVYTDADAMSPHVSIANEAINIGAGPIGDSYLSIKKIIDVAKKAGADAIHPGYGFLSENHNFSEACKSSGIVFVGPSPKSIELMGNKAQAKRIMKNAGVPCVPGEEVENKNDRELIISAETIGFPLMIKAAAGGGGRGMRLVNNITELQKNCEIARSEAENAFGSSEIIFEKAIIDPRHVEIQIMADNFGNVISLGERDCSVQRRHQKIIEESPSPAVDDDLRKNMGEVACAAAKEINYSGAGTVEFLLDEN

SEQ ID NO: 81884 - protein, 360 aa, Unknown
  Bacterial polypetide isolated from the Sargasso Sea
MFKKVLIANRGEIALRVIRACHELDIKTVAVYSTVDELSLHVKFADEAVCIGPPQSKDSYLNIPRIIAAGEITGADAIHPGYGFLSESAQFSQICKENGFAFLGPSPDIIDSMGNKAKAKQTMKLAGVPVVPGGDGILDGPDDALDKANAMGYPVMLKASAGGGGRGMRLVKDAKDVISAYKSANQESLTAFGNGDIYIEKFIENPRHIEVQILADSFGKAIHLGERECSIQRRHQKLIEESPSPLVDEETRKRIGDAAVAGAEAVNYIGVGTIEFLMDKNKNFFFMEMNTRIQVEHPVTEMVTGIDLIKQQIKMHAGEVCPSIENFQLRGHSIECRINAEDPSKDFMPFPGEIKNFHMP

SEQ ID NO: 81885 - protein, 450 aa, Unknown
  Bacterial polypetide isolated from the Sargasso Sea
MFNKVLIANRGEIALRVIRACHELNIKTVAVYSTADEYSLHVKFADEAVCIGPPPSKDSYLNIPKIIAAGEITGADAIHPGYGFLSESAQFSQICEDNGFVFLGPNPEIIDSMGNKAKAKQTMKAAGVPVVPGGDGVLDGPEDALDKANEMGYPIMLKASAGGGGRGMRLVKDAADVIASYKSANQESITAFGNGDIYIEKFIQNPRHIEVQILADKYGNAIHLGERECSIQRRHQKLIEESPSPLVDDDTRKKIGDAAVSGAKSVNYVGVGTIEFLMDSQKNFYFMEMNTRIQVEHPVTEMVTGVDLIKQQIKMHAGKECPKLDNFQLRGHSIECRINAEDPSNNFMPFPGEISSFHMPGGKGVRVDSHAYAGYVIPSQYDSMIGKIIVHAKNRERAIIRMQRALEETIIDGPKTTIPYQMAIMKDEVFKSGDFDTSFLETFNYNEEEN

SEQ ID NO: 81886 - protein, 231 aa, Unknown
  Bacterial polypetide isolated from the Sargasso Sea
MDKDYDGIITTSIESVVNWSRKFSLFQYPFVTACCGMEYMAAACSHYDISRFGAEIPRFSPRQADLLWVVGTITHKMSPILKTIYDQMADPKWVIAFGTCASTGGFYQNYSVLQGIDRLIPVDLYIAGCPPRPEAVLDGLIELQNNIQKEGPKPNGIAPSAIRHKEQKIDQLNQYFEISKKEVFENVQNPKSNRISKPGFAYSKDFVNSSPHIGYDSPELQKKKNEIKEKT

SEQ ID NO: 81887 - protein, 817 aa, Unknown
  Bacterial polypetide isolated from the Sargasso Sea
MKKILIANRGEIACRIIDSCKKLKFHSIAVYSDIDKNSKHVRKADESIHIGASKAQESYLNADKIIEAAKKLKADAIHPGYGFLAENEKFAQKVIDSGITWIGPKPNTIVSMGNKDVARDLALKSNLPICPGLNNKDLEKEDLEKKCNEIGFPILVKASAGGGGIGMQIVNDYGELIKSVEKTKNLAKKAFGNSDVFLEKFIKNARHIEIQIFGFGEKKAVHFFERDCSIQRRFQKIIEESPAPKIDEKILNEMAQSAVNFASNQNYEGAGTIEFIYDVDEKKFYFLEMNTRIQVEHPVTESITNSDLVEMQIKFALGIDFDLTEQNKINRNGHAVECRLYAEDPSKNFLPSPGKITKLKIPNVGLTNIRLDIGVDEGDEISFYYDPMIAKIISKGANRTESINNMINFLKDFEIEGIKTNKSFLISVLQNKTFEDADFNTKFIENNLTLFKEKKEIKLKDKQQNKNNEQKYSDKDVKAFEKIISKTPKIKNGQDYTDKDLKEFENIVSSKNNKKKTDEKTEVNNVPGKIYDTPKFLPAGDKYMLIEFGNVMNLELNFTAQNLAKAIKDHKVKGVYETSPCFASMIVHYEPEEIKFNELKNELISLINSLGPSDEIEINSRIFSFPTVYLDKWTKECIEDYSNKIAKKKPDPELITELNNLENIDQFVRVHSSTEYWVAAIGFWPGLPFMMALDPRCKLTVPKYNPPRTWTPKGTVGMGGASTCIYPDRLPGGYQIFGIIPVPIWDTKKSFPVFENNICLFQPGDRVKFVPTTYEEFDHVSNKIKDGTYNYNIVEYQKFSVKNYKSWLKTIDHSKRF

SEQ ID NO: 81888 - protein, 167 aa, Unknown
  Bacterial polypetide isolated from the Sargasso Sea
MKPQTASGLFQKILIANRGEIACRIIRTCQSLGVSTVAVYSEADQDALHVRLADDAFHIGKAVPEDSYLNHERILETAIQCQADAIHPGYGFLAENDIFAEACLSKGINFIGPRPESIREMGSKSRAKQLMQEAGVPVVPGYHGDQQDFKILSNEAEKIGFPILIKP

SEQ ID NO: 81889 - protein, 259 aa, Unknown
  Bacterial polypetide isolated from the Sargasso Sea
MINKLLIANRGEIALRILRAAKELKIPTVAAYSEADKDLMHVKMADESICIGPADSSLSYLNIPAIISAMELSGADGVHPGYGFLSENPDFAEKVEKSGFDFVGPSASVIRMMGNKVSAKEFALEAGLPIVPGSSGPIEEDTHNKAEEIGYPIIIKAASGGGGRGMRIVNSREDLESAIELTQQEAAIAFGDSTVYMEKFLENPRHIEVQVMADRHGNVLHLGDRDCSLQRRHQKVIEEAPAINSDEEKRQEIYAKCIE

SEQ ID NO: 81890 - protein, 260 aa, Unknown
  Bacterial polypetide isolated from the Sargasso Sea
MFKKVLIANRGEIAVRVIRACKEWGIGTVAVHSDVDADSMHVRLADESVCIGSHQPQNSYLNTAAIMSAVDVTGAEAIHPGYGFLSENYKFAEIVEKHNVKFIGPKAEIIKKMGDKIQAKIIAKEKGLPVIEGSDGGVKDLKQAKEICKKIGYSVLIKASGGGGGKGMKIVEEENKLSEMYSLARLEAKKYFGNDEVYIEKYFKNPRHIEVQVLSGRNRTVHLNERDCSVQRKHQKLIEETPSPVLDDKVRSDLLDKTIK

SEQ ID NO: 81891 - protein, 246 aa, Unknown
  Bacterial polypetide isolated from the Sargasso Sea
MFKKILIANRGEIAVRIIRACKEWGISTVAVHSDVDRDSMHVRLADESVCIGSHQPQNSYLNIPALMSAIELTNAEAVHPGYGFLSENANFAKILEENKIKFIGASSELIAMMGDKIQAKKIAKENGLPVIEGSEGGVKDIAQAKELCKKIGFPVLIKASGGGGGKGMKIVYKEEEFETLFSTAKSEAQKYFGNDEVYIEKFFQNPRHIEVQILAGKNRVVHLHERDCSVQRRHQKLIEETPSPVL

SEQ ID NO: 81892 - protein, 192 aa, Unknown
  Bacterial polypetide isolated from the Sargasso Sea
MINKLLIANRGEIALRILRAAKELKIPTVAAYSEADKDLMHVKMADESICIGPADSSQSYLNIPAIISAMELSGADGVHPGYGFLSENPDFAEKVEKSGFDFVGPSGSVIRMMGNKVSAKEFALKSGLPIVPGSSGPIDENVHEEAEKIGYPVIIKAASGGGGRGMKIVYNPEELDNAIELTQQESAAAFGD

SEQ ID NO: 81893 - protein, 293 aa, Unknown
  Bacterial polypetide isolated from the Sargasso Sea
MFKKVLIANRGEIALRILRACRELEIKTVAIHSEADETAMHVRMADESVCVGPASAQSSYLNIPAIITAATISNVDAIHPGYGFLSENKRFAEIIEEHNIKFIGPKSEHIEIMGNKIAAKKVMEENKVPTVPGLNDISDMKKVLEFIDKIKLPIIIKAASGGGGKGMRVVNKLEDLEESINAAKIESKKSFNDDTVYLEKFFVNPKHIEIQILADCNGNVLTLGERDCSIQRKHQKIIEESPSTVLTNMEREKISNLCIDAIKSIKYEGVGTLEFLYENNEFYFMEMNTRLQV

SEQ ID NO: 81894 - protein, 226 aa, Unknown
  Bacterial polypetide isolated from the Sargasso Sea
MFKKILIANRGEIAVRIIRACKEWGISTVAVHSDVDRESMHVRMADESVCIGSHQPANSYLNIPALMSAIELTNADAVHPGYGFLSENANFARILEENKINFIGATSKHIEMMGDKIQAKKIAKENGLPVIEGSEGGVKDVSEAKELCKKIGFPVLIKASGGGGGKGMKIVYKEEEFETLFSTAKSEAQKYFGNDEVYIEKFFQNPRHIEVQILAGKNRAVHLHER

SEQ ID NO: 81895 - protein, 455 aa, Unknown
  Bacterial polypetide isolated from the Sargasso Sea
MFEKILIANRGEIAIRIIRACNEMGIKTVAVYSKADKNSLHVKFADEAICIGEGPAVESYLNIPRIIAAGEITNADAIHPGYGFLAENAKFSKICKENGFTFIGPDSKIIDLMGDKVNARNTAKDAGLPIIPGSNTLSSVEELLEIAEQIGYPVMLKAVAGGGGKGMRIINNASEAEKGFNIIQNEAGMAFKNSEIYVEKFVENGRHIEVQILSDKFGNHLHLGERECSIQRSNQKLIEESPSLFVDDDLRNDLTLKSLQLSKKVNYVGAGTIEYLVDDKKNFYFIEMNTRIQVEHTVTEMVYMIDLVKEQIRTYAGIELSIKQEDICMNGHAIECRINAEDPFNDFTPSPKMIESLNFAGGIGVRIDSFIYAGYQIPTNYDSMLGKLIVHSSSREKALVRMKRALQETFIDGPKTTLPLLEMIFENKDFNNGNFDINFLGKFLKNKKEKDNESS

SEQ ID NO: 81896 - protein, 203 aa, Unknown
  Bacterial polypetide isolated from the Sargasso Sea
MFKKILIANRGEIAMRVIRTCKEMGIKTVAVYSRADEESLHVRFADEAVCIGPAPSNESYLKPANIIAAAEITNADAIHPGYGFLSENSNFSKICEEHKIKFIGASPTMIEAMGDKSTAKKTMQKAGVPVIPGSDGIVPTLEDAQNIALEIGYPVMLKATAGGGGKGMRMANSPNDLIKAWEVARQESKSAFDNDAMYLEKFI

SEQ ID NO: 81897 - protein, 406 aa, Unknown
  Bacterial polypetide isolated from the Sargasso Sea
EGAMHVRMADESICVGPASAQSSYLNIPAIITAATLTNVDGIHPGYGFLSENQRFAEIIEEHNIKFIGPHSSHIKIMGNKIDAKKIMDENNVPTIPGLNDIFDSKLIKEFIKDVNLPIIVKAASGGGGKGMRVVTSAEEINNAINSAKAEAKKSFNDDNVYLEKFLTNPKHIEIQILADAHGNIITLGERDCSIQRKHQKLIEESPSTLLTNEKRKEISDLCKKAISSIGYEGVGTLEFLYENENFYFMEMNTRLQVEHPVTEMVTGIDLVKQQILAASGEKLKISQNDINFKGHAIECRINAEHPDSFIPSPGKITQYHQPGGLGVRVESAVYQGYSVPPHYDSMIGKLITYADNRKECIARMNRALEEYIIMGINTNIQLHQKIIMSKEFQSGKYDINFMSTFN

SEQ ID NO: 81898 - protein, 230 aa, Unknown
  Bacterial polypetide isolated from the Sargasso Sea
MFKKILIANRGEIAVRIIRACKEWGISTVAIHSDVDRESMHVRLADESICVGPHQPTFSYLNIPAIMSAIELTGAEAVHPGYGFLSENFEFAKMLEENNIKFIGPSSSLIKMMGDKIEAKRVAKEYGLPIIEGSDGGIKDINEAKKICEKVGFPILIKASGGGGGKGMKIVNRLEEFENLFLTAKQEAKKFFGNDEVYIEKFFQNPRHIEVQVLSGKNRTVHLHERDCSV

SEQ ID NO: 81899 - protein, 100 aa, Unknown
  Bacterial polypetide isolated from the Sargasso Sea
MKKILIANRGEIACRIIESCKKLNIHSIAVYSDIDKKSKHVRLADEAIHIGNSKAQESYLSSRKIINAALKTKADAVHPGYGFLSENAEFAQNVIDAGLI

SEQ ID NO: 81900 - protein, 126 aa, Unknown
  Bacterial polypetide isolated from the Sargasso Sea
MLNKVLIANRGEIALRVIRACREMGIKSVAVHSTADSDAMHVRMADESVCIGPAAGTSSYLSMPAIIAACEITGAEAIHPGYGFLSENAKFVQIVEDHGIKFIGPTAEHIRIMGDKITAKDTMREL

SEQ ID NO: 81901 - protein, 222 aa, Unknown
  Bacterial polypetide isolated from the Sargasso Sea
MFKKILIANRGEIAIRIIRACNEMGIKTVAVYSKADKNSLHVKFADEAICIGEGPAVESYLNIPRIIAAGEITNADAIHPGYGFLAENAKFSKICKENGFTFIGPDAEIIDLMGDKVNARNAAKDAGVPIIPGSNILSSVEEFLEIAEQIGYPVMLKAVAGGGGKGMRVIKNANEAKKVLISFKMKQEWHLIIQKSMLKNLLKMAVILRSKFYQINLEIIFN

SEQ ID NO: 81902 - protein, 445 aa, Unknown
  Bacterial polypetide isolated from the Sargasso Sea
MFKKILIANRGEIAVRIIRACKEWGISTVAVHSDVDRESMHVRMADESVCIGSHQPANSYLNIPALMSAIELTNAEAVHPGYGFLSENANFARILEENKINFIGASSKHIEMMGDKIQAKRIAKENGLPVIEGSEGGVKDISEAKELCKKIGFPVLIKASGGGGGKGMKIVYKEEEFETLFSTAKSEAQKYFGNDEVYIEKFFQNPRHIEVQILAGKNRVVHLHERDCSVQRRHQKLIEETPSPVLNDEIRKDLFDRTVKMVAKIGYMGAGTVEFIYEDGKFYFLEMNTRVQVEHPVTEMVTGVDIIKEQIWIAFSGETALKQSDINPRGHAIECRINAEDASKNFQPSPGVITMCHQPSGFRTRVDGAIFQGYKVTPYYDSMVCKLICHGRNRTEAIQRMNRSLDEFVIEGITTTIPLHKKLLNHKKFINSDFNVSWLDKDTIV

SEQ ID NO: 81903 - protein, 325 aa, Unknown
  Bacterial polypetide isolated from the Sargasso Sea
MFKKILIANRGEIAVRVIRACKEWGISTVAIHSDVDRDSMHVRLADESVCVGTHQPLNSYLNIPAIMSAIELTGAEAVHPGYGFLSENSDFAKILEDYKIKFIGPSSKLIKMMGDKIQAKKIAKEYGLPVIEGSDGGVKDKKHAKEICEKIGFPVLIKASAGGGGKGMKIVYKESEFDDLFATAKSEAKKYFGNDEIYIEKFFQNPRHIEVQVLSGKNRTVHLHERDCSVQRRHQKLIEETPSPILTNDIRKDLFERTVNMVSKIGYEGAGTVEFIYENEKFYFLEMNTRVQVEHPVSEMITGIDIIKEQIWIAFSGNTALKQSD

SEQ ID NO: 81904 - protein, 572 aa, Unknown
  Bacterial polypetide isolated from the Sargasso Sea
MKKLLKASILLFGLSLLSPNCWASGDPVKGKSLYSICVACHGANGEGQKINNAPRISGQHDWYVERQLINYRDGIRGVHIDDITGMQMRSIAITLKKDQDIADVTAYVSTLLSETPKATMEGDIVAGKNAYATCAACHGADGKGNKALNSPKIAGLQDWYIARQLNHFKIGARGRLKKDIIGQQMRPMAMALDEDAINNLAVYIASLEGAPVMSSAVAIASSGSQPSMSDMMAAAKPASLNTSEPLYSTCTACHGENGEGKQWLGAPKISGQHDWYLKRQLKNWQDGIRGTHPKDVYGIQMRSMSMVMANDQEIDKVVSYIGGLNSPKPPATIKGDLQAGQNLYATCVACHGPGGMGNKALNSPKIAGLPDWYVARQLWGFKNGLRGENPRDVYGQQMRPMAMALPDEEAINNISAYIATFDGTGEAPAITTTVAASGTTDVSSTDTGAKAVTVAAATSGGSAEAGAALYTTCIACHGADGAGNKALNSPRIAGQSAWYLTNQLKGFKAGYRGSKPEDIYGMQMRPMSMTLADDQAIANVAAYITTLNGAVSPATLDGNAEAGKGLYVTCVA

SEQ ID NO: 81905 - protein, 154 aa, Unknown
  Bacterial polypetide isolated from the Sargasso Sea
MKFLLKDNISIIKKVKVERKKIVFTNGCFDLLHVGHIRYLAQAKKLGDFLIIGLNSDSSVKALKGKDRPIYSFEDRAVLLSALTSVDLVIIFEELTPENLIKEIVPDVLVKGGDYNIEDIVGFQTVIQNGGLVKSLSFYDGYSTTNYINKINKP

SEQ ID NO: 81906 - protein, 128 aa, Unknown
  Bacterial polypetide isolated from the Sargasso Sea
KILKKLTNNYKTQIVIQEFLPDIYDGDFRVLIIHGKPYKKTLARIPQEGSFKGNLAAGGKGEVRDISDVQMRIGSVVGEYLMRKDINFAGIDIIGQKLTEINITSPTCAREIFEQSGMNPIEDYFKKL

SEQ ID NO: 81907 - protein, 372 aa, Unknown
  Bacterial polypetide isolated from the Sargasso Sea
MFKKILIANRGEIAVRIIRACKEWGIPTVAVHSDVDRESMHVRMADESVCIGSHQPANSYLNIPSLMSAIELTNTDAVHPGYGFLSENANFARILEENKINFIGASSKHIEMMGDKIQAKKIAKENGLPVIEGSEDGVKDISEAKEICKKIGFPILIKASGGGGGKGMKIVYKEDEFETLFSTAKSEAQKYFGNDAVYIEKFFQNPRHIEVQILAGKNRVVHLHERDCSVQRRHQKLIEETPSPVLNNEIRKDLFEKTLNMVAKIGYMGAGTVEFIYEDGRFYFLEMNTRVQVEHPVTEMVTGIDIIKEQIWIAFSGETALKQSDINPRGHAIECRINAEDPSKNFQPSPGVITMCHQPSGFRTRVDGAIFQ

SEQ ID NO: 81908 - protein, 217 aa, Unknown
  Bacterial polypetide isolated from the Sargasso Sea
MFKKILIANRGEIACRVIDTCNKLGIDTVSVYSDADSRALHVMKAKEAINIGSAPSSESYLVIERIIDACKKTGADAVHPGYGFLSENSSFVNQLEREGITFIGPPSEPIRVMGDKIESKIFAEKSNVNIIPGHQEIIKDSEEALEISKKIGFPVMIKASAGGGGKGMRIAKAEEDVEDAFNSSVNEAKSSFGDDRIFIEKFIEKPRHIEIQILADN

SEQ ID NO: 81909 - protein, 284 aa, Unknown
  Bacterial polypetide isolated from the Sargasso Sea
MFKKILIANRGEIAVRIIRACKEWGIQTVAIHSDVDKESMHVKLADESVCVGSHQPANSYLNIPAILSAIEITNSEAVHPGYGFLSENFNFASMLEENNIKFIGPSSKLIKMMGDKIEAKKIAKKYGLPVIEGSAGGISDLESGKKLAKEIGFPILIKAAGGGGGKGMKIVRSEKEFDNLFLTAKSEAKKFFANDEVYIEKFFQNPRHIEVQVLSGKNHTVHLHERDCSVQRRHQKLIEETPSPVLTDEIRKDLFDRTVNMVSKIGYEGAGTVEFIMKMVNFIF

SEQ ID NO: 81910 - protein, 264 aa, Unknown
  Bacterial polypetide isolated from the Sargasso Sea
MFKKILIANRGEIAVRIIRACKELNIKTVAIHSNVDTDSMHVKLADESICVGDSSAKQSYLNIPSIISAIDITGADAVHPGYGFLSENDKFAKILKSHNVKFIGPSSKSILDLGNKSNALKLANHYDLPILGNKNSKNINDTDEALKIANEIGMPIVIKAAYGGGGKGMRVFYSDNEIKKFFSQLKTEAKNYFGNDAMYAEKFLTNAKHIEFQIISDTKNQNVEIIGQRDCSIQRKNQKIVEEIPSEFVKINKLNKITKNIKSL

SEQ ID NO: 81911 - protein, 382 aa, Unknown
  Bacterial polypetide isolated from the Sargasso Sea
QLFQLAKLLGAKAVHPGYGFLSENASFAKMLDDHKLTFIGPKHSHISMMGDKIEAKKIMQEYGVPTVPGSEGEIVDLKDAIKTSKDIGFPVLLKASAGGGGRGMKVVHDEKELTDALPIIKQEALSFFGNDSIYIEKFIDSPRHIEIQVICDSHNNFLHLHERDCSIQRRNQKVIEEALAPEIDQDKKDKLFKICIDAMKKMGYLGLGTLEFLYADSEFYFMEMNTRLQVEHPITEMLTRIDLVREQICVAAGDKIFTSQENIKPLGHSIECRINAESSYDFKPSAGTIEMYHPPAGNGIRLDTFIYSGYKVPHYYDNLLAKLIVTGRTRNHAIKRALRSLNEIVIDGIETNIDLHKKILSSNDFKNGAVPINWLEKNIDKL

SEQ ID NO: 81912 - protein, 107 aa, Unknown
  Bacterial polypetide isolated from the Sargasso Sea
MIKKILIANRGEIACRVIRTARKLNINTVVVYSDADKDSLFVKQADESYHIGGSQPVESYLDINKIINIAKKSKADAIHPGYGFLSENAAFVKRLAKEKIKFIGPKS

SEQ ID NO: 81913 - protein, 445 aa, Unknown
  Bacterial polypetide isolated from the Sargasso Sea
MFKKILIANRGEIALRILRACEELDIKTVAVYSSADKDLKHVKMADESICIGPAESAKSYLNVAAIISASELTGIDAIHPGVGFLSENDHFAQQVTSSGYKFIGPDSETIKVMGNKITAKEAVLSAGMQPVPGTGRINSEEEALKMADEIGYPVIIKAAAGGGGKGIQICEKKEEFLSKLSLTQIEALNSFGSDEVYIEKYLQTPRHVEIQVAADDHGNAVHFFERDCSIQRRNQKIIEEAPAFDIPQEKLDEIRKIAVNTCKKLNYKGLGTFEFLYEDGNFYFIEMNTRLQVEHTITEMITGIDLVKLQIMIAAGQEIPLSQDDINCRGHAIECRINAEHHETFIPSPGKVTEFHPPGGFRIRTDSHLYSGYTVPQYYDALIAKICAHSSDRISAIRKMRVALEETYIEGINTNAPLHQRILIEPNFVEEKISINYLRDILNIK

SEQ ID NO: 81914 - protein, 167 aa, Unknown
  Bacterial polypetide isolated from the Sargasso Sea
MRFNSILVANRGEIACRIMQTAQFMGIKCVAVFVDADKDAPFVKMADEAIKLSSGYMDGSAIIDAAKQSGAEAIHPGYGFLSENAAFARKVKSNKLIWIGPSPHVIKVMGDKLKAKEIAEKSGVPTLPMTSNTKDVKSIGYPILIKAAAGGGGKGMRIVEKESELKD

SEQ ID NO: 81915 - protein, 442 aa, Unknown
  Bacterial polypetide isolated from the Sargasso Sea
KILIANRGEIAVRVIRACKEWGIPTVAIHSDVDRDSMHVRLADESVCVGTHQPLNSYLNIPAIMSAIELTSAEAVHPGYGFLSENPEFAKILEDYKIKFIGPSSKLIEMMGDKIQAKKIAKEYGLPVIEGSDGGVTDKKHAKEISKKIGFPVLIKASAGGGGKGMKIVYKESEFDDLFATAKSEAQKYFGNDEIYIEKFFQNPRHIEVQVLSGKNRTVHLHERDCSVQRRHQKLIEETPSPILNDKIRKDLFERTVNMVGKIGYEGAGTVEFIYENEKFYFLEMNTRVQVEHPVSEMITGIDIIKEQIWIAFTGNTALKQSDVVPRGHAIECRINAEDASKNFQPSPGTIGMCHQPSGFRTRVDGAIFQGYKVTPYYDSMVCKLICHGRNRTEAIQRMRRSLDEFVIDGITTTIPLHKKLLDHPKFIDSDFNVSWLDKEKII

SEQ ID NO: 81916 - protein, 136 aa, Unknown
  Bacterial polypetide isolated from the Sargasso Sea
MFKKVLIANRGEIAVRVIRACKEWGIGTVAVHSDVDSESMHVRLADESVCIGSHQPQNSYLNIPAIISAIDVTGAEAVHPGYGFLSENYKFADMIQKHGIKFIGPKAEIIKKMGDKIEAKRIAKQNGLPVIEGSES

SEQ ID NO: 81917 - protein, 444 aa, Unknown
  Bacterial polypetide isolated from the Sargasso Sea
MFKKILIANRGEIAVRIIRACKEWGISTVAIHSDVDRESMHVKLADESICVGSHQPENSYLNIPAILSAIELTNAEAVHPGYGFLSENYNFAKILEENNIKFIGPSSKHIKMMGDKIQAKKIALQYGLPVIEGSEGGVKDILEAKRILKKTGLPVLIKAAGGGGGKGMKIVKNENEFESLFLTAKQEAKKYFGNDEVYIEKFFENPRHIEVQILAGKNRVIHLHERDCSVQRRHQKLIEETPSPVLNDEIRRDLFRKTVNMVQKIGYEGAGTVEFIYEDGKFYFLEMNTRVQVEHPVTEVVTGIDIIKEQIWIAFSGDTALEQKDIQPRGHAIECRINAEDPSKNFQPSPGTIGMCHQPSGFRTRVDGAIYQGYKVTPYYDSMVCKLICHGRNRTEAIQRMNRSLDEFVIEGITTTIELHKKLINHKKFIESDFNVTWLDKEKI

SEQ ID NO: 81918 - protein, 448 aa, Unknown
  Bacterial polypetide isolated from the Sargasso Sea
MPIGKVLIANRGEIALRILRSCRELGIATVAVYSTVDKDALHVQLADEAVCVGDALSSKSYLNVPNILAAATSRGVDAIHPGYGFLAENDKFAEMCGDHGLTFIGPSPHAIRSMGDKSTAKATMQSVGVPTVPGSEGLLAGPQDAAVLAEQMGYPVMIKATAGGGGRGMRLVQSPDQLNNLFKAAQGEAEAAFGNPGLYMEKFIDRPRHVEVQVLADRHGNVVHLGERDCSIQRRHQKLLEEAPSPALDPDLRRRMGEAAVAAARSINYEGAGTVEFLLDRSGGFYFMEMNTRIQVEHPVTEMVTGIDLIAEQLRIAGGEPISVQQEEINLSGHAIECRINAEDATHNFRPAPGRITGWLPPGGPGVRVDSHVYTGYDIPPFYDSLIGKVIVWGRNRDVALSRMKRALNECAVTGIPTTVEFHLALLDRPEFINGDVHTKFVEQDMLN

SEQ ID NO: 81919 - protein, 501 aa, Unknown
  Bacterial polypetide isolated from the Sargasso Sea
MKKILIANRGEIACRIIKSCKKLNLHSIAVYSDADEKSKHVKLANEAVHIGNSKAQESYLSSKNILSAALKYKADAIHPGYGFLSENAEFAQNVIDSGLVWIGPKPNSITSMGNKDIARELAIKSNLPICPGLKNDELDSNDLEKKCIDIGYPILIKASAGGGGIGMQIVNNFNELKSAIEKTKNLAKKAFGNSDIFLEKFIRNSRHIEIQVFGYGEKSAVHFYERDCSIQRRFQKIIEESPAPKVEQSIIKEMAEMSVNFASDQKYEGAGTIEFIYDIDQKKFYFLEMNTRIQVEHPVTEEITGVDLVELQIKYALNLDSTSILQSDISKNGNSLECRLYAEDPKKNFLPSPGKITKLRFPEVNKDIRLDIGVDEGDEISFYYDPMIAKIISKGVSRAEVIKKMKNFLEKMEIEGIKTNKSFLIEVLKNKSFEEAKFNTKFIENNLSIFTKYEEKNQDPIIKKEVKISDKKENENSQIKKSENKNYTDKDVKAFENIISK

SEQ ID NO: 81920 - protein, 147 aa, Unknown
  Bacterial polypetide isolated from the Sargasso Sea
MKKILIANRGEIAIRIARSVSDLGMIPIGIYSEDDESSLHLTKMNENHKIPGKGVSAYLDIKEIVSISKENNIDVIHPGYGFLSENQNFAKIVRKEGIIFIGPDEKTLKSLGQKSLARGLAEKLGIPVIKGTNKKTSLEESKKFFKS

SEQ ID NO: 81921 - protein, 153 aa, Unknown
  Bacterial polypetide isolated from the Sargasso Sea
MLDKVVIANRGEIALRILRACKELGIKTVAVHSTADRELKHVLLADETICIGKPASTDSYLNVPAIIAAAEVTGAVAIHPGYGFLSENADFAEVVEKSGFIFIGPRAETIRLMGDKVSAIEAMKKAGVPCVPGSDGPVDSDAKHNAAIAKRIG

SEQ ID NO: 81922 - protein, 284 aa, Unknown
  Bacterial polypetide isolated from the Sargasso Sea
MFKKILIANRGEIAIRIIRACNEMGIKTVAVYSNADKNSLHVKFADEAICIGEGPAVESYLNIPRIIAAGEITNADAIHPGYGFLAENAKFSKICKENGFTFIGPDAEIIDLMGDKVNARNAAKDAGVPIIPGSNTLSSSEELLKIANKIGYPVMLKAVAGGGGKGMRIVKNESEAEKGFNIIQNEAGMAFDNSEIYVEKFVENGRHIEVQILSDKFGNHLHLGERECSIQRSNQKLIEESPSLFVDDLLREELTRKSLELAKKVNYVGAGTVEFLVDSQKNFY

SEQ ID NO: 81923 - protein, 191 aa, Unknown
  Bacterial polypetide isolated from the Sargasso Sea
MFKKILIANRGEIAVRIIRACKEWGILTVAVHSDVDRESMHVRMADESVCIGSHQPANSYLNIPALMSAVELTNADAVHPGYGFLSENANFARILEENKINFIGASSKHIEMMGDKIQAKRIAKENGLPVIEGSEGGVKDVSEAKELCKRIGFPVLIKASGGGGGKGMKIVYKEEELKRCSQPQNQKHKNT

SEQ ID NO: 81924 - protein, 425 aa, Unknown
  Bacterial polypetide isolated from the Sargasso Sea
MRACRELDIKTVAIHSEADDTAMHVRMADESICVGPSSAQSSYLNIPAIITAATITDVDAIHPGYGFLSENKRFAEITEEHKIKFIGPKSEHIKMMGNKIDAKKIMDANNVPTVPGLNHLDNDDKVNDFINKVGLPIIVKAASGGGGKGMRIVNKKSELKKSIEAAKVESKKSFNDDVVYLEKFLTNPKHIEIQILADSYGNVVTLGERDCSIQRKHQKLIEESPSTILLDEERGKISNLCRKAINSIDYEGVGTLEFLFEENKFYFMEMNTRLQVEHPVTEMVTGIDLVKQQILSASGEKLKIKQEDVKIKGHAIECRINAEHPTSFIPSPGKITQYHQPGGLGVRVDSAVYQGYVIPSHYDSMIGKLITYAENRKECIEKMKRALEEYVIMGINTNIQLHQKLIKSNEFSEGKYDINYMTKYI

SEQ ID NO: 81925 - protein, 451 aa, Unknown
  Bacterial polypetide isolated from the Sargasso Sea
MYKKILIANRGEIALRIIRACHELGIHSVAVYSTADKNSLHTKFADEAVCIGPPLSADSYLSIPNIISAGEITNADAIHPGYGFLAENADFSKICDDNGFAFIGPKPDIIDAMGDKSKAKETMKSAGVPVIPGNEGILSNPEEAKKIAKDIGYPVMLKASAGGGGRGMRLVYDENEIESAFTTASSEALNAFSNGDMYIEKFVENPRHIEIQILADTNGNVVSLGERECSIQRRYQKLIEESPSPAVNEKLRKKMGDAAIAGAKAVDYVGVGTVEFLLDKNKDFYFMEMNTRIQVEHPITEMVTGADLIKWQIKTHFGEKFPDYLYKMKLRGHSIECRINAEDPAKNFAPSAIPISSFHMPGGKGVRIDSHAYAGYEIPPFYDSLLGKLIVHSPDRKSAINRMERALEETIIEGPKTTVPFHQAIMKDQRFRSGDFDTNFLNNFKYNDGEK

SEQ ID NO: 81926 - protein, 267 aa, Unknown
  Bacterial polypetide isolated from the Sargasso Sea
MINKLLIANRGEIACRVIKTANAQGIKTVAVYSDADKNALHVQMADEAVYLGPSPSKESYLRGELIIEKAKELGVDAIHPGYGFLSENAEFANLCAKNNIIFVGPPASAIEAMGSKSAAKHIMEKAGVPLVPGYHGDDQSEAVLKGAADEMGYPVLLKAAAGGGGKGMRQVWSEKEFSQALNAAKRESMASFGDDHMLVEKYLTRPRHVEIQVFCDTHGNGVYLFERDCSVQRRHQKIIEEAPAPNMSQSVREKMGEAAILAAKAIN

SEQ ID NO: 81927 - protein, 445 aa, Unknown
  Bacterial polypetide isolated from the Sargasso Sea
MFKKILIANRGEIAVRIIRACKEWGISTVAVHSDVDKESMHVRLADESVCIGSHQPANSYLNIPALMSAIELTKSEAVHPGYGFLSENANFAKILEESSIKFIGPSSKLIKMMGDKIQAKKIAKEYGLPVIEGSDGGVSNIAKAKEICKKIGFPVLIKAAGGGGGKGMKIAFEEKNFDELFLAAKSEAKKYFANDEVYIEKFFQNPRHIEVQVLSGKNRTVHLHERDCSVQRRHQKLIEETPSPILSDDLRKDLFEKTVNMVSKIGYEGAGTVEFIYEDGKFYFLEMNTRVQVEHPVTEMVTGIDIIKEQIFIAFTGNTALKQTDINPRGHAIECRINAEDASKNFQPSPGTITMCHQPSGFRTRVDGSIYQGYKITPYYDSMVCKLICQGRNRQEAIQRMLRSLDEFVLDGITTTIGLHKKLLNHKKFIESDFNVSWLDNEKII

SEQ ID NO: 81928 - protein, 450 aa, Unknown
  Bacterial polypetide isolated from the Sargasso Sea
MITRRQFLVGSLAFGGLATSAFGKKINLASMPISEGYGALVADPQKLLDLPKGFSYKVISSLGNSMSDGMHVPDRADGMGCLPVEGSSDKVALIRNHELHPKHLSAQPQSIQKHTSELAYDNYHSGVALPGGTTTMVYNLTTKMVEREFISLVGTVRNCSGGITPWGTWLTCEESVDRPHGPNGDVVNKDHGYIFEVPANADSLIEAKPLKAMGRFNHEAACVDPKTGIVYLTEDQGDSLLYRFVPNEYANLAAGGQLEALVVKNKPQFDTRNWSSTTMPLATWFDVEWIALDNPESPNDDLRARGYEKGAALFARGEGIHWGENELYFCCTNGGQKQLGQVMKLVPSADGKQDKLQLFLESEDKNLYNFGDNLTVCPNGHLVVCEDQYTDIVDNHLRGVTPNGEVYNFAKLHAQTELAGACFSPDGNTLFVNIYSPTKTLAITGPWLEG

SEQ ID NO: 81929 - protein, 551 aa, Unknown
  Bacterial polypetide isolated from the Sargasso Sea
MKKILIANRGEIACRIIKSCKKLNLHSIAVYSDVDEKSKHVRLANEAVHIGNSKAQESYLSSKKILSAALESKADAIHPGYGFLSENAEFAQNVIDSGLVWIGPKPNSINSMGNKDVARELAIKSNLPICPGLKNDELNSNDLEKKCIDIGYPILIKASAGGGGIGMQIVNNFNELKSAVEKTKNLAKKAFGNSDIFLEKFIRNSRHIEIQVFGYGEKSAVHFYERDCSIQRRFQKIIEESPAPKVEQSIIKKMAEMSVNFASDQKYEGAGTIEFIYDIDQKKFYFLEMNTRIQVEHPVTEEITGVDLVELQIKYALNLDSTSILQSDISKNGNSLECRLYAEDPKKNFLPSPGKITKLRFPEVNKDIRLDIGVDEGDEISFYYDPMIAKIISKGANRPEVIKKMKNFLEKMEIEGIKTNKSFLIEVLKNKSFEEAKFNTKFIENNLSIFTKYEEKNQDPIIKKEVRISDKKENENSQIKKSENKNYTAKDVKAFENIISKSQIKTNGQNYTQKDLKAFEKIISPKDEINKISKTKIRNIPGKIYDTPKSN

SEQ ID NO: 81930 - protein, 374 aa, Unknown
  Bacterial polypetide isolated from the Sargasso Sea
MFKKILIANRGEIAVRVIRACKEWGIKTVAVHSNVDKESMHVRLADESVCIGSHQPANSYLNIPAIMSAIELTKAEAVHPGYGFLSENANFSKILEENKIKFIGPSPKLIKMMGDKIEAKKVAKKYGLPVIEGSEGGVSDLNQGKKISKKIGFPVLIKAAGGGGGKGMKIVNDEKSFDIAFSSAKTEALKYFGNEEVYIEKFFQNPRHIEVQVLSGKNRTVHLHERDCSVQRRHQKLIEETPSPILTDEIRKDLFTKTVTMVSKIGYEGAGTVEFIYEDGKFYFLEMNTRVQVEHPVTEMVTGIDIIKEQIWIAYNGETALKQSDINPRGHAIECRINAEDPAKNFQPSPGTIGMCHQPSGFRTRVDGSIYQGY

SEQ ID NO: 81931 - protein, 270 aa, Unknown
  Bacterial polypetide isolated from the Sargasso Sea
MFKKVLIANRGEIAVRVIRACKEWGIGTVAVHSDVDSESMHVRLADESVCIGSHQPQNSYLNIPAIISAIDVTGAEAVHPGYGFLSENFKFADMIAKHGIKFIGPKAEIIKKMGDKIEAKRIAKQNGLPIIEGSEGGVKNVDEAKLICKKIGYPVLIKASGGGGGKGMKIVESEDKLEGLFSLARLEAKKYFGNEEVYIEKYFKNPRHIEVQIMSGKNRTVHLNERDCSVQRKHQKLIEETPSPVLDEKTRSDLLDKTVKMVEALGYEGA

SEQ ID NO: 81932 - protein, 317 aa, Unknown
  Bacterial polypetide isolated from the Sargasso Sea
MFKKILIANRGEIAVRVIRACKEWGISTVAVHSDVDKESMHVRLADESICIGSHQPANSYLNIPTIMSAIELTNSEAVHPGYGFLSENSSFAKILEDNNIKFIGPSSKLIKMMGDKIEAKKIAKKNGLPVIEGSEGGVSNIKEAKEICEKIGFPVLIKAAGGGGGKGMKIVNNESEFEKLFSLAKSEAQKYFGNDEVYIEKFFQNPRHIEVQVMSGKNRTVHLYERDCSVQRRHQKLIEETPSPVLDDEIRKELFDKTVNMVSKIGYEGAGTVEFIYEDGKFYFLEMNTRVQVEHPVSEVVTGIDIIKEQINVAFTG

SEQ ID NO: 81933 - protein, 430 aa, Unknown
  Bacterial polypetide isolated from the Sargasso Sea
IALRILRACRELDIKTVAIHSEADETAMHVRMADESVCVGPASAQSSYLNIPAIITAATISNADAIHPGYGFLSENKRFAEIIEEHDIKFIGPKSEHIEMMGNKIAAKKIMEKNKVPTVPGLNDLSDMKKVLDFIDDIKLPVIIKAASGGGGKGMRVVNKIEDLEESIKSAKIESKKSFNDDTVYLEKFFVNPKHIEIQVLADSNGNVLTLGERDCSVQRKHQKIIEESPSIVLTNVEREKISSLCIKAIKSIKYEGVGTLEFLYENNKFYFMEMNTRLQVEHPVTEMITGQDLVKEQIKVASGNKIKLKQEDINFNGHSIECRINAEHPETFIPSPGKITQYHQPGGLGVRVDSAVYQGYIIPSHYDSMIAKLIVYGKNRNECIQKMKRALEEYVIIGIDTNIQLHQKIIQSSEFLSGKYDINYMSKFE

SEQ ID NO: 81934 - protein, 237 aa, Unknown
  Bacterial polypetide isolated from the Sargasso Sea
MYKKILIANRGEIALRVIRACHELGLKSVAVYSSADKDSLHVKFADEAICIGPPDSRESYLNIPNIISAGEITNADAVHPGYGFLAENADFSNICKENGFSFIGPTGDIINAMGDKAQAKKTMKEAGLPIIPGNEGVLDNVDETKALASEIGYPVMLKASAGGGGRGMRLVRKESELEHAYSTASGEAQNAFNNGDLYIEKFIEEPRHIEIQLLADVHGNAVSLGERECSIQRRHPK

SEQ ID NO: 81935 - protein, 1027 aa, Unknown
  Bacterial polypetide isolated from the Sargasso Sea
MFEKILIANRGAIACRILRTLRELDVTGVAVYAEADRASLHVSEAPIAHGLGDGPASATYLDTEKILEIARRENVQAIHPGYGFLSENAAFGEACEAAGIEFIGPTPAQLRAFGLKHTARGIAADQGVPMLNGTGLLDDLAAALAAAESIGYPVMLKSTAGGGGIGMRVCWNVEELRAHFEVVKRLGQNNFSDAGVFLEKYIERARHLEVQVFGDGRGDAIALGVRDCSVQRRNQKVLEETPAPNLPDGMSAALCEAAVKLAKAVSYRSAGTVEFVYDSAAQQFYFLEVNTRLQVEHGVTEQVWGVDLVRWMIELAAGTLAPLQELAAGLKPHGHAIQARLYAEDPGRDFKPSPGLLTDVAFPRADGRSLRIDTWIEAGCEVPPYFDPMLAKVIAWSPTRDAARHALADALQNTRLYGVETNRDYLRQILDDHPFASGEPWTRCLEGLKYRASTLEVISAGTQTTVQDYPGRLGYWAVGIPPSGPMDDRALRLGNRLLGNGADAAALEITMSGPTLRFNTDAVVAVTGANLPVLLDDIEQPLNTTLLVAAGSTLALGTIRGAGARAYLCVRGGFDVALYLGSRSTFTLGQFGGHGGRALRAGDVLHLQPLQDVHAGAVLANLPALETVRTLRVIYGPHGAPEYFSPRYVEQFFDTEWEIHFNSSRTGVRLIGPKPEWSREDGGEAGLHPSNIHDNPYAVGAVDFTGDMPVILGPDGPSLGGFVCPVTIIEADLWQIGQLKAGDKVRFVPVQIDAAREAARQRLRELETLEFEPQATFTKAAALTSPIVLETGADRERLVARVSGDTHLLLEIGPTELDLALRFRGHALMQSLEAMALTGVIDLTPGIRSLQIHYQPESLPLAQLLAIVERAWQDVLLQKNLRVPSRIVHLPLSWDDPACRLAIDKYMTTVRKDAPWCPSNLEFIRRINDLDSIDAVKQIVFDASYLVMGLGDVYLGAPVATPLDPRHRLVTTKYNPARTWTAENSVGIGGAYLCVYGMEGPSGYQFVGRTLQMWDRYREVADFAGRP

SEQ ID NO: 81936 - protein, 445 aa, Unknown
  Bacterial polypetide isolated from the Sargasso Sea
MFKKILIANRGEIAVRIIRACKEWGISTVAVHSDVDRDSMHVRLADESVCIGSHQPQNSYLNIPALMSAIELTNAEAVHPGYGFLSENANFAKILEENKIKFIGASSELIAMMGDKIQAKKIAKENGLPVIEGSEGGVKNIAQAKELCKKIGFPVLIKASGGGGGKGMKIVYKEEEFETLFSTAKSEAQKYFGNDEVYIEKFFENPRHIEVQILAGKNRVVHLHERDCSVQRRHQKLIEETPSPVLNNEVRKDLFEKTVNMVEKIGYMGAGTVEFIYEGGKFYFLEMNTRVQVEHPVTEMVTGIDIIKEQIWIAFSGETALEQSDINPRGHAIECRINAEDASKNFQPSPGTIGMCHQPSGFRTRVDGAIYQGYKVTPYYDSMICKLICHGRNRSEAIQRMNRSLDEFVIEGITTTIPLHKKLLNHKKFIESDFNVGWIDKEKII

SEQ ID NO: 81937 - protein, 155 aa, Unknown
  Bacterial polypetide isolated from the Sargasso Sea
MLERLLIANRGEIAIRIARTASDMGIKTVSVFSEDDHLSLHTRHSESAVNLGQAGVAAYLNAENLIQVAKETGCDAIHPGYGFLSESAEFAKLCAEAGIRFVGPSPETLSQFGDKAQARNLAIASEVPVLKGTNQATNLEEANAFYDSLGVGTAV

SEQ ID NO: 81938 - protein, 361 aa, Unknown
  Bacterial polypetide isolated from the Sargasso Sea
MFKKILIANRGEIAVRIIRACKEWGISTVAVHSDVDRDSMHVRLADESVCIGSHQPANSYLNIPALLSAIEITDAEAVHPGYGFLSENANFARVLEENNIKFIGASSKLIQMMGDKIQAKKIAKEHGLPVIEGSEGGIKDIKEAKELCKKIGFPILIKASAGGGGKGMKIVYKEAEFETLFSTAKSEAKKYFGNDEIYLEKFFQNPRHIEVQILAGKNGVVHLHERDCSVQRRHQKLIEETPSPVLNDEIRKDLFERTVKMVSKIGYEGAGTVEFIYEDGKFYFLEMNTRVQVEHPVTEMVTGIDIIKEQIWIAFSGETALKQNDIMPRGHAIECRINAEDASKNNQPSPGTIEMCHQPSG

SEQ ID NO: 81939 - protein, 366 aa, Unknown
  Bacterial polypetide isolated from the Sargasso Sea
MFKKILIANRGEIAVRIIRACKEWGISTVAIHSDVDRESMHVRLADESICVGPHQPTFSYLNIPAIMSAIELTGVEAVHPGYGFLSENFEFAKILEENDIKFIGPSSNLIKMMGDKIEAKKVAKNYGLPVIEGSEGGIKDINEAKKICEKIGFPVLIKASGGGGGKGMKIVNKLEEFENLFLTAKQEAKKFFNNDEVYIEKFFQNPRHIEVQVLSGKNRTVHLHERDCSVQRRHQKLIEETPSPVLDDSIRKELFEKTVSMVSKIGYEGAGTVEFIYEDGKFYFLEMNTRVQVEHPVTEMVTGIDIIKEQIWIAFSGNTALKQSDINPRGHAIECRINAEDPSNNFQPSPGKIGMCHQPSGFRTKS

SEQ ID NO: 81940 - protein, 211 aa, Unknown
  Bacterial polypetide isolated from the Sargasso Sea
MVEKVLIANRGEIALRIVRSCRELGIATVAVFSTVDKKALHVQLADEAVCVGDSLSNKSYLNIPNILAAATSRGVDAIHPGYGFLAENDKFAEMCNDHGIVFIGPSPKAIRSMGDKSTAKETMEAVGVPTVPGSQGLLSNVDEAYKLADEIGYPVIIKATAGGGGRGMRLVENSDNLEKMFKAAQGEAEAAFGNDGLYMEKFIKKPRHVEI

SEQ ID NO: 81941 - protein, 164 aa, Unknown
  Bacterial polypetide isolated from the Sargasso Sea
MFKSILIANRGEIACRLIKSARRLGIKTYAVYSEVDKHSLHTKEADVAVCIGQAESKKSYLNIKRIIEVALENKIEAIHPGYGFLSENYLFAKKVEASGIKFIGPSWKSIRAMGNKNNAKKIISSANIPLVDGFLVDKEKPVENKNKVKEIGFPVMPSRGRWWR

SEQ ID NO: 81942 - protein, 128 aa, Unknown
  Bacterial polypetide isolated from the Sargasso Sea
MDTDYDGFITTSIDSVVNWSRKFSLFQYPFVTACCGMEYMAAACSHYDISRFGAEIPRFSPRQADLLWVVGTITHKMSPVLKTIYDQMADPKWVIAFGTCASTGGFYQNYSVLQGIDRLIPVDLYIAG

SEQ ID NO: 81943 - protein, 147 aa, Unknown
  Bacterial polypetide isolated from the Sargasso Sea
MKKILIANRGEIACRIIESCKKLNIHSIAVYSDIDKKSKHVRLADESIHIGNSKAQESYLSSKKIINAALKTKADAVHPGYGFLSENAEFAQNVIDSGLVWIGPKPNSITSMGNKDIARELAIKSNLPICPGLKNEELNSNDWKKNV

SEQ ID NO: 81944 - protein, 247 aa, Unknown
  Bacterial polypetide isolated from the Sargasso Sea
MKKVLIANRGEIAIRIARTCSDLGIKTVGIYSEDDANCLHLSKVDEAYPIQGKGAQAYLDIKQIISIAKESKADFIHPGYGFLSENSALAASTKRAKIKFIGPSEKTLKIFGDKTTAKELALSLDIPTISGTHQKTSLKHAQSFMKSLSKNSSILIKAISGGGGRGMRVVSKLEELKESYERASSEAKATFDSPDLYLEEYLKNYRHIEFQIIGDGTGAVSHLHERECSIQRRHQKLIEIAPSPSLG

SEQ ID NO: 81945 - protein, 333 aa, Unknown
  Bacterial polypetide isolated from the Sargasso Sea
MTIINSVLIANRGEIAIRISKTLNEMGIKAYGIYSKDDSSSAHLSYCSEVFELNGTGPSAYLNIDEIISLAKSKKIKAVHPGYGFLSENHAFAASCAKNDIIFIGPNEKTLKNFGNKEKAKKLAQKLEIPVCSSSGPIQKKSDILSFFNEIKKNKIILKANFGGGGRGSRIIHKKDDFSEVLSLVKEEAKSFSGSNMIFAEEVIEEARHIEIQILGDGQSCIHLFERDCSFQRSFQKFIEFCPAPNLSSQAKDKLYNYAISLCESVAYKGLGTVEFLVDKNEKIYFMEVNPRVQVEHTITEELTGIDLIRSQISIFNGKSLKDQNIKAGIVLG

SEQ ID NO: 81946 - protein, 369 aa, Unknown
  Bacterial polypetide isolated from the Sargasso Sea
MFKKILIANRGEIAVRIIRACKEWGIQTVAIHSDVDKESMHVKLADESVCVGSHQPANSYLNIPAILSAIEITNSEAVHPGYGFLSENFNFASMLEENNIKFIGPSSKLIKMMGDKIEAKKIAKKYGLPVIEGSEGGISDLESGKKLAKEIGFPILIKAAGGGGGKGMKIVRSEKEFDNLFLTAKSEAKKFFANDEVYIEKFFQNPRHIEVQVLSGKNHTVHLHERDCSVQRRHQKLIEETPSPVLTDEIRKDLFDRTVNMVSKIGYEGAGTVEFIYEDGKFYFLEMNTRVQVEHPVTEMVTGIDIIKEQIWIAYTGNTALEQSEINPRGHAIECRINAEDPSRNFHPSPGLIGMCHQPSGFRTRVDSS

SEQ ID NO: 81947 - protein, 345 aa, Unknown
  Bacterial polypetide isolated from the Sargasso Sea
MFKKILIANRGEIAVRIIRACKEWGISTVAVHSDVDRESMHVKLADESVCIGSHQPANSYLNIPALLSAIDLTNAEAVHPGYGFLSENANFAKILEENKIKFIGASAKHIEMMGDKIQAKKIAKENGLPVIEGSEGGVRDVAAAKELCKKIGFPVLIKASGGGGGKGMKIVQKEEDFETMFSTAKSEAKKYFGNDEVYIEKFFQNPRHIEVQILAGKNETIHLHERDCSVQRRHQKLIEETPSPVLNDEIRKDLFDKTVNMVRKIGYQGAGTVEFIYEDGKFYFLEMNTRVQVEHPVTEMVTGIDIIKEQIWIAFTGETALKQSDINPRGHAIECRINAEDPEKN

SEQ ID NO: 81948 - protein, 98 aa, Unknown
  Bacterial polypetide isolated from the Sargasso Sea
MFKKILIANRGEIAVRVIRACKEWGIETVAVYSDVDKNSMHVRLADESVCIGSHQPANSYLNIPAIMSAIEITKAEAVHPGYGFLSENANFVKILGKK

SEQ ID NO: 81949 - protein, 88 aa, Unknown
  Bacterial polypetide isolated from the Sargasso Sea
MINKVLIANRGEIALRVMRACKKMGIKTVAVHSTADRQLAHVKLADESVCIGGPNPKESYLNMPSIISAAELTNSDAIHPGYGFLSES

SEQ ID NO: 81950 - protein, 189 aa, Unknown
  Bacterial polypetide isolated from the Sargasso Sea
MKKILIANRGEIACRIIESCKKLNLHTIAVYSDVDKKSKHVRIADEAVHIGESKAQESYLSTRKIINAALSSKADAIHPGYGFLSENAEFAQNVMDSGITWIGPKPNNITSMGNKDIARELAIKSNLPICPGLKNDEIESSDLEKKCMEIGYPILIKASAGGGGIGMQIVNNFNELKTAVDKTKNLAKK

SEQ ID NO: 81951 - protein, 383 aa, Unknown
  Bacterial polypetide isolated from the Sargasso Sea
MFKKILIANRGEIAVRIIRACKEWGISTVAIHSDVDRDSMHVRLADESVCVGTHQPLNSYLNIPSIMSAIELTNANAVHPGYGFLSENAEFAKILEDYKIKFIGPSSKLIQMMGDKIQAKKIAKEYGLPVIEGSDGGVNDKIKAKEICKKIGFPVLIKASAGGGGKGMKIVYKESEFDDLFATAKSEAKKYFGNDEIYIEKFFQNPRHIEVQVLSGKNRTVHLHERDCSVQRRHQKLIEETPSPVLTDDIRKDLFERTVNMVSKIGYEGAGTVEFIYEDGKFYFLEMNTRVQVEHPVSEMITGIDIIKEQIYIAFSGETALNQSDVNPRGHAIECRINAEDASKNFQPSPGTIGMCHQPSGFRTRVDGSIFQGYKVTPYYDSM

SEQ ID NO: 81952 - protein, 368 aa, Unknown
  Bacterial polypetide isolated from the Sargasso Sea
MINKILIANRGEIALRIIRSCKEMGISTVAVYSTIDKESLHVKFADEAVCIGPPNSKDSYLNIPKIIAAAEITNSEAIHPGYGFLAENSEFSKICSESKIKFIGPTHHMIEKMGDKITAKKTMEKAGIPTVPGSKDLIESISEGKKLAKKIGYPIILKATAGGGGKGMRIVNEDKDFKKSWEEATNESSAAFGNSGLYIEKYIEEPRHIEIQIVGDKYGNVSHLSERDCSIQRRHQKLIEETPSPFVDDNLREKMGQTAIKAGKAINYEGAGTIEFIVDKDKNFYFMEMNTRIQVEHGVTEEVTDFDLIKEQIKVTDGIKVSGKNYYPKLHAIECRINAEDPKRNFIPSPGKITNLHIPGGHGVRVDT

SEQ ID NO: 81953 - protein, 453 aa, Unknown
  Bacterial polypetide isolated from the Sargasso Sea
MYKKILIANRGEIALRIIRACHELDIKTVAVYSTADEFSLHVKFSDEAVCIGPPPSNESYLNIPRIIAAAEITHSDAIHPGYGFLAENAEFSKICEENGFSFIGSSAKIINSMGNKSEARNTMKNSGVPVIPGSKSVLKDVSEASKLAEKVGYPIMVKASAGGGGKGMRLVNSKKELESAFASAQTEAKNSFNNDDLYLEKFVENPRHIEVQILSDNFGNTIHLGERECTIQRRHQKLIEESPSVVVNDKLRNKLGSAAISAAKAVNYVGVGTVEFLLDKNLDFYFMEMNTRIQVEHPITEMVTGVDLIKQQIRMHAGKKYPKFLENFQLRGHSIECRINAEDPANDFIPSPMKITSFHMPGGKGVRIDSHAYAGYQIPANYDSMIGKLIVFSSSRERAINRMARALEECIIEGPKTTIPFHQAIMNNELFKKGEFDTGFLDNFKFIDKGEQL

SEQ ID NO: 81954 - protein, 328 aa, Unknown
  Bacterial polypetide isolated from the Sargasso Sea
MFKKILIANRGEIAMRLIRTCKEMGIQTVAVYSKADEESLHVRFADEAVCIGPASSAESYLKSANIIAAAEITNADAIHPGYGFLSENSKFSKICQEHKIKFIGASPEMIDKMGDKASAKATMKKAGVPTIPGSEGIVDSLEDAQKIAQKIGYPIMLKATAGGGGKGMRIVPKAKDLLKAWEDARQESKASFDNDDMYIEKFIENPRHIEIQIIGDSKGEAAHLSERDCSIQRRHQKLIEETPSPFMTEKLRNEMGEAAVKAAKAVKYEGAGTIEFLVDKNRKFYFMEMNTRIQVEHPITEQVIDYDLIREQIKIANGEAISGKNYFP

SEQ ID NO: 81955 - protein, 484 aa, Unknown
  Bacterial polypetide isolated from the Sargasso Sea
MKKLLKSSILLFGFSLLSANCWAEGDPVRGKSLFGICVACHGANGEGKKINNAPRISGQQDWYVERQLINYRDGIRGVHIDDITGMQMRSIAITLKRDEDIADVTAYVSTLQSETPKATMEGDLVAGKNAYATCAACHGADGKGNKALNAPKIAGLQDWYIARQLNHFKIGARGRLKKDTIGQQMRPMAMALDEDAINNLAVYIASLEGAPMMSSAVAVASSENQPSMSDMMAAATPASLNTSEPLYATCTACHGENGEGKQWLGAPKISGQHDWYLKRQLKNWQDGIRGTHPKDVYGIQMRSMSMVMANDQEIDKVVSYIGGLNSPKPPATIKGDLQAGQSLYATCVACHGPGGIGNKALNSPKIAGLPDWYVARQLWGFKNGHRGENPRDVYGQQMRPMAMALADQEAINNVSAYVASFDGSGAAPAMATSVAASGTTDATSTDTGGQAVTVAAVASGDSAEAGAALYTTCIACHGADGAGN

SEQ ID NO: 81956 - protein, 191 aa, Unknown
  Bacterial polypetide isolated from the Sargasso Sea
MPIGKVLIANRGEIALRILRSCRELGIATVAVYSTVDKDALHVQLADEAVCVGDALSSKSYLNVPNILAAATSRGVDAIHPGYGFLAENDKFAEMCGDHGLTFIGPSPHAIRSMGDKSTAKATMQAVGVPTVPGSEGLLSGTEDATVLAEQMGYPVMIKATAGGGGRGMRLVQSPDQLNNLFKAAQGEAEA

SEQ ID NO: 81957 - protein, 445 aa, Unknown
  Bacterial polypetide isolated from the Sargasso Sea
MLKKILIANRGEIAVRVIRACKEWGIETVAVHSDVDRDSMHVKLADESVCIGSHQPINSYLNIPAIMSAIEITNAEAVHPGYGFLSENANFANVLEENNIKFIGASAKLISMMGDKIQAKKIAKENGLPVIEGSEGGVKDINDAKQLCKKIGFPVLIKASGGGGGKGMKIVNKEEEFETLFSTAKSEAQKYFGNDEVYIEKFFQNPRHIEVQILAGKNRTIHLHERDCSVQRRHQKLIEETPSPVLNDEIRKDLFDRTVKMVSKIGYEGAGTVEFIYEDGKFYFLEMNTRVQVEHPVTEMVTGIDIIKEQIWIAYTGETALKQSDITPRGHAIECRINAEDPSKNFQPSPGIIEMCHQPSGFRTRVDGAIFQGYKVTPFYDSMVCKLICQGRNRQEAIQRMNRSLDEFVIEGITTTIPLHKKLLNHKKFIDSDFNVSWLDKEKII

SEQ ID NO: 81958 - protein, 237 aa, Unknown
  Bacterial polypetide isolated from the Sargasso Sea
MIEKVLIANRGEIALRVMKTCKTLGIKTVAVYSDEDVNSLHVKTADESYYIGEAAPAKSYLNQEKILEVMLSSGTDAIHPGYGFLSENDDFARLCEKNKINFIGPSADSMNLCGDKMRCKAAMLKAEVPTVPGSPGIVDDAQQAEKIANEIGYPVLLKSVYGGGGRGIRLVTNDKELNEGFATVTSESIAAVGKSAIIVEKFLEKTRHIEYQMCRDKHGNAVHLFERECSIQRRNQK

SEQ ID NO: 81959 - protein, 341 aa, Unknown
  Bacterial polypetide isolated from the Sargasso Sea
AIRIARTCNDLSIKAIGIYSEDDLNSLHLSKMDESFMVDEKGASAYLNIKKIIDIAKQEKVDGIHPGYGFLSENPAFAKAAKQAKIKFIGPSEKSLKIFGNKSEAKQLASKLNVPVIAGTEGKTSLKQATDFFKGLKKNSSVVIKAIAGGGGRGMRVVNTQSDLKDAMNRAASEAQSAFDSSDLYVEEYLENYRHIEIQVLGDGKGLATHFHERECSTQRRHQKILEIAPAPGINKGLKEKMLDASVALIQESKYEGLATVEFLVDYAKEDFRFIECNARLQVEHTVTEAILGLDLVKAQIQIASGKTLKQLKLEQENISEPNGFAIQSRVNMEVIDSEGE

SEQ ID NO: 81960 - protein, 424 aa, Unknown
  Bacterial polypetide isolated from the Sargasso Sea
MKSEISVVIPTLDNFLEVQKIILSIDSQDLLPSEIILADSSASNKIEDCISDLQSSVPIRYLRVGRAYKYDRFLHRFFSFPILSFFKSHFPKGRAFPYEATNAGASIARYKWIAFLDATTVPSKAWLKDYFNLISKEGFDVIFGNTKYYGETWYQELLRASTYGSIGHETAPGSLMQTAEFLDGYKITEGVRSGGDVAWKMQIKDSLKFYLPKKTYLSYSSLPKSLFSTLKKFFIYQIYGSFLDIQNNVKDLYLGTALLLSIILIPKWNYIVGWDSALFIPHITKIFFLSLSLIIFISFIVNRIFFRKFAPDSFRANFLKLILFFLIAYSIFNWNGVVAKWVEDSIWYIPHITKIFVSLIFAASFIYRGIYFPLKNRIRFSYLFPYRWFLVGILGILLDLVKAPGYLLGAILASFIRRAKYIKG

SEQ ID NO: 81961 - protein, 343 aa, Unknown
  Bacterial polypetide isolated from the Sargasso Sea
LKINGKGTIIYEDGSRYLGEFRDSTYNGRGTFTYADGKEWTGEWKDGKNINGEGIIKYDNGEMWEGEYKDGKRNGEGTYTYPDEKQYVGQYINDERNGEGTLTHPDGKKYIGEWKDGTYHGQGTYIYSDGREYKGEFSEGFFNGAGLFLYPDSSKYLGSFTKGNRNGQGTYTYPDSSEWVGEWKDSKRFTGNGIIKFDNGGIWEGEFKNGEPYTGKGIFIWSDSSQYEGDIVEGLYQGQGTYTYPDSSEWVGEWKDSKRFTGNGIIKFDNGGIWEGEFKNGEPYTGKGIFIWSDSSQYEGDIVEGLYQGQGTYTYPDSSEWMGEWKDSKRFTGNGIIKFDNGG

SEQ ID NO: 81962 - protein, 163 aa, Unknown
  Bacterial polypetide isolated from the Sargasso Sea
MLTNSMFTKLLIANRGEIACRIIKTAQAMGVRTVALYSDADKNARHVAMADESFYLGGSAPADSYLKGDLIIEIAKKAQAQAIHPGYGFLSENADFARKCEAAGIVFVGPGSDAIDAMGSKSAAKAIMTAAQVPLVPGYHGDDQTDATLKAEALKIGFPMLIK

SEQ ID NO: 81963 - protein, 101 aa, Unknown
  Bacterial polypetide isolated from the Sargasso Sea
MLEKVLIANRGEIALRILRACKELGIKTVAVHSTVDRNLKHVLLADETICIGPAPSPQSYLNIPALIAAAEVTNAQAIHPGYGFLAERADFAQQVEESGLV

SEQ ID NO: 81964 - protein, 138 aa, Unknown
  Bacterial polypetide isolated from the Sargasso Sea
MLTNSMFTKLLIANRGEIACRIIKTAQAMGVRTVALYSDADKNARHVAMADESFYLGGSAPADSYLKGDLIIEIAKKAQAQAIHPGYGFLSENADFARKCEAAGIVFVGPGSDAIDAMGSKSAAQAIMTAAQVPLVAG

SEQ ID NO: 81965 - protein, 100 aa, Unknown
  Bacterial polypetide isolated from the Sargasso Sea
MFDKILIANRGEIALRVIRACQEMGIQTVAVHSTADSDAMHVRMADESVCVGPPSGLESYLSMPAILAACEISGAQAIHPGYGFLYEIANFVQASGRSWT

SEQ ID NO: 81966 - protein, 279 aa, Unknown
  Bacterial polypetide isolated from the Sargasso Sea
TLGAANTLTNPLTAQGATNSLTGQGAPNSLATPGTTNTLAVQGATDSLTGLGATNSLATLGAANTLAVQGATNSLAAQGATNSLTEQGATDSLAVQGATNSPDAQGATNPLTAQGAANSLTGQGATNSLATPGATNTLAVQGATDSLAALIHAWRATNSLTGQGVTNSLATLGAANTLAVQGATNSLAAQGATNSLTEQGATDSLAVQGATNSPDAQGATNPLTAQGATNSLTGQGATNSLATPGATNTLAVQGATDSLTGLGATNTLAVQGATDSLAA

SEQ ID NO: 81967 - protein, 100 aa, Unknown
  Bacterial polypetide isolated from the Sargasso Sea
MLTNSMFTKLLIANRGEIACRIIKTAQAMGVRTVALYSDADKNARHVAMADESFYLGGSAPADSYLKGDLIIDIAKKAQAQAIHPGYGFLSENADFAQQV

SEQ ID NO: 81968 - protein, 237 aa, Unknown
  Bacterial polypetide isolated from the Sargasso Sea
KKAQAQAIHPGYGFLSENADFARKCEAAGIVFVGPGSDAIDAMGSKSAAKAIMTAAQVPLVPGYHGDDQTDATLKAEALKIGFPMLIKAAYGGGGKGMRIVEHEGEIMDAINSARREAASSFGNDKLLMERYLRQPRHVEVQVFADTFGNAIYLSDRDCSIQRRHQKVVEEAPAPGLSDELRAQMGEAAVAAAKAIDYVGAGTVEFLLDTDNSFYFMEMNTRLQVEHPVTEMVTGQD

SEQ ID NO: 81969 - protein, 94 aa, Unknown
  Bacterial polypetide isolated from the Sargasso Sea
MLTNSMFTKLLIANRGEIACRIIKTAQAMGVRTVALYSDADKNARHVAMADESFYLGGSAPADSYLKGDLIIEIAKKAQAQAIHPGYGFLSENA

SEQ ID NO: 81970 - protein, 119 aa, Unknown
  Bacterial polypetide isolated from the Sargasso Sea
MLTKQMLTNSMFTKLLIANRGEIACRIIKTAQAMGVRTVALYSDADKNARHVAMADESFYLGGSAPADSYLKGDLIIDIAKKAQAQAIHPGYGFLSENADFARKCEAAGIVFVGPGSEA

SEQ ID NO: 81971 - protein, 283 aa, Unknown
  Bacterial polypetide isolated from the Sargasso Sea
FTGNGIIKFDNGGIWEGEFKNGEPYTGKGIFIWSDSSQYEGDIVEGLYQGQGTYTYPDSSEWVGEWKDSKRFTGNGIIKFDNGGIWEGEFKNGEPYTGKGIFIWSDSSQYEGDIVEGLYQGQGTYTYPDSSEWVGEWKDSKRFTGNGIIKFDNGGIWEGEWSEGVKINGKGTITYPDNSKYVGAFKESKYNGEGTYTYANGDKWSGTWKDGDKLTGKGVINYSDGSKYTGPLEDGKRIGSGSLNFTDGKRYVGEFLNNEYNGEGELTYPDNSKYVGAFKESKY

SEQ ID NO: 81972 - protein, 290 aa, Unknown
  Bacterial polypetide isolated from the Sargasso Sea
ANRGEIALRVLRACREMGIQTVAIHSTADTDAMHVRLADESVCIGPPPVQKSYLNVPAVLSAATISNADAIHPGYGFLSENANFASMAEEHGFIFIGPTSKHIEIMGNKILAKKTMKNAGIPVVPGADSGITTPEEAIPLAKAIGFPLIVKASSGGGGRGMRVVETYDELEKSVRLASREALNSFGDPVVYLEKYLSNPRHIEVQIIADHHGNVVHLGERDCSIQRRHQKILEEAPSPALSPDQRALIGKIVSTAIKKIGYRSVGTIEFLYDNGEFYFIEMNTRLQVEHP

SEQ ID NO: 81973 - protein, 93 aa, Unknown
  Bacterial polypetide isolated from the Sargasso Sea
MIDSLLIANRGEIACRIMRTARELGIATVAVHSDTDRDALHVRSADQAVNLGGARPSESYLRGEAIIAAAKATGAQAIHPGYGFLSENADSPA

SEQ ID NO: 81974 - protein, 131 aa, Unknown
  Bacterial polypetide isolated from the Sargasso Sea
MLTNSMFTKLLIANRGEIACRIIKTAQAMGVRTVALYSDADKNARHVAMADESFYLGGSAPADSYLKGDLIIEIAKKAQAQAIHPGYGFLSENADFARKCEAAGIVFVGPGSDAIDAMGQQSAAKAIMTAA

SEQ ID NO: 81975 - protein, 228 aa, Unknown
  Bacterial polypetide isolated from the Sargasso Sea
MIFNSILIANRGEIACRVIKTAKEMGIRSVAVYVDADKDAPFVKDADESVKLKDGGYLDADQIIEAALKTDAQAIHPGYGFLSENASFARKVKKSGLIWVGPSPHVISVMGDKLKAKELAIKADVPTLPMTSNPKEASKIGYPLLIKAAAGGGGKGMRIVNKSKELKDSIISAQREALNGFNDDRIFIERYVEKSRHIEIQIIGDSHGNVVHLGERECSIQRRHQKIM

SEQ ID NO: 81976 - protein, 176 aa, Unknown
  Bacterial polypetide isolated from the Sargasso Sea
MSYEANFTNATTSNATAAIMLPLPAPPGGYSPPPPDATDAIANATAFSTTNATDTAPIANATAFNATNATDAAPIANATAFNATNATDAAPIANATAFNTTNATDATPIANATAFNTTNATDATPIAANTTTVANTTTASAVIVVSSASPSSGPLTGGTHIVVSGSGFATHAAVRT

SEQ ID NO: 81977 - protein, 579 aa, Unknown
  Bacterial polypetide isolated from the Sargasso Sea
MTIKKLLIANRGEIASRIISSSHDMGISCVAIYTEADKDTPYVREADQAFKLSDSYLNSKEILDIALKSNSDAIHPGYGFLSENAAFANQVKKLNIKWVGPSSNAIKKMGDKLTAKEIAIKANVPTLPMTSDPKKANSIGYPILVKAAAGGGGKGMRIVEKAKDLKESIKAAEREAEGGFGDKRVFLERYIKRSRHIEIQILGDAFGNIVHLGERECSIQRRHQKIVEESPSPMVDEEMREKMGEAAIKLASKLKYESAGTVEFLVDEKTKEFWFLEVNTRLQVEHPITEEVTGIDLVKEQLRIASGEELGYEQEDIDFYGSSIEVRLYAEDPGNDFLPVTGKMIAFEPSDDPLVRWDVGIESGSNITANFDPLLAKVISFGETRLEAANKLALAMENSHFGGMKTNRDYLVSILRSKEYLDGDTTTDFVERINLNSEVDLTEEEIFNFAKVGAMWMQGKNRSEAMVLQNIQSGWNNARLPYQEVKLSLDDQEYRVKYKSLKDGNFVSAESEIIRMFDWHEDFIDVEISNVRYRSKITMDDDLLLIQTHKGNLLFKILPKFNITQEEAIKGGLTAPMPG

SEQ ID NO: 81978 - protein, 430 aa, Unknown
  Bacterial polypetide isolated from the Sargasso Sea
MFDKILIANRGEIALRVIRACQEMGIQTVAVHSTADSDAMHVRMADESVCVGPPSGLASYLSMPAILAACEISGAQAIHPGYGFLSENAHFVQAVEDHGLKFIGPTAEHIRIMGDKITAKDTMKALGVPCVPGSEGGVDSLNDAHEVAADIGYPVIIKATAGGGGRGMKVARTAKELESAFLTARAEGKAAFGNDEVYIEKYLTTPRHIEIQVFGDGKGRAVHLGERDCSLQRRHQKVLEEAPGPYVLDEERKLIGKTCADAVAKIDYIGAGTIEFLYENGEFYFIEMNTRLQVEHPVTEAIFGVDLVREQIRIASGQPLSFVQEQLEINGHSIEVRINAEKLPNFSPSPGKVTAYHAPGGLGVRMDSALYNGYSIPPYYDSLIGKLIVHGENRKEAIARLRRALGELIIDGIDTTVPLFEELLNEDDIV

SEQ ID NO: 81979 - protein, 386 aa, Unknown
  Bacterial polypetide isolated from the Sargasso Sea
MLDKVVIANRGEIALRILRACHEIGIKTVAVHSKADDNLKHVLLADETVCIGPAESMNSYLDMPRIISAAEVTDAVAIHPGYGFLSENADFAERVESSGFTFIGPSSEAIRMMGDKVSAIKLMKKAGVPTVPGSDGALKDDPDENLRIARDIGYPVIIKASGGGGGKGMRVVHAEAALLNAIALTQAESRSAFNNDEVYMEKFLETPRHIEIQVLCDGQGNAIHLGERDCSMQRRHQKVIEEAPAPGITEDQRNYVGQRCIDACLEMGYRSAGTFEFLYQDNEFYFIEMNTRLQVEHPVTEMITGIDIVKEQLKIASGEKLAIKQEDVKIKGHAIECRMNAEDPKTFMPSPGDIKLWHMPGGPGIRIDSHIYSGYRVPPYYDSMIG

SEQ ID NO: 81980 - protein, 269 aa, Unknown
  Bacterial polypetide isolated from the Sargasso Sea
MNFTKLLIANRGEIACRVIGSAQNMGIKCVAVYVDADKESPYVKMADEAVKLSDSYLNSKEIIQAAIDTGAQAIHPGYGFLSENAKFARDVAKAGIKWVGPSGRVITQMGDKLKAKELAEKAGVPTLPMTTDPKKAKDIGYPLLIKAAAGGGGKGMRIVESSKDLKSSIEGAQREAKAGFDDERIFIERYVPISRHIEIQILGDSHGNVVHLGERECSIQRRHQKIIEESPSPRADEEMRHKMGEAAVNLAKKLKYESAGTVEFLVDDK

SEQ ID NO: 81981 - protein, 672 aa, Unknown
  Bacterial polypetide isolated from the Sargasso Sea
MFKSILVANRGEIACRIIRSARRLGIKSIAVYSEADRGALHVDMASDSVCIGPAQASESYLNMDAIIEAIEETGAEAVHPGYGFLSENATFAERLAEANVTFIGPGPEAIRKMGDKIESKKLAQAAGVPTVPGYSDPLSGAAESKKLADDICYPVMLKASAGGGGKGMRLVADPSKIEDAFKSCVAEAESSFGDGRVFIEKFITTPRHIEIQVLADSHGHTLHLGERECSIQRRHQKVIEEAPSPFVTEEMRAAMGGQAIALSEAVDYVSAGTVEFIVDADRNFYFLEMNTRLQVEHPVTELVTGLDLVEQMIRIAHGEELAFGQDDIKMEGWAMESRIYAEDPMRGFLPSIGRLVRYREPVTSAFGITKNVRMDGGINEGDEINRFYDPMIAKLVTNGDTREEAIRHMCWALDEYYIRGVANNLGFLSAVMHHPRFQRGELSTNFIADEFGERFIPDQTEHKDLDLIVAVTGAVHRIAEGKLLGLQSRNLSGNIMSKQDTHLDDKKVVVLNGTFFPIVTSGANGEIGVRVRDRNFRIETDWSPRSPIFAGTVNGEPISLQIEKEGSHYSVQHTGLTAHARVMSPLAAEMLGRMPEKEAPDTSGQLTSPMPGLLVSLEVEEGQDVKIGEPLAVIEAMKMENQLFAERDGVVAKIHLTPGDSLDVGELILELG

SEQ ID NO: 81982 - protein, 345 aa, Unknown
  Bacterial polypetide isolated from the Sargasso Sea
MFTKLLIANRGEIACRIIKTAQAMGVRTVALYSDADKNARHVAMADESFYLGGSAPADSYLKGDLIIEIAKKAQAQAIHPGYGFLSENADFARKCEAAGIVFVGPGSDAIDAMGSKSAAKAIMTAAQVPLVPGYHGDDQTDATLKAEALKIGFPMLIKAAYGGGGKGMRIVEHEGEIMDAINSARREAASSFGNDKLLMERYLRQPRHVEVQVFADTFGNAIYLSDRDCSIQRRHQKVVEEAPAPGLSDELRAQMGEAAVAAAKAIDYVGAGTVEFLLDTDNSFYFMEMNTRLQVEHPVTEMVTGQDLVKWQLMVASGQPLPLKQDEVRIHGHAFEVRIYAEDPQ

SEQ ID NO: 81983 - protein, 562 aa, Unknown
  Bacterial polypetide isolated from the Sargasso Sea
MTKKRVLIANRGEIALRIIRSVKEMDMHAIAVYSDIDSDSLHVKRADESFYLGGSLPADSYRNLKNLIKAVVETKADMVHPGYGFLAENADFAKAVQKKDVIWIGPNPETIKSMGDKIESRKLISKVGLIPVPGQLKPSRTKREALKDANSFGYPVALKAAHGGGGKGLRIVSNEKELNENFEIVKRESEAYFGSDQIYVEKFIKPARHVETQILSDKYGNHIYLGERDCSLQRRNQKLIEESPPIWLSDFGREELKKATIKIAESSNYINAGTVEFLADNDENFYFLEMNTRLQVEHTVTEMRYGIDLVKEQIKVALGNSLEDFKTEARGHSIEFRINAEDPTNNFMPTPGTITEYREPMGNGVRVDGWVKTGTSISHFYDNLISKLVVWGVSREEAISKGKRCLDEYIIGGIPTTISLLSDVISTKEFKESQIHVKFLEENFEIKDVSEDETFTDRPSKVNISLNDNDSPSLAPQRPKKIGMDLTGNIRNPGIIKADMQGTIMDIMTKKGKKVKKGDSLFVLEAMKMENVVTAPIGGVIKEFNIKKGQPVNKGDILVEIG

SEQ ID NO: 81984 - protein, 522 aa, Unknown
  Bacterial polypetide isolated from the Sargasso Sea
MIANRGEIACRIIKTAHEMGISCVAVYTEADSNSPFVRMADEAVKLSDTYLNGKEIIEAAKRTGAQAIHPGYGFLSENAKFSRDVQKEGLIWVGPSSRVITSMGDKLKAKDIAEKAGVPTLPMTTDPKKANTIGYPILIKAAAGGGGKGMRIVEDKKDLKEAIAGAQREALTGFGDDRVFIERYVASSRHIEIQILGDSHGNVVHLGERECSIQRRHQKIIEESPSPRVDSEMRATMGEAAIKLAKKLKYESAGTVEFLVDDKTGEFWFLEVNTRLQVEHPVTEEVTGKDLVYEQLRIARGEELGYSQEDISWEGSSIEARLYAEDPSKDFLPATGTLIAYENDTNIDARWDTGIEQGSVVGTDFDPMLAKVITKGKTRIDAANKLALALETMHIGGVTTNRDFLVASLRTKDFLDGKTTSDFIEKTNPQRAVILEGSMLENALTAAALWIQGQNRESANILKDIPTGWRNSRLPRQKINFRYLEKDLEVTYKANRDGSFDVNDGTVARVIKWTFSGIDIEV

SEQ ID NO: 81985 - protein, 494 aa, Unknown
  Bacterial polypetide isolated from the Sargasso Sea
MTKKRVLIANRGEIALRIIRSVKELDMEAIAVYSDVDADSLHVKRADEAYYLGGSLPSESYRNIKTLMKAITDTKADMVHPGYGFLAENADFAKAVQKKGVIWIGPNPETIKSMGDKIESRKLISKAGLNPVPGQLKPSRTKREATKDAADFGYPVALKAAHGGGGKGLRIVNNEKELLENFEIVKRESEAYFGSSQIYVEKFIKPARHVETQILSDKYGNHIYLGERDCSLQRRNQKLIEESPPIWLSDYGREQLEKATMRIAEISNYVNAGTIEFLADTDENFYFLEMNTRLQVEHTVTEMRYGIDIVKEQIKIALGNSLEGFETEARGHSIEFRINAEDPHNDFLPTPGTITEYREPMGNGVRVDGWVKTGSSISHFYDNLIAKLIVWGVSREEAISKGKRCLDEYIIVGVPTTASILSEVLSTKEFRESKIHVKFLEENFQIKEIEEEEVITDRPQKVNITLDDSANPSLAPQRPKKIGMDLTGNIKNPG

SEQ ID NO: 81986 - protein, 330 aa, Unknown
  Bacterial polypetide isolated from the Sargasso Sea
MTKKRVLIANRGEIALRIIRSVKELDMEAIAVYSDIDSDSLHVKRADDAYYLGGSLPSESYRNIKTLMKAITDTNADMVHPGYGFLAENADFAKAVQKKGVVWIGPNPETIKSMGDKIESRKLISKAGLNPVPGQLKPSRTKREATKDAADFGYPVALKAAHGGGGKGLRIVNNEKELLENFEIVKRESEAYFGSSQIYVEKFIKPARHVETQILSDKYGNHIYLGERDCSLQRRNQKLIEESPPVWLSDYGREQLEKATMRIAEISNYVNAGTIEFLADTDENFYFLEMNTRLQVEHTVTEMRYGIDIVKEQIKIALGNSLKGFETEAR

SEQ ID NO: 81987 - protein, 575 aa, Unknown
  Bacterial polypetide isolated from the Sargasso Sea
MFDSILVANRGEIALRIMRTAQAMGIQTIAIYVEADKDAPHVRFADKAVLLPDGGYLNIDAVLDAAQKSNAGAIHPGYGFLSENSEFATRVIKEKIVWVGPSPKVISIMGDKLKAKELAIKASVPTLSMTSNEKEVKKIGYPLLIKAAAGGGGKGMRVVTDKKDLQESLEGAKREALSGFGDERVFIERYVEKSRHIEIQILGDSHGNVIHLGERECSIQRRHQKIIEESPSPRITEEIRFAMGNAAVDLAKKIKYESAGTVEFLFDDKSGEFWFLEVNTRLQVEHPVTEEVTGIDLVAEQIKIARGEELQYSQEDIEWTGSSIEARLYAENPNNDFLPETGKMFAYEQAENDFMTRWDSGVHKDSVIGTNFDPMLAKVISYGETREDAARVLAKSLEDSHIGGVITNKDFLIATLRSDEFLKGNTTTDFIERVKPPRVKNLTNDELNLALTAAAMWKQMRNRISSDIASYIPSGWTNGRLPNPNITFLLDGNEIFVEYKLINKNKFLVFNSEVEVVNIDDKYIDLVFDGVRVKSRISEDAEFILVHIPSGDVSFEVKPRFSMPGLEVQAGGLVA

SEQ ID NO: 81988 - protein, 425 aa, Unknown
  Bacterial polypetide isolated from the Sargasso Sea
DSYLRWERIVDAAKTTGAQAIHPGYGFLSENEDFAKACADAGLVFIGPPASAINAMGLKAESKRLMEQAQVPLVPGYHGADQDPAMLQREADRIGYPVLIKASAGGGGKGMRAVDKAEDFAAALDSCKREAINSFGDDAVLVEKYVQRPRHIEIQVFGDTHGNCVYLFERDCSVQRRHQKVLEEAPAPGMTPELRARMGEAAVAAAKAVNYVGAGTVEFIVEQPGGYDAPEQMKFYFMEMNTRLQVEHPVTEAITGLDLVEWQLRVASGEPLPLKQEDLRITGHAIEARICAENPDNNFLPATGALNVYALPECVTFERGAVRVDSGVRQGDAISPFYDSMVAKLIVHGDTREQTLARLDEALAQTHIVGLATNVQFLRRVAKTAAFAQAKLDTALIQREQAVLFHQEPVGLPLAAAAAIAQTLC

SEQ ID NO: 81989 - protein, 445 aa, Unknown
  Bacterial polypetide isolated from the Sargasso Sea
MFKKVLIANRGEIAVRVIRACKEWGIGTVAVHSDVDSDSMHVRLADESVCIGSHEPRNSYLNIPAIMSAVDVTGAQAIHPGYGFLSENYKFAEIVQKHGIKFIGPGSEIIKKMGDKIEAKKIAKQNGLPVIEGSDGGVKNSKDAKIICKRIGYPVLIKASGGGGGKGMKIVEHESKLDELFSLARLEAKKYFGNDEVYIEKYFKNPRHIEVQVLSGKNRTVHLNERDCSVQRKHQKLIEETPSPVLDEKTRSDLLNKTVKMVEAIGYEGAGTVEYIYENGNFYFLEMNTRVQVEHPVTEVQTGIDIVKEQIWIAHSGDTALKQNDISARGHTIECRINAEDPSKDFQPSPGIISVCHQPSGFRTRVDGSIFQGCKITPYYDSLVCKLICKGRNRTEAIQRTMRSLNEFVIDGITTTIDLHKKILSHEKFISSDFDTNWLSKEKFY

SEQ ID NO: 81990 - protein, 300 aa, Unknown
  Bacterial polypetide isolated from the Sargasso Sea
MTFHKLLIANRGEIACRIIKTAHEMGIACVAVYTEADSYSPFVRMADQAIKLSDSYLNGNEIINAAKQTGAEAIHPGYGFLSENAKFARAVQKEGLIWVGPNSRVITSMGDKLKAKDIAEKAGVPTLPMTTDPKKANSIGYPILIKAAAGGGGKGMRIVEDKKDLKEAIAGAQREAKTGFGDDRVFIERYVASSRHIEIQILGDSHGNVVHLGERECSIQRRHQKIIEESPSPRVNPEMRAAMGDAAIKLAKKLKYESAGTVEFLVDDKTGEFWFLEVNTRLQVEHPVTEEVTGKDLVYE

SEQ ID NO: 81991 - protein, 562 aa, Unknown
  Bacterial polypetide isolated from the Sargasso Sea
MTKKRVLIANRGEIALRIIRSVKEMDMHAIAVYSDVDADSLHVKRADESFYLGGSLPADSYRNLKNLMKAVIETKADMVHPGYGFLAENADFAKAVQKKDVIWIGPNPETIKSMGDKIESRKLISKAGLMPVPGQLKPSRTKREAMKDANTFGYPVALKAAHGGGGKGLRIVNNEEELDQNYEIVKRESEAYFGSDQIYVEKFIKPARHVETQILSDKYGNHVYLGERDCSLQRRNQKLIEESPPVWLSEFGKEELKKATLMIAKSSNYVNAGTVEFLADNDENFYFLEMNTRLQVEHTVTEMRYGIDLVKEQIKIALGNSLEDFETEARGHSIEFRINAEDPANNFLPTPGTITEYREPMGNGVRVDGWVKTGTSISHFYDNLISKLVVWGVSREEAISKGKRCLDEYIIGGIPTTISLLSQVISTKEFKESQIHVKFLEENFKIKDISEEETISDRPSKVNISLDDNESQSLAPQRPKKIGMDLTGNIRNPGIIKADMQGTIMDTMTKKGKKVKKGDSLFVLEAMKMENVVTAPIGGVIKEFNIKKGQPVNKGDILVEIG

SEQ ID NO: 81992 - protein, 460 aa, Unknown
  Bacterial polypetide isolated from the Sargasso Sea
MIKKILIANRGEIACRVIRTARKLNINTVAVYSDADKDSLFVKQADESYHIGGSQPAESYLDINKIINIAKKSKADAIHPGYGFLSENAAFVKRLAKEKIKFIGPNPNAIKKMGDKIESKNLAIKLKLNVIPGHTAPVKNSKEALKISNKIGYPVLLKASAGGGGKGMRIVRKNSELEENFNAAKSESKKSFGDDRVFIEKYIEQPRHIEIQILCDKHGNQVHLGERECSIQRRYQKVIEECPSPFVDEEMRNEMAAQALTLAKEVKYDSAGTVEFVVDANKNFYFLEMNTRLQVEHPVSELVTGVDLVEQMIYCADNKKLNISQKDINLKGWSVESRIYAEDPTKDFLPSIGRVTEYIEPSKIEDKDQIIRNDTGINPGSEVSLFYDPMISKLAVHSKDRATAIDLMINSLQNYYLSGVENNIEFLISILDDKKFRNGKISTNFIKEKFPKGYYSNHNL

SEQ ID NO: 81993 - protein, 323 aa, Unknown
  Bacterial polypetide isolated from the Sargasso Sea
MFKKILIANRGEIACRVIQTCKKMGIKTVAIYSDADENALHADLADEAICIGGSSSAESYLVIEKIIDACKKTKADAVHPGYGFLSENEEFAKALEENSIAFIGPNHKAIVSMGDKIESKNIAEKASVNVIPGYTKAIKDEKEAVKIAKEIGYPVMLKASAGGGGKGMRVVNNDDECVDGFQRAKNESKASFGDDRIFAEKFITEPHHIEIQILADKKGNAIFLGERECSIQRRHQKVVEEAPSPFINDKTRQEMGAQAIALAKAVDYESAGTVEFIVDKNQNFYFLEMNTRLQVEHPVTEMVTGIDLVEQMIKIAYGEELEI

SEQ ID NO: 81994 - protein, 494 aa, Unknown
  Bacterial polypetide isolated from the Sargasso Sea
MIKKVLIANRGEIAVRIIRACKEMGIETVAIYSKPDRTSLHVLLADEAYFIGPGPSTQSYLNIENILTILKKSNADAVHPGYGFLSENCDFANAIIKEGAIWIGPSDEVITTMGDKMAARKLVIDAGAPIVPGTTDPITNVCEAIEIAGKIGYPILIKAAGGGGGKGMRIIHSEVELESAMEQASSEAKNAFADERIYIEKYLEEPHHIEIQVFADQYGNIVTLGERECSIQRRYQKIIEETPSPFIDKKLRKELSKTAYDITKACNYLGAGTIEFLVDKHKKIYFLEMNTRLQVEHPITEMVTGIDLVKEQILVASGKKLSYSQQHIQNNGHSIECRIYAENGFNNFSPSIGTISEIMFPHGLGVRIDEGIRAGQEITPYYDPLLGKLITWGNNREIALKRMIRALEELQIIGIESSIPFCLNFIKHKIFKDGKYSTHTLDEIKDQLLLDKLNEKEYLAARISAVEAKYISRNSLTNKRKLNDKNNNWSQISK

SEQ ID NO: 81995 - protein, 679 aa, Unknown
  Bacterial polypetide isolated from the Sargasso Sea
MLTNSMFTKLLIANRGEIACRIIRTAQAMGVRTVALYSDADKNARHVAMADESFYLGGSAPADSYLKGDLIIEIAKKAQAQAIHPGYGFLSENADFARKCEAAGIVFVGPGSDAIDAMGSKSAAKAIMTAAQVPLVPGYHGDDQTDTTLKAEALKIGFPMLIKAAYGGGGKGMRIVEHEGEIMDAINSARREAASSFGNDKLLMERYLRQPRHVEVQVFADTFGNAIYLSDRDCSIQRRHQKVVEEAPAPGLSDELRAQMGEAAVAAAKAIDYVGAGTVEFLLDTDNSFYFMEMNTRLQVEHPVTEMVTGQDLVKWQLMVASGQPLPLKQDEVRIHGHAFEVRIYAEDPQNEFLPASGKLNFLREPEQSKYVRIDSGIRENDVISNFYDPMIAKLIVWDESRPRALQRLVHALESYQISGLKHNIEFLANIAEHPAFAKADFSTDFINRYGDALIGSASSETDTAIAFAALYQVLARKEAAKAQAINSADPYSPWGQVSGFRLNSVSQHTIALLDDAHELQQLVLLDFGDHYQLSQPTVDGQVSKSLSGELKQDLLLAEINGHKSKVPVSAQGDDFTLFLPSGSYHFTAVKTQVVEAESSNEDKLKAPMNGTVVTHLVEVGAEVKAGQGLLVMEAMKMEYTIEAPFDGIVTEFYFKAGELVSDGAVLLHVEPKAQSEEA

SEQ ID NO: 81996 - protein, 362 aa, Unknown
  Bacterial polypetide isolated from the Sargasso Sea
MFKKILIANRGEIACRVIRTAKRMGIATVAVYSEADAESLHARSADEAIDIGGNASSDSYLVIDKILDAIKKSGAEAVHPGYGFLSENATFAKKLNEEGITFIGPGVKAIAAMGDKIESKKIAAVAGVNTVPGYMGVLADDREAVKVAAEIGFPVMIKASAGGGGKGMRVAFNEGEVREGFRAAVSEAASSFGDDRVFIEKFIEDPRHIEIQIVADSDGNTVYLGERECSIQRRHQKVVEEAPSPFLDAKTRKAMGEQAVLLSKSVDYKSAGTVEFIVDKNKNFYFLEMNTRLQVEHPVTECITGLDLVELMIKIAAGETLPLKQKDVKLKGWSMETRVYAEDPYRNFLPSTGRLTQYKPPQ

SEQ ID NO: 81997 - protein, 446 aa, Unknown
  Bacterial polypetide isolated from the Sargasso Sea
MLDKVLIANRGEIALRVQRACRELGIKTVAVHSTADESQKHVFLADESVCIGPPESLKSYLNIPSIISAAEVTDAMAIHPGYGFLAENGDFAEQVEQSGYIFIGPKSETINLMGNKISAKEIVGEVGIQCIPGSDGKLDDDIEKVHKLADEIGYPVLIKAAAGGGGKGMRVAHTKGALQHTIDLTKIESKAAFGDETIFLEKLLEEPRHIEFQVIADHHGNAVCLGDRDCSMQRNHQKIIEEAPAPKIPKKLRNEMFKKCIAFCKHINYRGAGTLEFLYENGEFYFIEMNTRLQVEHPVTEMITGIDIVKEQIKIAMGLPLSFKQNDIVEKGHAIECRINAEDPKTFMPSPGKIDLWHPPGGPGIRVDSHIYTGYEIPPYYDSMIAKVIAFANTRESAITRMGVALSEMIVEGIQTNRDLQIEIMQHNAFKDGGTNIHYLEKRLGL

SEQ ID NO: 81998 - protein, 101 aa, Unknown
  Bacterial polypetide isolated from the Sargasso Sea
MIFNSLLIANRGEIACRIIKTAKEMGIRSIAVYVDADKDALFVKEADESIRLDDGGYLDSKEIISAAKKSGAQAIHPGYGFLSENASFARKVKKEGIVWVG

SEQ ID NO: 81999 - protein, 640 aa, Unknown
  Bacterial polypetide isolated from the Sargasso Sea
MTYHKLLIANRGEIACRIMKTAHDMGISCVAVYTDADSESPFVKLADEAIKLTDTYLNGKEIIEAAITTGAQAIHPGYGFLSENAKFSRDVIKAGLIWVGPSSKVITSMGDKLKAKEIADKAGVPTLPMTTEPSKANTVGYPLLIKAAAGGGGKGMRIVESKKDLKDSITSAQREAKVGFGDDRIFIERYVASSRHIEIQILGDSYGNIVHLGERECSIQRRHQKIIEESPSPRVDEEMRTAMGNAAIKLAKKLKYESAGTVEFLVDDKTGEFWFLEVNTRLQVEHPVTEEVTGKDLVYEQLRISRGETLGYSQDDITWNGSSIEARLYAEDPAKDFLPATGTLIAYDVDKNIDARWDTGVEKGSIIGTDFDPMLAKVIAKGKNRMDATNKLALALQSLHIGGVTTNRDFLVECLRSKHFHEGNTTSDFIEIAKPNRSIELTKDKLEQAGIAAALWIQGENRDKAPILKEIQSGWTNSRLPKQKIGFQSGSEEISISYKSNRDGSFNINDAISAKVIKWNPFGIDIEIGNTRFFSKITKNNETLVVHGPWGDILFKILPRFKTIGQETKDGGLIAPMPGKVIDLKVEVGSKINKGDTLVVLEAMKMEHTVKAIEDGVIDELFVSQNDQVENGTLLMVIKK

SEQ ID NO: 82000 - protein, 328 aa, Unknown
  Bacterial polypetide isolated from the Sargasso Sea
MLDKVLIANRGEIALRIQRACRELGIKTVAVHSTADDSQKHVFLADESVCIGPPESLKSYLNIPSIISAAEVTDAMAIHPGYGFLAENGDFAEQVEQSGYIFIGPKSETINLMGNKISAKEVVSEVGIQCIPGSDGELDDDIDKVHKLADEIGYPVLIKAAAGGGGKGMRVAHTKGALQHTIDLTKTESKAAFGDDTIFLEKLLEEPRHIEFQVLADHHGNAVCLGDRDCSMQRSHQKIIEEAPAPKIPKKLREEMFKKCITFCKHIDYRGAGTLEFLYENGEFYFIEMNTRLQVEHPVTEMVTGIDVVKEQIKIAMGMPLSINKKML

SEQ ID NO: 82001 - protein, 639 aa, Unknown
  Bacterial polypetide isolated from the Sargasso Sea
MRFNSILVANRGEIACRIMQTAQFMGIKCVAVFVDADKDAPFVKMADEAIKLSSSYMDGSAIIEAAKQSGAEAIHPGYGFLSENSAFARKVKSNKLIWIGPSPHVIKVMGDKLKAKELAEKSGVPTLPMTSNIRDVKSIGYPILIKAAAGGGGKGMRIVKKESELKDSIVSAKREALSGFGDDRIFIERYVEKSRHIEIQILGDEHGNIVHLGERECSIQRRHQKIIEESPSPRIDPFLRQEMGQAAVKLAKKIKYCSAGTVEFLFDDKTDEFWFLEVNTRLQVEHPVTEEVTGIDLVAEQIKIARGEELEFVQDDIDWQGHAIEARLYAEDPGNNFLPEIGILHAYDTSLASEVRWDSGVEEGSVIGTDFDPMLSKVISWAPNRLDAANKLVRGLEKAHMGGVVTNRQFLISCLRNESFLNGNTTTDFIEREVLETKKNLSLNELHQASIAVALWLAQQNRVSDLVTGFIPANWTNGRMPLQRVKLIFEKDEIEVKYKLNRDNLYEVMGSTCEIYHCDSAGIDMAIDSHRFYSNVTKVESEILINMPFGDIDASVLPRFLEPGNDVPEGGLIAPMPGKVIDVKVKKGSKVKTGDTLVIIEAMKMEHSIKATETGKIAKVMIQLNDQVDNGATLLVLEK

SEQ ID NO: 82002 - protein, 248 aa, Unknown
  Bacterial polypetide isolated from the Sargasso Sea
MIFDSLLIANRGEIACRIIKTAKEMGIRSIAIYVDADKDAPFVNQADESIRLEDGGYLNGNQIIEAAKKTGAQAIHPGYGFLSENASFARKVKKENIIWIGPSPNVISVMGDKLKAKELAVKADVPTLPMTSKPNEAKKIGYPLLIKAAAGGGGKGMRIVDKEKDLKESLVSAQREAKSGFNDERIFIERYVEKSRHIEIQILGDSFGNIVHLGERECSIQRRHQKIIEESPSPRISDEVRKIWVMLQ

SEQ ID NO: 82003 - protein, 272 aa, Unknown
  Bacterial polypetide isolated from the Sargasso Sea
MIFNSILIANRGEIACRVIKTAKEMGIRSVAVYVDADKDAPFVKDADESVKLKDGGYLDADQIIEAALKTDAQAIHPGYGFLSENASFARKVKKSGLIWVGPSPHVISVMGDKLKAKELAIKADVPTLPMTSNPKEASKIGYPLLIKAAAGGGGKGMRIVNKSKELKDSIISAQREALNGFNDDRIFIERYVEKSRHIEIQIIGDSHGNVVHLGERECSIQRRHQKIIEESPSPRVTDEIRNKMGDAAVKLAKQIKYESAGTVEFLFDDKTR

SEQ ID NO: 82004 - protein, 665 aa, Unknown
  Bacterial polypetide isolated from the Sargasso Sea
MFDKILIANRGEIACRVAATCKRLGIASVAVYSDADANAKHVAACDEAVHIGGSAAADSYLRIERIIEAARATGAQAIHPGYGFLSENEDFAHACEAAGIVFIGPPVDAIAAMGSKAAAKALMHAAAVPLVPGYHGDDQDAANLHREADAIGYPVLLKASAGGGGKGMRVVERSDDFPAALASCQREAASSFGNDRVLIEKYLTRPRHVEVQVFGDTHGNTVYLFDRDCSVQRRHQKVLEEAPAPGLHDDVRQAMGEAAVAAARAVNYVGAGTVEFIMTGEAFYFMEMNTRLQVEHPVTEMVTRLDLVEWQLRVASGEPLPLKQDELHVRGHALEARLYAENPARGFLPSTGTLKHLRLPAGVEFAIGASVRVDSGVREGDAITPFYDPMIAKLIVHGADRAEALSLMLRALRACEVVGLHTNAAFLQRIVACAPFATADLDTGLIERNHDTLFAPQEPPRAMLALACAALLARERGATAQGASPWGELPDWRLNGGYRRTLEWHAAEREADVTVTYEDDGAVARLAIGDAAAQPFVWTRGATPLDFDVTLGGVRSSGRVYADGDHFHVFTQGAAETFEWRNVLAHAGDAEQGGGRLTAPMPGKVIAVLVEPGQKVEAGTPLIVMEAMKMEHTIGAPSAGVVAEVLYGVGDQVSDGAQLLMMAEG

SEQ ID NO: 82005 - protein, 471 aa, Unknown
  Bacterial polypetide isolated from the Sargasso Sea
MPSSVLFTKVLVANRGEIALRTVRALHDLGIASVAVYADDDAASSHVQAASAAVALGATGPAAYLDGARLIAIAQAQGCDAVHPGYGFLSERADFARACDEAGLRFIGPTPAQLALFGDKAQARALAQQQGVPLMPGTQAAVSLEEVQAFFAQHAHAGIVIKAIGGGGGRGMRAVASADDLPAAYARCRSEAQAAFGVDGVYVERLMSNARHIEVQVLGDGREVIALGERECTLQRRFQKVVEIAPSPSLPGALRERITTAALSMARAVDYQGLGTFEFLVDLASADLPFVFIECNPRLQVEHTITEEVTGVDLVQAQIALAAGRRLRDIGLDPAAPPTVLGFAVQWRINAETLDAQGTATPGSGTLRRFDLPAGPGVRVDTHGAAGATPSPHYDTLLAKLIVHTRSPRFADALRRSQRALAECRIEGVATNLALLQALAARQEMESQQVHTRWLESVLPELLAATKDIAD

SEQ ID NO: 82006 - protein, 677 aa, Unknown
  Bacterial polypetide isolated from the Sargasso Sea
MFNKILIANRGEIACRVAATCKRLGIASVAVYSDADANAKHVAACDEAVHIGGSTAAESYLRVERIIEAARATGAQAVHPGYGFLSENEDFAHACEAAGIVFIGPPVEAIAAMGSKAAAKALMHAAAVPLVPGYHGDDQGAQLLHREADAIGYPVLLKASAGGGGKGMRVVERTEDFAAALASCKREAASSFGNDRVLIEKYLTRPRHVEVQVFADRHGGAVYLFDRDCSVQRRHQKVLEEAPAPGLSSEIKREMGEAAVAAARAVNYVGAGTVEFIMTGTGDFYFMEMNTRLQVEHPVTEMVTGQDLVEWQLRVAADEPLPLSQEQLKVDGHAIEARIYAEHPARGFLPSTGTLKHLRMPEGVEFSIGEPGRKASVRIDSGVREGDTITPFYDPMIAKLIVHGATREEALARLNRALRACEVVGPHTNVEFLQRIVTSEPFATGDLDTGLIERHHDALFAPARKPFKEALALACAALLTREGGSAHGASPWDALSHWRLNSGYTQTLGWRDIDSNRSANESDSVFTVTFARDGATQTLEHDGVRENFTWSGGTGEHEYRATIGDARVTGRVFIDADTFHVFCLGEALAFEWQNLLAHAADAEGGEGRLTAPMPGKVIAVLVEPGTVVEKGTPLIVMEAMKMEHTIGAPAAGTVSEVLYAVGDQVADGAQLLVLDVS

SEQ ID NO: 82007 - protein, 321 aa, Unknown
  Bacterial polypetide isolated from the Sargasso Sea
MFKKILIANRGEIACRVIQTCKKMGIKTVAIYSDADENALHADLADEAICIGGSSSAESYLVIEKIIDACKKTKADAVHPGYGFLSENEEFAKALEENSIAFIGPNHKAIVSMGDKIESKKIAEEASVNVIPGYTKAIKDEKEAVKIAKEIGYPVMLKASAGGGGKGMRVVNNDDECVDGFQRAKNESKASFGDDRIFAEKFITEPHHIEIQILADKKGNAIFLGERECSIQRRHQKVVEEAPSPFINDQTRQEMGAQAIALAKAVDYESAGTVEFIVDKNQNFYFLEMNTRLQVEHPVTEMVTGIDLVEQMIKVAYGEEL

SEQ ID NO: 82008 - protein, 639 aa, Unknown
  Bacterial polypetide isolated from the Sargasso Sea
MKPQTASGLFQKILIANRGEIACRIIRTCESLGVSTVAVYSEADRDALHVRLADDAFHIGKAVPEDSYLNHEQILETAIQCQADAIHPGYGFLAENDVFAEACLSKGINFIGPRPESIREMGSKSRAKQLMQEAGVPVVPGYHGDKQDFKTLSNEAEKIGFPLLIKPVAGGGGRGMRLVHQLNELEEALTLSRSEAKNAFGDDNVLLERFIEGPRHIEFQIFGDQHGNFVHLHERECSIQRRHQKILEESPSPFLDKTLRKQMAEASLKAANAVQYLGAGTVEFIIGEERLFYFIEMNTRLQVEHPVSEMRTGLDLVEWQIRIASGEELPLEQDQIRPKGHSIEVRVCAENPERGFLPSSGLLELYDFPEDPSASESSLIRLDSGFEQKDRVGIHYDSMLAKLIVYGEEREKALETMQHALKYTAIIGPETNLGFLQKLVSHPQFLNGKADTLFIDACLPELLQNEETTPEWIYWACAIDFLQSEKESARQKAANSSNPHSPWLFFDNWRMGGEEPFQISFRDEQNNQRGIRLIERDLGFEVFTGKECIPLKFQQQSRDVVILYENSNGITEKHSLRSFRHQNDILAVHETGRIQLTLESGRDHEHETEHTDSQLKAPMPGNIIRVCVKNGEKVNRGQT

SEQ ID NO: 82009 - protein, 640 aa, Unknown
  Bacterial polypetide isolated from the Sargasso Sea
MIFNSILIANRGEIACRVIKTAKEMGIRSVAVYVDADKDAPFVKDADESVKLKDGGYLDADQIIEAALKTNAQAIHPGYGFLSENASFARKVKKSGLIWIGPSPHVISVMGDKLKAKELAIKADVPTLPMTSNPKQASKIGYPLLIKAAAGGGGKGMRIVNKSKELKDSILSAQREALNGFNDDRIFIERYVEKSRHIEIQIIGDSHGNVVHLGERECSIQRRHQKIIEESPSPRVTDEIRNKMGDAAVKLAKQIKYESAGTVEFLFDDKTGEFWFLEVNTRLQVEHPVTEEVTGIDLVSEQLKIARGEPLQFKQTDINWKGSSIEARLYAEDPNNDFLPEIGTLIAFDKDESVEARWDSGVTKGTIVGTDFDPMLAKIISYAPNRTDAAGKLAKALESAHIGGVKTNRDFLINCLKSSEFIDGNTTTDFIDRVNPARKLTLDQDSLEHVTAVATLWLQARNRDNANVANFMPSGWTNGRLPSQAVVFEHEGSEIKIGYKLMRDGSFKLSTGKNANIYSADNHGIDCVYDDKRHYAKVTKDADKLLVHMPYGDVMLNIKPKFVIPGLEVAKGGLTAPMPGKVIDIKVKKGKKVKTGDTLVILEAMKMEHSIKASEDGTVTQLLISVNDQVENGALLMIVE

SEQ ID NO: 82010 - protein, 367 aa, Unknown
  Bacterial polypetide isolated from the Sargasso Sea
MLDKILIANRGEIALRIQRACRELGIKTVAVHSTADDSQKHVFLADESVCIGPPESLKSYLNIPSIISAAEVTDAMAIHPGYGFLAENGDFAEQVEQSGYIFIGPKSETINLMGNKISAKEIVGEVGIQCIPGSDGELDDDIEKVHKLADEIGYPVLIKAAAGGGGKGMRVAHTKGALQHTIDLTKTESKAAFGDDMIFMEKLLEEPRHIEFQVIADHHGNAICLGDRDCSMQRSHQKIIEEAPAPKIPKKLREEMFDKCIAFCKHINYRGAGTLEFLYENDEFYFIEMNTRLQVEHPVTEMVTGIDIVKEQIKIAMGLPLSLKQEEIVEKGHAIECRINAEDSKTFMPSPGMIDLWHPPGGAWNTS

SEQ ID NO: 82011 - protein, 358 aa, Unknown
  Bacterial polypetide isolated from the Sargasso Sea
MFNKILIANRGEIAVRILRACKELGIQTVAVYSSADKNAMHVKLADESVCIGPASSLKSYLNIPAIISACEVSGADAVHPGYGFLSENFGFVEKLEAHGIKFIGPKSEHIKMMGDKILAKESANNLGLPIIPGSPGEISNTKEGLEVANKLGYPIIIKASSGGGGRGMIKVFKEEDLDESLKKASTEAEKSFNDKRVYIEKYLQNPKHIEIQVIGDEYSNIVHLGERDCSMQRRNQKLIEETPSVIIDDKKRDEICSLTINSLKTMGYCNAGTVEYLYENGNFYFMEMNTRLQVEHPVSEEIYNFDLVKEQIKIAAKYKLSTDQDTLKSNGHSIECRINAEDPDSFIPSPGIITNYHA

SEQ ID NO: 82012 - protein, 990 aa, Unknown
  Bacterial polypetide isolated from the Sargasso Sea
MKKVLIANRGEIAIRIARTCSDLGLKTVGIYSEDDSNSLHLSKVDEAFKIEGNGAQAYLNIKEIIAVAKKSKVDAIHPGYGFLSENSSFASAAKRAKIKFVGPSERTLKIFGDKTSAKELALSLGIPVIAGTKQKTTLKQAQDFLKSLKKNSSVVIKAISGGGGRGMRVVSKPDDLKESFDRASSEAKASFDSPDLYLEEYLRDYRHIEFQILGDGTGAVSHLHERECSIQRRYQKLIEIAPSPSLNVDLKSRMIEASLALTQKLKYEGLATIEFLVNIEKNDFRFIECNPRLQVEHTVTESVLSLDLVRAQLQIASGKTLKQIKLEQENVPEPQGYAIQSRVNMETIDSQGNANPGGGIFENFDLPSGPGVRADSYGYAGYQTNPLFDSLIAKIITYASGDNYKQAINRNYRSLCEFKISGVPTNLNLLKNILVNKDFKNNKVHTNFFEDNLDTLTSLKDHSDLSDINRSISKDIPKRGKIEDLDPLAVLDHGKSGGVFVDQSENILELQQLDIKEGYESVNAPMQGMIVKFNVKVGDSVWEGKTLGIMEAMKMEHEITSQVSGVVEEISVSNLDTVFEGHSLMLIRLADVEKQNLSDEEEIDLDWIRPDLREALDRKEASHDINRPEAVKKRYGTGHRTARENIAHLCDEGSFLEYGSVVMAAQRRRRSEEDLIKNTTGDGMVCGLGHVNGHLFPESASRVMAMSYDYMVLAGTQGKMNHAKKDRMFEIAEQNELPTILFAEGGGGRPGDTDTSGVAGLDCLAFTYFAQLSGLVPVIGITTGRCFAGNAVLLGCCDVIIATEDSNIGVGGPAMIEGGGLGVFTPDEVGPMDVQVPNGVVDIAVKDEEEAVEVAKKYLSYFQGSIKNWTAPDARKLRFAVPENRLRYYDMRDIIDGIADIDSVLEIRKDWAPGIITSLIRIEGKPVGVVANNPGHLSGAIDSPGADKGSRFIQLCDAFDIPILSLIDCPGIMVGPESEKTALIRHAARM

SEQ ID NO: 82013 - protein, 565 aa, Unknown
  Bacterial polypetide isolated from the Sargasso Sea
MSQQRILIANRGEIALRIIRSAKEMDMYTIAVYSDADEDALHVKRADEAYYLGGSLPAESYRNLKKLVKAATDTKADLVHPGYGFLAENADFAKAIQKKGIVWIGPSPETIRSMGDKIESRKLVSKLGLNPVPGQLKPSRLRREAIKDAESFGYPVALKAAHGGGGKGLRIVQNEAELIENFEIVKRESEAYFGSDQIYVEKFIKPARHIETQILSDKYGNTLYLGERDCSLQRRNQKLIEESPPEWLSDYGRERLKEYTLKIANSSNYINAGTVEFLADSDENFYFLEMNTRLQVEHTVTEMRYGIDLVKEQIKIALGNSLEDYKLEPRGHSIEFRINAEDPTNNFLPTPGTITEYREPTGNGVRVDGWARTGTQITHFYDNLISKLIVWGVSREEARSKGIRCLEEYIIGGIPTTINVLADILKTKEFINSQIHVKFLEENFEIRDIEDEEISSDRPSKVKISLDDNNNPTLAPQRPKKIGMDLTGNIRNPGLIFAEMQGTIMETMTKQGKKVKKGDSLFVLEAMKMENVITSPIDGVIKTYNVQKGQAVKKGDLLVEIETRF

SEQ ID NO: 82014 - protein, 640 aa, Unknown
  Bacterial polypetide isolated from the Sargasso Sea
MIFNSILIANRGEIACRIIKTAKEMGIRSIAVYVDADKDSLFVKQADESIRLEDGGYLDGDQIINAAKMSGAQAIHPGYGFLSENASFARKVKKEKLIWVGPSPNVISVMGDKLKAKELAIKADVPTLPMTSKPNEAKKIGYPLLIKAAAGGGGKGMRIVNKEKDLKESIVSAQREAKSGFNDERIFIERYVEKSRHIEIQILGDSKGNVVHLGERECSIQRRHQKIIEESPSPRISDDVRNKMGEAAVKLAKQIKYESAGTVEFLFDDKTEEFWFLEVNTRLQVEHPVTEEVTGIDLVCEQLKIARGESLEFDQKDITWTGSSIEARLYAEDPNNDFLPEIGTLIAFEENNSAEARWDTGVNKGTVVGTDFDPMLAKIISYAPNRTDAAGKLAKALESAHIGGVKTNRDFLVNCLKTKEFLDGDTTSDFIERVKPSRKLEINQSEIEHASAIAAMWMQQQNRNNSNVAKFMPSGWTNGRLPNQKVTFEFENTEYDFEYKQKRDQKFLFSNNKEAFIYSSDEDGIDMIFDGKRHYSRVTVSKNNILVHMPFGDVMLELKPRFKMPGTEVTIGGLIAPMPGKVIDVKVKKGKKVKAGDTLVILEAMKMEHSIKASEDGTVSELLISVNDQVENGALLMVVK

SEQ ID NO: 82015 - protein, 345 aa, Unknown
  Bacterial polypetide isolated from the Sargasso Sea
MIFNSILIANRGEIACRIIKTAKEMGIRSVAVYVDADKDALFVKQADQSVRLKDGGYLDGNQIIGAAIKAGAQAIHPGYGFLSENSSFARKVKKEGLVWIGPSPHVISVMGDKLKAKELAVKASVPTLPMTSNPKEANKIGYPLLIKAAAGGGGKGMRIVNKSSELKDSIISAQREALNGFNDERIFIERYVEKSRHIEIQILGDSNGNVVHLGERECSIQRRHQKIIEESPSPRVSEEIRNQMGDAAVKLAKQIKYESAGTVEFLFDDKTGEFWFLEVNTRLQVEHPVTEEVTGIDLVSEQLKVARGEELKFSQEDIQWCGSSIEARLYAEDPYNDFLPEIGTL

SEQ ID NO: 82016 - protein, 640 aa, Unknown
  Bacterial polypetide isolated from the Sargasso Sea
MIFNSLLISNRGEIACRIIKTARDMGIRSVAVYVDADKDALFVKEADEAIRLDDGGYLDSKQIINAAKKSGAQAIHPGYGFLSENASFARKVKKEGIIWVGPSPHVISVMGDKLKAKELAVKANVPTLPMTSKPSEAKNIGYPLLIKAAAGGGGKGMRIIEKEKDLKESISSAQREAKNGFNDDRIFIERYVEKSRHIEIQILGDSNGNVVHLGERECSIQRRHQKIIEESPSPRISEEIRNKMGEAAVKLAKKIKYESAGTVEFLFDDKTEEFWFLEVNTRLQVEHPVTEEVTGIDLVCEQLKIARGESIKFNQNDISFNGSSIEARLYAEDPNNDFLPEIGTLIAFEISKSAEARWDTGVIKGAVIGTDFDPMLAKVISFASNRIDAASKLAKALESAHIGGVKTNRDFLINCLKSPEFLKGNTTTDFIERVNPDRKLIINESDLNHVTVIAALWIQTKNRNEAKVAKFMPSGWTNGRLPKQKIIFEYESQEIKIEYSQKRNGQFSFSDNKVAQIYSSDNESIDVIFDGKRHISKITSSLNNILVHMPYGDVMLNVKPKFTLPGLEVAAGGLVAPMPGKVIDIKVKKGKKVKAGDTLVILEAMKMEHSIKAAEDGVVSELLISINDQVENGALLMVVK

SEQ ID NO: 82017 - protein, 344 aa, Unknown
  Bacterial polypetide isolated from the Sargasso Sea
MLEKVLIANRGEIALRILRACKELGIKTVAVHSTVDRNLKHVLLADETICIGPAPSPQSYLNIPALIAAAEVTNAQAIHPGYGFLAERADFAQQVEESGLVFIGPRPESIRLMGDKVSAIEAMKKAGVPCVPGSDGAVGDDDEVNKAIAKRIGYPIIVKAAGGGGGRGMRVVRSEDELVESIAMTKNEAGTAFGNDMVYMEKFLENPRHIEIQVLADGQGNAIHLGERDCSMQRRHQKVVEEAPAPGITQELRNFIGGRCVQACIDLNYRGAGTFEFLFEDGEFYFIEMNTRIQVEHPVTEMITGVDLIKEQLRIASGMPLSIKQSDIVIRGHAVECRINAEDA

SEQ ID NO: 82018 - protein, 657 aa, Unknown
  Bacterial polypetide isolated from the Sargasso Sea
MFRKILIANRGEIACRVIDTCNKLGIDTVAVYSEADSRALHVMKAKESVNIGLAPSSESYLVIEKIINACKNTGADAVHPGYGFLSENASFVNQLEREGITFIGPPSEPIRVMGDKIESKIFAEKSNVNIIPGHQEIIKDSEEALEISKKIGFPVMIKASAGGGGKGMRIARAEEDVEDAFNSSVNEAKSSFGDDRIFIEKFIEKPRHIEIQILADNHGNVIHLGERECSIQRRNQKIIEESPSPFVDEKLRNEMGEQAKRLASTINYASAGTVEFIVDQDKNFYFLEMNTRLQVEHPVTELVTGIDLVEEMIKIASGEELKLRQDDIKFNGWAIESRIYAEDPERNFMPSTGRLNSYITPINIDNIRNDTGVYEGGEISIYYDPMISKLCSYGKDRNEALLKMEIALNHHYINGIRNNINFLTAIIRNENFISGDINTGFIDVEYPEGYRPFVNDDKFALLFAIAGTYLYTIDEFRLRNQNRNNSFFEKSLVAVIEDSVFEFKTYDRQDNLIIEYNDEVITIDSSYEPGKPLASISINGEEYHFKIEKIINGYNISSYGFSSDVKILSKRAYELSKHMIAKDVRSNEKIIKCPMPGLVVSIDVNEGQEIDIGDKLCTIEAMKMENVIRSEVSGIIKKIHCKGGDSLASDEIILEFS

SEQ ID NO: 82019 - protein, 657 aa, Unknown
  Bacterial polypetide isolated from the Sargasso Sea
MFKKILIANRGEIACRVIETCDKLGIETVAVYSDADSRALHVMKAKEAINIGPAPSSESYLVIEKIINACKKTGADAVHPGYGFLSENSAFVNQLEREGITFIGPPSEPIRVMGDKIESKIFAEKSGVNIIPGHQEIIKDSQEALEISKKIGFPVMIKASAGGGGKGMRIAKVEADVEDAFNSSVNEAKSSFGDDRIFIEKFIEKPRHIEIQVLADKHGNVVHLGERECSIQRRNQKIIEESPSSFVDEQLRNDMGEQAKRLTSTIGYASAGTVEFIVDQNKNFYFLEMNTRLQVEHPVTELITGIDLVEEMIKIAAGEELKLKQDDIKFKGWAIESRIYAEDPERNFMPSTGRLNEYIVPSDIENIRNDTGVYEGGEISIYYDPMISKLCSYGNDRNEALSKMETALNNHYINGIRNNINFLTAILRNKHFISGDINTGFIDIEYPDGYKPFVDNDKFALLFSIAATYLYTIDQFRSRNQKKQKSFFEKSLVAIVEGSIFEFKTYDRQDNLIIEYNDEVISIDSSYNPGNPLAEITINGEDYNFKIERIINGYNISSYGFSSDIIILSKRAHELSKYMLEKDNRSNEKIIKCPMPGLVVSIDVDEGQEVDIGDKLCTIEAMKMENVIRSEVSGIIKKIHCSDGDSLASDEIILEFS

SEQ ID NO: 82020 - protein, 679 aa, Unknown
  Bacterial polypetide isolated from the Sargasso Sea
MLTNSMFTKLLIANRGEIACRIIKTAQAMGVRTVALYSDADKNARHVAMADESFYLGGSAPADSYLKGDLIIEIAKKAQAQAIHPGYGFLSENADFARKCEAAGIVFVGPGSDAIDAMGSKSAAKAIMTAAQVPLVPGYHGDDQTDATLKAEALKIGFPMLIKAAYGGGGKGMRIVEHEGEIMDAINSARREAASSFGNDKLLMERYLRQPRHVEVQVFADTFGNAIYLSDRDCSIQRRHQKVVEEAPAPGLSDELRAQMGEAAVAAAKAIDYVGAGTVEFLLDTDNSFYFMEMNTRLQVEHPVTEMVTGQDLVKWQLMVASGQPLPLKQDEVRIHGHAFEVRIYAEDPQNEFLPASGKLNFLREPEQSKYVRIDSGIRENDVISNFYDPMIAKLIVWDESRPRALQRLVHALESYQISGLKHNIEFLANIAEHPAFAKADFSTDFITRYGDALIGSASSETDTAIAFAALYQVLARKEAAKAQAINSADPYSPWSQVSGFRLNSVSQHTIALLDDAHELQQLVLLDFGDHYQLSQPTADGQVSKSLSGELKQDLLLAEINGHKSKVPVSAQGDDFTLFLPSGSYHFRAVKTQVVEAESSNEDKLKAPMNGTVVTHLVEVGAEVKAGQGLLVMEAMKMEYTIEAPFDGIVTEFYFKAGELVSDGAVLLHVEPKAQSEEA

SEQ ID NO: 82021 - protein, 500 aa, Unknown
  Bacterial polypetide isolated from the Sargasso Sea
MIEKVLIANRGEIALRVMKTCKTLGIKTVAVYSDEDVNSLHVKTADESYYIGEAAPAKSYLNQEKILEVMLSSGTDAIHPGYGFLSENDDFARLCEKNKINFIGPSADSMNLCGDKMRCKAAMLKAEVPTVPGSPGIVDDAQQAEKIANEIGYPVLLKSVYGGGGRGIRLVTNDKELQDGFDTVTSESIAAVGKSAIIVEKFLEKTRHIEYQMCRDKHGNAVHLFERECSIQRRNQKLIEQTPSPIVDQAKREEIGELVVKAAEAVDYTNLGTAEFLRADNGEFYFIEINARLQVEHPISEMVSGLDFVKLQLDIANGEPLPFKQSDLKMNGYAIECRINAEDTFLDFAPSTGPVPYVTIPSGPNVRCDTYLYPGCTVSPFYDSLMAKLCTWGPTFDESRVKMLNALNDFDIQGVETSIPLYKTILNSEEYKNGQLSTDFLKRYDMIEKLEKDLIQDRKEKQIPAIASAIMHSEFYKSKVKSQNSGDTDGISTWVERGIM

SEQ ID NO: 82022 - protein, 640 aa, Unknown
  Bacterial polypetide isolated from the Sargasso Sea
MIFNSLLIANRGEIACRIIKTARDMGIRSVAVYVDADKDALFVKEADEAIRLVDGGYLDSKQIINAAKKSGAQAIHPGYGFLSENASFARKVKKEGIIWVGPSPHVISVMGDKLKAKELAVKANVPTLLMTSKPSEAKNIGYPLLIKAAAGGGGKGMRIVEKEKDLKESISSAQREAKNGFNDDRIFIERYVEKSRHIEIQILGDSNGNVVHLGERECSIQRRHQKIIEESPSPRISKDTRNKMGEAAVKLAKKIKYESAGTVEFLFDDKTEEFWFLEVNTRLQVEHPVTEEVTGIDLVCEQLKIARGESLKFNQNDISFNGSSIEARLYAEDPNNDFLPEIGTLIAFEKSNSAEARWDTGVIKGTVIGTDFDPMLAKVISFAPNRIDAASKLAKALESAHIGGVKTNRDFLINCLKSPEFLKGNTTTDFIERVNPDRKLIIDEGDLNHATVIAALWIQMKNRDEATVAKFMPSGWTNGRLPKQKIIFEYEGQEIKVEYSQKRNGQFSFSDNKVAQIYSSNNESIDVMFDGKRHISKITSSENNILVHMPYGDVMLNVKPKFTLPGLEVAAGGLVAPMPGKVIDIKVKKGKKVKAGDTLVILEAMKMEHSIKAAEDGVVSELLISINDQVENGALLMVVK

SEQ ID NO: 82023 - protein, 445 aa, Unknown
  Bacterial polypetide isolated from the Sargasso Sea
MFKKILIANRGEIALRILRACRELGIKTVAIHSDADEAAMHVRMSDESICVGPASAQSSYLNIPAIITSATMSNVDAIHPGYGFLSENKRFAEIIEEHNIKFIGPSSKHIGMMGNKILAKKIMIDNGIPVVPGINKVNDENEIKSFIKKVELPVIIKASSGGGGKGMRVVYKEEDLQESIAAAKVESKKSFNDDTVYIEKFLTKPKHIEIQILSDSHGNVVTLGERDCSIQRKHQKLIEESPSNLLTSEQRKEISSLCQKAIKTIGYEGAGTIEFLFENNKFYFMEMNTRLQVEHPVTEMVTGIDLVREQIEIAYGKKLSIKQEDINLKGHSIECRINAEHPENFIPSPGTITQYHQPGGLGIRVDSAVYQGYSIPSHYDSMIGKLITYADNRSECISKMKRALEEYVIMGINTNIQLHQKIIKSKEFISGKYDINFLSKFLQFK

SEQ ID NO: 82024 - protein, 446 aa, Unknown
  Bacterial polypetide isolated from the Sargasso Sea
MFDKVLIANRGEIAVRINRACQELGISTVAIHSEADTESMHVRIADESVCIGPNPVNKSYLNSHAIISACEITGAQAVHPGYGFLSENASFAKMLEDHKLTFIGPKYSHIEMMGDKIEAKKIMKKFGVPTVPGSEGEVKSESDALKASDEIGYPVLLKASAGGGGRGMKIVNSKKELQDALPIIKQEALSFFGNDSIYIEKFIDSPRHIEVQVICDTHGNFLHLHERDCSVQRRNQKVVEEALAPNVDEKKKQKLFKTCVDAMEKMGYLGLGTLEFLFDGKEFYFMEMNTRLQVEHPITEMLTRVDLVREQICVAHGDKIFTNQENIKPLGHSIECRINAESSKDFKPSAGKIEMYHPPAGNGIRLDTFIYSGYKVPHYYDNLLAKLISTGRTRNHAIKRALRSLNEIVIDGIDTNIELHKKILSSSEFKNGGVAINWLENNIENL

SEQ ID NO: 82025 - protein, 442 aa, Unknown
  Bacterial polypetide isolated from the Sargasso Sea
MFNKILIANRGEIAVRVLRACKELGIQTVAVYSSADKDAMHVKLADESVCIGPASSLKSYLNIPAIISACEVSGADAVHPGYGFLSENYGFVEKLEAHDIKFIGPRSEHIKMMGDKILAKESAKNLGLPIIPGSPGEINNTKEGKDIANELGYPIIIKASSGGGGRGMIKVFKEEDLDESLKKASTEAEKAFNDKRVYIEKYLQNPKHIEIQVIGDEYNNIVHLGERDCSMQRRNQKLIEETPAVVIDDIKREEICNLTINSLKTMGYFNAGTVEYLFEDGNFYFMEMNTRLQVEHPVSEEIYNFDLVKEQIKIAAKYKLSANQDVLNSNGHSIECRINAEDPNTFIPSPGLITNYHAPSGPGIRVDSNCYSGLEISPYYDSLIAKLIVYDQDRSSCIQRLKRALDEFVIDGIKTTIPFFQEIITQEDFLEGSYNINWLEDY

SEQ ID NO: 82026 - protein, 1125 aa, Unknown
  Bacterial polypetide isolated from the Sargasso Sea
MKKILIANRGEIAIRIARTCNDLGIKTIGIFSEDDLNSLHLSKMDESFMIDEKGANAYLNIKKIIDIAKREKVDGIHPGYGFLSENPAFAKAAKQAKLKFIGPSEKSLIIFGDKSAAKLLATNLDIPVVKGTDGKTSLKLASSFFKGLKKNSSLVIKAIAGGGGRGMRVVNSDSELKDAMNRASSEAKAAFDSSDLYVEEYLKNYRHVEVQVLGDGKGNAVHMHERECSTQRRHQKIIEISPAPGINKELKQKMFNASVHLIKETKYEGLATVEFLVDYSKGDFKFIECNARLQVEHTVTEAVLGLDLVRAQIQIASGKSLKQLKLEQEDIPEPKGFAVQSRVNMEVIDSKGEIKPSGGKFTSFDLPSGPGVRSDSYGYNGYESNPAFDSLIAKVITHSPEDNFKQALKRNYRSLCEFKVEGVPTNLDLLKNILSNSKFKNNELHTNFIDQNIENLLSVGKHINLSDISRSIKKNIPKRGKIENLDPLAVLDHGKTGGVFVDDSENILQLENEELEAGLSSIKAPMQGMIVKFDVKQGDEIWKGKPLLIMEAMKMEHEVLSDISGIVKEIKVQPQDTVFEGHSLMTIQLAEVKEKTTKKTKDIDLDRIRPDLKEALERKEASHDKNRPEAVKKRYSTGHRTARENIEDLCDEGSFVEYGSVVIAAQRRRRSEEDLIKNTTGDGMVCGLGQVNGDLFGETDSRVMAMSYDYMVLAGTQGKMNHAKKDRMFEIAEQNKLPTILFAEGGGGRPGDTDTSGVAGLDCLAFTYFAQLSGLVPVIGITTGRCFAGNAVLLGCCDVIIATEDSNIGIGGPAMIEGGGLGVFTPDEVGPMDVQVPNGVVDLSVKDEEEAVEVAKKYLSYFQGSISDWKAPDPRKLRFTVPENRLRYYDMREVIEGIADIGSILEIRKDWAPGIITSFIRVEGRPVGVVANNPGHLSGAIDSPGADKGSRFIQLCDAFDIPILSLIDCPGIMVGPESEKTALVRHASRMFVVGANIETPLMSVVIRKAYGLGAQAMAGGSFKIPLFTVTWPTGEFGGMGLEGAVKLGYRKELEAIKDPKKRIAAYEKMVADSYHRGRAVNMASHFELDDVIDPADTRNWIMGALKSLPPKKDRTSKKRPNVDTW

SEQ ID NO: 82027 - protein, 641 aa, Unknown
  Bacterial polypetide isolated from the Sargasso Sea
MTYHKLLIANRGEIACRIIKTAHEMGISCVAVYTDADSESPFVKLADEAIKLTDTYLNGKEIIEAAIKTKAQAIHPGYGFLSENAKFSRDVIKAGLIWVGPSSKVITSMGDKLKAKDIADKAGVPTLPMTTDPSKANTVGYPLLIKAAAGGGGKGMRIVESKKDLKDSIKGAQREAKAGFGDDRIFIERYVASSRHIEIQILGDSHGNIVHLGERECSIQRRHQKIIEESPSPRVDSKMRAAMGDAAIKLAKKLKYESAGTVEFLVDDKTGEFWFLEVNTRLQVEHPVTEEVTGKDLVYEQLRISRGEHLGYDQEDISWNGSSIEARLYAEDPTNDFLPATGTLIAYEVDKNIDARWDTGVKQGSVIGTDFDPMLAKVIAKGRNRTDAANKLALALQSLHIGGVTTNRDFLVECLRSKDFHKGNTTSDFISIAKPKRSIELKGTELEQAGIAAALWLQGENRKNTPILSGIQSGWTNSRLPKQKINFQYNSEELSILYKSNRDGSFEINKGINAKIIEWNNSGIDIEIEDIRFFSKVTRKDANLIVHGPWGDILFKIMPRFKSVNQEVKDGGLIAPMPGKVIDLKVKVGSKIKKGDTLVILEAMKMEHTVKATEDGVIDELFISNLDQVENGALLMVIKAK

SEQ ID NO: 82028 - protein, 640 aa, Unknown
  Bacterial polypetide isolated from the Sargasso Sea
MFDSILVANRGEIALRIMRTAQAMGIQTIAIYVEADKDAPHVRFADKAVLLPDGGYLDIDAVLDAAQKSNAGAIHPGYGFLSENSEFAKRVIKEKIIWVGPSPKVISVMGDKLKAKELAIKASVPTLPMTSDEKEVKKIGYPLLIKAAAGGGGKGMRVVTDKKDLQESLEGAKREALSGFGDERVFIERYVEKSRHIEIQILGDSHGNVIHLGERECSIQRRHQKIIEESPSPRITEEIRFAMGNAAVDLAKKIKYESAGTVEFLFDDKSGEFWFLEVNTRLQVEHPVTEEVTGIDLVAEQIKIARGEELQYSQEDIEWTGSSIEARLYAENPNNDFLPETGKMFAYEQAENDFMTRWDSGVHKDSVIGTNFDPMLAKVISYGETREDAARVLAKSLEDSHIGGVITNKDFLIATLRSDEFLKGNTTTDFIERVKPPRVKNLTNDELNLALTAAAMWKQMRNRISSDIAPYIPSGWTNGRLPNPNITFLLDGEEIFVEYKLINKNKFLVFNSEVEVVNIDDKYIDLVFDGVRVKSRISEDAEFILVHIPSGDVSFEVKPRFSMPGLEVQAGGLVAPMPGKVVDLKVKKGSKVKSGETLVILEAMKMEHSIKASEDGVIADIFIKENDQVENGAVLMVVDS

SEQ ID NO: 82029 - protein, 225 aa, Unknown
  Bacterial polypetide isolated from the Sargasso Sea
MSVQYFARLGSSLSVPDFARLGRSLSVQDFARLGSSLSVLDFTRLGSSLSVLDFARLGSSLSVLDFARLGRSLSVLDFARLGSSLSVLDFVRLGRSLSVLDFARLGSSLSVLAFARLGSSLPVMDFARLGSSLSVLDFARLGSSLSVLDFARLGSSLSVLDFARLGRSLSLLDFARLGRSLSVLDLARLGRSLSVLDFARLGRSLSVLDIARLGSSLSVLDVARL

SEQ ID NO: 82030 - protein, 285 aa, Unknown
  Bacterial polypetide isolated from the Sargasso Sea
SYLNIPNIIAAATSRGADAIHPGYGFLAENDRFAEICSAHGLIFVGPSPESIRAMGDKSTAKATMQRVGVPTIPGSEGLLSSVDEAAQLAGSMGYPVMIKATAGGGGRGMRLVRSADELENLFKAAQGEAEAAFGNPGLYMEKFITRPRHVEVQILADRFGNVVHLGERDCSIQRRHQKLLEEAPSPGLHPETRRLMGEAAVSAAKTIGYEGAGTVEFLLDASGEFYFMEMNTRIQVEHPVTEVVTGVDLIAQQLKIAAGEPLELKQETIKLNGHAIECRINAED

SEQ ID NO: 82031 - protein, 246 aa, Unknown
  Bacterial polypetide isolated from the Sargasso Sea
GYYKTMHNPKTDWCFKTEPDETLNNRSINYPRGKTLGGSSSINGLLYIRGQEQDYDMWRQLGNVGWSWKDVLPYFLKSEKQERGKNEFHGDAGPISVEDQRIKLDILDVFMNAAEEIGIPKVNDFNKGNNFGCGYFQVTEKKGLRCSAAVGYLRPIKNRLNLKIITKAHVKNINFDKKRAVGVSYWRDNQLIKAKAKKEVILSAGSIGSPHILQVSGVGDPLKIKNHGIEIINNSPGVGKNLQDHI

SEQ ID NO: 82032 - protein, 269 aa, Unknown
  Bacterial polypetide isolated from the Sargasso Sea
MNFKDSSKVLDNFISCKLENFGHYEDFVSTSDPYINHSLISAPLNIGLITPEQVLNKLSSFSYSKVGINNYEGFIRQVFGWREFMRYLNIHYYKDFNKGNFFGNDRKLTKHWYEGTTNIPILNDMILNLKKSGYVHHIPRLMIISNIMNLAGLKPSEVYKWFMETFIDSSDWVMTPNVYGMGMFSDGGIFATKPYLCGSNYLLKMSNYSRGDWTQTLDGLYWNFIYKNKNYFKTNQRLSMMYYTVNKMDKSKISTHISNAKKFIKEYTR

SEQ ID NO: 82033 - protein, 281 aa, Unknown
  Bacterial polypetide isolated from the Sargasso Sea
RHLSVPSSSTGNKNISKLEPGQYLVINKEKSIFKNKYWDPFSFEVDHSITENEAILKIEELLFESVKHRKVSDVEVGLFLSGGLDSSLIGKIMSKDTNSDVKSFNIDYQEHFQGYEGEVDEARFAASHIGVNLIEDKIQYSDFKEIIDNYSFYQDDLVGDEVGIPLYFLGKSAKDNGIKVVQVGEGADELFYGYDHWIRFMKLNNFLSPITKSRSSSFNLKSHRGNMLSNILLNRTSFAGGALGFNLPEINNLLVEGITPEYELIHFVDNKWDDYFSNKNS

SEQ ID NO: 82034 - protein, 216 aa, Unknown
  Bacterial polypetide isolated from the Sargasso Sea
MENFDYIIIGAGSAGCVLANRLSENPKNKVLLIEAGGKDTNPWIHIPVGYYKTMHNPEVDWCYKTEPDETMANRSIPYPRGKTLGGSSSINGLLYIRGQEQDYDIWRQLGNKGWSWKEVLPYFIKSENQERGKNEYHGVGGPLSVSDTRIKLDLLEKFMDASEERGIPRVEDFNKGNNFGCGYFQVTEKNGLRCSAAVGYLNPIKTRKNLKIETNC

SEQ ID NO: 82035 - protein, 264 aa, Unknown
  Bacterial polypetide isolated from the Sargasso Sea
RDSVKLCSIGRRKIGIFLSGGLDSGMIAYEHSKLYDTTNTYTNKMEPNVIWREDDHNDDHYKALDLAKQFNFNHKVVTMTPQILTETWDDSIYFMEQPVYNPSMVMYYHTNKMLADDGIVVTLAGDMGDEVLGGYPKYWKLRNKNVNTWNKLIDAWMNRIKRPIQVTETPVSREDLKEHFVKTFPIELYNTEDTVNSYMALDCVTQVPEEFFIRNDTYGMAFSMEGRFPLATKKFMQYALSIRSYEKIGKHKHQTKLLSKKAYK

SEQ ID NO: 82036 - protein, 200 aa, Unknown
  Bacterial polypetide isolated from the Sargasso Sea
MAGAPPHTNASVRDEDGQLLTKASDVAGRWTRYFADVFCADVVSESVARPTISRNDALGKRCFDEDTLQLSFSETLRLIERLPKGKGLGMDGLPAEILQAGGAAMAMFLHDFISDAAVVRYMPFQWKGGRIAPVFKKKGSPQICSDNRGILLAPHASKVFTGGLQYRIKDAYLEAVGRTQFGAVRGRGTLPANMLTRSVV

SEQ ID NO: 82037 - protein, 185 aa, Unknown
  Bacterial polypetide isolated from the Sargasso Sea
MRYLNIHYYKDFNKGNFFGNDRKLTKHWYEGTTNIPILNDMILNLKKSGYVHHIPRLMIISNIMNLAGLKPSEVYKWFMETFIDSSDWVMTPNVYGMGMFSDGGIFATKPYLCGSNYLLKMSNYSRGDWTQTLDGLYWNFIYKNKNYFKTNQRLSMMYYTVNKMDKSKISTHISNAKKFIKEYTR

SEQ ID NO: 82038 - protein, 1083 aa, Unknown
  Bacterial polypetide isolated from the Sargasso Sea
MTFSFVKDSRQAGKYYEETDDYYAKEGHRGEWDGEGAEALGLQGGVDKETFKNLLDGKLPDGTVVRKPAPKTNKDGKKANARLGIDFTFSAPKSVSIVALVSGDRRVIAAHDAAVADALKMLESKVVARKKVKKLSFREHTNNFVVAKFQHDLSRDQDPQLHTHAVVMNLTQREDKRWTALSNEEMLKSVKVTGAYYRARLAERLQDMGYDIRATRHGFEMASVPDAAIEMFSQRSRTIEKHLDAQGLTRDTASGGMKQTITKNTRKRKDEGDRAVLRQEWRDALATAGIKIPEAAPEHQAAPARTPTPPGREAGHGASDGAGPRDPGAGGGSSGRGGAEPRRPEVTPQSPSTRPTSGDFNRDATDPRDSRERPQQPERVDAESFPAHSPQQAAGPTGGDPPLPDKQRRAREALDFAIEHLTERQGIFTHGELLERAYMKALGGTAEIDRELDRAKVDGRLLPELPLYQTAKSFSRDEQAKSDDPQFDKFRHDNDIHKLTRASWVSMLVNVEGYSADRAEKTVDNAIASGRLVQTEERYTTPDMRSRELRILWMERLGRDTVQPIKTAEEVDTMLAQSDLNAGQRDAAKLVLTTTNRIVGVQGYAGVGKSHMLSKSVEGIKAETAKRASESGYRVIGLAPYGSQNKALKELGMDSQTLASFLAKKPEPGLLGPNTIVFLDEASVVPAHQMEALMKRIEQHGARLVLLGDRKQTQAVEAGKPFEQLQDAGMQLAHITEIQRQKNATLKAAVEKAANDNIGGSVFTLKENVHQVKEAPERHKAIADAYASKPLEERNNTLIVVGTNEARREINKLVRENLELPKGELVRALESFDMTRAEHRHASSYVPGLIVLAERDGSHGLKRGEHFKVVSIDANANTLRLVGKDTGELVVNASKLEGLSTYQPTEIEIVRGDWLRMTRNDNKQGVYNGERHQVAAVEADAVVLENGARLPRENAIHAQHGYAQTVHSAQGLTTNSVLMDADTKSLTANRAVFYVAISRARHDIAIYTNDRSKLAETMSREPKKYAALELRDNRREDEVLRAISAIRRSEKDARSARQALSRDIRGSATRTTQQRAARRGRSR

SEQ ID NO: 82039 - protein, 153 aa, Unknown
  Bacterial polypetide isolated from the Sargasso Sea
HRLVSGYEAPVYIAWSSSNRCATIRIAGHFKGEKYAYMKRMEYRVPDPASNPYLVFSAVLAAGLDGIKKKIEPGDPVKEDIYKMTKSERKKHGIDTLPANLGRALDELESDRKYLNPIFSNEVLDKIVELERRDHREIAIRPHPHEFYLYFDV

SEQ ID NO: 82040 - protein, 162 aa, Unknown
  Bacterial polypetide isolated from the Sargasso Sea
MKRVLIANRGEIALRVHRACKQLGLETVAAYTKVDHQLLHLRLADHQICIGEESYLDGRQLISAALVTGCDAIHPGYGFLSENAEFVLSVESAGLIFVGPAASHIALMGDKVVARRTMAKAGLPTLPGSETAISDEKELLAVAQEIGFPVMLKAAYGGGGMG

SEQ ID NO: 82041 - protein, 264 aa, Unknown
  Bacterial polypetide isolated from the Sargasso Sea
MGIGKLLIANRGEIALRIIRSCREMGISTVAVYSTVDRNALHVQLADEAVCVGDPPSGRSYLNIPNIIAAATSRGADAIHPGYGFLAENDRFAEICSAHGLIFVGPSPESIRAMGDKSTAKATMQRVGVPTIPGSEGLLPSVDEAAQLAGSMGYPVMIKATAGGGGRGMRLVRSADELENLFKAAQGEAEAAFGNPGLYMEKFITRPRHVEVQILADRFGNVVHLGERDCSIQRRHQKLLEEAPSPGLHPETRRLMGEAAVSAA

SEQ ID NO: 82042 - protein, 320 aa, Unknown
  Bacterial polypetide isolated from the Sargasso Sea
MFNKVLIANRGEIACRIAATANKIGLRTVAIYSEADSGSKHVSLCDEAFLVESSTPLESYLNQSEIIKIAIKTGAGAIHPGYGFLSENSEFAQKVEEAGLIFVGPDFKAIEIMGRKDAAKKAMSKAGIPVVPGYHGENQTDEKLKKEAESIGYPLLIKAIAGGGGKGMRLVESPKEFLTLLASARTEAEKAFGNGRVLIEKYILAPRHIEIQIFGDGQSAIHLFERDCSLQRRHQKVLEECPAPGMTGKMREAMCRAAVSAAETIGYKGAGTVEFIVDGSDGLKEDKFWFMEMNTRLQVEHPITEEITGIDLVAWQFDVA

SEQ ID NO: 82043 - protein, 252 aa, Unknown
  Bacterial polypetide isolated from the Sargasso Sea
ASDAANEVVDIINSEGGEAIANGASVTDLDAVKEMTNQTMEKWGRIDILVNNAGILRDKSFHKITLEDFNLVMDVHFQGSLNCTHTIFPIMREQEYGRIVFTSSSSGVFGNFGQTNYGSAKMAMVGLMNTLKIEGQSKNVFANSITPVAYTRMTEGLIPEDFGKNLQPEFVTPAVIYLSSENAPNGAIMAAGAGVFSRIFIHETMGVSLGMGEDMTPENIEANWDKISDMTDARALQNGGEQTLKFFELINK

SEQ ID NO: 82044 - protein, 327 aa, Unknown
  Bacterial polypetide isolated from the Sargasso Sea
GVIYKGRDNVDQFKSAHAINTKLRTLKEAIKGSDVFLGLSAKDTVTQDMVKSMAKNPIIFACANPDPEIKPELVDEVRSDAIVATGRSDYPNQVNNLIGFPYIFRGALDVRAKEINEEMKIAAAQAIASLAREEVPDEVVNAYGGERPRYGREYIIPSTFDPRLISRIPSAVAEAAIKSGVARKKIKDIEAYKDQLANRLDPSMSIMQGINAQIKKNPRTVVFAEGEDENMLKAAIAYKNSRLGTPIVIGSEKRVKEQLKEIGLDENYNIKIVNSTNKDKRELYTKKLYSKLQRKGLLERDVDRLIRNDRVIWGASMVECGDADAMV

SEQ ID NO: 82045 - protein, 337 aa, Unknown
  Bacterial polypetide isolated from the Sargasso Sea
PPLSEIHEDSENVYKYTSKSNLVAVITNGTAVLGLGDIGPLASKPVMEGKGLLFKIFADIDVFDVEIDAKNIDDFVNTVKNIAPTFGGINLEDIKAPEAFEIEKRLVSELDIPVMHDDQHGTAIISGAALINALELAEKKIEEVKMVICGAGAAAISCAKIYLALGLKKENIIMFDSKGPINIERTNLTTEKQKFITHNTSIKTLSDAIDGSDVFIGLSMANMMTKEMLLSMAKNPIVFAMANPDPEISYTVAKRTREDIIIATGRSDHPNQVNNVLGFPFIFRGALDVRASKINEEMKMAAVYALAELAKEPVPEIVNIVYKEKKLMFEEIIYSKT

SEQ ID NO: 82046 - protein, 70 aa, Unknown
  Bacterial polypetide isolated from the Sargasso Sea
TVNCIAPGLIETDMTSHLSDTVKQGYLDRIPLKKLGKPKDIAQMILFLCSDEASYITGQTFYIDGGMSLN

SEQ ID NO: 82047 - protein, 100 aa, Unknown
  Bacterial polypetide isolated from the Sargasso Sea
MANRLKGKVALITGGAAGFGKKTAETLKAEGAVVYISDINVEGGEKVAKDFDVNFLQQDVTNTDDWERVINEIKNKEGKLNILVNNAGIGYMGDVESTTN

SEQ ID NO: 82048 - protein, 329 aa, Unknown
  Bacterial polypetide isolated from the Sargasso Sea
VAAPVKAIAKNPDLVYDYTSKGNLVAVISNGSAILGLGNLGSLASKPVMEGKSVLFKRFADIDSIDIEINNNKTDSIIETIKNISGTFGGINLEDIAAPDCFIVEQKLKEILDIPIFHDDQHGTAIITTAALINALDVSKKQINNVKIVVNGAGASAQACTNLFKSYGVKNENIIMCDSKGVIYKGRKNVDQFKSAFAANTKLRTLEEAIKGADVFLGLSAKDVVSKDMIKSMAKNPIIFACANPDPEIKPEIINEVRSDAIIATGRSDYPNQVNNLIGFPYIFRGALDVRAKEINEEMKMAAAKAIALLAREDVPDEVVAAYGGDRPK

SEQ ID NO: 82049 - protein, 273 aa, Unknown
  Bacterial polypetide isolated from the Sargasso Sea
IINEVRSDAIIATGRSDYPNQVNNLIGFPYIFRGALDVRAKEINEEMKIAAAKAIALLAREDVPDEVVSAYGGDRPRYGKNYIIPSTFDPRLISVIPVAVAKAAMKSGVARKKIEDFDIYKDQLTNRLDPSMSIMQGINAKVRKNPKKVIFAEGEDENMLKAAIEFGKNKLGTPILIGTEKRIKEQLKKIGLDENHKIEIVNSTDKEKREKYVKHLYKRLQREGQLERDVDRLVRNDRIAWGASMIACNDADAMVTGNIRHYTASIEKLKKVV

SEQ ID NO: 82050 - protein, 159 aa, Unknown
  Bacterial polypetide isolated from the Sargasso Sea
MDLENKVALVTGAGVRIGQEVAVKLGQLGMRLVIHYHHSEEGAKQTIQRLPGKKSRHLVLQADLKDVSAIKELVHKAEKQAGPVSVLVNNAAEFFPTPLFFATEEEWDHLLALNLKAPFFLSQALGGNMKSSGEGKIINMVDVSAERPWKSFLPYCASK

SEQ ID NO: 82051 - protein, 234 aa, Unknown
  Bacterial polypetide isolated from the Sargasso Sea
AEAGSDVAITGLTDVNAKTIANELAATGVNTLALGGDATKAKDMDSIVNNVLEQWGTVDTLINCVGDAIRKPVSRLPGTELEGMSEEEWHFILDINLTEAFQGCRALGPHFLERKTGNVINISGWASFRGRAQSAAYDAAKAGVMRFTECLAQEWAPYNIRVNAVAPGRFPDPEQLSQDVYAGRQQEAAQEIPLGRLGNLKEPGYLCVFLASEAASYITGQTWAIDGGISIKHP

SEQ ID NO: 82052 - protein, 228 aa, Unknown
  Bacterial polypetide isolated from the Sargasso Sea
GFGLAIVEKFLASEAKVIIWDKDKEMMNSLNLGDNVHTVEVDVTNFDSVNKATEQSLQISDSIDILVNNAGIAGPSFKTWEYPIEEWQKVIDIDLSGVFYCCKSVVPHMIEKNYGKIVNIASIAGKEGNPNAMPYSAAKAGVIALTKSLGKELADKNIAVNCVTPAAAKTRIFDQISQEHIDYMLSKIPRNRFVKVEELASLVAWMSSDENSYTTAGVFDLSGGRATY

SEQ ID NO: 82053 - protein, 276 aa, Unknown
  Bacterial polypetide isolated from the Sargasso Sea
ITTAALINALDISKKKINKIRVVINGAGASAIACSDLFMKKGVPKKSITMIDRKGVIYKGRDNLNHWKSEHAIETKNRTLEQAIKGADVFLGLSTKGVLTKKMVKSMEKNPIIFACANPDPEITPEEVNEVRNDAIVATGRSDYPNQVNNLLGFPYIFRGALDVRAKTINEQMKLAAADAIAALAREDVPDEVAAAMGGGERPKYGREYIIPSTFDPRLISVIPVAVAKAAMQSKVARKKIEDFEVYKERLKQRLDPSVTILQGINSQIKKNKKKV

SEQ ID NO: 82054 - protein, 307 aa, Unknown
  Bacterial polypetide isolated from the Sargasso Sea
LKEMLDIPVFHDDQHGTAIITCAALINALHITKKNIKNIKIVINGAGASAMACANLFKAKGVPQKNITMLDRKGVIYKGRENLNEWKSLHAIETKARTLDEIIEGADVFLGLSKADVLKKDMVKKMAKNPIIFACANPDPEITPEEIEEVRNDAIIATGRSDYSNQVNNLIGFPYIFRGALDVRAKTINEEMKMAASNAIAALARERVPDEVVAAMGGERPRYGKNYIIPSTFDPRLISVIPVAVAKAAIKSGVARKKIENFEIYSEQLKQRLDPSVTIMQGINSQVKKAQKKVVFVDGEDENTLKA

SEQ ID NO: 82055 - protein, 202 aa, Unknown
  Bacterial polypetide isolated from the Sargasso Sea
SQDKLETLYDELIPNGNNVAIQPIDFSSVKEKDYIDIVKAIREEYPEINGLVNNAGILGEKKSIEQFDYKTWREVQRVNLDAGFLLSKHLLPLMKKSKNSSIIFTSSGVGRIGKAYWGAYSVSKFATEGLMQILSEELQNTSSVRVNCINPGAVRTKMRESAYPAEDPESNPLASEIMTPYLFLMSDISADITGHSIDAQEN

SEQ ID NO: 82056 - protein, 213 aa, Unknown
  Bacterial polypetide isolated from the Sargasso Sea
AEADALVAELTAQGRRAAALQLDTGKIATFPAFAEAVRGVLTRWKAERFDYLVNNAGVGVHATVAETTEAQFDELMNVHFKGVFFLTQILLPLMADGGRIVNISSGLARFALPGYGAYAAMKGAVEVLTRYLAKELGPRGIAVNVVAPGAIETDFGGGAVRDNASLNAMVASNTALGRAGVPDDIGGVVASLLSPDNRWINAQRIEASGGMFL

SEQ ID NO: 82057 - protein, 104 aa, Unknown
  Bacterial polypetide isolated from the Sargasso Sea
MSLSAKTLFITGASRGIGREIALKAAADGANIVIAAKSAEPHPKLEGTIFSVAAEVEAAGGKALALQLDVRDEQAVAAAMAQAAEHFGGIDALVNNAGAIKLVG

SEQ ID NO: 82058 - protein, 319 aa, Unknown
  Bacterial polypetide isolated from the Sargasso Sea
WISTRRTATSSRRWPGRRQTTAAGRLTPLHHGMFQMKLNRQQLSRLGGAVALPSYTAEMIRTGIAHFGVGGFHRAHQAVYTDALMNQGLALDWGICGVGVRSEDRAMRDALASQDYLYTLVELGDEPNLPVRVIGAITDMLLAEESPQALIDKLADPAIRIVSLTITEGGYCIDDSTGEFLAELPAIAHDLRHPESPQSVFGFLCAALAKRRAAGIPAFTLMSCDNLPHNGDVTRKALLAFAHLADHQLATWIDHHVSFPNAMVDRITPMTSAAHRQQLAEQHGVDDAWPVVCEPFVAWVLEGQFVSGRPAWEEVGVQF

SEQ ID NO: 82059 - protein, 79 aa, Unknown
  Bacterial polypetide isolated from the Sargasso Sea
MKSFKNKVALVTGAASGMGRYLAINLAKEGADVVICDINEDSLRETEKIIKSFNVGSSCYVFDIRNKEEIEELPERIIK

SEQ ID NO: 82060 - protein, 138 aa, Unknown
  Bacterial polypetide isolated from the Sargasso Sea
METRAAIAVEAGKPLEIHSVELDGPKEGEVLVEMKATGICHTDEFTLSGADPEGIFPAILGHEGAGIVVDIGPGVTSLEKGDHVIPLYTPECRECEYCTSGKTNLCQAIRETQGRGVMPDGTSRFRMGQDPIYHYMGT

SEQ ID NO: 82061 - protein, 32 aa, Unknown
  Bacterial polypetide isolated from the Sargasso Sea
PDDISSLTKFLASDKASYITGQTFHINGGMLM

SEQ ID NO: 82062 - protein, 324 aa, Unknown
  Bacterial polypetide isolated from the Sargasso Sea
FFGLSIGNIISQKMVLSMAEKPIIFAMANPEPEILPEKIKECRNDAIIATGRSDYPNQVNNVLGFPYIFRGALDVRAKTINLEMKIAAAKAIADLAKEDVPDEVANAYPGKRPQYGPDYIIPSPFDPRLISKVPPAVAKAAMDTGVARKAIVDIENYSNELSARLNPSAGLLQKVFQEVKENPKRVIFTEGEEEDMIRAAVIFLNNRMGTPILIGRDDVIKDKMQEMGLDFFDQMEIHSTRNKSEHDRYAEHIYHRLQRKGFLKKDCLDLLNRERNVFAACMVSLKEADAMVCGLTRSYAASLESIEYVLDPIPNKTILGLTVM

SEQ ID NO: 82063 - protein, 181 aa, Unknown
  Bacterial polypetide isolated from the Sargasso Sea
MANRLKGKVALITGGAAGFGKKTAETLKAEGAVVYISDINVEGGEKVAKDFDVNFLQQDVTNTDDWERVINEIKNKEGKLNILVNNAGIGYMGDVESTTNEAWDMVHKVDLDSVFYGCKYALPLMRDSGNGSIINISSISGIVAGHNFTAYNSAKAAVRHLSKSVALHCARTTNLVRCNSV

SEQ ID NO: 82064 - protein, 154 aa, Unknown
  Bacterial polypetide isolated from the Sargasso Sea
MEIRFDEQVAIVTGAGRGLGRAHAIAMASKGAKVVVNDFSGSQEISENANSVVEEIISAGGEAFANGANVANFDQVQCMVNETIDKWGRVDILVNNAGILRDKTFLKMSVEDMREVIDVHLMGSLNCSKAVWETMREQSYGRIVLTSSSSGLYG

SEQ ID NO: 82065 - protein, 73 aa, Unknown
  Bacterial polypetide isolated from the Sargasso Sea
APDIAGQGIANPVGQIWSAAMMLDYLGEKEASDRIVKSIELTLKDKNSRTKDLQGSSNTEQCSKKILDNLSSV

SEQ ID NO: 82066 - protein, 110 aa, Unknown
  Bacterial polypetide isolated from the Sargasso Sea
MEITSLFNISGKVAVVTGGSRGIGEMITAGFLANGVKVYISARKAPALIEKAKELSEKYNQECIPVPCDLSSMNGIDEFVNQITEKEDAIDFLVNNAGAAWGEPLESSLK

SEQ ID NO: 82067 - protein, 194 aa, Unknown
  Bacterial polypetide isolated from the Sargasso Sea
MDTQSLFSLAGRTALVTGGSRGIGKMIATGFIAQGAKVYISSRKADVCEAVAEELGPNCIAVPQDISTVDGCKALAATMAEHESGIDILVNNAGAAWGESFETFPEAGWDKVMDLNVKSIFFLTQAMHCLLKAGASDEQPAKVINTASIDGLRLNPWETYSYQASKAAVINLTKRLAARLVKDGILVTGIAPGA

SEQ ID NO: 82068 - protein, 83 aa, Unknown
  Bacterial polypetide isolated from the Sargasso Sea
MSKKISLIGAGQIGGTLAHLIGLKELVDEVVMFDVASGIAKGKALDIAQSSSVDGFNVKLSGTDNYEDIKDSNVIIITAGVPR

SEQ ID NO: 82069 - protein, 205 aa, Unknown
  Bacterial polypetide isolated from the Sargasso Sea
MNQIDLNNKTAVITGGAQGFGYSMVERFSQSGAKVMIWDKDQELIDSLDLPENVSAVQTDVTSYDSVENSVKATLEKNNKIDILVNNAGIAGPSFKTWEYPIDQWQNVVDIDLTGVFYCCRAVTPHMIKNNYGRIVNIASIAGKEGNPNAMPYSAAKAGVIALTKSLGKELSDKNIAVNCVTPAAAKTRIFDQISQEHIDYMYQK

SEQ ID NO: 82070 - protein, 57 aa, Unknown
  Bacterial polypetide isolated from the Sargasso Sea
MFLKNYNLRNKTALVTGAGKGIGRACAIALAEAGANLIIISRTKKDLDEVSKKIKSL

SEQ ID NO: 82071 - protein, 278 aa, Unknown
  Bacterial polypetide isolated from the Sargasso Sea
GGINLEDIAAPDCFIIEQKLKKIVDVPIFHDDQHGTAIITTAALINALDINGKSIKKVKVVVNGAGASALACTELFKKTGVKHENLIMCDRKGVIYKGRDNVDQWKSKHAVKTKFRSLKEAINGADVFLGLSAKDALTKDMVKSMAKNPIIFACANPDPEITPEKVEEVRKDAIVATGRSDYPNQVNNLIGFPYIFRGALDVRAQTINEEMKIAAAHAIADLAKKRVPDEVASVMGGVRPIYGKEYIIPSTFDPRLISVIPVAVAKAAIKTGVARKKI

SEQ ID NO: 82072 - protein, 207 aa, Unknown
  Bacterial polypetide isolated from the Sargasso Sea
MKLKDKVALVTGGASGLGQATVEAFVAKGAKVVILDINEDKAKAIIKDLGDDNVLFISTDIMEEDPVVDAVNQIKDKFGALHIAVNCAGTGYPGRILGKEAPHPLDAFKFIINLNLVGTFNVMRIAAELMDKNDPGSKGEKGVIINTASIAGYEGQIGQSAYSASKAGVIGLTLTAARDLARHAVRVCTIAPGIFDTPLMQLAPDKV

SEQ ID NO: 82073 - protein, 284 aa, Unknown
  Bacterial polypetide isolated from the Sargasso Sea
GGIGKQHALELARRGAKVVVNDLGGSVDGSGASDAANEVVELIKSEGGEAISNGASVTDLDAVKAMVDQTMTEWGRVDILVNNAGILRDKSFHKVTLEDFNLVMDVHFQGSLNCTHTVFPIMRDQEYGRIIFTSSSSGVFGNFGQTNYGSAKMAMIGLMNTLKIEGQNKNVFTNSITPVAYTRMTEGLIPEDFGKNLQPEYVTPAVIYLASDDAPNGAIMAAGAGVFSRIFIHETMGVSLGMDKDMTPENIQANWDKISDMEDARALQNGGEQTLKFFELISKE

SEQ ID NO: 82074 - protein, 85 aa, Unknown
  Bacterial polypetide isolated from the Sargasso Sea
MKKISLIGAGQIGGTLAHLIGLKELANEVVLFDIASGIAKGKSLDIAQSSSVDGFNVKLSGTDDYKDIKNSDVIIITAGVPRKPG

SEQ ID NO: 82075 - protein, 166 aa, Unknown
  Bacterial polypetide isolated from the Sargasso Sea
MNGLRDKVILVTGAASGLGYADAEFLTESGATVVMTDINEDSGKAVADRLGNLFLGQNVADEHRWSEVMSEIRDRFGRLDGLVNNAGIAPIADIETTTTEVWRQTLAVHLDGTFFGCQTALRLMKESGGGSIVNMSSTAALIGIPDYLAYSAAKGGIRSMTKAIAV

SEQ ID NO: 82076 - protein, 295 aa, Unknown
  Bacterial polypetide isolated from the Sargasso Sea
FKNPDAAYEYTSKGNFFAVISNGSAILGLGNLGSLASKPVMEGKAVLFKRFADIDAIDIEIDNKNSDEIIKCIQNIGNSFGGINLEDIAAPDCFIIESKLRETLDIPIFHDDQHGTAIITTAALINALDISKKKVGDVKIVVNGAGASAIACANLFKKIGIKSENILMLDRKGVIYKGRDNIDQFKSAYAVETKLRTLPEAIKGADIFLGLSAKNVLTKDMVKSMSKNPIIFACANPDPEIKPELVDEVRSDAIVATGRSDYPNQVNNLIGFPYIFRGALDVRAKEINDEMKIAA

SEQ ID NO: 82077 - protein, 235 aa, Unknown
  Bacterial polypetide isolated from the Sargasso Sea
MGNTKKIVITGASRGIGSTIAKAFSDQGAYVVGTCTSPIRKEFCSEWIISDFSDINQINECAERIKEIGPDVLINNAGINKISSFENIVANEFLLIHQINVFAPFRFCQAAIPNMKTKNWGRIINISSIWGKISKEFRASYSASKFALDGITLALAAEYSKCGILANCVSPGFTDTELTRNILSDIEIRNIALNIPINRLAAPNEIADYVLWLGSEKNTYVTGQNLAIDGGFTRV

SEQ ID NO: 82078 - protein, 193 aa, Unknown
  Bacterial polypetide isolated from the Sargasso Sea
FVADVSKASSFNSLLTYFYKKYKSVDIFVNNAGITHKPKPMEKVTEKEFDKVFNVNAKSVYYCGKYFVPKMKKVKRGVILNVASTAGLSPRPKLNWYNASKGWMITATKAMAIELAPFKVRVNAIAPVAGKTPLLKSFMGGNTPKKKQAFLSTIPIGRFSTPQDMGNAACFLCSDEASMITEIVLEVDGGRCI

SEQ ID NO: 82079 - protein, 137 aa, Unknown
  Bacterial polypetide isolated from the Sargasso Sea
MKDLFSIEGKVALVTGGSRGIGSMIAAGFLASGAKVYISSRKAEVCDETAKKLSEEYGGECISIPADVSNVEGIEALADAIKTKEDKLDILINNAGVAWGEPIDTYPEIGWDKVMDTNVKGIFFLTQKLLPLLRQAG

SEQ ID NO: 82080 - protein, 243 aa, Unknown
  Bacterial polypetide isolated from the Sargasso Sea
MHYGRERIVLVTGASRGAGRGIALALGKTGATVYLTGRPENDSNTNLSGTLSETAQQVTNAGGHGIPLYCDHSSDEQTGSVLSEIKKEHGRLDVLVNNVTDIDDAITDRGPFWEKPISLCNLLSVGLRSHYVTTWHAAPLLIAEGGGLVVNTSSFGGRTYMHGPAYGAGKAGVDKMAHDMAVDFKPFQVAVISLWMGLLLTERTKRVLDSDQDRYKDLLDSAETPEFTGHIINALADDKNFII

SEQ ID NO: 82081 - protein, 234 aa, Unknown
  Bacterial polypetide isolated from the Sargasso Sea
MTTSRFDLTGKTALITGASSGLGAHFARVLAAAGARVVLAARRADRLSALVDELKQQGHEAMAVTMDVTDADSVDAGFSAAEQAFGVCDILVNNAGIGDPVPFLNMDEGNWRSMLDTNLDGAWRVAHRGCKAMAGSGQGGSVINIASILGLRVGKALAHYAVAKAGVVQLTKAMAMELAKNGIRVNAIAPGYFRTEMNSDYFDTEHGQTYVRSKVPMGRLGQLDELDGPLLLLA

SEQ ID NO: 82082 - protein, 297 aa, Unknown
  Bacterial polypetide isolated from the Sargasso Sea
AGLDVTLADMNGAAIENAITRAAKLFERRLKNENKIAAALERLRSDPDGHGAADADLIIEAVAEKLDVKQAVFQNLEKVCKTGAILATNTSAIPLEDIATALNAPERLIGLHFFNPVPVLPLVEVIWSKYSDQDLVNRGMQFAGQIDKMPVRCKSAPGFLVNRALLPYIFKAIEAVAGGENADHIDEALVDFGMPMGPVELADQIGLDVCLDAGIVLGIAPAAKTLLDEKCKAGTIGRKSGGGFYEWDGNQAIRARQSQDPSVMATIAENMLTPMIEECRKAVDEQVVDSADSADAG

SEQ ID NO: 82083 - protein, 124 aa, Unknown
  Bacterial polypetide isolated from the Sargasso Sea
MCRRNGYSNIDRANGCVNTNATLSYSEEMMHIDLSNKRVIVTGASRGIGKAIAKAFAQEGAKVAICARNIDTLQAAANEFCAPIENILVRGVDVTDSEAVKEFVHEVADLWSGVDILINNAGQG

SEQ ID NO: 82084 - protein, 282 aa, Unknown
  Bacterial polypetide isolated from the Sargasso Sea
RLFFNEQKLKELLDIPIFHDDQHGTAIITTAALINALDISKKKIDRVKIVVNGAGASAQACANLFKSSGVKSENIIMCDSKGVIFKGRKNIDQFKSAHAIETKLRTLEEAMKGADVFLGLSAKDVVSKEMVKSMADKPIIFACANPDPEIKPELIKQSRSDAIIATGRSDYPNQVNNLIGFPYIFRGALDVRAKEINEAMKVAAANAIALLARENVPDEVVSAYGGDRPRYGKDYIIPSTFDPRLISVIPAAVAEAAMKSGVARKNIMDLESYKDQLTNRLD

SEQ ID NO: 82085 - protein, 41 aa, Unknown
  Bacterial polypetide isolated from the Sargasso Sea
ANVTNEDQVKDLVEGVLDKWGRIDILVNNAGILRDKTFAKM

SEQ ID NO: 82086 - protein, 140 aa, Unknown
  Bacterial polypetide isolated from the Sargasso Sea
MNKIDLKNKVAIVTGGAQGFGLAIVEKFLASDAKVIIWDKDKEMMSTLNLGDNVHTVEVDVTNFDSVNKATEQSLQISNSIDILVNNAGIAGPSFKTWEYPIEEWQKVIDIDLTGVFYCCKSIVPHMMKKIMGKLLILLL

SEQ ID NO: 82087 - protein, 204 aa, Unknown
  Bacterial polypetide isolated from the Sargasso Sea
MNNIDLKNKVAIVTGGAQGFGYSMVERFSASGAKVIIWDKDKSLMSKLSLPKNVKTMEVDVTSYQSVETATNDTINKFYSIDILVNNAGIAGPSFKTWEYPLEEWQQVMDIDLNGVFYCSKAIVPHMIKANYGRIVNIASIAGKEGNPNAMPYSAAKAGVIALTKSLGKELSDKNIAVNCVTPAAAKTKIFDQISQEHIDYMLS

SEQ ID NO: 82088 - protein, 204 aa, Unknown
  Bacterial polypetide isolated from the Sargasso Sea
IIATGRSDYPNQVNNLIGFPYIFRGALDVRAKTINEEMKIAAVNAIASLAKKRVPDEVVAAMGGERPKYGKDYIIPSTFDPRLISVIPVAVARAALKTKVARKKIDNFETYADQLKQRLDPSVTIMQGINSKIKKNQKRVIFTDGEDENTLKAAIAFKNAELGIPIIVAKEKIVKQRLKEIGYGENFDIQITNSTDKKKREKYV

SEQ ID NO: 82089 - protein, 106 aa, Unknown
  Bacterial polypetide isolated from the Sargasso Sea
MKIEEIFSVKDKVALVTGGSRGVGEMIASAYLANGAKVYITARKAEACNNKASELSEKYNAECISIPNNASSLEGIQELFEEINQKESKLDILVNNAGAAWGEPFE

SEQ ID NO: 82090 - protein, 277 aa, Unknown
  Bacterial polypetide isolated from the Sargasso Sea
DVFLGLSAKDTVSPKMIKSMSKKPIIFVCANPDPEITPEEILKVRTDAIIATGRSDYPNQVNNLIGFPYIFRGALDVRAKEINEEMKMAAAKSIAMLARDDVPDEVVSAYGGERPKYGKNYIIPSTFDPRLLSVIPSAVAKAAIKSGVARKKINDFDVYKDELINRLDPSMSLMQGINAKIRKNPKKVIFAEGEDENMLKAAIEFNKARLGTPILIGSEERIKDQLKKIGLGENFKIQIVNSKDKSKREKYTKYLYKKLQRDGLLERDVDRLIRNDR

SEQ ID NO: 82091 - protein, 172 aa, Unknown
  Bacterial polypetide isolated from the Sargasso Sea
VINQYKRIDILVNNAGIATSAPIHEMTDVMWDELISIHLNGTFYATRECLKVMYEQEYGRIINTASQLAYKGSAGFSHYTAAKGAIISFTRSLSLEIGEMNIRANCVAPGATMTRMLSEVPTEILDGIKASIPKGTIANIEEIVPAYLFLASEDGDHFVGQTISPNGGDHFL

SEQ ID NO: 82092 - protein, 245 aa, Unknown
  Bacterial polypetide isolated from the Sargasso Sea
MIDLSKTNVILTGATGGIGNSILEKLINSGANVLATGTNDEKLKKINEKFKSVKTTKFDISLHDKIEEFINKSYETLDNKVDVLINNAGITRDNLSIRMKDEEWNQVINLNLTSTFLLSKNIIKKMLKNKKGKIINISSLVGHTGNIGQANYTASKAGVIAMSKSLALEYGKKNINVNCISPGFITTEMTDKINEDYKKLLKSKIPLNRFGDPVDIANTVLFLCSNLSDYITGETIHVNGGMYFS

SEQ ID NO: 82093 - protein, 281 aa, Unknown
  Bacterial polypetide isolated from the Sargasso Sea
CRTLEDALNGADIFFGLSIGNIISQKMVLSMAEKPIIFAMANPEPEILPEKIKECRKDAIIATGRSDYPNQVNNVLGFPYIFRGALDVRAKTINLEMKIAAAKAIADLAKEDVPDEVANAYPGKRPQYGPDYIIPSPFDPRLISKVPPAVAKAAMDTGVARKAIVDIENYSNELSARLNPSAGLLQKVFQEVKENPKRVIFTEGEEEDMIRAAVIFLNNRMGTPILIGRDDVIKDKMQEMGLDFFDQMEIHSTRNKSEHDRYAEHIYHRLQRKGFLKKDCL

SEQ ID NO: 82094 - protein, 186 aa, Unknown
  Bacterial polypetide isolated from the Sargasso Sea
RESIADAFETVEREAGTVTVLVNNAGIAERDMALDVTEGHWNRVIGTNLTGVWAVAQEAARRMVKSEVGGSIVSIASLLSKRVSPGIMPYAVSKAGVAHMTRALAVEWAQHGIRVNAIAPGYFETDLNREYLRSDYAQSMIKRIPFRRTGELEELSGPVLMLCSDAGSYVSGTVISVDGAHAVNQF

SEQ ID NO: 82095 - protein, 254 aa, Unknown
  Bacterial polypetide isolated from the Sargasso Sea
AHAIDTKLRTLKEAIKDADVFLGLSTKDVLTKDMVKLMAKNPIIFACANPDPEISPEDVHEVREDAIVATGRSDYPNQVNNLIGFPYIFRGALDVRAKTINEEMKVAAAHAIAELAREYVPDEVVAAMGGERPIYGKEYIIPSTFDPRLISVIPVAVAKAAIKSGVARKNIENFETYKEQLKQRLDPSTTIMQGVNTQIKKSQKKVVFADGEDENTLKAAIAFKSNGLGIPILIAKKEIVKQKLKEIGLEENYK

SEQ ID NO: 82096 - protein, 40 aa, Unknown
  Bacterial polypetide isolated from the Sargasso Sea
MYYQSIRCDGYGLSKFSGLPANKVVGMAGILESSRFKLFL

SEQ ID NO: 82097 - protein, 304 aa, Unknown
  Bacterial polypetide isolated from the Sargasso Sea
VVVNGAGASAIACTNLFKSLGIKKDNVVMCDRKGVIYQGRDKVDQFKSAHAIKTKFRTLEEVMKNADVFLGLSAKDVVTQAMIKSMAKKPIIFACANPDPEIKPEKILEVRDDAIIATGRSDYPNQVNNLIGFPYIFRGALDVRAKEINEEMKIAAVRAIAKLAREDVPDEVVSAYGGDRPKYGKDYIIPSTFDPRLISEIPVAVADAAIKSGVARKKISKLDDYKDQLTARLDPSMSLMQGINAKVKNNPKTVVFAEGEDQNMLKAAIEFGKNKLGKPIVIGNEKRVKETLKSIGLDENIKST

SEQ ID NO: 82098 - protein, 143 aa, Unknown
  Bacterial polypetide isolated from the Sargasso Sea
MFLVARACAPLLMASAAQGRAPAAVLVSSTFGVRVPHVGYGPYAASKAGVINLVRALATEWAPGIRVNGIAPGVIDTAFLQGGTGRAVKQTGLDMEHFVQGVALQRLGRAEEIAHALLYLLSHAASYITGQTVHVNGGTHMAA

SEQ ID NO: 82099 - protein, 176 aa, Unknown
  Bacterial polypetide isolated from the Sargasso Sea
MVKKVIVTGASRGIGFELVQKYAEAGHEVIALSRNSDRLKQLKEACLQLNPQAQVHILPFDLAKDDIAAQLMCFIESCFQHVDILINNAGALIAKPFTEISAEELERIYNVNVLSVFKLTQELIPKFSNNAHIVNISSVGGVQGSVKFSGLSAYSSSKAALVALTECLGEDIKKPT

SEQ ID NO: 82100 - protein, 237 aa, Unknown
  Bacterial polypetide isolated from the Sargasso Sea
MKSILVTGSSSGIGSAVCQHFAKRGWKVFGSVRKIEDGIKLKEICGDNFIPLLFDVTDRENIKDAITILNKELEGLGLDCLVNNAGINIPGPIEYQDTGQIRKVFEVNIMGVINCIQAFLPSLKKSKDSTIINISSMAGKTGLPMQGSYCMTKFGLEGLSESLRRELLIYGIKVVVIGPGAIESAIWEKIHEDDYTTYSNTIYENAFSKLDFMLNKARDSALPANVIAKKVEDIVSS

SEQ ID NO: 82101 - protein, 308 aa, Unknown
  Bacterial polypetide isolated from the Sargasso Sea
NPDAAYEYTSKGNLVAVISNGSAILGLGNLGALASKPVMEGKAVLFKRFADIDAIDIEIDNKNSEEIIKCIQNIGNSFGGINLEDIAAPDCFIIESKLRETLDIPIFHDDQHGTAIITTAALINALDISKKKVGDVKIVVNGAGASAIACANLFKKIGIKSKNILMLDRKGVIYKGRDNIDQFKSAYSVETKLRTLSEAIKGADIFLGLSAKNVLTKDMVKSMSKNPIIFACANPDPEIKPELVDEVRSDAIVATGRSDYPNQVNNLIGFPYIFRGALDVRAKEINDEMKIAAAKAIATLAREEVPDE

SEQ ID NO: 82102 - protein, 276 aa, Unknown
  Bacterial polypetide isolated from the Sargasso Sea
MGRLNKKVAIVTGAGRGIGKEICLYLANEGAKIVVNDLGGDRDGSGGGKIADEVVNEINGLGGESVANYDSVSTVEGGNNIFNTAIDSFGQADILVNNAGILRDRTLYNMEESDWDLIMEVHLKGHYNCTRPLVRYIRDTNRSDCRIINMSSVSGLFGNFGQVNYGAAKEGIAGFTRSLALEVAKYKCTVNTISPGAATRLTIDLIEAAGRKYDENDWTQGPEQIAPIVAWLCTDAAKDVTSQIIHSQGGILGIMQQPAIIQSFTTEDLWTLDQLD

SEQ ID NO: 82103 - protein, 262 aa, Unknown
  Bacterial polypetide isolated from the Sargasso Sea
EIIKDNVNKKEKSIIFSFLHNALNLRREKCNKPITLLCCDNIRENGKMLEKSLISYLKLCNDIELINWIETNVTFPSCMVDRITPRSPKNLANEISEKFKINEKSSVMAEPFIQWVIEDKFIDERPKLEKVGVEFVTNIIPYEEAKIRILNAGHLVLSYFGVLNNYKTYDQTIKDEQLKEFFFNFQRLEAIPALGNDIPFDLEEYMLVIFNRFNNENIADKHERLVMDGSSKFPLFVLPTIQRCFDLKKIPNHCIDAIASWY

SEQ ID NO: 82104 - protein, 172 aa, Unknown
  Bacterial polypetide isolated from the Sargasso Sea
MDFFNLTGKTALVTGGNGGLGLGMAQGLANYGCEVILVGRNKKKLTDSVALINENHQGKAHQLLADVNLYEDLERIVYEGIKITGTIDILVNNAGISIRKQPQDLSDDDWDQVLNTNLKSVFRLSKLMYSHFETIGHGKIINIGSMYSIFGSDWVVPYSASKGAVIQLTKSL

SEQ ID NO: 82105 - protein, 279 aa, Unknown
  Bacterial polypetide isolated from the Sargasso Sea
AILFKRFADIDSIDLEIDSSNAKEIINCIASLSKSFGGINLEDIAAPDCFIIEQKLREKLDIPIFHDDQHGTAIITLAALINALDISKKSIKKIKVVVNGAGASAIACTNLFKSSGVPSENIIMIDRKGVLFRGRDNLDQWKSAHAIDTKLRTLKEAIKGADVFLGLSTKNVLTKEMVKSMAKKPIIFACANPDPEINPEDVNEVRSDAIVATGRSDYPNQVNNLIGFPYIFRGALDVRAKTINEEMKTAAAYSIAELAREYVPDEVVAAMGGERPNLW

SEQ ID NO: 82106 - protein, 180 aa, Unknown
  Bacterial polypetide isolated from the Sargasso Sea
GATIELPSLRECVDDILILSEHFLDLLEKEGGPKRKLGIKAQDLFRAYSWPGNVRQLQNVVKRLGLTAREYEISLTEVEQSLENQPDSNGSFGNAGTEKMANDIERHLRRYFDLHGNILPPVGLYNRILKELEIPLIAVSLEATGGNQAKCADLLGINRNTLRKKISDLEIKVHKRRKLM

SEQ ID NO: 82107 - protein, 47 aa, Unknown
  Bacterial polypetide isolated from the Sargasso Sea
MKTLTFENGDTLPMLGLGTWKSAPGEVYNAVRSAIEMGYRHIDCAHI

SEQ ID NO: 82108 - protein, 318 aa, Unknown
  Bacterial polypetide isolated from the Sargasso Sea
MLRVWEKIQIIFACANPDPEITPEEVEEVRDDAIVATGRSDYPNQVNNLLGFPYIFRGALDVRAKTINDEMKIAAANAIAFLARERVPDEVVAAMGGDRPKYGKDYIIPSTFDPRLINVIPVAVAKAAIKTGVARKKIDNFDLYSDQLKQRLDPSVTIMQGINSQIKKNQKRVVFADGEDENTLKAAIAFKNSGLGIPILVAKDKIVKQRLKEIGYGENFDIEIINSTKKKLREKYSKYLFEKLHRSQGLLKRDCDRLVRNDRVIWGSCMVACSDADAMVTGNTRRYGQSLQKITKVVPPRPGEIMFGLNMVVNKGRT

SEQ ID NO: 82109 - protein, 232 aa, Unknown
  Bacterial polypetide isolated from the Sargasso Sea
MAQQRCCNLCSTLFPPIIRNSFGETPMLKGKTALVTGSTSGIGLGIAKALARQGANIVLNGFGDVDGPRAEVLAAGEAAGAQVAYHGADMSRVADIEDMMKYSASQFGRVDILVNNAGIQHVANVENFPVERWDSIIAINLTSAFHTSRLALPAMKSANWGRIINVASVHGLVGSAQKSAYVAAKHGIVGLTKVTALENATTGVTCNAICPGWVLTPLVQKQVDAKAAEHGI

SEQ ID NO: 82110 - protein, 300 aa, Unknown
  Bacterial polypetide isolated from the Sargasso Sea
IDSIDLEIDSSNANEIINCIASLSKSFGGINLEDIAAPDCFVIEQKLREKLDIPIFHDDQHGTAIITLAALINALDISKKSIKDIKVVVNGAGASAIACTNLFKSSGVPNKNIIMIDRKGILYRGRDNLDQWKSAHAVDTKLRTLKEAIKGADVFLGLSTKDVLTKDMVKSMAKNPIIFACANPDPEISPEDVSEVREDAIVATGRSDYPNQVNNLIGFPYIFRGALDVRAKTINEEMKTAAAHAIAKLAREYVPDEVVAAMGGERPIYGKEYIIPSTFDPRLISVIPVAVAKAAIKSGV

SEQ ID NO: 82111 - protein, 65 aa, Unknown
  Bacterial polypetide isolated from the Sargasso Sea
MGKNGLDCLVNNAGINISGPMEYVESNEVRKVFEVNVMGPLNCSQSFLPMLKKSTSATIINISSM

SEQ ID NO: 82112 - protein, 76 aa, Unknown
  Bacterial polypetide isolated from the Sargasso Sea
MRKKIALVGAGNIGGTLAHIIGLKEIADVALIDVVEGIPKGKALDLSQSSSIESFNIQFKGSANFKDMNNSDVVIV

SEQ ID NO: 82113 - protein, 87 aa, Unknown
  Bacterial polypetide isolated from the Sargasso Sea
MKSILVTGSSSGIGAAICEHFSQIGWKVFGSVRNQYDGDKLTDICGENFIPLIFDVTDINAIKEAANLVESHLGKNGLNCLVNNAGI

SEQ ID NO: 82114 - protein, 88 aa, Unknown
  Bacterial polypetide isolated from the Sargasso Sea
MYLNKYNLKNKVALVTGAGKGLGKACAVALAEAGANLIIVSRTKKDLNQVSKIIKRFKVKCKSYVCDVTNYNEIKGIINKQGRIDILI

SEQ ID NO: 82115 - protein, 121 aa, Unknown
  Bacterial polypetide isolated from the Sargasso Sea
MPEPYPERDVAGRVVLITGASRGLGHYVASQLASRGARVIAVARTLEPPWVEALTAAASVGGSVDAVACDLTSVDAVRSLFQSTLPALGVSKIDVLVNNAAIMPHIFDDPLSTRRARPFII

SEQ ID NO: 82116 - protein, 98 aa, Unknown
  Bacterial polypetide isolated from the Sargasso Sea
TLEDVLKGADIAFGLSVKGAFTNEMMLSMNEKPIVFAMANPDPEISPDELRKIRPDAIIATGRSDYPNQVNNVLGFPYIFRGALDVRASAINIDMKIA

SEQ ID NO: 82117 - protein, 298 aa, Unknown
  Bacterial polypetide isolated from the Sargasso Sea
FGPIALPGVVKKSMVKKMAKNPIIFACANPDPEIKPEDIEEVRNDAIIATGRSDYPNQVNNLIGFPYIFRGALDVRAKTINEEMKVAAANAIASLAREFVPDEVAAAMGGERPNYGKEYIIPSTFDPRLISVIPVAVAKAAIKSGVARKKIENFDQYSEQLKQRLDPSVTIMQGINNQIKKTNKKVVFADGEDENTLKAAIAFKNSGLGTPILVAKEKVVKEKLREIGYGENFDIEIVNSTLSDKRKKYVNYLFKKLQRKEGLLERDCDKMVRNDRVIWGSCMVACGDADAMVTGNSR

SEQ ID NO: 82118 - protein, 245 aa, Unknown
  Bacterial polypetide isolated from the Sargasso Sea
MINLENKNIILTGATGGIGNSIVDTLSSLKAKIIVTGTNENKLEELKNKYKNIISLKQDISKHNELESFIEKCNTELGDKIDILINNAGITKDNLTIRMNKEDWEKVINVNLTSTFLLSKYVIKKMLKKKFGKIINITSVVAHTGNLGQANYTASKGGVSAMSKSLSLEYAKKNIMINCIAPGFIETAMTEKINNEYKNQLKSKIPMDRFGTPQDIANCAAFLCSDLSNYITGETIHVNGGMYFS

SEQ ID NO: 82119 - protein, 315 aa, Unknown
  Bacterial polypetide isolated from the Sargasso Sea
SPGVAAPVKEIYKNPDLAYEYTTKGNLVAVISNGSAILGLGNLGAIASKPVMEGKAVLFKRFADIDAIDLEIDTKDPNEIIKSIKNFAISFGGINLEDIAAPECFIIEENLKEILDIPVFHDDQHGTAIITSAALINSIHITKKKISKIKVVVNGAGASAMACSNLFIKLGVKKDNLTMIDSKGVISTIRKDLNKWKLKYAKKTKDKDLYDALKNADVFLGLSSAGILKKEMIKRMAKNPIIFACANPDPEILPEEAYKVRKDAILATGRSDYANQVNNLIGFPYIFRGALDTRAKTINEEMKISAAYAIAKLAR

SEQ ID NO: 82120 - protein, 80 aa, Unknown
  Bacterial polypetide isolated from the Sargasso Sea
MRKISLIGAGQIGGTLAHLIGLKELVNEVVMFDVASGIAKGKALDIAQSSSVDGFNVNFSGTDNYEDIKNSDVIIITAGV

SEQ ID NO: 82121 - protein, 193 aa, Unknown
  Bacterial polypetide isolated from the Sargasso Sea
MLLKHKTSIITGCNRGIGLHILETFVQNGANVFACYRKKSDQIIDNCKNLSKKFGVKVYPIFFDLKNNDELKKAFQEISENQENIDILVNNAGIIHTSLFQMTKIENFKEIFDVNFFSYIDFTQRISKLMTKRKSGSIINISSSAAHEANIGRSAYASSKSSIEVLSKVISRELGRSNVRVNSIAPGLTETDM

SEQ ID NO: 82122 - protein, 169 aa, Unknown
  Bacterial polypetide isolated from the Sargasso Sea
MSNKYKTLFDLTDKVAIVTGSSRGIGASIAEAFAEFGASVVLSSRTKESVDEIAANIKKNGFKAEAVECHVGEEEQLKNLVETTIKTYGKIDILVNNAGINPVFDRLENADDKLFNKIIDINVKAAFKLSNMVMKYMKENNAGSIINISSVEGHKPDKDLGVYSISKAA

SEQ ID NO: 82123 - protein, 214 aa, Unknown
  Bacterial polypetide isolated from the Sargasso Sea
YAVTRNINDLKKLKKRKNLFLFYGDITKKEIIENIFNLAKKNKHVINCLVNNAGIRQRKSFDFLTENDLKFIFENNYFSVFNLTKKFVKQFKFKKNFGSIVNISSIVGELGFKELSGYAATKSAINGFTKSLSDELPKKKIRVNSIAPGFIKSSYYNNFKKNKKSLYKWTLSRIPIAKWGENADVADLTIFLLSENSKYINGQIIKVDGGWSST

SEQ ID NO: 82124 - protein, 287 aa, Unknown
  Bacterial polypetide isolated from the Sargasso Sea
CDRKGVIYKGRENLDQWKSKHAVNTKFRTLKEAIKGADVFLGLSAKDALTQGMVKSMAKNPIIFACANPDPEISPEKIEEVRSDSIIATGRSDYPNQVNNLIGFPYIFRGALDVRARTINEEMKVAAAHAIADLAKKRVPDEVASVMGGVRPAYGKDYIIPSTFDPRLISVIPVAVAKAAIKTGVARKKIKDFDLYADQLKNRLDPSVTVMQGINSLIRKKQKKVVFADGEDENNLKAAIAFKNSGLGIPILVAKKELVKKKLKEIGYNENLNIEIVNSTDNEKRNK

SEQ ID NO: 82125 - protein, 310 aa, Unknown
  Bacterial polypetide isolated from the Sargasso Sea
KTNSIIETIKNIAGTFGGINLEDIAAPDCFIIEQKLKEVLNIPIFHDDQHGTAIITTAALINALDVSKKQIQNVKIVINGAGASAQACANLFKSSGVKSENIIMCDSKGVIYKGRENVDQFKSAFASNTKLRTLKEAMKNSDVFLGLSAKDVVSRDMVKSMAKNPIIFACANPDPEIKPEHIQEVRTDAIIATGRSDYPNQVNNLIGFPYIFRGALDVRAKEINEDMKIAAAKAIALLAREDVPDEVVSAYGGDRPKYGKEYIIPSTFDPRLISVIPSAVAKAAINSGVARKEIKDFEAYKDQLTNRLDP

SEQ ID NO: 82126 - protein, 186 aa, Unknown
  Bacterial polypetide isolated from the Sargasso Sea
MINFKNKKILITGATGGIGKELVKRFNSLEGQVLATGTKNEKLNDLKKEFPNISILKFDISEHSKIEEFIENVSSQLSGLDILVNNAGINMDNLSLRMKDEEWKKVIDVNLGSTFLLCKYAIKKMLKNKYGKIVNITSIVGHTGNLGQSNYAASKAGIIGMTKSLAIEYAKKNITLNCVSPGFIQT

SEQ ID NO: 82127 - protein, 169 aa, Unknown
  Bacterial polypetide isolated from the Sargasso Sea
MSESALPSMRVDGQVALVTGAGRGIGRGCALALAEAGAEVIAMSRTEAELNEVVNEIQAAGGTATPVVCDVSDGAAVRQHISEIQTLDILVNNAGILRASSLLDLSEEDLDAMLQINCRGAVLVAQAAIQIMERQGSGVVINMSSTFGVNGRANNSVYSATKHFIEGFT

SEQ ID NO: 82128 - protein, 238 aa, Unknown
  Bacterial polypetide isolated from the Sargasso Sea
MSRLKDKVAIVTGGASNPGLGHSTIHKFAEEGAKIVVTDIDVEGGEKTVSEVKEKGGEAIFIKQDVVSTEDWKNVVDASISEFSKIDILVNNAGIALIGPFEEFSEDQWDQQINVNLKSVFLGCKAVIPEMKKNNSGSIINLSSIAGLVGLQGCAAYNASKGGVRLLTKSIAIEYGPNKIRCNSIHPGFMATNMNDPKKIAERGRDFEAIIETIPLKSMGTAEDIANCALYLASDESS

SEQ ID NO: 82129 - protein, 148 aa, Unknown
  Bacterial polypetide isolated from the Sargasso Sea
MQNNNLKGKIAVITGCNKGIGKAILSEYAKNGVNCISCVRSVSDDFKAFCQNLSEENNVKVSIVKMDLSDNKLVSESVKEIFKISKKIDILVNNAGILFNSLFFMTSDKQLKDLFQINFFSHVFLTQLISREMIKNKKGNIIFSLLLQ

SEQ ID NO: 82130 - protein, 256 aa, Unknown
  Bacterial polypetide isolated from the Sargasso Sea
MSIKGKTALVTGSSRSLGKSIAIALAKNGANVVINHRDSESEAIEVSKEIEDLGVKSLVVQAEVSNKDDVLKMSELVHEKFGGVDILVNNVGTSAMVPFLDMTDEDWHQIIGINLHSFFYCTQTFIRHMVKNQWGRIINITGHASLRGSPFAAHTVAGKGGAVGFTRSIATEFADQGITCNNVAPGHMDTPPRRPYYTQLKEEVGQDWYGGWISKIPMKKLGDPDEFGALCAFLASEDASYITGQMFLVNGGIMYS

SEQ ID NO: 82131 - protein, 227 aa, Unknown
  Bacterial polypetide isolated from the Sargasso Sea
QGVDIILTYQSNAAAAAEVVAEIEWHGRKAVALPLDVGDSQSFNDFSLRVKAALEQTWQRDSFDYLVNNAGIGIHVPMAETSVEHFDTLMNIHVKGPFFLTQALLPLLADNGSIINVSTGLTRFAVPGFGAYPTMKGAVETMTKYWAKELGPRGIRVNVLAPGAIETDFGGGAVQDNPQMNEFLAQQTALGRVGLPEDIGGAISVLLSPAAAWINAQRIEASGGMFL

SEQ ID NO: 82132 - protein, 236 aa, Unknown
  Bacterial polypetide isolated from the Sargasso Sea
GSSGIGAAIATLFAKEGADISFCHFKDDTKANLVMEKINGYGRKCFNQNIDIGKKDNCDDFFQKSLQSIGEPDILVNNAGIIYARPFEEATESEFDETLNVHLKSTFFLTQNCYKIMKKNKFGRIINISSQLVFSGGPNRTDYCAAKGGIFSFTRALSLEAINHNILVNNIAPGVAQTALLDGIDQNVLDQAKEIIPMKRFAQPEEIAPTALLLASEEGSFYCGATLSPNGGEVMV

SEQ ID NO: 82133 - protein, 291 aa, Unknown
  Bacterial polypetide isolated from the Sargasso Sea
AALINALDLVGKKLSDINIVINGAGAAGIACLELLKSMGLPNKNGILCDTKGVIHADRKENINQWKSAHAIKTKKRSLEDALKGADVFFGLSKGNIVSQEMAKSMSEKPIIFAMANPEPEILPEAVKECRPDAIIATGRSDYPNQVNNVLGFPYIFRGALDVRATTINLEMKIAAAKAIAELAKEDVPDEVANAYPGQRPQYGPDYIIPSPFDPRLISKVPPAVAKAAMETGVARKAIVDMDQYASDLSARLNPSEGLLQKIFQEVKENPKRVIFTEGEEEDMIRSAAIFL

SEQ ID NO: 82134 - protein, 244 aa, Unknown
  Bacterial polypetide isolated from the Sargasso Sea
LGSKKDSVIIISKIWPEPDLALKDYQRALDNSLKALGRDSVDLYLMHWPGNYFNTREKSARLVENMLSLKQSGKAKTIGLSNFKAGDLELLGSNIKKFSLNQIPYSLLDRGYEGKTLDLCKKNSMEYMAFSPTAQGLLARPMKENDLKMPTRKMHHLFQPSTYPAAKKVWETVRNIANEIKREPIEVAVAWVLKQENIFTAIVGSRNPEQVEEFASAADLELSSDQLSRLTESSNTFPAVKARK

SEQ ID NO: 82135 - protein, 38 aa, Unknown
  Bacterial polypetide isolated from the Sargasso Sea
MRKKLALIGSGNIGGTLAHLICLKELGDVVMLDVADGH

SEQ ID NO: 82136 - protein, 128 aa, Unknown
  Bacterial polypetide isolated from the Sargasso Sea
MTRLRRAMDAFRAIADPLERYVYLRTLQRGDTETFYRALISRPLELMPFVYTPTVGEACERYHELPTPVNGVYVTADDAGAVGAKLRRHWKEEMAWLSRGVGGRVGGGEGGGRESRGRARGGGGGDGR

SEQ ID NO: 82137 - protein, 222 aa, Unknown
  Bacterial polypetide isolated from the Sargasso Sea
DKLYASNAKILATGTNQNKLDNIKQNYENIITKKFDISNHALIEKFIDECNSLLENKIDVLINNAGITSDNLSIRMKDEEWNNVLNLNLTSTFMITKYVIKKMLKNKKGKIINITSIVGHTGNVGQVNYSASKAGLIGMSKSLALEYGKKNIKINCVSPGFIKSEMTDKISEDYKKIMQDKISLGRFGKPDDVANVVAFLSSELSDYITGETIHVNGGMYFS

SEQ ID NO: 82138 - protein, 107 aa, Unknown
  Bacterial polypetide isolated from the Sargasso Sea
MDVRAAVAHEVGKPLTIETVQLEGPKEGEILVEIKSTGVCHTDAFTLSGDDPEGIFPAILGHEGAGVVVDIGKNVTSLTKGDHVIPLYIPECRQCKSCLSGKTNLCT

SEQ ID NO: 82139 - protein, 194 aa, Unknown
  Bacterial polypetide isolated from the Sargasso Sea
DNHVQVDLSNPNNTLEAIHEVKKRLNGRLHALVNNAGISPKGENGERLDTLGTDLSIWGKVFHVNFFASVILARGLKEELLKAQGAIVNVTSIAGSRVHPFAGAAYATSKAALGALTREMSKDFGPLGVRVNAIAPGEVKTAILSEGTDKIVADIPMKRLGLPEEVADTIFYLCSQEASYVSGAEIEINGGQHV

SEQ ID NO: 82140 - protein, 313 aa, Unknown
  Bacterial polypetide isolated from the Sargasso Sea
DVKIVINGAGALALACANLFQSIGVKTGNIIMLDRKGVIYKGRDNVDQFKSAYAVETKLRTLKDAIKGADVFLGLSAKNVLDKDMVKSMAKNPIIFACANPDPEIKPELVDEVRSDAIVATGRSDYPNQVNNLIGFPYIFRGALDVRAKEINEEMKIAAAKAIATLAREEVPDEVVNAYGGERPHYGKEYIIPSTFDPRLISRIPAAVAQAAMDSGVARKKIGDIEAYKDQLTNRLDPSMSIMQGINAQVKKRPKTVVFAEGEDRNMLKAAVAYKNSRLGNAIVIGNEKRVSEQLKRIGLDENYKIKIVNSTD

SEQ ID NO: 82141 - protein, 91 aa, Unknown
  Bacterial polypetide isolated from the Sargasso Sea
MVENQKVIITAGASGIGLETLKLFLSAGAKVAICDIDHSALDTVQKQFPGVFINHCDVSDAIQSENFIRNAATFLGGIDTLVNNAGIGGPT

SEQ ID NO: 82142 - protein, 176 aa, Unknown
  Bacterial polypetide isolated from the Sargasso Sea
VKYVNDEMENKIDVLINNAGITNDNLSIRMKEEEWKRVIDINLTSTFLISKNIIKQMLKNKKGKIINITSVVGHTGNIGQANYTASKAGIVAMSKSFALEYGKKNIKVNCVSPGFITTEMTNKIDQNYKEILKSRIPLDRFGDPKDVANTVLFLCSNLSEYITGETIHVNGGMYFS

SEQ ID NO: 82143 - protein, 109 aa, Unknown
  Bacterial polypetide isolated from the Sargasso Sea
MAGRLEGKVALVTGGASGIGAETSRIYAREGAKIAIADINDNAGHAVAQEIGDAAFYAHHDTRNEDAWQAIVKQVVDTFGRLDILVNAAGVSGRRPDGTSAPNLEEQDL

SEQ ID NO: 82144 - protein, 87 aa, Unknown
  Bacterial polypetide isolated from the Sargasso Sea
MFLKKQNLKNKIALVTGAGKGIGRACAIALAEAGASLIMVSRTKKDLDQVSKIIKKFKSKCKSYVCDVTRYSEIKSVIDSQKRIDIL

SEQ ID NO: 82145 - protein, 229 aa, Unknown
  Bacterial polypetide isolated from the Sargasso Sea
MRLKEKVSIVTGAASGFGKGISEKFSKEGAKVILADINKDLLETVSKKLNQDFFHTDVASSSSMQQLSEYVIKKYGSIDIMVNNAGITHLPKPLEEVGEEEFDKVFAVNSKSVFFCGKFFVPHMKKKKQGSILNIASTAGISPRPHLNWYNASKGWMITATKAMAVELAPFNVRVNSLAPVAGETPLLKSFLGEDTHERRKAFLSTIPIGRFSTSKDLGNAACFLCSDE

SEQ ID NO: 82146 - protein, 315 aa, Unknown
  Bacterial polypetide isolated from the Sargasso Sea
GYSNNTNSIIETIKNISGTFGGINLEDIAAPDCFIIEQKLKEVLDIPIFHDDQHGTAIITTAALINALDVSKKKINNVKVVINGAGASAQACTNLFKSSGVKSENIIMCDSKGVIYKGRKNIDQFKSAFAVSTKLRTLEEAMKNADVFLGLSAKDVVSKDMVKSMAKNPIIFACANPDPEIKPEIIEEVRSDAIIATGRSDYPNQVNNLIGFPYIFRGALDVRAREINEEMKVAAAKAIALLARDDVPDEVVSAYGGDRPKYGKNYIIPSTFDPRLISVIPSAVAKAAIKSGVARKEIKDFDNYKDELTNRLDPS

SEQ ID NO: 82147 - protein, 313 aa, Unknown
  Bacterial polypetide isolated from the Sargasso Sea
MVFHDDQHGTAIITTAALLNALDISRKKVDKIKIVVNGAGASAMACANLFKKSGVPQKNITMIDRQGVIFRGRENLNQWKSSHAIETKDRDLNHAIKNADVFLGLSAKGALTKDMVKKMAKNPIIFACANPDPEITPEEIEEVRDDAIIATGRSDYPNQVNNLIGFPYIFRGALDVRSKTINEEMKVAAANAIANLAKEDVPDEVVAAMGGERPHYGKDYIIPSTFDPRLISVIPAAVAQAAIDTGVARIKINDFEIYKDQLKQRLDPTVTIMQGINSYIKKKPKKVVFADGEDENTLKAAIAFKNSKLGIPI

SEQ ID NO: 82148 - protein, 104 aa, Unknown
  Bacterial polypetide isolated from the Sargasso Sea
KASFVEQCLDKRQGPVIAATDYMKLYADQIRQWVPAPYKVLGTDGFGRSDSRRKLRQFFEVDRHWVAYTALSALVEQGKLKPKVLTDALKAFGIDPAKTNPLDC

SEQ ID NO: 82149 - protein, 208 aa, Unknown
  Bacterial polypetide isolated from the Sargasso Sea
MNKYNFSKRIAIVTGGAQGFGLAITKRIIQSGGKVIVWDIDKEAIEKAQKEINSDDFNFKIVDVTNFDIVKSSIKEIEEQFGKIDIFVNNAGITGMNAKVWDYPIDEWKKVIELNLNSTFYCCKAIVPHMVKNNYGRIVNIASIAGKEGNPNASAYSTSKAGVIGLTKSLGKELADKNIAVNCITPAAAKTRIFDQMTEEHINYMLSK

SEQ ID NO: 82150 - protein, 174 aa, Unknown
  Bacterial polypetide isolated from the Sargasso Sea
MISTLEKEITFRFLKARKKDGFLNVISIFSFIGISLGVAILIIVMSVMNGFRTELISKIVGFNAHAVVKPYNKAIVAISDKDLYKSVFSNDGEAVIFYENSTKGVFLKGYLEKDFKELEITNNEKFFGSKNLSENTISIGRDLSNTLGLDIGDEVSITSPSGIQTLIGSLPKQT

SEQ ID NO: 82151 - protein, 265 aa, Unknown
  Bacterial polypetide isolated from the Sargasso Sea
DKAVKKIGLSRVALITGEEKILPKEASYFFCTVESMPNNISVDCVIIDEIQLAADYERGHIFTNKLLSLKGNFQTIFLGSLNIEYILKKIYPNIIIQKKNRFSQLTFLRKQNFSKLEPRSAIIAFNINKVYEIAENIRTHKGGTAIVLGSLSPRTRNAQVEVYENKNVDYLVATDAIGMGLNLNINHVSFSSLEKFDGRYNRNLFPNEIGQIAGRAGRYKQDGTFSYTKEAGKLDSLVIQQIENHNFDRIQKIYWRNSDLNFDSI

SEQ ID NO: 82152 - protein, 104 aa, Unknown
  Bacterial polypetide isolated from the Sargasso Sea
MSASKVIIVTGASQGIGAATVDAFRARGHRVVATSRSIGPSNDPDLVTVAGDIGDAAVARRVVDAAIERFGRVDTLVNNAGIFIAKPFTQYTADDYAQITNVNL

SEQ ID NO: 82153 - protein, 91 aa, Unknown
  Bacterial polypetide isolated from the Sargasso Sea
MKDINGKNIIVTGASGGIGNSIIEKLNQAGANILASGTRIEKLEELKGKYENIKTLKFDISKNDKIEEFIENATKELGGSLDCIVNNAGIT

SEQ ID NO: 82154 - protein, 167 aa, Unknown
  Bacterial polypetide isolated from the Sargasso Sea
MELKDKVIIITGAGQGLGRQFALDCAAKGMKVALADIDTDAMEKTRKECESNGIEARGYELNVTIEAEVEAVYSQVVSDFGTLDATVNNAGILRDSLLVKEKDGEIRKFPLSKWQEVIDTNLTGVFLCGREAAAQFVGLNKSGVIINIASVARSGNFGQSNYSAAKA

SEQ ID NO: 82155 - protein, 206 aa, Unknown
  Bacterial polypetide isolated from the Sargasso Sea
MNLKNKKILITGATGGIGNCLVKKFYDLGSNIIATGTNEQKLEKIKKDFSGVHTEKFKLDQHNKIEEFIDKIDKKLEGLDILVNNAGINLDNLSIRLTEENWKKVLDVNLTSTFMMCKYAIKKMLKKKYGKIINITSIVGHTGNLGQSNYAASKAGIVAFSKSLAIEYARKNININCVSPGFIKTDMTDKINEDFKKSLISKIPSG

SEQ ID NO: 82156 - protein, 268 aa, Unknown
  Bacterial polypetide isolated from the Sargasso Sea
VLEVRDDAIIATGRSDYPNQVNNLIGFPYIFRGALDVRSKTINEEMKVAAANAIAALAREDVPDEVVAAMGGDRPHYGKEYIIPSTFDPRLISVIPAAVAKAAMDSGVARKKIKDFEIYKEQLKQRLDPSVTIMQGINSQIKKTKKKIVFADGEDENTLKAAIAFKNSGLGIPILVAKKDIIKKRLKEIGYSENLDIEITNSTDKNKREKYSSFLFKKLQREQGLLERDCDRLVRNDRVIWASCMVSCGDADGAVTGNTRRYGASLEK

SEQ ID NO: 82157 - protein, 289 aa, Unknown
  Bacterial polypetide isolated from the Sargasso Sea
NGTAVLGLGNIGPLASKPVMEGKSVLFKKFADVDGIDLEINTEEIDKFVDTVSLLEPSFGGINLEDIKAPDCFIIEDKLREKMNIPVFHDDQHGTAIITIAGIINALDLTNRKISNTKFVVNGAGAASIACVELLKAIGAKNNHVILIDRQGVIFQGRKENMNQWKSGHAVNTKLRTLEDALNDADVFLGLSVKGAVTKKMVKSMADNPIIFAMANPIPEIMPDEIKSVRGDAIIATGRSDFPNQVNNVLGFPYIFRGALDVRATKINDKMKIAAANAIAELARQDVPD

SEQ ID NO: 82158 - protein, 276 aa, Unknown
  Bacterial polypetide isolated from the Sargasso Sea
LGLSAKGALTKDMVKKMAKNPIIFACANPDPEITPEEIEEVRDDAIIATGRSDYPNQVNNLIGFPYIFRGALDVRAKTINEEMKVAAANAIANLAKEDVPDEVVAAMGGERPHYGKEYIIPSTFDPRLISVIPAAVALAAIKTGVARIKIEDFETYKDQLKQRLDPTVTILQGVNGYIKKKQKKVVFADGEDENTLKAAIAFKNSKLGIPILVGKEELIKDQIKKIGYNENFDIEIINSKDADKREKYVKYLFKKLQREKGMLERDCDRLVRNDRV

SEQ ID NO: 82159 - protein, 290 aa, Unknown
  Bacterial polypetide isolated from the Sargasso Sea
PLANQRDLALAYSPGVAVACKAIQENAEEASKLTGRQNLVAVITNGTAVLGLGNIGALASKPVMEGKAVLFKKFAGINVFDLELNENNPEKLVDIICALEPTFGAINLEDIKSPDCFMIEKLCQQRMKIPVFHDDQHGTAIVVGAAVKNWLRLVERKLSDLKIVSTGGGAAGIACLDLLVKMGAKPEQIYLVDHLGLVYDGRKEAMNPHKAAFSKKTAARCLDDIMDGTDIFLGLSVPDILKADMVAKMNPKPLILALANPDPEIFPEDAQTIRPDAIIATGRSDYPNQV

SEQ ID NO: 82160 - protein, 74 aa, Unknown
  Bacterial polypetide isolated from the Sargasso Sea
MSKISLIGAGQIGGTLAHLIGIKELVNEVVLFDVASGVAKGKALDIAQSSSVDGFDVKFSGTDDYKDIKGSDGI

SEQ ID NO: 82161 - protein, 170 aa, Unknown
  Bacterial polypetide isolated from the Sargasso Sea
RILECYESISVLVNNAGIGSSKGLLEITESEWDRTIDVNLKGCFNWSRAVVPSMQDRGSGRIVNIASIAAYSGGSVSKLAYAASKAGILGMTRSLAKELGPSITVNAICPGTIKTELTAKAYANKGSEGISLGRFGTPEDIGEVVAFLASSEPNFITGQAITVDGLQSIF

SEQ ID NO: 82162 - protein, 210 aa, Unknown
  Bacterial polypetide isolated from the Sargasso Sea
WGRIDILVNNAGILRDKSFHKVTLEDFNLVMDVHFQGSLNCTHTIFPIMREQEYGRIVFTSSASGVFGNFGQTNYGSAKMAMVGLMNTLKIEGQNKNVFTNSITPVAYTRMTEGLIPEDFGKNLKSEFVTPAVIYLSSENAPNGAIMAAGAGVFSRIFIHETMGVSLGMGEDMTPENIEANWDKISDMTDARALQNGGEQTLKFFELINK

SEQ ID NO: 82163 - protein, 116 aa, Unknown
  Bacterial polypetide isolated from the Sargasso Sea
MNPEPIVFAMANPEPEIHPEEADGLAAVMATGRSDYPNQINNVLAFPGIFRGALDAGATDVTENMKLAAAKAIADSVSPADLRPAFVVPSVFDKSVPFRVADAVAAAAIADGVCRA

SEQ ID NO: 82164 - protein, 325 aa, Unknown
  Bacterial polypetide isolated from the Sargasso Sea
RDLSLAYSPGVAAPVKEIAKNPDLAYDYTSKGNLVAVISNGSAILGLGNLGALASKPVMEGKSVLFKRFADIDSIDIEINNNNPDSVIETIKNIGGTFGGINLEDIAAPDCFIIEQKLKELLDIPIFHDDQHGTAIITTAALINALDISKKEIDKVKVVINGAGASAQACANLFKSSGVKNQNIIMCDSKGVIYKGRKNIDQFKSAHAIDTDLRKLDEAMNNADVFLGLSAKNVVTKDMVKSMAKNPIIFACANPDPEIKPELIQEARSDAIIATGRSDYPNQVNNLIGFPYIFRGALDVRAREINEDMKVAAANAIALLARENV

SEQ ID NO: 82165 - protein, 318 aa, Unknown
  Bacterial polypetide isolated from the Sargasso Sea
RHLGGKIEMQSKTLIKTRNDMSIIYTPGVARISNAIKQQPESVWNLTSKGNTVAVVTDGSAVLGLGDIGASASLPVMEGKAQLLKELADIDAWPIAINSKDPEEIINTVKLISPGFGGINLEDISSPRCFYIEERLQKELDIPVFHDDQHGTAVVVLAGLLNSTKVVNKKIKKLKVVIAGVGAAGISTTKLLMKSGIKDIVGVDQEGIISSSSNYSDNPNWEWFAKHTNPRDLSGNLDEAMKGADVFIGLSAPDVISTKHLKSMSENPIVFAMANPEPEIWPEEALKYVTVMATGRSDYPNQVNNALCFPGMLGEYKC

SEQ ID NO: 82166 - protein, 301 aa, Unknown
  Bacterial polypetide isolated from the Sargasso Sea
HGTAIITTAALINAVDIAKKNLKKIKIVINGAGAAAMACAKLFRSTGIPKNNIKMLDTKGVINKNRKDINSWKKEFAVETKDENLDDAMKNADVFLGLSAAGVVKKSMVKKMAKNPIIFACANPDPEIKPEDIEEVRNDAIIATGRSDYPNQVNNLIGFPYIFRGALDVRAKTINEEMKVAAANAIASLAREFVPDEVAAAMGGERPNYGKEYIIPSTFDPRLISVIPVAVAKAAIKSGVARKKIENFDQYSEQLKQRLDPSVTIMQGINNQIKKTNKKVVFADGEDENTLKAAIAFKNSD

SEQ ID NO: 82167 - protein, 267 aa, Unknown
  Bacterial polypetide isolated from the Sargasso Sea
MAVVCVIPGDDAAPEAMNAAVQVLNELTPEIDLVELPMDEGSGGSLSDESKNTIDGADATLFGATSIRNGAIAYLRWGKKTYANIRPITYMSGAKSPLSNPNDIDFVIVRENTEDLYVAIEGDLETIRPLQLQPYRGSGIPESGDGKFAVKVITEEATSRIAHYAFSFARERKQDGYPGRVTMSCKYNTLPTSDGFFRQIVQGVAKEYPDIEYRDFIIDDFARRIVVEPQELDVVLLPNMYGDILSDEASGLIGGLGIPPSGCYGDD

SEQ ID NO: 82168 - protein, 118 aa, Unknown
  Bacterial polypetide isolated from the Sargasso Sea
MGILDGKVVIVTGSARGMGAAEALDAAENGAEVIVTDILDEQGNETAVEIGATYRSLDVTSKENWSEVVSSVLDEHGRIDGLVNNAGIYTSQDIFSGSADTFQKVIEVNQFGTYLGMA

SEQ ID NO: 82169 - protein, 82 aa, Unknown
  Bacterial polypetide isolated from the Sargasso Sea
MKKKISLIGAGQIGGTLAHLIGTKELVDEVVLFDVASGIAKGKALDIAQSSSVDGFNVRLSGTDDYKDIKDSNVIIITARCP

SEQ ID NO: 82170 - protein, 221 aa, Unknown
  Bacterial polypetide isolated from the Sargasso Sea
MLITGASRGIGAAIARLAGRKGWDVAINYLQSKEKAEAVADEIRAAGTNAITVRADVGLETDIIRMFHEVDAGLGTLDAVVNNAAVDYDTLIAEFSLGQFRRTFEINVIGPALIAKEAVNRMSTRLGGAGGVIVNVSSISSRTGGWPRDVPYAASKGALDSFTLGLAKEVGPEGIRVVSVRPGATRTEIWDGNEVDLNAATEAVIREAPLRRMGEPEEIAS

SEQ ID NO: 82171 - protein, 308 aa, Unknown
  Bacterial polypetide isolated from the Sargasso Sea
DPEITPEEIEEVRDDAIIATGRSDYPNQVNNLIGFPYIFRGALDVRSKTINEEMKVAAANAIVNLAKEDVPDEVVAAMGGERPQYGKDYIIPSTFDPRLISVIPLAVAKAAIDTGVARKKIEDFDLYKDQLKQRLDPTVTIMQGVHNYIKKKQKKVVFADGEDENTLKAAIAFKNSKLGIPVLVGKEELIKNQIKKIGYNENFDIEIVNSKNKEKREKYVKHLFKKLQRQKGMLEWDCDRLIRNDRVIWSSCMVACGDADAMVTGNTRRYSASLEKIMQVVEPRTGEIMFGLNLIVNRGKTIFLCDTS

SEQ ID NO: 82172 - protein, 152 aa, Unknown
  Bacterial polypetide isolated from the Sargasso Sea
NVNINEIEALTLGSHGETMVPVPSQCKVAGKSLNKLLGDDEISELVQKTSDGGAEIVGLLKTGSAYFAPSSAAATMVKSIISDSNEIMPACSWVNGEFGINDVFLGVPTMLGANGVTEVVEIDLEESELNALKSASDAVKSKVEELNSILSQ

SEQ ID NO: 82173 - protein, 136 aa, Unknown
  Bacterial polypetide isolated from the Sargasso Sea
MKNLFDLNGKTALVTGASSGLGRHFALTLSRSGATVVVAARRDDKVAEVASEIVASGGRAIGVALDVTDRESITDVFERVEREVGTVTILVNNAGIAKRDLAIEVTEDHWQEVIATNLTGVWVVAQEAARRMIKAQ

SEQ ID NO: 82174 - protein, 298 aa, Unknown
  Bacterial polypetide isolated from the Sargasso Sea
KELLDIPIFHDDQHGTAIITTAALINALDISKKKIDNVKVVINGAGASAQACANLFKSSGVKSENIIMCDSKGVIFKGRENIDQFKSAFAIDTKFRTLNDAIKGADVFLGLSAKDVVSKEMVKSMAKNPIIFACANPDPEIKPELINEVRSDAIVATGRSDYPNQVNNLIGFPYIFRGALDVRAKEINEEMKVAAANAIALLARENVPDEVVSAYGGDRPRYGKDYIIPSTFDPRLISVIPSAVAQAAMKSGVARKKIPDLELYKDQLTNRLDPTMSLMQGINAKVRKNPKRVIFAEG

SEQ ID NO: 82175 - protein, 143 aa, Unknown
  Bacterial polypetide isolated from the Sargasso Sea
MRLKGKISIITGAASGFGKGIAKKFSEEGALLILADINNDELKKVSEELKQDLFQVDVSISKSMKDLSEYVIKKYKKIDIMVNNAGITHLPMPLEKVSEEEFDKVFSVNAKSVFFCGKFFVPHMKKLNNGSILNIASTAGLSP

SEQ ID NO: 82176 - protein, 213 aa, Unknown
  Bacterial polypetide isolated from the Sargasso Sea
LEKLISEVNSKRLKTYKCDISDSHDVEKTFRSIKDDFGCLYGLVNNAGINPSRNTILETTYDDWNKTIETNLSGAFRCSKEAISLMVKNGEGSIVNISSIAGISGMEKRFAYSASKAALIGISSSMAMDFAKDNIRVNCICPGYVETPLVSDYIKDLPASEKEILVSSHLLGRLGSVADIASAVSFLISDEASWITGAILPVDGGYTLGKISQ

SEQ ID NO: 82177 - protein, 293 aa, Unknown
  Bacterial polypetide isolated from the Sargasso Sea
HDDQHGTAIITTAALINALDITKKSIDKIKVVVNGAGASAMACANLFKNTGVPQKNITMVDRKGVIYRGRENLNQWKSSHAVETKDRTLSDAINKADVFLGLSAKGALTKEMVKKMAKNPIIFACANPDPEITPEEIEEVRDDAIIATGRSDYPNQVNNLIGFPYIFRGALDVRSKTINEDMKVAAADAIAKLAREDVPDEVVAAMGGERPHYGKDYIIPSTFDPRLISIIPSAVAKAAMDTGVARKKIDNFELYKEQLKQRLDPTVTIMQGINNYIKKNNKKIVFADEKRKY

SEQ ID NO: 82178 - protein, 171 aa, Unknown
  Bacterial polypetide isolated from the Sargasso Sea
MVARSSDQLESVAEQIRDSGGQASVLPADLTKMEEIHKLEELGPFTILVNNAGINRPQSFEDVKENDFDDVLDLNVKSAFFVAQSVARGMIQTGRGGSIINMSSQMGHVGGRNRSVYCATKHAMEGFSKGMALDLAAHKIRVNTVCPTFIETALTKPFMENKEFMQDILSR

SEQ ID NO: 82179 - protein, 305 aa, Unknown
  Bacterial polypetide isolated from the Sargasso Sea
TENADEFINSVKYLGPSFGGINLEDIKAPECFIIEDTLRELMDIPIFHDDQHGTAIISTAALLNALDLSGKKISDAKIVVNGAGAAGIACLELLKAMGMPNNNAILCDTKGVIHSERKENMNQWKSAHAIKTDCRTLEDALVGADIFFGLSVGNIISQKMALSMADNPIIFAMANPEPEITPEDVKECRSDAIIATGRSDYPNQVNNVLGFPYIFRGALDVRATTINLEMKIAAARAIAELAKEDVPDEVANAYPGKRPQYGPNYIIPSPFDPRLISKVPPAVAKAAMDTGVARRAIVDMDQIFQ

SEQ ID NO: 82180 - protein, 114 aa, Unknown
  Bacterial polypetide isolated from the Sargasso Sea
MILNNTTKDKHMSDFIKSKAAIAWGPNQPLSVEEVDVMMPKKGEVMVKITATGVCHTDAFTLSGEDPEGIFPAILGHEGAGVVYAVGEGVTSVEVGDHVIPLLYAECGECKMCT

SEQ ID NO: 82181 - protein, 274 aa, Unknown
  Bacterial polypetide isolated from the Sargasso Sea
VVNGAGASAQACAELFKDFGVPNKNIIMIDKKGVIYKGRPDKIDQWKSRHVVNTKFRTLNEAIKDADMFLGLSVKGALKKEMVKKMSKNPIIFACANPDPEITPEEISKVRDDAIVATGRSDYPNQVNNLLGFPYIFRGALDVRSKTINKEMKIAAAKAIAKLARENVPDEVVAAMGGDRPHYGKDYIIPSTFDPRLISVIPEAIAKAAMSTGVARKKIEDFELYKDQLKQRLDPTVTIMQGINTYIKKNQKKIVFADGEDENTLRAAIAFKNS

SEQ ID NO: 82182 - protein, 210 aa, Unknown
  Bacterial polypetide isolated from the Sargasso Sea
MKSILVTGSSSGIGAAICEHFTQIGWKVFGSVRNQNDGDKLTDTCGENFTPLIFDVTDIYAIKEAAKLVEYHLGKNGLNCLVNNAGINISGPMEYVESNEVRKVFEVNVMGPLNCSQSFLPMLKKSTSATIINISSMAGKIGLPMQGSYCGSKFALEGISESMRRELQIHNIKVVVIGPGAIESSIWDKFEKDEMEEQYKDTEYTSAIKK

SEQ ID NO: 82183 - protein, 84 aa, Unknown
  Bacterial polypetide isolated from the Sargasso Sea
MKKISLIGAGQIGGTLAHLIALKGLANVVLFDVAAGIAKGKALDIAQSSPVNGFNVNLLGTDKYEDTKNSDVIIVTGRSTQENQ

SEQ ID NO: 82184 - protein, 294 aa, Unknown
  Bacterial polypetide isolated from the Sargasso Sea
EKKVIEASGGEVVVAPDSSEETLIALAKDVDVIMTCFAQVTDNVIESAKKCVAIGRFGVGVDNISVKKATELGIPVTYVPDYCMEEVSDHVLALLHTWNRKIALFDKSVKDEGWGHLKLSMRIMRLREKVLGIVGFGRIGQMVAEKASAFGMKIIANDPIISKNEMEKLGVESVSLKHLLSISDFVTLHAPLIPQTHNLISTEELNLMKKDSFLINAARGPLIDEKALYHALKNGTIGGAGLDVMVDTIPEKNHPLLQLDNILVTPHIAFFSQESTLELEERAAQEVVRVYKGQ

SEQ ID NO: 82185 - protein, 99 aa, Unknown
  Bacterial polypetide isolated from the Sargasso Sea
MSKSIIVTGAGSGIGESIARKAGDAGYKVGVLDVNTDAAEQVASSLSNGVALHASTTDPDQVEQALDKFGETPDALVNNAGIVRFGPLIDLSFDDWRSV

SEQ ID NO: 82186 - protein, 297 aa, Unknown
  Bacterial polypetide isolated from the Sargasso Sea
IEISSSKNMTTKRDLALAYSPGVAAPVRAISENPEAAFDYTSKGNLVAVISNGSAILGMGNLGALASKPVMEGKAVLFKRFADIDSIDLEIDSNNTDEIINSIKNFAPSFGGINLEDIAAPDCFIIEEKLKEILDIPVFHDDQHGTAIITTAALINALDICKKKIDEVKIVVNGAGASAMACTNLFKKSGVPQKNITMIDRTGVIYKGREKLNKWKSNHAIETKDRTLDEAIKDADVFLGLSAKGALTKNMVKKMAKNPIIFACANPDPEITPEEIEEVRDDAIIATGRSDYPNQVN

SEQ ID NO: 82187 - protein, 102 aa, Unknown
  Bacterial polypetide isolated from the Sargasso Sea
MTIRFDDKVAIVTGAGGGIGKQHALELAKRGAKVVVNDLGGSVDGSGASDAAEEVVELIKSDGGEAISNGASVTDLEAVKGMVDQTMSKWGRVDILVNNAGI

SEQ ID NO: 82188 - protein, 37 aa, Unknown
  Bacterial polypetide isolated from the Sargasso Sea
MKKKITLIGAGQIGGTLAHLIALKNLTDVVLFDVASG

SEQ ID NO: 82189 - protein, 322 aa, Unknown
  Bacterial polypetide isolated from the Sargasso Sea
KNVLDKDMVKSMAKSPIIFACANPDPEIKPELVDEVRTDAIVATGRSDYPNQVNNLIGFPYIFRGALDVRAKEINEEMKIAAAKAIATLAREEVPDEVVNAYGGERPHYGKEYIIPSTFDPRLISRIPAAVAQAAMESGVARKKILDIETYKDQLTNRLDPSMSIMQGINAQVKKRPKTVVFAEGEDQNMLKAAVAYKNSRLGNPIVIGNEKRVKEQLKEIGLDENYKIKIVNSTDKEKREMYTKKLYAKLQRKGLLERDVDRLIRNDRVIWGSSMVECGDADAMVTGNIRHYAASIESLKKVVEARPGEILFGLNLLITPK

SEQ ID NO: 82190 - protein, 201 aa, Unknown
  Bacterial polypetide isolated from the Sargasso Sea
ELGVVFISHDVTKTEDWISVIDEIKEQSSGLNVLVNNAGIGFMADVEATTEEEWELVHKVDLDSVFLGCKYAIPLMRESGNGSIINISSISGIVAGHNFAAYNSAKAAVRHLTKSVALHCARSTDLVRCNSVHPVFAQTEMMKAFFDNPNDELVSKIERQIPVRKLVTVEDVANSILFLASDESKMITGSELVIDGGLSAQ

SEQ ID NO: 82191 - protein, 244 aa, Unknown
  Bacterial polypetide isolated from the Sargasso Sea
KEFAVDTKDKSLDDAMKNADVFLGLSAAGVVKKSMVRKMAKNPIIFACANPDPEIKPEDIEEVRDDAIIATGRSDYPNQVNNLIGFPYIFRGALDVRAKTINEEMKVAAANAIASLAREFVPDEVAAAMGGERPNYGKEYIIPSTFDPRLISVIPVAVAKAAMKSGVARKKIENFDQYSEQLKQRLDPSVTIMQGINNQIKKTNKKVVFADGEDENTLKAAIAFKNSGLGTPILVAKEKVVKEK

SEQ ID NO: 82192 - protein, 198 aa, Unknown
  Bacterial polypetide isolated from the Sargasso Sea
MLFDISDPKASEAIYKQVRETFGRLDALVNNAGIAIFDPIEKVENGTWRKVMATNLDGVFYLTKALTPMLKETKGTVVNVSSISGLRASTLRVAYGTSKAAVIQLTKQQAVELGEYGIRVNAVAPGPVRTKLAMAVHTKEIIETYHDHIPLNRYGTERELGEVIYFLSSGKASYVTGQIVAVDGGFEAAGVGLPALRR

SEQ ID NO: 82193 - protein, 308 aa, Unknown
  Bacterial polypetide isolated from the Sargasso Sea
DVFLGLSSAGALKKEMIIVMAKNPIIFACANPDPEITPEEIEEVRNDAIVATGRSDYPNQVNNLLGFPYIFRGALDVRAKTINEEMKLAAVHAIASLARERVPDEVAAAMGGERPVYGKNYIIPSTFDPRLINVISIAVAKAAIKSGVARKKIENFDLYSEQLKQRLDPSVTIMQGINNQIKKNQKKVVFADGEDENTLKAAIAFKNGGLGTPIIIAKEKVIKKRLKEIGYSQNFNIEIINSTKKNMREKYVQYIFKKLHRDRGLLERDCDRMIRNDRVVWGSCMVACGDADAMVTGNTRRYGQSLDK

SEQ ID NO: 82194 - protein, 275 aa, Unknown
  Bacterial polypetide isolated from the Sargasso Sea
NCCTGRSDYPNQVNNFIGFPYIFRGALDVRSKTINEEMKVAAANAIAQLAREDVPDEVVAAMGGERPHYGKDYIIPSTFDPRLISVIPAAVAKAAIDSGVARKNIDDFEIYKEQLKQRLDPTVTIMQGINSFIKKNQKRIVFADGEDENTLKAAIAFKNSKLGIPILVGKESKIKEQIKNIGYSENFDIEIVNSKDEEKRKRYVKHLFEKLQREQGLLERDCDRMIRNDRVVWATSMVACGDADGAVTGNTRRFGASFEKIKQVVDVRKGEIMFG

SEQ ID NO: 82195 - protein, 246 aa, Unknown
  Bacterial polypetide isolated from the Sargasso Sea
EIVNSIKNFAVSFGGINLEDIAAPECFIIEENLKKILDIPVFHDDQHGTAIITSAALINSIHITKKIISKIKVVVNGAGASAMACSDLFIKLGVKKQNLTMIDSKGVISLDRKGLNKWKLKYAKKTKDITLSDALKNADVFLGLSSAGILKKEMIKQMAKNPIIFACANPDPEILPEEAYKIRKDAIIATGRSDYANQVNNLIGFPYIFRGALDVRAKTINEEMKISAANAIANLARERVPDEVAA

SEQ ID NO: 82196 - protein, 285 aa, Unknown
  Bacterial polypetide isolated from the Sargasso Sea
LEDAIKGADVFLGLSTKGVLTKAMVKSMSKNPIIFACANPDPEITPEEVNEVRDDVIMATGRSDYPNQVNNLIGFPYIFRGALDVRAKTINEEMKVAAAYAIAELAREYVPDEVVAAMGGERPKYGKEYIIPSTFDPRLISVIPTAVAKAAIKSGVARKKIENFDIYKEQLKQRLDPSTTIMQGVNNQIKKSQKKVVFADGEDENTLKAAIAFKSNGLGIPVLIAKKEIVKEKLKEIGLDENYKIEIINSTDKEKREKYAKLLYKKLQRKEGLLERDCDRLVRND

SEQ ID NO: 82197 - protein, 252 aa, Unknown
  Bacterial polypetide isolated from the Sargasso Sea
RLKDKVAIVTGGASNPGLGHSTIHKFAEEGAKIVVTDIDVEGGEKTVSEVKEKGGEAIFIKQDVVSTEDWKTVVDASISEFGKIDILVNNAGIALIGPFEEFSEDQWDQQINVNLKSVFLGCKAVIPEMKKNNSGSIINLSSIAGLVGLQGCAAYNASKGGVRLLTKSIAIEYGPNKIRCNSIHPGFMATNMNDPKKIAERGRDFEAIIETIPLKSMGTAEDIANCALYLASDESSYVTGSEYVVDGGWTTR

SEQ ID NO: 82198 - protein, 222 aa, Unknown
  Bacterial polypetide isolated from the Sargasso Sea
IDSIDLEIDSQDHNEIINSIKNFAPSLGGINLEDIAAPDCFVIEEKLKEILDIPVFHDDQHGTAIITTAALINALDITKKKIDEVKIVVNGAGASAMACANLFKKSGVPQKNITMVDRTGVIYSGRENLNQWKTAHGIETKHRTLKDAISNADVFLGLSAKGALTKDMVKTMAKNPIIFACANPDPEIKPEEVAEVRNDAIMATGRSDYPNQVNNLIGFPYI

SEQ ID NO: 82199 - protein, 317 aa, Unknown
  Bacterial polypetide isolated from the Sargasso Sea
RSLEYIDSWFGKGSNELPWIVGAAGSIRENLTYFYSAQSTLPSVVVIDKLGYVIDRLNSVNGNWSKLENAVNISDNNGNTKPLRQQYYPSAPYPPCHIKNIDYDDDDINDDIDADIDGDGWLNSDEQTCKTDPIDEKSIPIDTDGDGLCDDWDDWDNDNDSFNNSIDDCPLIAGSSYIPLGCSPDTDGDGVSDAFESVMYGTDAYHWDTDRDGFGDGEEIENGTNPLDSENYPIIEDNDYCIDLDEDNISNDPSEEPQGDPDNDGLANYQENILGTNCTNWDSDGDGLSDSVEINGWDITVFSPCTFSTYSEGEIFL

SEQ ID NO: 82200 - protein, 187 aa, Unknown
  Bacterial polypetide isolated from the Sargasso Sea
MTTTNNLNGQVALITGGSSGIGAGVAKSFSKHGARVIVNYLHENEQAKVIALIKETGGIGEGYRADVSEEAEVNKMINHVIKSYGRLDILVNNAGIVHSAPVESIQTDHWVETFKVHVNGTFFCTRASLPHMYNQNYGRIINTSSQLAYKGAAGFSNYSAAKGAIISFTRSLALEIGERNICVNTVA

SEQ ID NO: 82201 - protein, 59 aa, Unknown
  Bacterial polypetide isolated from the Sargasso Sea
MYLKKYNLKNKVALVTGAGKGLGRACAIALAEAGANLLLISRTKKDLEKVSKIIKKFNV

SEQ ID NO: 82202 - protein, 190 aa, Unknown
  Bacterial polypetide isolated from the Sargasso Sea
MNLENKKIIITGATGGIGNSIVKTLSDSGAKILATGTRLEKLEKLKSKFKNTDILKFDISKGEEIEEFIENATKKLGGGLDCLINNAGITQDNLAIRMNIDEWKKVININLTSTFLLSKFAVKKMLKSKYGKIINITSVVGHTGNLGQANYTASKAGIVAMSKSLAIEYAKKNININCISPRFYKNRDDR

SEQ ID NO: 82203 - protein, 275 aa, Unknown
  Bacterial polypetide isolated from the Sargasso Sea
NLFKSSGVKSENIIMCDSKGVIYKGRKNIDQFKSAFAIDTKLRTLSEAMKNADVFLGLSAKDVVNKEMVESMAKNPIIFACANPDPEIKPELIQEVRDDAIIATGRSDYPNQVNNLIGFPYIFRGALDVRAKAINEEMKVAAANAIALLARENVPDEVVAAYGGDRPRYGKDYIIPSTFDPRLISVIPAAVAQAAMKSGAARKKIQDLELYKDQLSNRLDPSMSIMQGINAKIRKSPKRVIFAEGEDENMLKAAIEFGKNKLGIPILIGAEKRVK

SEQ ID NO: 82204 - protein, 320 aa, Unknown
  Bacterial polypetide isolated from the Sargasso Sea
IDRKGVLYRGRDNLDQWKSAHAINTKLRSLKEAIKGADIFLGLSTKDVLTKDMVKSMAKNPIIFACANPDPEINPEDVHEVRDDAIVATGRSDYPNQVNNLIGFPYIFRGALDVRAKTINEDMKVAAAHAIAKLAREYVPDEVVAAMGGERPIYGKEYIIPSTFDPRLISVIPVAVAKAAIKSGVARKKIENFETYQEQLKQRLDPSTTIMQGVNNQIKKSQKKVVFADGEDENTLKAAIAFKSNGLGIPILIAKKDIVKQKLKEIGLDENYKIEIINSTDKEKREKYSKFLYKNLQRKEGLLERDCDRLVRNDQGNLGN

SEQ ID NO: 82205 - protein, 215 aa, Unknown
  Bacterial polypetide isolated from the Sargasso Sea
YFSISTLAFSEMVRLSLLKFSYQKEIDGELVGPNGAEGFGGIRWIFENNITVLQYTFLIYLVLIIILTCLFLMERSGLGMIFRMIGQDPMLTRVHGLNTVIYKVIAAVIAGFVAGLGGMLYAHSFTYIEPQIFNVMLGVHSLAYGLIGGLGTVFGPLIGVALDIGLLESIRIIQGYRMIVFGGLVAIMLIFMPRGILDENRVYKLKIALRSLLRV

SEQ ID NO: 82206 - protein, 246 aa, Unknown
  Bacterial polypetide isolated from the Sargasso Sea
MRLKEKVSIITGAASGFGKGIAKKFSEEGAKLILADINKDVLEKVSKDMGHDFFPVDVGDSNSMQELSNYVLNKYGTIDIMVNNAGITHLPKPLEDVNEEEFDKVFKVNSKSVFLCGKFFVPHMKKERKGSILNISSTAGLSPRPNLNWYNATKGWMITATKAMAIELAPFNVRVNSLAPVAGETPLLKSFLGEDTVERRNAFLSTIPIGRFSTPKDLGNAACFLCSDEASMITGSILEVDGGRCI

SEQ ID NO: 82207 - protein, 304 aa, Unknown
  Bacterial polypetide isolated from the Sargasso Sea
DDRSTVYDYTSKGNIVAVISNGTAILGLGNLGAHASKPVMEGKSVLFKRFSDIDSIDLEIDTEDAEEFINSVKYLGPSFGGINLEDIKAPECFIIEDSLREIMDIPIFHDDQHGTAIISAAALINAMDLAGKKIDEAKIVVNGAGAAGIACLELLKAMGMPNEHAILCDTKGVIHTERKENMNQWKSAHAVKTKCRTLEDALNGADIFFGLSIGNIISEKMVLSMAEKPIIFAMANPEPEILPEKIKECRDDAIIATGRSDYPNQVNNVLGFPYIFRGALDVRAKTINLEMKIAAAKAIADLAK

SEQ ID NO: 82208 - protein, 255 aa, Unknown
  Bacterial polypetide isolated from the Sargasso Sea
MIDNSDLFTLKGKTALITGSSQGIGLALAKGMYSFGAKIILNGRNKKKLDEVSKKFEKQDHVFKLNFDVTSYKETERSINDFEQKEGQIDILVNNAGIQFRSPLENFPEEEFGKLIQTNIISIFNVSKCVAKFMIKREKGKIINIASVQTSLARPGIAPYTASKGAVGNFTKGMATDWAKYGLQCNAIAPGYFKTPLNEALVQDKNFSKWLETRTPAGRWGEVKELIGACIFLSSNASSFVNGHILYVDGGITAS

SEQ ID NO: 82209 - protein, 109 aa, Unknown
  Bacterial polypetide isolated from the Sargasso Sea
MISKPKISIIGAGNVGASAAYRALELDLADVVLLDIVEGLPQGKALDMTQMLSVTGISSSVIGTNDYSDTKDSDVVIITSGLARKPGMSRDDLISTNTKIIKEVTEQVD

SEQ ID NO: 82210 - protein, 281 aa, Unknown
  Bacterial polypetide isolated from the Sargasso Sea
VVISGAGASALSCAEHYVRLGVRKENMIVCDSGGILTKTRKDAGELNKYKAKFSREIPDGGIGDALVGADVFLGLSKAGIVSGKMVAKMAVTPLIFALANPTPEIMPEEVAAVRNDAIMATGRSDYPNQINNVLGFPYIFRGALDVQADKITEGMKMAATMALAELAKMPVPDDVAAAYGGAQIQFGPDYLIPKPFDARVLIWEASAVAQAAVEEGVVDPEIAKSFDVDSYRHQLEGRLGLTRSIMRGVIDKAGRLRQRIVFTEGDHPTMLKAAAQCIQEG

SEQ ID NO: 82211 - protein, 59 aa, Unknown
  Bacterial polypetide isolated from the Sargasso Sea
MSKKISLIGAGQIGGTLAHLIGLKELVGEVVMFDVASGIAKGKALDIAQSSSVDGFNVK

SEQ ID NO: 82212 - protein, 257 aa, Unknown
  Bacterial polypetide isolated from the Sargasso Sea
IFACANPDPEIKPELIQEVRSDAIIATGRSDYPNQVNNLIGFPYIFRGALDVRAKEINEAMKVAAAKAIALLARENVPDEVVSAYGGDRPRYGKDYIIPSTFDPRLISVIPSAVAEAAMKSGVARKNINDLEIYRDQLTNRLDPTMSLMQGINAKVRKNPKRVIFAEGEDENMLKAAIEFGRNKLGTPILIGAEKRIKEQLNSIGLDENYKIDIVNSTDKEKRERYVKHLYKKLQREGQLERDVDRLVRNDRIAWGA

SEQ ID NO: 82213 - protein, 200 aa, Unknown
  Bacterial polypetide isolated from the Sargasso Sea
KDLNQDFLHTDVANSNSMQQLADYVLKKYGTIDIMVNNAGITHLPKPLEEVSEDEFDKVFAVNSKSVFLCGKFFVPHMKKQKKGSILNISSTAGISPRPNLNWYNATKGWMITATKAMAVELAPFNVRVNSLAPVAGETPLLKSFLGEDTLERRNAFLSTIPIGRFSTPKDLGNAACYLCSDEASMITGSILEVDGGRCI

SEQ ID NO: 82214 - protein, 183 aa, Unknown
  Bacterial polypetide isolated from the Sargasso Sea
MAGTAIITGGSRGIGAATARQAAMAGYDVCINYVTHSKAADRVVAECEALGRKAVAVKADVGNAQDVAELFTACDNALGPVSLLVNNAGIIGKATTVSDLPDDALARTFEVNVYGTIYCAREAIQRMATSKGGRSGVIINVSSVAARLGSPGEYVHYAASKAAVETFTIGLAKEIGGEGIRVN

SEQ ID NO: 82215 - protein, 130 aa, Unknown
  Bacterial polypetide isolated from the Sargasso Sea
MRLKNKIAIITGAASGFGKGIAKKFSEEGAKSILVDINKDLLEKVSKDLNQDFLHTDVANSNSMKQLADYVLKKYESIDIMVNNAGITHLPKPLEEVSEKEFDKTFAVNSKSVFLCGKFFVPHMKKQKKG

SEQ ID NO: 82216 - protein, 287 aa, Unknown
  Bacterial polypetide isolated from the Sargasso Sea
ISNGTAILGLGNLGAIASKPVMEGKAVLFKRFGDIDAIDLEIDSINPEEIINSIKNFANSFGGINLEDIAAPDCFVIEEKLKKILDIPVFHDDQHGTAIITYAALLNALDISKKNIKKVKVVVNGAGASAMACSNLLLKAGVIKSNITMLDSKGVIHKNRKNLNKWKQNYATNTKSRKLSDAIKGADVFLGLSSAGVLTKEDVRSMAANPIIFACANPDPEITPEEVEEVRNDAIVATGRSDYANQVNNLLGFPYIFRGALDVRAKTINDEMKIAAANAIAYLARER

SEQ ID NO: 82217 - protein, 269 aa, Unknown
  Bacterial polypetide isolated from the Sargasso Sea
REIAKNPDAAYDYTTKGNLVAVISNGSAILGMGNLGALASKPVMEGKAVLFKRFADIDSIDLEIDSSNTEEIIKSIINFSKSFGGINLEDIAAPDCFIIEKKLKEKLDIPVFHDDQHGTAIITLAALINALDISKKSIKKIKIVVNGAGASAMACTNLLIRSGVPKKNITMLDSKGVIHKGRDNLNQWKIIYAAETKNRTLEDAIKNTDVFLGLSTKGVLTKKMVKKMSKKPIIFACANPDPEITPEEVNEVRKDAIIATGRSDYPNQV

SEQ ID NO: 82218 - protein, 51 aa, Unknown
  Bacterial polypetide isolated from the Sargasso Sea
MTKKKSKISLIGAGQIGGTLAHLIGTKELVDEVVLFDVASGIAKGKALDIA

SEQ ID NO: 82219 - protein, 117 aa, Unknown
  Bacterial polypetide isolated from the Sargasso Sea
MGRVEEKVVLITGASSGLGFADAHRLAEEGAKLVLTDINRDDGEALAGEIGEAALFIEQDVSEEQSWDLVIDQTLKRFGRLDALVNNAGIAPISDIEKTTTQEWRRVMGVHVDATFF

SEQ ID NO: 82220 - protein, 168 aa, Unknown
  Bacterial polypetide isolated from the Sargasso Sea
MDDNKRPLYLPFAGPAILEAPLINKGSAFSEEERIFFNLEGLVPYAIETIEEQASRAYDQFRSFNNDLDKHIYLRNIQDTNETLFYRLVQNHISEMMPIIYTPTVGLACERFSKNYRRNRGLFISYPNKDRIDDILNNSTRQKVKIIVVTDGERILSLSDQSIGGMGI

SEQ ID NO: 82221 - protein, 167 aa, Unknown
  Bacterial polypetide isolated from the Sargasso Sea
MNFKNKIVVVTGGFSGTGKVIVDKFLSLKAKVYSLDKMYLGVEKKKFLVNYQIDLSNYDEIKRFSDYIYKCEKKVDFLVNNAGISLPFNKKNPYEYWNNTISTNLSAAFFLSNFLVKLLKKSKNASIVNIASVSSKIAMANNQAYNSSKSGLTALTFSQAMDYKNYK

SEQ ID NO: 82222 - protein, 161 aa, Unknown
  Bacterial polypetide isolated from the Sargasso Sea
MKKKVLITGVSGGIGSAIANKFIENNYTIIVSTSSQESLKNLRNKFGESHFYYHINFNNLDDIDSELKLISEEHKDLSVIVNNAGITDDGLLLRMKYSQWERVIQTNLNSNFKIIKSQLPNMISNKYGKIIGISSVVATSGNPGQTNYVASKSGMIGFYKS

SEQ ID NO: 82223 - protein, 301 aa, Unknown
  Bacterial polypetide isolated from the Sargasso Sea
MRSNQKLIQEVRSDAIIATGRSDYPNQVNNLIGFPYIFRGALDVRAKEINEEMKVSAANAIALLARENVPDEVVSAYGGDRPRYGKDYIIPSTFDPRLISVIPAAVADAAMKSGVARKNIKDLEHYKDQLTNRLDPTMSLMQGINAKVRKNPKRVIFAEGEDENMLKAAIEFGRNKLGIPILIGTEKRIKEQLKNIGLDENYKIEIVNSTDKVKREKYVKHLYKKLQREGQLERDVDRLVRNERIAWGASMIACKDADAMVTGNIRHYAASIEKLKKVTEPRPGEEIFGMTMITLKGKLFL

SEQ ID NO: 82224 - protein, 41 aa, Unknown
  Bacterial polypetide isolated from the Sargasso Sea
MKRIGKPEDIAAACPFLASEEASYITGQTISTNGGRYMGSH

SEQ ID NO: 82225 - protein, 288 aa, Unknown
  Bacterial polypetide isolated from the Sargasso Sea
MVKKMAKNPIIFACANPDPEITPEEVEQVRSDAIIATGRSDYPNQVNNLIGFPYIFRGALDVRAKTINEEMKVAAANAIASLARERVPDEVVAAMGGDRPTYGKEYIIPSTFDPRLISVIPVAVAKAAIKTGVARKKIKNFNAYTEQLKQRLDPSVTIMQGINSQIKKTQKKVVFADGEDQNTLKAAIAFKKSGLGIPILVAKEKVVKERLRKIGYSENFDIEIVNSTSKENRKKYLKYIFKKLHGDKGELDPDVYQLYLRDCDKIIKNDSVAWGSCMVSCGDADAMV

SEQ ID NO: 82226 - protein, 273 aa, Unknown
  Bacterial polypetide isolated from the Sargasso Sea
NFCLNPKTNLCQSIRVTQGRGLMPDGTSRFSLDGQEILHYMGCSTFSNYTVLPEIAVAKVREDAPFDKICYIGCGVTTGIGAVAFTMKVEPGSTVAVFGLGGIGLNVIQGAKMVGAARIIGIDLNNSKQSLATQFGMTDFINPTDVENVVDYIVDMTGGGVDYSFECIGNVSVMRQALECCHKGWGQSCIVGVAGAGKEISTRPFQLVTGRSWRGTAFGGARGRTDVPRIVDWYMEGRLNIDDLITHKMPLEQINEAFDLMHEGKSIRSVIEY

SEQ ID NO: 82227 - protein, 63 aa, Unknown
  Bacterial polypetide isolated from the Sargasso Sea
MDLENKVALVTGAGVRIGQAVAVKLGQLGMRVIIHYHHSEKGAKQTIQKLPGKKSRHLVLQAD

SEQ ID NO: 82228 - protein, 91 aa, Unknown
  Bacterial polypetide isolated from the Sargasso Sea
MKAAVFREVNVPMEIEDIQVSKPGPREVLIRTGAAGICHSDMHFFNGTYPGQVPMVLGHESAGVVEEVGSDVHYVKPGDHVITCLSVFCGH

SEQ ID NO: 82229 - protein, 242 aa, Unknown
  Bacterial polypetide isolated from the Sargasso Sea
MKNILITGAGKGIGYECVKALSNDKKVLIFALMRSKSDLKKFDKIKNVISFTGDVNNQKVINKIFNYALKRKIVIDGLVNNAGIRQRQNFLEISRKKINKIFQTNFFSIFYLMQIFSKGLIRKKRPGAIVNIGSIVGNLGFSQLSGYASTKMALIGLTKSFAVEMASKNIRANLINPGFTKTSFYKKFKSKKKLYNWTISRIPLKRWAEPYEIANLVKFLLSNKSSYINGEVINIDGGWTNA

SEQ ID NO: 82230 - protein, 306 aa, Unknown
  Bacterial polypetide isolated from the Sargasso Sea
KNITMVDRSGVIYRGREKLNQWKSSHAIETSDRSLDDAIKNADVFLGLSAKGVLTKAMVKKMAKNPIIFACANPDPEITPEEIEEVRNDAIVATGRSDYPNQVNNLIGFPYIFRGALDVRAKIINEEMKIAAAKAIARLAREDVPDEVVAAMGGERPHYGKNYIIPSTFDPRLISIIPAAVAKAAIDTGVARKKIRNFETYQEQLKQRLDPTVTIMQGINGYIKKNQKKIVFADGEDENTLKAAIAFKNSKLGTPILVGKEEKIKEQIKKIGYNENFDIKIINSKDKSKREKYVKFLFKKLQREQG

SEQ ID NO: 82231 - protein, 185 aa, Unknown
  Bacterial polypetide isolated from the Sargasso Sea
MGRVEEKVVLITGAASGLGFADAHRLAEEGAKLVLTDVNCDDGEALASEIGEAALFIEQDVSEEQSWDLVIDQTLNQFGRLDALVNNAGIAPISDIEKTTTQEWRRVMGVHVDATFFGCRSAIPIMTKSGGGSIINMSSIAALVGLSSYLSYSSAKGAIRSMTKSIAMHCIESRNNIRCNSIHPG

SEQ ID NO: 82232 - protein, 198 aa, Unknown
  Bacterial polypetide isolated from the Sargasso Sea
QGINLDVTKSEDWISAIQFIKNEAGSLNILVNNAGIGNGGDIESTDVETWKLVHSVNLDSVFLGCKHAIELMRDSGDGSIINISSMSGIVASHNTSAYNSSKAAVRHLSKSIALHCAKTTNLVRCNSIHPVFTRTAMVQTMIDAAPERNIEEKLIQQIPIRKLAEPKDIANAAVFLASDESSFITGTELLIDGGLSAT

SEQ ID NO: 82233 - protein, 184 aa, Unknown
  Bacterial polypetide isolated from the Sargasso Sea
MILERFKVTDKIAIVTGGTRGIGLAIAYALGEAGAKLVVTSRTNKFGGLESLQKANFDVSFYEGDMHDKSVPQKIIDFAIEKYGRVDILVNNAGVAQHGDMEEYNDELLDNIMNINVDSVFRMCRSVLTPMKQQGGGVILNIGSISGLVSNIPQPQVAYNASKAAVHMLTKSLASDYADQNIRV

SEQ ID NO: 82234 - protein, 152 aa, Unknown
  Bacterial polypetide isolated from the Sargasso Sea
MSNLLEGHVAVVTGGGSGIGEGIAIGYAEQGASVAILDVNVEAGSHVAKTISMKGGNAINVGVDVTDRESCEGAVGEVREKLGVVSILVNNAGINRRTPVTGDKATVAKDWDDIIEVNIKGVFNVTHAFLPQLIETKGRVINIGSIQSFVHV

SEQ ID NO: 82235 - protein, 36 aa, Unknown
  Bacterial polypetide isolated from the Sargasso Sea
MERVALVTGGSRGIGAAISLALKNEGYKVAATYAGN

SEQ ID NO: 82236 - protein, 286 aa, Unknown
  Bacterial polypetide isolated from the Sargasso Sea
EDVTLVCNGAGAAALACLDLLLTLGLKRENILMVDSRGVVHSEREGLGNQYKARYAMTTEARSLSDAMVGRDIFLGVSVADTVTQDMIKLMAPDPIIMALANPDPEIRPELVKEVSPNSIIATGRSDYPNQVNNVLCFPFMFRGALDVGATTINDEMKAACTHALAALAKAEADETVVQAYGTEMKFGPEYVIPKPFDPRLLAQLAPAVAKAAMDSGVATRPIADFDAYRQSLSEFTFQSGHAMRPLFDRARLNPKRIVYAEGESSRVLRAVQNAVDEGIVKPILI

SEQ ID NO: 82237 - protein, 251 aa, Unknown
  Bacterial polypetide isolated from the Sargasso Sea
SNGSAILGLGNLGAIASKPVMEGKAVLFKRFADIDSIDLEIDSNNPEEIINSIKNFSKSFGGINLEDIAAPDCFIIENKLKEILDIPVFHDDQHGTAIITTAALINAIHITKRDIKKIKIVINGAGASAMACADLFISKGVPKKNIAMVDRKGVIYKGRKDLNEWKSLHAIETKSRSLDEVIKDADVFLGLSKAGTLKKEMVKKMSKNPIIFACANPDPEITPEEIEQVRDDAIIATGRSDYPNQVNNLIG

SEQ ID NO: 82238 - protein, 216 aa, Unknown
  Bacterial polypetide isolated from the Sargasso Sea
DDIFYKIIKKRCPRAIWKTLDLCDDQDCKKAVKDILTKLSKIDGLVNNAGINDTVGISAGPNEFRKSLDRNLVHYYTMTNLCIMELIKTKGSIVNVSSKVVLTGQSGTSAYAAAKGGILALTREWAAEHSACGLRVNAVIPGEVMTPMYEKWLEGFKKPDEKLKQITSRIPLEKRMAKVEELAMPIVFLLSQWAGHITGQFLVVDGGYSHLDRALT

SEQ ID NO: 82239 - protein, 237 aa, Unknown
  Bacterial polypetide isolated from the Sargasso Sea
IINCISALGKSFGGINLEDIAAPDCFIIEKKLREKLDIPIFHDDQHGTAIITLAALINALDISKKLIKDIKIVVNGAGASAMACANLFVNNGVLKNNIIMLDRKGVIYRGRDNLNKWKSAFAIETKHRTLEDAIKGADVFLGLSAKGILTKKMVKNMSKNPIIFACANPDPEILPEEVHEVRSDAIVATGRSDYPNQVNNLIGFPYIFRGALDVRAKTINEEMKVAAAHAIAQLAKE

SEQ ID NO: 82240 - protein, 43 aa, Unknown
  Bacterial polypetide isolated from the Sargasso Sea
MRKKISLIGAGQIGGTLAHLIVLKELADVVLFDVAEGLAKGKL

SEQ ID NO: 82241 - protein, 160 aa, Unknown
  Bacterial polypetide isolated from the Sargasso Sea
MKKISVIGAGVIGSGWIIRFLAHDKKVTAYDKDSKLKKKIIAEIRRTWPYVKKLFNKKKLKLKNFKYVTSLKEALKDADFIQECAPENYKLKTTLMEIIGKYSKPNAIISSSSSGLLPSKIYSKCKNPSRTIIAHPFNPVYMIPGVELVPGKKTSKKILN

SEQ ID NO: 82242 - protein, 213 aa, Unknown
  Bacterial polypetide isolated from the Sargasso Sea
MKKETRVKDLFSVEGKTAVVTGGSRGIGEMIAAGYLSNGAKVYISSRKANACDETAKRLAEQFGGECVSIPADMSSLEGIDAFVKELNERESSLDILVNNAGVAWGAPLEEFPELGWDKVMNTNVKGVFFLTQKLLPLLEAGNSSEKPSYVINVGSIDGIKTPRFDNFSYGPSKAAVHHLTRVLASHLVRRNIIVNGIAPGPFPTFMLSAGVG

SEQ ID NO: 82243 - protein, 248 aa, Unknown
  Bacterial polypetide isolated from the Sargasso Sea
QPNPTVGNVEAGLALLKANQCDFVISLGGGSPHDCAKGIALVATNGGSIKDYEGLDQSAKPQLPLVAINTTAGTASEMTRFCIITDEARHIKMAIVDKHTTPLLSVNDPELMLKKPASLTAATGMDALTHAVEAYVSIAANPITDACAIKAIELIQGNLVNAVKQGQDIEAREQMAYAQFLAGMAFNNASLGYVHAMAHQLGGFYDLPHGVCNALLLPHVQEYNAKVVPDRLKDIANGDGCRCSQYDR

SEQ ID NO: 82244 - protein, 219 aa, Unknown
  Bacterial polypetide isolated from the Sargasso Sea
MNLENKKIIITGATGGIGNSIVKRLSNAGAKILATGTRLEKLEELKSKFKNTDILKFDISKGDEIEEFIENATNQLGGGLDCLINNAGITQDNLAIRMNIDEWKKVIDINLTSTFLLSKFAVKKMLKNKFGKIINITSVVGHTGNLGQANYTASKAGIVAMSKSLAIEYAKKNININCISPGFIKTEMTDKIEEKFKEAIISKIPSSRLGEPEDVANAV

SEQ ID NO: 82245 - protein, 226 aa, Unknown
  Bacterial polypetide isolated from the Sargasso Sea
IAKKFSDEGAKVILADINKDLLEKVSNGLDQDFFHVDVSSSSSMKKLSEYVLNKYGNIDIMVNNAGITHLPKPLEDVSEEEFVRVFEVNSKSVFLCGKFVVPHMKKQRKGSILNISSTAGISPRPNLNWYNATKGWMITATKAMAIELAPFNVRVNSLAPVAGETPLLKSFMGEDTPERRNAFLSTIPIGRFSTPKDLGDAACFLCSDESSMITGSILEVDGGRCI

SEQ ID NO: 82246 - protein, 329 aa, Unknown
  Bacterial polypetide isolated from the Sargasso Sea
SKKQNTFFCTVEAMPNNIDVDCVIVDEIQLAADYERGHIFTDRLLNLRGNFQTIFLGSLNIQNILKKIYPNIIIEKKSRFSQLTFLRQQNISKLEPRSAIIAFNTNKVYEIAENIRTHKGGTAVVLGSLSPRTRNAQVEVYENKNVDYLVATDAIGMGLNLNINHVNFSSLEKFDGRYNRNLAPNELGQIAGRAGRYKQDGTFSYTKEAGNLDPLIIQQIETHNFDNIQKIYWRNSDLDFNSSEKLLLSLKKYPVHNYFIHKKNALDEINFRNLINDNEINKHLSSIKNLKLLWDICQIPDFEKLFYDNYLLLLKEIYLTLIENNLYIP

SEQ ID NO: 82247 - protein, 66 aa, Unknown
  Bacterial polypetide isolated from the Sargasso Sea
MSLQGKVALVTGGSRGIGRAIALALAEQGAKVAFCHPDDAQAHDTLAELQKLTEAESLPADVSDEA

SEQ ID NO: 82248 - protein, 250 aa, Unknown
  Bacterial polypetide isolated from the Sargasso Sea
MSGRLKNKVALITGGAQGFGKGIASKFLAEGASVIITDINKANGEKTASELGVTFFEHDVGDHKRWEEVVTAVNDQIGKLNILVNNAGIGHMGNVEQTSVEDWDMVHKVDLDSVFYGCKYALPLMRESGMGSIVNISSISGIVAGHNFSAYNSAKAAVRHLTKSVALHCARTTDLVRCNSVHPVFAKTEILEALLSDTSSGMLEKLEKQIPVRKLAEIEDIANAVLFLASDESKMITGSELVIDGGLSAQ

SEQ ID NO: 82249 - protein, 56 aa, Unknown
  Bacterial polypetide isolated from the Sargasso Sea
MGTDLFNLEGKVALVTGASRGIGEEIARLLAEQGAHVIVSSRKIDGCQVVADAIKA

SEQ ID NO: 82250 - protein, 280 aa, Unknown
  Bacterial polypetide isolated from the Sargasso Sea
IMLDRKGVIYEGRTEGIDQWKSRYAVKTKHKNLEDAVNGADVFLGLSTKGVLKKKMVKSMAKNPIIFACANPDPEITPEEINEVRDDAIIATGRSDYPNQVNNLIGFPYIFRGALDVRSKTINEEMKVAAANAIAKLAREDVPDEVVAAMGGERPHYGKDYIIPSTFDPRLISVIPAAVAKAAIESGVARKNIGDFEVYKEQLKQRLDPTVTIMQGINSFIKKNQKRIVFADGEDENTLKAAIAFKNSKLGIPILVGKESKINEQIKNIGYSENFDIEIV

SEQ ID NO: 82251 - protein, 276 aa, Unknown
  Bacterial polypetide isolated from the Sargasso Sea
EAIKDADVFLGLSVKGALTKNMVKKMAKNPIIFACANPDPEITPEEIEEVRDDAIIATGRSDYPNQVNNLIGFPYIFRGALDVRSKTINEEMKVAAANAIANLAKEDVPDEVVAAMGGERPHYGKDYIIPSTFDPRLISVIPTAVAKAAMDTGVARVKIKNFELYKDQLKQRLDPTVTIMQGVHSYIKKKQKKVVFADGEDENTLKAAIAFKNSKLGIPILVGKEELINNQIKKIGYNENFDIEIINSKDTAKREKYVKYLFKKLQRQKGMWSGIV

SEQ ID NO: 82252 - protein, 245 aa, Unknown
  Bacterial polypetide isolated from the Sargasso Sea
MSQGGASNPGLGHSTIHKFAEEGGKIVVTDIDVEGGEKTVSEVKEKGGEAIFIKQDVVSTEDWKNVVDASISEFNKIDILVNNAGIALIGPFEEFSEDQWDQQINVNLKSVFLGCKAVIPEMKKNNSGSIINLSSIAGLVGLQGCAAYNASKGGVRLLTKSIAIEYGPNKIRCNSIHPGFMATNMNDPKKIKERGRDFEAIIETIPLRSMGTAEDIANCALYLASDESSYVTGSEYVVDGGWTTR

SEQ ID NO: 82253 - protein, 204 aa, Unknown
  Bacterial polypetide isolated from the Sargasso Sea
MKDLFSIEGKVALVTGGSRGIGEMIAAGFLASGAKVYISSRKKEVCDQTAERLSTEYGGTCISMPSDLSNLEGIDNLVSDISKEESKIDFLINNAGAAWGAPIDNYPENGWDKVMDTNVKGIFFLTQKLLPMLRSAAKESPARVVNIGSIDGLTSGSFENFAYGPSKAAVHHLTRVLAANLISENIIVNAIAPGPFPTWMLSTG

SEQ ID NO: 82254 - protein, 232 aa, Unknown
  Bacterial polypetide isolated from the Sargasso Sea
MTQRIALVTGGSRGLGKNAALKLADRGTDIIFTYNSQQQAALDVVAEIEQKGRKAAAIQLNVSDVAGFESFTHEVQAQLKSMWNREAFDYLVNNAGIGLYGAFADTSEAMFDQLVNIHFKGPFFLTQRLLPLIQNGGRILNVSSGLARFALPGYAAYASMKGAMEVLTRYQAKELGERGISVNIIAPGAIETDFGGGRLRDNKELNAYVASQTALGRAGLPDDIGDAIAALL

SEQ ID NO: 82255 - protein, 132 aa, Unknown
  Bacterial polypetide isolated from the Sargasso Sea
MKSILVTGSSSGIGAAICEHFSQIGWKVFGSVRNQNDGDKLINICGENFTPLIFDVTDINAIKEASNIVENLLGINGLDCLVNNAGINISGPMEYVESDEVRTVFEVNVMGPLNCSQIFLPMLKKSSSATII

SEQ ID NO: 82256 - protein, 77 aa, Unknown
  Bacterial polypetide isolated from the Sargasso Sea
MPPSNNEKNLLAILGPTNTGKTHLAFDRLISYKSGIFGFPLRLLARENYEKAIKLIDFNKVALVTGEEKIIPKNAKY

SEQ ID NO: 82257 - protein, 84 aa, Unknown
  Bacterial polypetide isolated from the Sargasso Sea
PVHGSAPDIAGQGLANPIAAILSVAMMLRYSFGLEEPARKIEEAIEKVLKEGYRTVDLEGPKDMKLNTDQMSQKILENLRGFNE

SEQ ID NO: 82258 - protein, 279 aa, Unknown
  Bacterial polypetide isolated from the Sargasso Sea
NQWKSAHAVKTKCRTLEDALNGADIFFGLSIGNIISQKMVLSMAEKPIIFAMANPEPEILPEKIKECRKDAIIATGRSDYPNQVNNVLGFPYIFRGALDVRAKTINLEMKIAAAKAIADLAKEDVPDEVANAYPGKRPQYGPDYIIPSPFDPRLISKVPPAVAKAAMDTGVARKAIVDIENYSNELSARLNPSAGLLQKVFQEVKENPKRVIFTEGEEEDMIRAAVIFLNNRMGTPILIGRDDVIKDKMQEMGLDFFDQMEIHSTRNKSEHDRYAEHIY

SEQ ID NO: 82259 - protein, 160 aa, Unknown
  Bacterial polypetide isolated from the Sargasso Sea
MIDIKNKNVIVTGATGGIGNSIVKALVDHGANVLATGTKVEKLNELKKINSKIKTLQFDISNHDKIEKFIDDAASELDNKLDCIINNAGITKDNLSIRMTYDEWSKVIDINLTSTFLMSKYSIKKMLKNKSGKIVNITSVVGHTGNVGQANYTASKAGIV

SEQ ID NO: 82260 - protein, 258 aa, Unknown
  Bacterial polypetide isolated from the Sargasso Sea
ADIFFGLSVGNIISQKMALSMADNPIIFAMANPEPEITPEDVKECRSDAIIATGRSDYPNQVNNVLGFPYIFRGALDVRATTINLEMKIAAARAIADLAKEDVPDEVANAYPGKRPQYGPDYIIPSPFDPRLISKVPPAVAKAAMDTGVARKAIVDMDRYSNELSARLNPSAGLLQKIFQEVKENPKRVIFTEGEEEDMIRAAVIFLNNGMGTPILIGREEIIKSKMKEMGLDFFDKIEIHSTRNKTEHDRYAEHIYN

SEQ ID NO: 82261 - protein, 178 aa, Unknown
  Bacterial polypetide isolated from the Sargasso Sea
MQAAILRDDSGSLNVEDISIDKPQRNEVLVQTVASGLCHSDLHFIDGSWSHLAMYPMLLGHEAAGIVQDVGEDVVGIEVGDHVISCLSIFCGYCDRCLTGHSYICSQRQEISGRPMEEPPRLTDSEGAVINQFTGLGSFAQEMLVHQNGVVKITPDMPLDRAALIGCGVTTGVGAVFR

SEQ ID NO: 82262 - protein, 267 aa, Unknown
  Bacterial polypetide isolated from the Sargasso Sea
DDAIKGADVFLGLSKAGVLKKNMVKKMAKNPIIFACANPDPEITPEEIEEIRNDAIIATGRSDYPNQVNNLIGFPYIFRGALDVRAKTINEEMKLAASNAIATLARERVPDEVVAAMGGDRPKYGKDYIIPSTFDPRLISVIPVAVAKAAIKSGVARKKIENFDTYSEQLKQRLDPSVTIMQGINSQIKKTQKRVVFVDGEDENTLKAAIAFKNSGLGIPIIVAKEKVVKERLKEIGYSENFNIEIVNSAIKEKREKYSKYLFKKLH

SEQ ID NO: 82263 - protein, 231 aa, Unknown
  Bacterial polypetide isolated from the Sargasso Sea
SIAKAFAEFGANVVVCSRSQEGIEKVVSEITANGYNAIACVCHVGEDDQLKNLIETTINKYGRIDILVNNAGINPVFDRLENADEKLFNKILDINTKSPFKLSNLVFDYMKKNKSGSIINISSVEANKPDKGLGVYSISKAAISMLTKSQAKEWGKYGVRSNAICPGLIKTKLSSALWQNEEMLDKWLGDLPIRRAGDPDEISGIALYLASEASSYTTGETFNIDGGYMIN

SEQ ID NO: 82264 - protein, 122 aa, Unknown
  Bacterial polypetide isolated from the Sargasso Sea
MNLKNKKVIITGATGGIGNSLVKRFAEEGALILATGTKEEKLNDLKKNFNNIQIAKFNLGEHSTIESFIESAVQKLGGLDILVNNAGINLDSLTIRMSEENWKKVLDINLTSTFLMCKSAIK

SEQ ID NO: 82265 - protein, 84 aa, Unknown
  Bacterial polypetide isolated from the Sargasso Sea
MQLSFLDGKTLFVTGGSRGIGLAIAKRAASEGANVTLAAKTAEPHPRLPGTVYSAANEVRKLGGKALPMVVDIRFEEQVEAAIK

SEQ ID NO: 82266 - protein, 220 aa, Unknown
  Bacterial polypetide isolated from the Sargasso Sea
DKNGFVKINAGVVKDVVGNIKKFADDAMIIPVTNPLDPMAQIAYKTSGFDRSRVFGMGGMLDLSRFKQFIHEATGYSRESTKALVIGEHGENMLPLTRFATVSGIPLPTLLPKEKLDEIFTATKGVAAEVIKLKGATVHAPGNAISAMIESVVQDKKQVIPVSTNLDGEYGQKDVSIGVPAVVGKNGVEKILELELNDEEKEWFNKGVDSVKNALSGVEF

SEQ ID NO: 82267 - protein, 298 aa, Unknown
  Bacterial polypetide isolated from the Sargasso Sea
MVLGHEGAGVVVEVGALVKDISIGDHVAFIFMPNCGDCLQCRSGKPSNCEQGNATNAAGKLLSGERRIALNGREINHYAGVSCFAEYVTADHRSVVKLPKEVPFDIAAVFSCAVITGVGAVVNTAKVPMGASVGVVGLGGVGLSAMLGARASGARQIVGIDPVKYKRDGAKQLGADMVFDSKDRDIVTKIRDATSGGLDYVFEAVGEVEAIELAYALTGRGGTTTSSGLSHPSKNFSVSHVQLVAEERTIKGSFLGGCVPKRDIPNYIKMYQDGKLPVDQLIKGHINLENINEAFDKL

SEQ ID NO: 82268 - protein, 172 aa, Unknown
  Bacterial polypetide isolated from the Sargasso Sea
MANRLKGKVALITGGAAGFGKKTAETLKNEGAVVYISDINVDGGEKVAKEFDVNFLQQDVTKTDDWKRVIEKIKESEGKLHILVNNAGIGYMGDVESTTNEAWDMVHKVDLDSVFYGCKYALPLMRDSGNGSIINISSISGIVAGHNFTAYNSAKAAVRHLSKSVALHCART

SEQ ID NO: 82269 - protein, 180 aa, Unknown
  Bacterial polypetide isolated from the Sargasso Sea
MANKLLENKIAVVTGGATGIGKEIVRELAENDATVILADRNAPLGEKEAQEFQAKKLDVTFMQLDISKIDEVKNFFNSINKKYSRLDILVNNAGIKINAGKVTETSEFEWNLTLGTNLTGTFLCCKYGIPLMEKNGGSVINFSSGSGIKGSYNSVAYGVTKAGIIHLTKTVSLELQHKIL

SEQ ID NO: 82270 - protein, 194 aa, Unknown
  Bacterial polypetide isolated from the Sargasso Sea
MTKETRVKDLFSVEGKTAVVTGGSRGIGEMIAAGYLSNGAKVYISSRKANACDETAKRLAEQFGGECVSIPADMSSLEGIDAFVKELNERESSLDILVNNAGVAWGAPLEEFPELGWDKVMNTNVKGVFFLTQKLLPLLEAGNSSEKPSYVINVGSIDGIKTPRFDNFSYGPSKAAVHHLTRVLASHLVRRNIM

SEQ ID NO: 82271 - protein, 203 aa, Unknown
  Bacterial polypetide isolated from the Sargasso Sea
MITNAAVLREAKKPLSFEELKIDAPKAGEVRVQLRSCGVCHTDYSLAKGILDHQPIPSVLGHEGSGIVIDVGPGVSNVKKGDHVVMAPIAPCGQCGRCLNQEGAYCEREEIRGWGILPDGRTPLTDKDGNGVAIGFNTGFYSDYAVVPSTAVAKIPKDVPFEIASLLGCAVVSGYGAIVNTAKVQVSQSTLVVGLGGVGLSAV

SEQ ID NO: 82272 - protein, 160 aa, Unknown
  Bacterial polypetide isolated from the Sargasso Sea
MKLKDKVALVTGGASGLGQATVEAFVANGAKVVILDLNEDKANEIIKDLGDDNILFIATNIMEEDPVVDAVNQIKDKFGALHIAVNCAGTGYPGRILGKEAPHPLDAFKFIINLNLVGTFNVMRIAAELMDKNDPGSKGEKGVIINTASIAGYEGQIVSQ

SEQ ID NO: 82273 - protein, 285 aa, Unknown
  Bacterial polypetide isolated from the Sargasso Sea
NQHIAIKTKLRTLKDAIKGADVFLGLSAKNVLTQEMVKSMAKNPIIFACANPDPEIKPELVDEVRSDAIVATGRSDYPNQVNNLIGFPYIFRGALDVRAKEINEEMKIAAAKAIATLAKEEVPDEVVNAYGGERPRYGKEYIIPSTFDPRLISRIPAAVAEAAMKSGVARKKISDIETYKDQLTNRLDPSMSIMQGINAQLKKRPKTVVFAEGEDKNMLKAAIAYKNSRLGTPIVIGNEKRVKEQLKEIGLDENYKIKIVNSTDKDKRELYTKKLYNKLQRQGLL

SEQ ID NO: 82274 - protein, 320 aa, Unknown
  Bacterial polypetide isolated from the Sargasso Sea
RMNERLDMKVPLDFTTLCIEDFLKVINHLIDLFKGDGYTDDIDHLGNRRIRSVGELLGNQFSIGLSRMARTIRERMSLRDSDQLTPHDLVNARTVSTVVQAFFGSSQLSQFLQQTNPLDELTHKRRLSALGPGGLTRDRAGFEVRDVHHTHYGRICPIETPEGPNIGLIASLSTYAIVNPFGFLETPYRIVEKGKLVNGGIQYLSADQEDKQTIAQANAAVDGRGRFQEDVIQVRRRGDFPVVRPEEIGFMDVSPCQLVSAAAALIPFLEHDDANRALMGSNMQRQAVPLLRTAAPFVGTGMERRVAIDSKAVVTARHEG

SEQ ID NO: 82275 - protein, 241 aa, Unknown
  Bacterial polypetide isolated from the Sargasso Sea
CFGHPSPEVMPDSARKAVSDAIIATGRSDFPNQVNNVLCFPFIFRGALDVEATEINDEMQFACINAIAEIARTTTSAEAAAAYQGESLTFGPEYLIPKPFDPRLSVVVPTAVAQAAMKSGVAKKPIPDLESYKDKLKEGVFKSALLMRPVFETAKRVKRRIVFAEGEDERVLRAAQAILEETSEQPILIGRPSVLEQRCERLGLVVRPGRDFEIVNPEDDPRYRDYWTSYHEKMCRTRHYA

SEQ ID NO: 82276 - protein, 256 aa, Unknown
  Bacterial polypetide isolated from the Sargasso Sea
EARYFFCTVESMPNNISVDCVIIDEVQLSADYERGHIFTDKILNLKGNFQTIFLGSLNIENILKKIYPNIIIEKKNRFSQLTFLRKQNFSKLEPRSAIIAFNINKVYEIAENIRIHKGGAAVVLGSLSPRTRNAQVEVYENQNVDYLVATDAIGMGLNLNINHVSFSSLEKFDGRYNRNLAPNEIGQIAGRAGRYKQDGTFSYTKEAGNLDPIVIQQIENHQFEDIQKIYWRSSDLDFNSIELLLSSLKKYPIKKF

SEQ ID NO: 82277 - protein, 243 aa, Unknown
  Bacterial polypetide isolated from the Sargasso Sea
VKSMAKNPIIFACANPDPEISPEEINEVRDDAIIATGRSDYPNQVNNLIGFPYIFRGALDVRSKTINEEMKVAAAEAIAKLAREDVPDEVVAAMGGERPHYGKDYIIPSTFDPRLISIIPAAVAKASIESGVARKNISNFEIYKDQLKQRLDPTVTIMQGINSFIKKNQKRIVFADGEDENNLKAAIAFKNSKLGIPILIGKESKIKEQIKNIGYNENFDIEIVNSKDTKKKDRYVHHLFKKL

SEQ ID NO: 82278 - protein, 159 aa, Unknown
  Bacterial polypetide isolated from the Sargasso Sea
MNQGVDVNVLAPEKTAVVTGGSRGIGYATALRLAQDGLRVIICSRSEESVKKSAEEIAVTSGNDSVLGICADVSSACEVDRMFAEVENFASGSPSILVNNAGYLELEALIGMSESHWDRVISQNLKSTFLCSRKAMAMMAAAGVSGNIVNVSSLAGIRG

SEQ ID NO: 82279 - protein, 188 aa, Unknown
  Bacterial polypetide isolated from the Sargasso Sea
MFDASNKVALVTGATGGIGKATVQLFLDCNAKVITTGRSQEKLNSIYKDKEKVFTVQADFSKEEDAKAAIKKGLIQFNRIDYVIHCAGAVGSGSFSETSIDEWHKLLDINLTSAFLLCRETYSALKKTSGSLVLVSSVNGSHGGSSTSGPVYAISKAGINNMTRYLAKEWSKDNIRVNCVSPGPVDTP

SEQ ID NO: 82280 - protein, 238 aa, Unknown
  Bacterial polypetide isolated from the Sargasso Sea
MKKILITGASGGIGSSIADKFFNNKYEMILTSSSDTTLDQLREKYGNNNYYYSLDFKRPDENNIVLKKISEEHQDLNVIVNNAGITDDSLLLRMKTDQWNNVIQANLSSNFTIIKALLPNMIKNKSGNIIGISSVVATSGNPGQSNYVAAKSGMIGFYKSIALEVASRNINVNIVSPGFIISPMTNKLNDKQRNIILEKIPMKRFGESNEIADLVYFLSRDESRYITGQNILYKAVEC

SEQ ID NO: 82281 - protein, 292 aa, Unknown
  Bacterial polypetide isolated from the Sargasso Sea
NTGISKKNIIMLDRKGVIHSGRNDLNKWKSNYAIKTNDRTLNDAIKNADVFLGLSSAGVLKKEMVKKMAKNPIIFACANPNPEINPEEVEEVRDDAIIATGRSDYPNQVNNLIGFPYIFRGALDVRAKTINEDMKVAAANAIAFLARERVPDEVVAAMGGDRPKYGKDYIIPSTFDPRLISVIPVAVARAAIKSGVARKKIENFDLYAEQLKQRLDPSVTIMQGINSQIKKNQKRVVFADGEDENNLKAAISFKNSGLGVPIIIAKEEIVKKKLKEIGYSENFNIEIINSKN

SEQ ID NO: 82282 - protein, 239 aa, Unknown
  Bacterial polypetide isolated from the Sargasso Sea
NKYAVVTGCNRGIGRAICQNFLIQGASVIGCSREVNKQLQMEMASFGQNFHNIQLDVQDETSIKEALKAIKNITKEVDILVNNAGIAHGGIFQMTPLADMRRVFEVNVFGAVAVTQAIARLMVRKKSGSIINISSTAAHLPDRGTMTYGASKAALSRITESMAQELGAMGIRANTIAPGVTETDMAKQMDGEAKERLISASALKKIAQPNDIANVALFLASNLSSHMTGQILIVDGGIL

SEQ ID NO: 82283 - protein, 246 aa, Unknown
  Bacterial polypetide isolated from the Sargasso Sea
DGDAADLVVEEIKSNGGEAIANKASVSDRDGAKSIVDDAVNHFGTLDILVNNAGNLRDKSFKNMTLDDYDAVLDVHLRGTGYVTHFAWPVMYQKNWGRIVLTSSTSGIFGNFGQANYGASKMGMLGLMNVLAIEGASHNIRVNCLAPGAATRMTASVPGATFDPKDPPAERGPSLVSPAVLYMCTEDAPSGWVMHAASGRFSRSQIFANEGVKFDADEATFEKLMDNIEQATDMSAAVGREPTRRG

SEQ ID NO: 82284 - protein, 50 aa, Unknown
  Bacterial polypetide isolated from the Sargasso Sea
MKKKISLIGAGQIGGTLAHLISIKEIANVVLFDVAEGIAKGKALDISQSI

SEQ ID NO: 82285 - protein, 301 aa, Unknown
  Bacterial polypetide isolated from the Sargasso Sea
ASHELTIRKNTVAIVSDGTAVLGLGDIGPEAAMPVMEGKALLFKEFADVDAFPICLDVETPDQIIETVIRLAPTFGGINLEDIAAPGAFEVEAELRRALDIPVFHDDQHGTAVVALAALENSVRLTGKDFKDLRCVILGAGAAGVACAKILLGRGIGDVVVCDRQGTIYPGRDNLNAAKEWIADNTNTDQIAGTVAQAMAGADVFMGLSGPGLVTRDDVAAMAEKPIVFAMANPDPEILPEEIGDIAAVVATGRSDYPNQINNVLAFPGIFRGAFDSSATDITEGMKIAAASAIAAAVSSD

SEQ ID NO: 82286 - protein, 285 aa, Unknown
  Bacterial polypetide isolated from the Sargasso Sea
NLFKKIGVKNENVIMCDRKGVVYKGRDNVDQFKSAHAAETKLRTLEQAMKGADVFLGLSAKDVVNKKMIKEMATNAIVFACANPDPEIKPELIGEVRNDVIIATGRSDYPNQVNNLIGFPYIFRGALDVRAKIINDEMKVAAARAIALLAREDVPDEVVSAYGGERPKYGKNYIIPSTFDPRLVRIIPSAVAEAAMKSGVARKRIENLEGYKDQLAARLDPSMSLMQGINAKVKKSPKKVVFAEGEDENMLKAAIEFGKTKLGKPVVIGNEKRVKETLKKIGLDE

SEQ ID NO: 82287 - protein, 313 aa, Unknown
  Bacterial polypetide isolated from the Sargasso Sea
SAHAIKTKCRTLEDALNGADIFFGLSIGNIISQKMVLSMAKKPIIFAMANPEPEILPEKIKECRDDAIIATGRSDYPNQVNNVLGFPYIFRGALDVRAKTINLEMKIAAANAIADLAKEDVPDEVANAYPGKRPQYGPDYIIPSPFDPRLISKVPPAVAKAAMDTGVARKAIVDMENYSNELSARLNPSAGLLQKVFQEVKENPKRVIFTEGEEEDMIRAAVIYLNNRMGTPILIGRDEVIKSKMKDMGLDFFDQMEIHSTRNKTEHDRYADHIYHRLQRKGFLKKDCLDLLIRERNVFAAWYGISKRSRCDG

SEQ ID NO: 82288 - protein, 39 aa, Unknown
  Bacterial polypetide isolated from the Sargasso Sea
MSKKISLIGAGQIGGTLAHLIAIKELADVVLFDVVEGLA

SEQ ID NO: 82289 - protein, 196 aa, Unknown
  Bacterial polypetide isolated from the Sargasso Sea
MYLKKYNLKNKVALVTGAGKGLGRACAIALAEAGANLLIVSRTKKDLEQVSKIVKKFRVKCKSYVCDITNYNEIKEIINKQLKIDILINNAGTNIPEHFTKVKRRNMEFLVKVNTVAAFNIAQLCTLKMIQTKNRKKIGGSIVNMSSQMGHVGGPIRSVYNMNKHGLEGLTKGMAIDLAKHNIRVNTVCPTFVVTP

SEQ ID NO: 82290 - protein, 192 aa, Unknown
  Bacterial polypetide isolated from the Sargasso Sea
AVAIEADVSDPDAVEEMFACITATGPLHGLVNNAGIIQEQSFLDTSEEDWRRIMAVDLDGVYRCCRCALESMSGAGRGAIVNIASELGQLGRENYVAYCTAKAGVIGMTKALAREFAPQIRINAVAPGPVETAMVSLEHMSEEWIAKELAIPAARLGQPEEIAAAVCFLLSPAASFFTGQTLGANGGAWMGS

SEQ ID NO: 82291 - protein, 240 aa, Unknown
  Bacterial polypetide isolated from the Sargasso Sea
MSRVALVTGGTRGIGEAICTTLKDAGYTVVANYGGNDQAAQEFTERTGIAAMKFDVSDFEKTKAAIEQIESDFGPVDVLINNAGITRDGTMHRMTFEQWNAVIQTNLASCFNTCRAVIEGMRERSFGRIVNIGSINGQAGQYGQVNYAAAKSGIHGFTKALAQEGAAKGITVNAIAPGYIDTDMVRAVPEDVLKKIVAKIPVGRLGKPEDIADGVLFLIKDESSFITGSTLSINGGQHMY

SEQ ID NO: 82292 - protein, 157 aa, Unknown
  Bacterial polypetide isolated from the Sargasso Sea
MKDKGIIVTGGTRGIGLAIANAFAAEGANISICGRTQVSLDAAKEKLAGHGGTVHAAACDVGDSASLEVYMNDAHAALGRLDVLVNNPSGFGRTDDDEGWKRSIDIDLMPVVRSSHIAIPMIEQVGGGAIIHISTISALTESMRTPPYGAIKAAVNH

SEQ ID NO: 82293 - protein, 300 aa, Unknown
  Bacterial polypetide isolated from the Sargasso Sea
AVETQLRGLDEAIKGADVFLGLSAKGVLKKEMVKNMAQNPIIFACANPDPEILPEEINEVRDDAIVATGRSDYPNQVNNLIGFPYIFRGALDVRSKTINEEMKVAASLAIAKLAREDVPDEVVAAMGGERPHYGKDYIIPSTFDPRLISVIPAAVAKAAMESGVARKNIENFEIYKDQLKQRLDPTVTIMQGINSYIKKNQKRIVFADGEDENTLKAAIAFKNSKLGIPILIGKESKIKEQIKNIGYSDNFDIEIVNSKNEEKRNKYVKHLFEKLQREQGLLERDCDRLVRNDRVIWATS

SEQ ID NO: 82294 - protein, 271 aa, Unknown
  Bacterial polypetide isolated from the Sargasso Sea
MKKILVIPGDGIGLEVIPATVSVIESLGLKIEFINSNAGDEIKKQTGNALPVEVLELVEEVDSILFGAAGESAADVILPLRREIDSFVNVRPAKAYPGVNALQPKTDLVILRENSEGVYTGIESRVSEEMATLTRVVTKTASTRLAEYSCEYVKAQGLDKFTIAHKDNVMRITDGLFRETVESVASKKGVKTESAIMDALAMLMVMHPENYQVIVCPNLAGDILSDLAAGLVGGLGLLPSSNIGPKCALFEPVHGTAPDIAGRGISNPIAS

SEQ ID NO: 82295 - protein, 252 aa, Unknown
  Bacterial polypetide isolated from the Sargasso Sea
DKVALVTGGASGLGQATVEAYVAKGAKAVILDINEDKAKEIINNLGEDNVMFISTDIMKEDPVIEAVNQIKENFGGLHIAVNCAGTGYPGRILGKEAPHPLDAFQFIINLNLVGTFNVMRIAAELMDKNEPDQKGEKGVIINTASIAGIEGQIGQSAYSASKAGVIGLTITAARDLARHAIRVCTIAPGIFDTPLMQLAPDKVREPLLESTQFPHRFGQPNEFADLAVHIVENTYLNGETIRLDSGMRMKPR

SEQ ID NO: 82296 - protein, 306 aa, Unknown
  Bacterial polypetide isolated from the Sargasso Sea
FIDDLVEKNIKIGSIVIRATPIMECLTGFMIAGFIFISGKLIATGELGVNNFFSFLAAMMLAYQPIRSLATINMAAYQGASAFKRISEIIDKEIKIKELPNAPSLILKNSNIRFHQVGFKYNSTNEKAIKDVNFDIKGQTMTAFVGHSGAGKSTIINLLPRFYEPQEGYIKIDNQDIKEVSLKSLRENLSLVSQDVVLFDDTIKNNIAYAKSNASDKEIINACKFAAAEEFIKKLPNGYDTMIGENGIRLSGGQKQRISIARAILKESPIILLDEATSSLDAESEEIVQNAISNLVKNKTTLVIAH

SEQ ID NO: 82297 - protein, 84 aa, Unknown
  Bacterial polypetide isolated from the Sargasso Sea
MSKISLIGAGQIGGTLAHLIGIKELVNEVVLFDVASGVAKGKALDIAQSSSVDGFDVKFSGTDDYEDIKGSDVIKITAGVPRKP

SEQ ID NO: 82298 - protein, 165 aa, Unknown
  Bacterial polypetide isolated from the Sargasso Sea
GRKGLNKWKSTYAIETKNRTLNDAINGADVFLGLSSAGVLKKEMIKKMAKNPIIFACANPDPEITPEEVEKVRKDAIIATGRSDYPNQVNNLIGFPYIFRGALDVRAKTINEEMKIAAVNAIASLAKKRVPDEVVAAMGGERPKYGKDYIIPSTFDPRLISVIPV

SEQ ID NO: 82299 - protein, 196 aa, Unknown
  Bacterial polypetide isolated from the Sargasso Sea
QDYFAADVSKESNFKSLLKYTFKKYKTVDIIVNNAGITHKPKNMEAVTGREFDKVFNVNAKSVYLSAKYFVPRMKKLRRGVILNVASTAGLSPRPKLNWYNASKGWMITATKAMAIELAPFNVRVNAIAPVAGVTPLLKSFMGGDTPQKKKAFLSTIPIGRFSTPQDMGNAACFLCSDEATMITGTILEVDGGRCI

SEQ ID NO: 82300 - protein, 304 aa, Unknown
  Bacterial polypetide isolated from the Sargasso Sea
VNAIADDTSSVYDYTSKGNIVAVISNGTAILGLGNLGAHASKPVMEGKSVLFKRFSDIDSIDLEIDTEDADEFINSVKYLGPSFGGINLEDIKAPECFIIEDSLREIMDIPIFHDDQHGTAIISAAALINAMDLTGKKINEVKIVVNGAGAAGIACLELLKAMGMPNENAILCDTKGVIHTERKENMNQWKSAHAVKTKCRSLEDALNGADIFFGLSIGNIISQKMVLSMAEKPIIFAMANPEPEILPEKIKEYRDDAIIATGRSDYPNQVNNVLGFPYIFRGALDVRAKTINLEMKIAAAKAI

SEQ ID NO: 82301 - protein, 75 aa, Unknown
  Bacterial polypetide isolated from the Sargasso Sea
MSRPKIALIGGGQVGGNIALLSAQKELGDIVIVDIPEAENFMKGKALDISQLLPHDGKDSKLSGTSNFEDIQDSD

SEQ ID NO: 82302 - protein, 291 aa, Unknown
  Bacterial polypetide isolated from the Sargasso Sea
MGVGNFHRAHQALYINNYIEETKDANWGICGINLRKEEREKFNFLKNREGKYILKTVSTDGDNEFSEIHSIQKLIDWSKDKEEAENILTDKNVEILTMTVTESGYYINEENNLNLHLQIVKDNIEQKENTIIFSFLLSALKKRMLSIDKEITLLCCDNIRENGLMLEKCLKKYVKESNELGLLQWIEKKVSFPSCVVDRITPRAPEYLANEVKEKFNIDEKCSVMAEPFIQWVIEDNFIGKRPDLEKVGVQFVKNVFPYEETKIRILNGGHVALSYIGALKGHTTYDKAIC

SEQ ID NO: 82303 - protein, 303 aa, Unknown
  Bacterial polypetide isolated from the Sargasso Sea
ATTSTFAPHLKGISENGRSFFYQGIIPDKISSYVKKFRGWICEEDFTKHTCSWVEPISSNYRRHDVWECPPNGQGIAALIALNIIENIDFSDPSIEPVLQIHYKIEAMKIAFQDALWYVADPEKLKIPVDELLSKTYAQQRFDEIKKDKANMEYRKGNFKQSGDTVYVSVIDGNGNACSFISSLYESFGTGLVVPDTGIVLQNRGALFSTDTDHPNFLEPAKRPYNTIIPGMITRNRNLVSSFGVMGGFQQPQGHLQVVSNMVDFGMNPQEALDSARFRIDINDEITFAEDSFDQEVISGLKS

SEQ ID NO: 82304 - protein, 231 aa, Unknown
  Bacterial polypetide isolated from the Sargasso Sea
GIGKEILKSLASDGFVVIGTSRSQDGLGHINETINDIGAKGCGLEYNVNDKDSLPSLNSTIKDKFGPVSVLINNAGITKDNLLIRMNENEWNDVLDTNLNSIFRLSKEFVKDMMKLRYGRIINIGSVVGLTGNAGQTNYSATKSGILGFTKSLAKEVASRNITVNSVSPGFIDTDMTNQLKDDQKNALIQSIPLGRMGTATELAKTVSFLASEEASYITGENINVNGGLYM

SEQ ID NO: 82305 - protein, 204 aa, Unknown
  Bacterial polypetide isolated from the Sargasso Sea
MSKCLIVTGGRRGIGAEVSRKASKQGYSVCVNFHRDQTSAQKLVRELEEDGVNALTYQADVSQEEKVVALFQTVEKHLRTPEALVNNAGILDFQTRVDGMNAKRIQRIFAVNITGSYLCAREAVKRMSTKYGGTGGSIVNLSSGAAKYGSPGEYVDYAASKAAIDTLTIGLAREVAEEGIRVNAVRPGFIYTEIHQSGGEPDLM

SEQ ID NO: 82306 - protein, 99 aa, Unknown
  Bacterial polypetide isolated from the Sargasso Sea
MYQKSLKNKVALVTGGGGPAMGSSHCLKLSKMGAHVIVLDKREDMAQMVSKKIIQTGGSSEVIICDIANIKETSNVLSSVLSEKQLIFLLTMLVFQECL

SEQ ID NO: 82307 - protein, 80 aa, Unknown
  Bacterial polypetide isolated from the Sargasso Sea
MRKKIALVGAGNIGGTLAHLIGLKELADVVLVDIADGIAKGKALDLSQSSAIELFDLNITGSKNFKNLKNADVVIVTAGF

SEQ ID NO: 82308 - protein, 302 aa, Unknown
  Bacterial polypetide isolated from the Sargasso Sea
RTLAEAIKGADVFLGLSAKDVVSKEMVKSMSKNPIIFACANPDPEIKPELIQEVRDDAIIATGRSDYPNQVNNLIGFPYIFRGALDVRAKAINEEMKVAAANAIALLARENVPDEVVAAYGGDRPRYGKNYIIPSTFDPRLISVIPAAVAEAAMKSGAARKKIEDVELYKDQLSNRLDPSMSIMQGINAKVRKNPKRVIFAEGEDENMLKAAIEFGRNKLGVPILIGSENRVREQLKKIGLDENYKIEIVNSTDKEKRERYVKHLYKKLQREGQLERDVDRLVRNDRIAWGSSMIACKDADA

SEQ ID NO: 82309 - protein, 202 aa, Unknown
  Bacterial polypetide isolated from the Sargasso Sea
MIDSKGVIYEGRSNKINQWKLKHALDTKLRTLKDAIKGADVFLGLSTKGALKKELIKTMAKNPIIFACANPDPEITPEEINKVRKDAIIATGRSDYPNQVNNLLGFPYIFRGALDVRSKVINEEMKTAAALAIAKLAREDVPDEVVAAMGGDRPHYGKDYIIPSTFDPRLITVIPAAVAKAAMDSGVARKNIDNFEVYKDST

SEQ ID NO: 82310 - protein, 132 aa, Unknown
  Bacterial polypetide isolated from the Sargasso Sea
MEKNSQRVIMISGANRGIGKAIREKLQSEKYLLSLGLRNPGAFRDAMDHHESKNVHLHKYDARNPESAESWVQSTLENFGRIDGLVNNAGILHPMGLEDDREELLDDMWEVNAKAPMRLTRLTFPHLRKSGR

SEQ ID NO: 82311 - protein, 290 aa, Unknown
  Bacterial polypetide isolated from the Sargasso Sea
GDGGQGNNTANQNGGAGGAVGSTSNTFTGMVSGTLTVTGGNGGAGGSGANAQGGIGGAGGAVTVTNLANGLTGPLNLMGGNAGNGGIGNANAGGKGGDGGLVTITAIGAGGTLGNVAIGAGTSGIGGDSGAANGGAGGEGGTIVVGNISQDITGTLTVWAGSGGAGGAGNGNGNGGAGGDGKAISTMSVSGAISSNVSLTGGSGGNGGAAGSGSGSGGNGGAGAALNASLGGNIGGTLTLNDGETGTAGATGTGSAGSGGALGAVTLTLNGSAAQTITGAVTVGDDGEAT

SEQ ID NO: 82312 - protein, 205 aa, Unknown
  Bacterial polypetide isolated from the Sargasso Sea
ECEAKGVEARGYELNVTIEAQVDAVYSQVISDFGTLDATVNNAGILRDSLLVKEKDGEIRKFPLSKWQEVIDTNLTGVFLCGREAAARFVELKKTGVIINIASVARSGNFGQSNYSAAKAGVSAMTVLWAKELAQNGIRVAGVAPGFTATEMVVSLRDDVKEKFVKSIPIKRFAEPSEMSDGVLFILKNDYFTGRMLEIDGGVRM

SEQ ID NO: 82313 - protein, 296 aa, Unknown
  Bacterial polypetide isolated from the Sargasso Sea
LKRFADIDSIDIEIDSKDSQAIIETIKNISGTFGGINLEDIAAPDCFIIEQKLREVLNIPIFHDDQHGTAIITLAALINALDICKKKIEKVKVVINGAGASAQACTNLFMSSGVKKENIIMCDSKGVIYKGRKNIDQFKSAFASNTKLRSLEEAIEGADVFLGLSAKDVVTKNMVKSMAKNPIIFACANPDPEIKPEAIEEVRSDAIIATGRSDYPNQVNNLIGFPYIFRGALDVRAKEINEEMKVAAAKSIALLAREDVPDEVVSAYGGDRPKYGKNYIIPSTFDPKINKCNTLS

SEQ ID NO: 82314 - protein, 214 aa, Unknown
  Bacterial polypetide isolated from the Sargasso Sea
MNEPEAEGVTFIETDVAREAGVRDLMTRVEFDFGHLDILVNNAGICIEEPIAETAEEDWDRVMAVNVKSTFLTTKHALPLMRAKSALHPAIVNISSIEGLGANPLHSVYAASKAAVAAFSHNTALEYGPYGIRCNAVAPGWINTPFNEQLLTQYPDRAAVDAEIEALHPVGRLGSPEDVANTVFWLASHDAAFVTGQEVVVDGGRLAKLPLPAL

SEQ ID NO: 82315 - protein, 48 aa, Unknown
  Bacterial polypetide isolated from the Sargasso Sea
LGRRAVAIQADSADPVAVRDAVDRAAEAFGGLDILVNNAGIFRAGAEN

SEQ ID NO: 82316 - protein, 234 aa, Unknown
  Bacterial polypetide isolated from the Sargasso Sea
MSNKYKNLFDLTDKVAIVTGSSRGIGASIAEAFAEFGASVVLSSRTKESVDEIATNIKKNGFKAEAVECHVGEEEQLKNLVETTIKTYGKIDILVNNAGINPVFDRLENADDKLFNKIIDINVKAAFKLSNMVMKYMKENNAGSIINISSVEGHKPDKGLGVYSISKAAISMLTKSQAKEWGKYGIRSNAICPGLIKTKLSSALWQNEEMLEIWLKDLPIRKAAEPEEISGMAV

SEQ ID NO: 82317 - protein, 262 aa, Unknown
  Bacterial polypetide isolated from the Sargasso Sea
ALINACDIAKKKLNEINVVINGAGASAMACAKLFINSGVNKNKIKMLDSKGVIYKGRDNLNEWKNEFSIKTDDRDLNDSIKNADVFLGLSQAGVLKKDMVKNMAKNPIIFACANPDPEITPEEIEEVRNDAIVATGRSDYPNQVNNLIGFPYIFRGALDIRSKTINEEMKVAAVRAIASLARERVPDEVVAAMGGERPVYGKNYIIPSTFDPRLISVIPLAVAKAAIKTGVARIGIENFDNYSEQLKNRLDPTVAVMQGINS

SEQ ID NO: 82318 - protein, 50 aa, Unknown
  Bacterial polypetide isolated from the Sargasso Sea
GVNEDYLIKEIPLGRFGEPAEVANLVTFLCSEEASYITGQTIHINGGLYM

SEQ ID NO: 82319 - protein, 259 aa, Unknown
  Bacterial polypetide isolated from the Sargasso Sea
AVISNGSAILGMGNLGALASKPVMEGKAVLFKRFADIDSIDLEINSSDVDDIVNSIKNFSPSFGGINLEDIAAPDCFIIEEKLKEILDIPVFHDDQHGTAIITTAALINALDISGKSIKDIKVVVNGAGASAMACTNLFKNSGVPQKNITMIDKKGVIYRGRENLNQWKTSHAIETKDRVLSDAIKGADVFLGLSAKGALTKEMVTKMAKNPIIFACANPDPEITPEEIEEVRNDAIIATGRSDYPNQVNNLIGFPIYF

SEQ ID NO: 82320 - protein, 303 aa, Unknown
  Bacterial polypetide isolated from the Sargasso Sea
ANPDPEITPEEVEEVRSDAIIATGRSDYPNQVNNLIGFPYIFRGALDVRAKTINEEMKVAAANAIASLARERVPDEVVAAMGGDRPKYGKDYIIPSTFDPRLISVIPVAVARAAIKSGVARKKIKNFDEYADQLKQRLDPSVTILQGINSQIKKTQKRIVFTEGEDQNTLKAAIAFKKNGLGIPILVAKEKIVKKKLKEIGYSENFDIEIINSTSKDNKEKYLKYIFKKLHGDKGELEPDVYELYLKDCDRIIKNDKVVWGSCMVACGDADAMVTGNTRRYAQSLDKVLKVVDSRPGEIMYGL

SEQ ID NO: 82321 - protein, 203 aa, Unknown
  Bacterial polypetide isolated from the Sargasso Sea
MKKISVIGAGVIGSGWIIRFLAHDKKVTAYDKDSKLKKKIIAEIRRTWPYVKKLFNKKKLKLKNFKYVTSLKEALKDADFIQECAPENYKLKTTLMEIIGKYSKPNAIISSSSSGLLPSKIYSKCKNPSRTIIAHPFNPVYMIPGVELVPGKKTSKKILNKAKRFYKSLSMNPIILKKELPGYLSDRLQEALWREALHIVNEG

SEQ ID NO: 82322 - protein, 311 aa, Unknown
  Bacterial polypetide isolated from the Sargasso Sea
MCDSKGVIYKGRKNIDQFKSAFAIDTKLRTLAEAMKNADVFLGLSAKDVVSKEMIKSMAKNPIIFACANPDPEIKPELIEEVRDDAIIATGRSDYPNQVNNLIGFPYIFRGALDVRAKAINEEMKVAAANAIALLARENVPDEVVAAYGGDRPRYGKNYIIPSTFDPRLISVIPAAVAEAAMKSGAARKKIEDLQLYRDQLTNRLDPSMSIMQGINAKIRKNPKRVIFAEGEDENMLKAAIEFGRNKLGVPILIGAENRVKEQLKKIGLDENYKIEIVNSTDKKKREKYVKHLYKKLQREGQLERDVDRLV

SEQ ID NO: 82323 - protein, 225 aa, Unknown
  Bacterial polypetide isolated from the Sargasso Sea
MIDLKNLNIILTGSTGGIGGAILEKLYSSNATIIATGTNQVKLDKIKENYKNVIIKKFDISNHSTIEKFINDCNDILNNKIDVLINNAGITSDNLTLRMKEEEWNRVINLNLTSTFLLSKYAIKNMLKNKSGKIINITSVVGHTGNIGQANYSASKAGIIGMSKSLAQEYGRKNISINCVSPGFIKSEMTDKISDIYKKTMEEKISLGRFGVPEDVANVVAFLSS

SEQ ID NO: 82324 - protein, 244 aa, Unknown
  Bacterial polypetide isolated from the Sargasso Sea
MGRTAIVTGGAKGIGLAIATRFIHSGANVTIWDIDEDRLKQSIDLLENKGAVKTEVVDVTNKKSIEAATNKVLESENKIDILVNNAGAVGTLAPVWEQPIENWEKMLRLNLTSAFMCCQIIVPSMISKKYGRVVNIASNGGKIGIKNNSGYAAAKAGLISLTKSLSKEVAKTGVLVNCITPGGANTELFDKLSNEYRTTIEEGMELGRLVEPAEIAALAAWLASEECSFSTGAAFDISGGRADY

SEQ ID NO: 82325 - protein, 275 aa, Unknown
  Bacterial polypetide isolated from the Sargasso Sea
IKDARVVINGAGAAGVACAELLKGMGVPPKNVILCDTRGVIFTGREAGMNQWKSAHANPTELRTLAEAVKGADVFFGLSKKGVMTAEMVKGMAPQPIIFAMANPDPEITPEEVAAIRGDAIMATGRSDYPNQVNNVLGFPYIFRGALDVRASTINDAMKIAAAEAIAALAREDVPDEVAAAYSAGNLRYGPEYIIPAPFDPRLISAVPMAVAQAAIASGVAQKPFADENDYRRSLGVRLDPAASNVQMIQEEVRSKPVRMVFAEGEEEPVIRAAL

SEQ ID NO: 82326 - protein, 215 aa, Unknown
  Bacterial polypetide isolated from the Sargasso Sea
SIDLEIDSEDPEEIISSIKNFAKSFGGINLEDIAAPDCFIIEEKLKKLLDIPVFHDDQHGTAIITYAALINAIDIAKKNIKKIKVVVNGAGASAMACSNLFKNSGVPGKNITMLDRKGVIYKGRKNLNKWKLSQAIDTKDRTLNDAIKGADVFLGLSSAGALKKDMVKKMAKNPIIFACANPDPEITPEEIEEVRKDAIIATGRSDYPNQVNNLI

SEQ ID NO: 82327 - protein, 234 aa, Unknown
  Bacterial polypetide isolated from the Sargasso Sea
MADPCVIVTGASKGIGAAIAIELDKRGLPVIGLSRAGDTVVGNAFVCDMTNEDQVRKRIGAIGAERGIAALVNNAGLYIGSPIAELSTDQYEQVMNLNAKAVMIASREAYPHLRDSGGTIVNIGSFFDKMGVPHNLPYCASKAAVAAMTRCMAVEWARDGIGVINVAPGYIETDLNADYLGRQKVQHWLAGRVPTGGPGKPDDVARLVAALICEDIPFLTGETIYIDGGQGMNH

SEQ ID NO: 82328 - protein, 234 aa, Unknown
  Bacterial polypetide isolated from the Sargasso Sea
KLTDICGENFIPLIFDVTDINAIKEAANLVESHLGKNGLNCLVNNAGINISGPMEYVESDEVRRVFEVNVMGPLNCSQSFLPMLKKSTSATIINISSMAGKIGLPMQGSYCGSKFALEGISESMRRELQIHNIKVVVIGPGAIESSIWDKFEKDEKEEQYKDTEYTSAIKKMDGTLKRARSIAIPAHRVAKKVEKIVNSKNPKPRYVVAGITDKMLNLIPRKILDKAFKMLLTK

SEQ ID NO: 82329 - protein, 230 aa, Unknown
  Bacterial polypetide isolated from the Sargasso Sea
FGYAIAKRFVQSGAKVINIDKDPESTADIKNNGEINFLEIYQIDITDYDVVEQTINSIIDKYINIDILVNNAGIAGPSFKTWDYPLDDWHQVIDIDLNGTFNCCRLVAPHMIKNNYGRIVNIASIAGKEGNPTASGYSAAKAGVIALTKSMGKELADYNISVNCVTPAAAKTKIFEQISEDHINYMLSKIPRKRFLKVDELASLVSWMVSEENSFTTAGVFDISGGRATY

SEQ ID NO: 82330 - protein, 211 aa, Unknown
  Bacterial polypetide isolated from the Sargasso Sea
QQQQQQQQQQQQQQQQQQQQQQQQQQRQQWQQHDNSHSHSHSHSHSHSHSHSHSHSHSHSNSNSNSNRKRNPNSRRAAAQATSSHTHHHYQQQAQSSSPIFSRLNLKTHLQGIDHRTSLVPSPAAATSVAGSRVRVPLGLCGSRRSCRRGLQHVLHQSAYGRGYVHGGDLGDAALVEAAGRNFHVGRSAVFELQRDYVSPARVSRSVRDEG

SEQ ID NO: 82331 - protein, 237 aa, Unknown
  Bacterial polypetide isolated from the Sargasso Sea
MSQTRTVVVTGGNRGIGLATAKRFAELGHRVAITARDPGHIDDQILAVSCDQTDSNAVDAAFDEIESNLGAVEILVANAGITRDQLMLRMSDDDFSAVIETNLTGSYRMARRAARPMLRARWGRLIFVSSVVGLLGSAGQVNYSASKAGLIGMARSMARELGSRNITANVLSPGPVDTEMFAALTEEQQATITEQVPLNRVAQPEEIAETITFLASDSAAYITGAVIPIDGGLGMGH

SEQ ID NO: 82332 - protein, 184 aa, Unknown
  Bacterial polypetide isolated from the Sargasso Sea
MSDDMKQAALDYHEFPRPGKISVELSTPAESQLDLSLAYSPGVAEPVREIAKDPDNAYRYTAKGNLVAVITNGSAILGLGDLGPLASKPVMEGKSLLFKRFAGIDSIDIEVDAESPQAFIDTVARIAETFGGINLEDIKAPECFEIERALIERCNIPVFHDDQHGTAIVTAAGMITALKLRAKR

SEQ ID NO: 82333 - protein, 288 aa, Unknown
  Bacterial polypetide isolated from the Sargasso Sea
ALLTGEEKILPKEAKYFFCTVESMPKNISVDCIIIDEVQLTADYERGHIFTDRILNLRGNFITIFLGSLNIENLLKKIYPNIIIEKKKRFSQLSFLRKQNFSKLEPRSAIIAFNINKVYEIAENIRTHKGGTAVVLGSLSPRTRNAQVEVYENKNVDYLVATDAIGMGLNLNINHVSFSALEKFDGRYNRNLAPNELGQIAGRAGRYKQDGTFSHTKEAGNLDPLIIQQIETHNFDNIQKIYWRNSDLDFNSIDALLSSLKKYPIHNYFIHKKNALDEINLRNLINDN

SEQ ID NO: 82334 - protein, 288 aa, Unknown
  Bacterial polypetide isolated from the Sargasso Sea
YLADSIAAFKSCNVVVEAVFEDLEVKHAVYEELEQHVSSECIIASNTSSLPISSLGRSCEKQERFAGLHFFNPVPLMRLVEVIRGPSTDDWVIDGLVKLGERMGRTPVVVRDAPGFLVNTGGRAFTTEALHILHEGVAKQSQVDAVMRDCAHFRMGPFELMDLTGVDVNYPASLIMHEQNSYDPRIRTVPFHKSLYDAGRFGRKTRHGNYKYDAEGNIVDIESPDYQTSSQKAPKVIIGENAEIFSDILAGSAMALIDDGESPIVAALFGEDCSSFAHRTGLDYRRIV

SEQ ID NO: 82335 - protein, 173 aa, Unknown
  Bacterial polypetide isolated from the Sargasso Sea
WGRIDSLICNAATTPVFGPISTLTDKAFDKIMNINLKSSLWLSNLSVPHMVKNGGGSIILMSSITAFVGTDTIGAYGISKAAEASLVRNLAVELGPKGIRVNGIAPGLIKTDFSKALWENPKLLEKQEKQTPLRRIGRPDDIAGIAHFLVCDASSYIAGQLIVADGGETISWG

SEQ ID NO: 82336 - protein, 243 aa, Unknown
  Bacterial polypetide isolated from the Sargasso Sea
QAAAQHALEGFVRAVGKEIGKKGATANLVWIAPNAENQLDSSVRFFLSPRSAYVSGQVVRIGKADEAKATNPVAPLAGKVALVTGASRGIGAAIAATLARDGATVIGLDIPPALEELQKVTGALKGKALACDITDEKAPKLIADFIEKETGGVDFVIHNAGITRDKTLGNMPEHFWDMTIAVNLTAEELIDEELAERKLIRENGRIVCISSISGIAGNFGQTNYSCAKSGVIGYVEAMARHLK

SEQ ID NO: 82337 - protein, 190 aa, Unknown
  Bacterial polypetide isolated from the Sargasso Sea
MKLKDKVALVTGGASGLGQATVEAFVANGAKVVILDINEDKANEIIKALGDDNVLFISTNIMEEDPVVDAVNQIKDKFGALHIAVNCAGTGYPGRILGKEAPHPLDAFKFIINLNLVGTFNVMRIAAELMDKNDPGAKGEKGVIINTASIAGYEGQIGQSAYSASKAGVIGLTLTAARELARHAVRVCTI

SEQ ID NO: 82338 - protein, 272 aa, Unknown
  Bacterial polypetide isolated from the Sargasso Sea
LFKKIGVKNENVIMCDRKGVIYKGRDQVDQFKSAHAVETKLRTLEQAMRNADVFLGLSAKDVVNREMIKSMAKNPIVFACANPDPEIKPEIINEVRDDVIIATGRSDYPNQVNNLIGFPYIFRGALDVRAKIINDEMKVAAANAIALLAREDVPDEVVAAYGGERPKYGKEYIIPSTFDPRLVRRIPSAVAEAAMKSGVARKKIENLENYKDQLTARLDPSMSLMQGINANVKKSPKRVVFAEGEDENMLKAAIEFGKNKLGTPIVIGNEKR

SEQ ID NO: 82339 - protein, 189 aa, Unknown
  Bacterial polypetide isolated from the Sargasso Sea
KFDISKHNEIENFIDKCNEILDNKIDILINNAGITKDNLSIRMKDEEWSKVIDINLTSTFLLCKSAIKKMLKNKNGKIINITSVVGHTGNIGQANYVASKAGVVGMSKSLALEYGKKNITVNCISPGFIKSNMTEKINDNHKELLKSRIPLERFGDPIDIANTVVFLCSNLSDYITGETIHVNGGMYFS

SEQ ID NO: 82340 - protein, 254 aa, Unknown
  Bacterial polypetide isolated from the Sargasso Sea
MILERFKITGKVAIVTGGTRGIGLAIAHALGEAGAKLVVTSRTDKFGGLNSLKEAGHDVSFFESDITDKSVPQKIIDYTLDKHGVIDILVNNAGVAQHGEMEEFNDELLDKIMNINVDSVFRMCRSVLTPMKKQGSGVILNIGSISGLVSNIPQPQVAYNASKAAVHMMTKSLASDFADQNIRVNAIAPGYFRTEMTKLSKETEHWYPTWDKMTPLNRMAETEEIGAAALFLCSPASSYVTGEVLVVDGGYTSR

SEQ ID NO: 82341 - protein, 254 aa, Unknown
  Bacterial polypetide isolated from the Sargasso Sea
MSRLKDKVAIVTGGASNPGLGHSTIHKFAEEGAKIVVTDIDVEGGEKTVSEVKEKGGEAIFIKQDVVSTEDWKNVVDASISEFSKIDILVNNAGIALIGPFEEFSEDQWDQQINVNLKSVFLGCKAVIPEMKKNNSGSIINLSSIAGLVGLQGCAAYNASKGGVRLLTKSIAIEYGPNKIRCNSIHPGFMATNMNDPKKIAERGRDFEAIIETIPLKSMGTAEDIANCALYLASDESSYVTGSEYVVDGGWTTR

SEQ ID NO: 82342 - protein, 180 aa, Unknown
  Bacterial polypetide isolated from the Sargasso Sea
VVVLGAGPIGLMSVFYAARAGATDIAVTARYDHQADAARMLGATHVFDSDGDGPEKLRSWAEEHPVDLVMETVGGTANTPTLAGQVARRGGRVLILGVFDPGVAMPASLILSRQLRLAGTIFYGYIGMQHDYEIATDLLNEHRDLLGNLITHRVSLDDVALGVGYAGDKSSGALKVAIEP

SEQ ID NO: 82343 - protein, 292 aa, Unknown
  Bacterial polypetide isolated from the Sargasso Sea
ATGRSDYPNQVINLIGFPYIFRGALDVRAKTINEEMKVAAAHSIAELAREYVPDEVVAAMGGERPIYGKEYIIPSTFDPRLISVIPVAVAKAAIKSGVARKKIENFETYKEQLKQRLDPSTTIMQGVNTQIKKSQKKVVFADGEDENTLKAAIAFKSNGLGIPILIAKKEIVRQKLKDIGLDENYKIEIVNSTDKEKREKYAKFLYGKLQRKEGLLERDCDRLIRNDRVTWGTCMVSCGDADALVTGNTRRYTSTLDKVKRVVDPRSGEIIFGLNIMVNRGRTVFIADITVH

SEQ ID NO: 82344 - protein, 245 aa, Unknown
  Bacterial polypetide isolated from the Sargasso Sea
MISLKDKKIIVTGATGGIGNSIIKLLSDSGAQILATGTKIDKLEELKSKFKNVKILNFDISKNQKIEEFIENASKQIGGGLDCLINNAGITQDNLAIRMSLEEWQKVIEINLTATFLLSKFAIKKMLRSKSGKIINITSVVSHTGNLGQANYTASKAGIIAMSKSLAIEYAKKNININCVSPGFIKTDMTDKIDQKFKEAIISKIPSSRLGEPEDVANAVIFLASDQSNYINGETIHVNGGLYMA

SEQ ID NO: 82345 - protein, 231 aa, Unknown
  Bacterial polypetide isolated from the Sargasso Sea
MSNLKNKIIMITGASSGFGKETAKMCVDLGAKVVLGARREDKLADLCNELGSDSAIYKAIDVTSKEQMHALANYGIETFGRIDSLVNNAGIMPLSLLERGRTDEWDQMIDVNIKGVLYGIDSVYSHMLERESGQIINISSVAGKRVMPGSAVYSGTKYAVRAISEGLRIESSGKIQVTCIYPGAFKTELAFSIKDESMLEALMSRGIGEIAQPAERVAESIIYALQLDPGG

SEQ ID NO: 82346 - protein, 287 aa, Unknown
  Bacterial polypetide isolated from the Sargasso Sea
MSIRFDDRVAIVTGAGGGIGKEHALELARRGAKVVVNDLGGSVDGSGASDAANEVVDIIKSEGGEAIANGASVTNLDAVKEMTNQTMEKWGRIDILVNNAGILRDKSFHKVTLEDFNLVMDVHFQGSLNCTHTIFPIMREQEYGRIVFTSSSSGVFGNFGQTNYGSAKMAMVGLMNTLKIEGQSKNVFTNSITPVAYTRMTEGLIPEDFGKNLQPEFVTPAVIYLSSENAPNGTIMAAGAGVFSRIFIHETMGVSLGMGEDMTPENIEANWDKISDMTDARALQNGG

SEQ ID NO: 82347 - protein, 272 aa, Unknown
  Bacterial polypetide isolated from the Sargasso Sea
TKQMVKKMAKNPIIFACANPDPEITPEEIEEVRNDAIIATGRSDYPNQVNNLIGFPYIFRGALDVRAKTINEEMKVAASLAIAKLAKEDVPDEVVAAMGGERPHYGKDYIIPSTFDPRLISVIPCAVAKAAMKTRVARKKIENFDIYQDQLKERLDPTVTIMQGINGYIKKNQKKIVFADGEDQNTLKAAIAFKNSRLGIPVLIGKKEKIKEQIKKIGYNENFDIEIINSKDKPKREKYVKFLFKKLQREQGLLERDCDRLVRNDRVVWASC

SEQ ID NO: 82348 - protein, 68 aa, Unknown
  Bacterial polypetide isolated from the Sargasso Sea
MYLKKINLKKKVALVTGAGKGIGKACAIALAEAGADLIIISRTQKDLDAVSKIIKRFKSKCSSYVCDV

SEQ ID NO: 82349 - protein, 207 aa, Unknown
  Bacterial polypetide isolated from the Sargasso Sea
MDVSKELDWKSFLKFLKVQKFNKINILVNNAGIYLGKDILKVTSKDFTELISINLLGTFFGIKFITPHLKKAGEFSNSMSSIINLSSIAGLVGSRLDPLYSMSKGGITTFTKSMAIYYGNRKYPIRINQIHPGIIETDMGKQVEDSRIIQNPNMSKKQSYNEGIKQTPIGRLGSPNEIAQGILYLASNDSSFMTGSSLVVDGGLTAQ

SEQ ID NO: 82350 - protein, 148 aa, Unknown
  Bacterial polypetide isolated from the Sargasso Sea
KKADVFLGLSQAGVLKKDMVKSMAKNPIIFACANPDPEITPEEIEEVRNDAIIATGRSDYPNQVNNLIGFPYIFRGALDVRSKTINEEMKVAAVDAIASLARERVPDEVVAAMGGERPVYGKDYIIPSTFDPRLISVIPLAVAKAAIK

SEQ ID NO: 82351 - protein, 252 aa, Unknown
  Bacterial polypetide isolated from the Sargasso Sea
INNVKIVVNGAGASAQACTNLFKSSGVKDENIIMCDSKGVIYKGRKNIDQFKSAFAANTKLRTLKEAIKNADVFLGLSTKDVVSKDMIKSMAKNPIIFACANPDPEIKPEIIKEVRSDAIIATGRSDYPNQVNNLIGFPYIFRGALDVRAKEINEEMKIAAAKAIALLAREGVPDEVVSAYGGDRPKYGKDYIIPSTFDPRLISVIPSAVAKAAIKSGVARKKIEDFDLYKDQLTNRLDPSMSIMQGINAKV

SEQ ID NO: 82352 - protein, 288 aa, Unknown
  Bacterial polypetide isolated from the Sargasso Sea
ELFILERKENMNQWKSAHAVKTKCRTLEDALNGADIFFGLSIGNIISQKMVLSMAEKPIIFAMANPEPEILPEKIKECRDDAIIATGRSDYPNQVNNVLGFPYIFRGALDVRAKTINLEMKIAAARAIADLAKEDVPDEVANAYPGKRPQYGPDYIIPSPFDPRLISKVPPAVAKAAMDTGVARKAIVDIENYSNELSARLNPSAGLLQKVFQEVKENPKRVIFTEGEEEDMIRAAVIFLNNRMGTPILIGRDDVIKDKMQEMGLDFFDQMEIHSTRNKSEHDRYAEH

SEQ ID NO: 82353 - protein, 104 aa, Unknown
  Bacterial polypetide isolated from the Sargasso Sea
MYLKKYNLKNKIALVTGAGKGIGRACAIALAEAGANLLLISRTKKDLEQVSRIIKKLKVKSKSYVCDITNYNEIKEIINKQHNIDILINNAGTNIPEHFTKVKR

SEQ ID NO: 82354 - protein, 197 aa, Unknown
  Bacterial polypetide isolated from the Sargasso Sea
DRKGGSAVSRTADVTESGAVQQVVSDTVAESGRIDILVNNAGIMRISDMTENHIEDWTAMVDVNIKGVLHFLSAVMPNMIQQGSGHIVNVGSVAGRRPFPGASVYAATKFAVRALSWGLHLELGAAHGIRVTDIQPGFVSTDLLAEQPETLTSWSEAWAERRTLEPEDVARSIVFAVTSPDHVSVSEILVRPTDQPT

SEQ ID NO: 82355 - protein, 217 aa, Unknown
  Bacterial polypetide isolated from the Sargasso Sea
AKLILADINKDLLEKVSKDLNQDFFYTDVASSSSMQQLANYVLKKYGTIDIMVNNAGITHLPKPLEEVSEEEFDKVFAVNSKSVFLCGKFFVPHMKKQKKGSILNIASTAGISPRPNLNWYNATKGWMITATKAMAVELATFNVRVNSLAPVAGETPLLKSFLGEDTSERRNAFLSTIPIGRFSTPKDLGNAACYLCSDEASMITGAILEVDGGRCI

SEQ ID NO: 82356 - protein, 146 aa, Unknown
  Bacterial polypetide isolated from the Sargasso Sea
MKTRAAVAMEAGKPLEIMEVDLDGPRAGEVLVEIMATGICHTDEFTLSGADPEGMFPAILGHEGAGIVREVGAGVTSVNVGDHVIPLYTPECRECDYCLHPKTNLCQAIRTTQGQGVMPDGTSRFSLNGKPILHYMGTSTFSNFTV

SEQ ID NO: 82357 - protein, 321 aa, Unknown
  Bacterial polypetide isolated from the Sargasso Sea
DFTMVSNGAGAAGIACAELLNAMGVPKKNITMCDTKGVIHRERTDLNQWKSAHAITTKKRSLKEALEGADVVFGLSVKGAFSQEMMEKMAKNPIVFAMANPDPEITPEDLKKIRPDAIIATGRSDYPNQVNNVLGFPFIFRGALDVRASRINMEMKIAAANALAQIARLDVPDEVAAAYSGAELHYGPEYIIPTPFDPRLITTVPPAVAEAAIRSKVAKKPLKDELSYRRELAMRLDQTASMMQVISSRVKDNPKKIVFAEGEEERIIRAAFQWTKEGYGESILIGRNSRVLKAIETLGLDPEQKGVQILNAKNSKRNDHY

SEQ ID NO: 82358 - protein, 279 aa, Unknown
  Bacterial polypetide isolated from the Sargasso Sea
MEGKAVLFKRFADIDSIDLEIDSKNSDEIINSIKNFAPSFGGINLEDIAAPECFIIEEKLKEILDIPIFHDDQHGTAIITTAALINALDINGKSISKVKIIINGAGASAMACANLFKKSGVPQKNITMVDRTGVIYKGRNKLNKWKSLHAVKTSDRSLNDAIEGADVFLGLSAKGALSKNMVKKMAKNPIIFACANPDPEITPEEIEEVRDDAIVATGRSDYPNQVNNLIGFPYIFRGALDVRAKTINEEMKVAASLAIAKLAREDVPDEVVAAMGGER

SEQ ID NO: 82359 - protein, 282 aa, Unknown
  Bacterial polypetide isolated from the Sargasso Sea
KDKNITMLDSKGVIHSERDNLNEWKKKFAIKTKNRTLNDAINGADVFLGLSQAGVLKKEMVKKMSKNPIVFACANPDPEITPEDVEDVRDDAIIATGRSDYPNQVNNLIGFPYIFRGALDVRSKTINEEMKVAAVKAIATLARERVPDEVVAAMGGDRPHYGKEYIIPSTFDPRLISVIPVAVAKAAIKTGVARKNIEDFDVYAEQLKNRLDPSVAVIQGINSQIKKNQKRVVFADGEDENNLKAAIAFKNNGLGEPILIAKEDIVKKKLYEIGYEEKLDIK

SEQ ID NO: 82360 - protein, 241 aa, Unknown
  Bacterial polypetide isolated from the Sargasso Sea
SRRVLVTGASRGIGRAIAYQLASDGFDVSVHCRSGRAEADAIVADIHANHGSARVLQFDVRDRAACRTQLDADVEAHGAYYGIVLCAGVTRDAAFPALTDEDWDIVLETGLDGFYNVVHPLTMPMVRARKGGRIVTIASVSGVMGNRGQVNYSAAKAGLIGATKALAVELASRKITVNCVAPGLIETDMLAHMEHVDQALRAVPMQRVGQPAEVAAVVGFLMSDAASYVTRQVIGVNGGMV

SEQ ID NO: 82361 - protein, 69 aa, Unknown
  Bacterial polypetide isolated from the Sargasso Sea
MKKISLIGAGQIGGTLAHLIAIKELANVVLFDIDEGIAKGKALDIAQSLAVDGYNVKLSGTNNYEETKD

SEQ ID NO: 82362 - protein, 258 aa, Unknown
  Bacterial polypetide isolated from the Sargasso Sea
HDDQHGTAIIAGAALLNALEITDRSVQDVRVVFSGAGASALSTAEHFQRLGVKKENILIVDSVGVIYEGREERMNEYKTPFAVKTDRRTLEEAMKDADVFIGLSVKGIVSKDMVKGMAADPIIFALANPDPEILPEDVAEVRQDAIMATGRSDYPNQVNNVLGFPFIFRGALDVRAKAINPEMMLAATKALADLAREQVPEAVRGAYEGSEIAYGRDYLIPKPFDRMVLYHVAPAVAQAAMDSGVARIDVELGEYSDR

SEQ ID NO: 82363 - protein, 273 aa, Unknown
  Bacterial polypetide isolated from the Sargasso Sea
GLGNLGALASKPVMEGKAILFKRFADIDSIDLEIDSSNADEIINCITSLSKSFGGINLEDIAAPDCFVIEQKLREKLDIPIFHDDQHGTAIITLAALINALDISGKSLKDIKVVVNGAGASAIACTNLFKSSGVPNENIIMIDRKGVLYRGRDNLDQWKSTHAIDTKLRNLKEAIKDADVFLGLSAKDVLTKDMVKSMAKNPIIFACANPDPEISPEDVHEVRQDAIVATGRSDYPNQVNNLIGFPYIFRGALDVRAKNINEEMKVAAAHAIA

SEQ ID NO: 82364 - protein, 68 aa, Unknown
  Bacterial polypetide isolated from the Sargasso Sea
MKAAVFREVNVPMEIEEITVSKPGPREVLIRTTAAGICHSDMHFFNGSYPGKVPMVLGHESTGIVEQV

SEQ ID NO: 82365 - protein, 284 aa, Unknown
  Bacterial polypetide isolated from the Sargasso Sea
GKSVLFKRFADIDSIDIEINNNKTDSIIETIKNISGTFGGINLEDIAAPDCFIIEQKLKEVLDIPIFHDDQHGTAIITTAALINALDVSGKKINNVKIVVNGAGASAQACTNLFKSSGVKNENITMCDSKGVIYKGRKNIDQFKSAFAIDTKLRTLGEAIKNADVFLGLSAKDVVSKEMVKSMAKNPIIFACANPDPEIKPEIIEEVRSDAIIATGRSDYPNQVNNLIGFPYIFRGALDVRAKEINEEMKVAAAKAIALLAREDVPDEVVSAYGGDRPKYGKNI

SEQ ID NO: 82366 - protein, 263 aa, Unknown
  Bacterial polypetide isolated from the Sargasso Sea
MRAAILRDDSGTLNIEDVTIDKPDRNEVLIKTVASGLCHSDLHFIDGSWSFLAMYPMLLGHEAAGVVQAVGEDVVGIQTGDHVITCLSMFCGYCERCLTGHSYICSERQQVQGRQPGNQPRITDHDGAEVNQFTGIGSFGEEMLVHQNGVVKISNDMPLDRAALVGCGVTTGVGAVFRSAEVKPGSTVAVVGCGGVGISTIQGAHLAGARQIIAVDLEQQKLDWATQLGATHTVNPNDGDPVAQVLELTSGGVDYSFEAIGLK

SEQ ID NO: 82367 - protein, 294 aa, Unknown
  Bacterial polypetide isolated from the Sargasso Sea
KLGHAIKTKNRTLNDAIVDADVFLGLSSAGILKKEMVKKMAKNPIIFACANPDPEITPEEVEEVRSDAIIATGRSDYPNQVNNLIGFPYIFRGALDVRAKTINEDMKIAAANAIASLAKKRVPDEVVAAMGGDRPIYGRDYIIPSTFDPRLISVIPVAVAKAAMKSKVARKKIKNFDIYSEKLKQRLDPSVTIMQGINSKIKKNQKKVVFTDGEDENTLKAAIAFKNAGLGVPIIIAKEKVVKQRLRQIGYVENLDIQIINSTDKTKTDKYSKFIFKKLHGDKGSLEPDVNELY

SEQ ID NO: 82368 - protein, 171 aa, Unknown
  Bacterial polypetide isolated from the Sargasso Sea
MLLKNKTAVITGCNRGIGFSILETYLKNGANVIACVRSESELFRDKIDLFSKKFEAKVNVVKFNLENEEEIEKGFLEIKKISPKIDILVNNAGINQMSLFQMTTLKTFRSVFDVNFFSIVSLTQKILKIIVKKNNSKIINIASNAADLSSQGRAAYAPSKAALLSLRKYIK

SEQ ID NO: 82369 - protein, 312 aa, Unknown
  Bacterial polypetide isolated from the Sargasso Sea
GAGASAQACSDLFKNSGVPNKNLIMIDRKGVIYKGRSEGVNQWKSKHANETKLRTLDEAIVGADVFLGLSAKGALKKEQVKKMAKNPIIFACANPDPEITPEEIYEVRDDAIIATGRSDYPNQVNNLIGFPYIFRGALDVRSKTINEKMKVAAAQAIAKLAREEVPDEVVAAMGGERPHYGKDYIIPSTFDPRLISIIPAAVAKAAMDSGVARKGIDNFDLYKEQLKQRLDPTVTIMQGINSYIKKNQKRIVFADGEDENTLKAAIAFKNSKLGIPILIGKEEKIKEQIKNIGYSENFNIEIVNSKDEEKRK

SEQ ID NO: 82370 - protein, 251 aa, Unknown
  Bacterial polypetide isolated from the Sargasso Sea
MKNLRGKNAIVTGGAKGIGKSVCLALANAGANIHILDINKDEGQETVKEIAKLNVQVSFYQIDVADDNSWIEFSNFLKSKKILIDILVNNAGIWIGKDINNVSLEEYQRLISINLTGVFLGIKYLVPFLTEAGKKSKFGSTIINLSSVAGLVGSQLDPLYSMTKGGITTFTKSMAIYFGKNKFPIRINQVHPGIIETDMGTQVYKARISQNPEMTTEESISAGINQTPIGRLGTADEVAKTILFLSSDNSS

SEQ ID NO: 82371 - protein, 55 aa, Unknown
  Bacterial polypetide isolated from the Sargasso Sea
MSKKISLIGAGQIGGTLAHLIGLKELANEVVLFDVASGIAKGKALDIAQSSSVDG

SEQ ID NO: 82372 - protein, 299 aa, Unknown
  Bacterial polypetide isolated from the Sargasso Sea
FKSAFAIDTKLRTLDEAIKNADVFLGLSAKDVVSKEMVKSMAKNPIIFACANPDPEIKPELIQEVRSDAIIATGRSDYPNQVNNLIGFPYIFRGALDVRAKEINEAMKVAAAKAIALLARENVPDEVVSAYGGDRPRYGKDYIIPSTFDPRLISVIPSAVAEAAMKSGVARKNITDLEIYRDQLTNRLDPTMSLMQGINAKVRKNPKRVIFAEGEDENMLKAAIEFGRNKLGTPILIGAEKRIKEQLNSIGLDENYKIDIVNSTDKEKRQRYVKHLYKKLQREGQLERDVDRLVRNDRM

SEQ ID NO: 82373 - protein, 283 aa, Unknown
  Bacterial polypetide isolated from the Sargasso Sea
KSEHTIETKNRTLEEAIKNADVFLGLSSKSILTKKMVKKMAKNPIIFACANPDPEITPEEVKEVRNDAIIATGRSDYPNQVNNLIGFPYIFRGALDVRARTINEEMKIAAANAIAALAREDVPDEVVAAMGGERPKYGKEYIIPSTFDPRLIVEIPVAVAKAAIKSGVARKKISDFELYKEQLKQRLDPSVTIMQGINNQIKKKQRKIVFADGEDENTLKAAIAFKNSKLGIPILVGKKEKIKEQLKNIGYSENLDIEIINSTDKEKRAKYANYLFKRLQRKE

SEQ ID NO: 82374 - protein, 221 aa, Unknown
  Bacterial polypetide isolated from the Sargasso Sea
MTRMDLLKINAGVVKDVVGNIKKFADDAMIIPVTNPLDPMAQIAYKTSGFDRSRVFGMGGMLDLSRFKQFIHEATGYSRESTKALVIGEHGENMLPLTRFATVSGIPLPTLLPKEKLDEIFTATKGVAAEVIKLKGATVHAPGNAISAMIESVVQDKKQVIPVSTNLDGEYGQKDVSIGVPAVVGKNGVEKILELELNDEEKEWFNKGVDSVKNALSGVEF

SEQ ID NO: 82375 - protein, 284 aa, Unknown
  Bacterial polypetide isolated from the Sargasso Sea
DLAYDYTSKGNLVAVISNGSAILGLGNLGALASKPVMEGKSVLFKRFADIDSIDIEINNNNPDSIIETIKNIGGTFGGINLEDIAAPNCFIIEQKLKSLLDIPIFHDDQHGTAIITTAALINALDISKKNIEKVKIVVNGAGASAQACANLFKSSGVKNENIIMCDSKGVIYKGRKNIDQFKSAFAIETKLRTLDEAIKDADVFLGLSAKDVVSKEMVKSMAENPIIFACANPDPEIKPELIQEVRSDAIIATGRSDYPNQVNNLIGFPYIFRGALDVRAKEIN

SEQ ID NO: 82376 - protein, 209 aa, Unknown
  Bacterial polypetide isolated from the Sargasso Sea
MAIHKILSEERQVDRLDGRTALVTGAARGLGAQIVRRFAEEGAHVIVNDLNLTAAQETAKKYSGDAFACDVSNSSEVDRMFLDIAAKGLEIDILVNNAGISGLEGDNQAQERVRKSLKVAEASAKGELPDIDPPILEVTDSAWSKMLAVHLDGTFFCSRAFVKNFRDSNSLNGIGRAIINMGSIMGTSGGAGSAAYCAAKAGILGLTRS

SEQ ID NO: 82377 - protein, 299 aa, Unknown
  Bacterial polypetide isolated from the Sargasso Sea
KPAETVTDLALAYSPGVAEPVREIAADVDNVYKYTAKGNLVAVISNGTAILGLGNLGPMASKPVMEGKALLFKRFANIDSIDIEVTHRSTEEFINTVANIADTFGGINLEDIKAPECFEIEKELIKRCKIPVFHDDQHGTAIVTAAGMLNALEIQGKDIRQAIIVCMGAGAAAIACMELLIKCGAQREHIYMLDTKGVIHTRRNDLNQYKQLFANNTDKRTLEDALTGADVFVGVSGPDVLPPEALQLMAEKPVIFACSNPDPEIKPELAHAARNDIIMATGRSDYPNQVNNVLCFSFI

SEQ ID NO: 82378 - protein, 305 aa, Unknown
  Bacterial polypetide isolated from the Sargasso Sea
KWEKNPIIFACANPDPEITPEDVETVRNDAIIATGRSDYPNQVNNLIGFPYIFRGALDVRAKTINEEMKIAAADAIAALARERVPDEVVAAMGGDRPKYGKDYIIPSTFDPRLISVIPVAVAKAAIKSGVARKKIENFEIYSEQLKQRLDPSVTIMQGINSQIKKNQKRVVFADGEDENNLKAAIAFKNSGLGIPIIIAKEEIVKKKLKEIGYGENFNIEIINSKNKNLREKYVKFLFNKLHRKEGLLERDCDKMARNDRVVWASCMVECGDADAMVTGNTRRYSSSLKKVTKVIDARPGEIMFG

SEQ ID NO: 82379 - protein, 211 aa, Unknown
  Bacterial polypetide isolated from the Sargasso Sea
KRRLILVKSHLGKNGLDCLVNNAGINISGPMEYVESDEVRTVFEVNVMGPLNCSQSFLPMLKKSSAATIINISSMAGKIGLPMQGSYCGSKFALEGISESMRRELQIHNIKVVVIGPGAIESSIWDKFEKDEMEEQYKDTEYTSAIKKMDGTLKRARSIAIPAHRVAKKVEKIVNSKNPRPRYVVAGITDKMLNLIPRKILDRAFKRLLTK

SEQ ID NO: 82380 - protein, 227 aa, Unknown
  Bacterial polypetide isolated from the Sargasso Sea
MDLNKKVALVTGGASGLGQATVEAYVAKGAKAVILDINEDKALEIINNLGEDKVMFISTDIMKEDPVVEAVNKIKDNFGGLHIAVNCAGTGYPGRILGKEAPHPLDAFQFIVNLNLVGTFNVMRIAAELMDKNEPDEKGEKGVIINTASIAGIEGQIGQSAYSASKAGVIGLTITAARDLARHAIRVCTIAPGIFDTPLMQLAPDKVKRSLLEITQFPHRFGHPNEF

SEQ ID NO: 82381 - protein, 147 aa, Unknown
  Bacterial polypetide isolated from the Sargasso Sea
MKRLNNKVAIVTGGASNPGLGHSTIHKFAEEGAKIVVTDIDVKGGEKTVSEVIEKGGEAIFIKQDVVSTEDWKSVVDASISEFSKIDILVNNAGIALIGPFEEFSEDQWDQQINVNLKSVFLGCKAVIPEMKKNNSGSIINLSSIAG

SEQ ID NO: 82382 - protein, 194 aa, Unknown
  Bacterial polypetide isolated from the Sargasso Sea
MIHDVSDEASWSELVESVFKKYGRIDILVNNAGIGTLPDFEEEDESGWDEMLSVNAKSIWLGIKSVVSIMKSQQSGSIVNVSSIFGASGGFGKSSSYHASKGAVSAMTRNAAIRYANDNIRINSVSPGFIKVLREEKTIEEAGDTMSQDILSRTPMGRWGDADEVAAAIYFLASSESSYITGAELFVDGGWMAT

SEQ ID NO: 82383 - protein, 78 aa, Unknown
  Bacterial polypetide isolated from the Sargasso Sea
MSKISLIGAGQIGGTLAHLIGTKELSDEVVLFDVASGIAKGKALDIAQSSSVDGFDVKFSGTDNYKDIKNSDVIIILQ

SEQ ID NO: 82384 - protein, 184 aa, Unknown
  Bacterial polypetide isolated from the Sargasso Sea
SFENIDSATQEVIKQFKSIDILVNNAGIAGPSFKTWDYPLEEWQQVIDIDLNGVFYCSKAVVPHMIKANYGRIVNIASIAAKEGNPNAMPYSAAKAGVVALTKSLGKELAENNISVNCVTPAAAKTKIFDQISQEHIDYMLSKIPRGRFLKVNELASMVSWLVSEENSYTTGAVFDLSGGRATY

SEQ ID NO: 82385 - protein, 204 aa, Unknown
  Bacterial polypetide isolated from the Sargasso Sea
QEILNKINIKNTIKKVVDVSSYKSVSYGLETTLQELGQIDILVNNAGIAGPSYKTWDYPIEEWQKVIDIDLTGVFFCCKAIVPHMKEKNYGRIVNISSIAGKEGNPNAMPYSAAKAGVIALTKSLGKELAENNIAVNCVTPAAAKTRIFDQISQEHIDYMLSKIPRNRFVLVEELASLVTWMVSEENSFTTGAVFDLSGGRATY

SEQ ID NO: 82386 - protein, 292 aa, Unknown
  Bacterial polypetide isolated from the Sargasso Sea
VAGIPTAWVARWGSGRPVISFGSDIDGIPKANQKPGVAYADPLISGAPGHGEGHNSGQAVNVVAALALKELMESEGIQGTLVLWPGVAEEQLASKAWYVRDGVLDDVDVTLFTHVSSNLGVSWGQAGGTGLVSVEFSFEGEAAHGAGAPWRGRSALDAVELMNVAWNFKREHLRPDQRSHYVITDGGDQPNVVPVSASVWYYFREMDYEDIQRNYDTAVRIAEGAAMMTDTEMSYRVRGAAWPRHFNRTVAETMYEHIEEVGLPEWTEDDHAFAEAVQQSVGSIPSGMPMSL

SEQ ID NO: 82387 - protein, 295 aa, Unknown
  Bacterial polypetide isolated from the Sargasso Sea
RHLVKEIYKNPEMAYYFTTKGNLVAVISNGSAILGLGNLGAIASKPVMEGKAVLFKRFADIDAIDLEIDSKDPDEIVNSIKNFAVSFGGINLEDIAAPDCFIIEEKLKEILDIPVFHDDQHGTAIITSAALINSIQITKKKISKIKVVINGAGASAMACADLFLKLGVNKNNLTMIDSKGVISFDRKGLSKWKLKYAKKTNNKTLIDALKNADVFLGLSSAGILKKQMIKKMAKNPIIFACANPDPEILPEEAFKIRKDAIVATGRSDYANQVNNLIGFPYIFRGALDVRAKTIN

SEQ ID NO: 82388 - protein, 257 aa, Unknown
  Bacterial polypetide isolated from the Sargasso Sea
MKAYPAVISSSVERFRFREALGEMMNAARLGNKYLADEEPWKMIKTDEERTKTQMYVALQIAAALSTLCEPFLPFTAQKLSRILKLEQPLAWNTISETSELLASGHQIGEAELLFSKIEDEAIQQQIEKLQATKTANEAENKVAEPQKELIQFEDFAKMDIRTGTILEAEKMPKANKLLILKVDTGIDVRTIVSGIAESFKPEDIIGKRVTVLVNLAPRNLRGVESQGMILMTTNTEGKLVFVNPDTDGVANGETIN

SEQ ID NO: 82389 - protein, 243 aa, Unknown
  Bacterial polypetide isolated from the Sargasso Sea
LQGKRALITGGSRGIGAAIAKRLAADGADVAITYEKSAERAQAVVAGIEALGRRAVAIQADSADPVAVRDAVDRAAEAFGGLDILVNNAGIFRAGALDDLTLDDIDATLNVNVRAVIVASQAAARHLGEGGRIVSTGSCLATRVPDAGMSLYAASKAALIGWTQGLARDLGSRGITVNIVHPGSTDTDMNPADGEHAGAQRSRMAIPQYGKAEDVAALVAFVVGPEGRSIHGTGLTIDGGANA

SEQ ID NO: 82390 - protein, 167 aa, Unknown
  Bacterial polypetide isolated from the Sargasso Sea
GGILDSSRFKTYISLETNFSQHDIDAMVIGGHGDTTMIPLTSISKCKDKLLSNIVSKDILEKISSDTMVGGATLTKLLGTSAWYAPGASVSYLVNAIINDTKEMLPCSVYLEGEYNAEDLCIGVPVIIGKKGFEEVVDLDINKNEIEMFENSVKAVKQTNLALDGLI

SEQ ID NO: 82391 - protein, 241 aa, Unknown
  Bacterial polypetide isolated from the Sargasso Sea
MSTSPNKVALVTGASDGIGAEFVQILAGRGYDLILVARRKEKLDQLAVKLSDEFGVNCTVMAADLSEPKAAQNLFQRVEDSGLQVNFLINNAGLLHNGFFTKLSLEAQEKMIQVNVMALTALTHLYADNMSANGGGHILNVASLAGWMAIPNQNVYAASKAYVVSFSQALSNEMIAANSGVQVTALCPGYTATKMMDNPDQGATLHIPSSMMMSAKDVAEIGIKACFAGKDIVVPGLANKL

SEQ ID NO: 82392 - protein, 157 aa, Unknown
  Bacterial polypetide isolated from the Sargasso Sea
MNKIDLKNKVAIVTGGAQGFGLAIVEKFLASDAKVIIWDKDKEMMSALNLGDNVHTVEVDVTNFDSVNKATEQSLQISNSIDILVNNAGIAGPSFKTWEYPIEEWQKVIDIDLTGVFYCCKSIVPHMIEKNYGKIVNIASIAGKEGNPNAMPYSAAK

SEQ ID NO: 82393 - protein, 200 aa, Unknown
  Bacterial polypetide isolated from the Sargasso Sea
EISKYSDSSTILKADVSNSAEVSKMVQSVTDQYKRIDILVNNAGIATSAPIHEMTDEMWDELISIHLNGTFYATRECLKVMYEQEYGRIINTASQLAYKGSAGFSHYTAAKGAIISFTRSLSLEIGEMNIRANCVAPGATMTRMLSEVPTEILDGIKASIPKGTIANIEEIVPAYVFLASEDGDHFVGQTISPNGGDHFL

SEQ ID NO: 82394 - protein, 283 aa, Unknown
  Bacterial polypetide isolated from the Sargasso Sea
KIENVKVVINGAGASAQACTNLFKSSGVKSENIIMCDSKGIIYRGRKDVDQFKSAFAANTKLRTLEEAMRNADVFLGLSAKDVVSKEMIKSMASNPIIFACANPDPEIKPEIINEVRSDAIVATGRSDYPNQVNNLIGFPYIFRGALDVRAKVINEEMKVSAAKAIASLAREDVPDEVVSAYGGDRPKYGKDYIIPSTFDPRLISVIPVAVAEAAIKSGAARKEIKDFDNYKDELTNRLDPSMSLMQGINAKVRKNPKRVIFAEGEDENMLKAAIEFGKNKLG

SEQ ID NO: 82395 - protein, 209 aa, Unknown
  Bacterial polypetide isolated from the Sargasso Sea
PFDKICYIGCGVTTGIGAVAFTMNVEPGATVAVFGLGGIGLNVIQGAKLVGARRIIGVDLNADKKELATQFGMTDFVNPSEVDNVVDHLIQMTGGGVDYSFECIGNVNVMRQALECCHKGWGQSCIIGVAGAGQEISTRPFQLVTGRSWRGTAFGGARGRTDVPKIVDWYMEGKIHVDEMITHTMPLTEINTAFDLMHEGKSIRSVVTY

SEQ ID NO: 82396 - protein, 230 aa, Unknown
  Bacterial polypetide isolated from the Sargasso Sea
FGAGSGIGRQIARTFADFGADLILLSKSIEKLESIYEEINQITSGSVIIQPINFKTADEKSYQKIVGAIKEEYSQIDGLVNNAGILGEKKPLEQYSYSVWRDVLKVNLDASFLLTKNLIPLLKESSSSSIIFTSSGVGRKGRAYWGAYSISKFATEAIMQILFEELQNTTSIRVNCINPGAVRTKMRESAYPAENPESNPSANEIMNHYLYLISDLSKDINGQSIDAQEH

SEQ ID NO: 82397 - protein, 273 aa, Unknown
  Bacterial polypetide isolated from the Sargasso Sea
DPEITPEEVEEVRDDAIVATGRSDYPNQVNNLIGFPYIFRGALDVRAKTINEDMKIAAANSIATLAREDVPDEVVAAMGGERPKYGKNYIIPSTFDPRLISEIPLAIAKAAIKSGVARRKIEDFDVYRDQLKQRLDPSVTIMQGINSQIKKTQKRIVFADGEDENTLKAAIAFKNSKLGIPILVGKKEKIKEQLKNIGYSENLNIEITNSNDKEKREKYVNFLFEKLQREQGLLQRDCDRMVRNDRVIWASCMVSCGDADGAVTGNTRRFGTS

SEQ ID NO: 82398 - protein, 220 aa, Unknown
  Bacterial polypetide isolated from the Sargasso Sea
MELKNKVALVTGGSSGIGAETANILSKNGCKVVVGYNRGEKRAKNLVKKLYNNGHSIVKIDLSDQICSEVAKKFIKKTYGRLDYLINSAGYTEPINHADISSLTPEKFNIIISINTGGTYSIIRTFVPLLNLSKSATIVNVSSVSAFTGSGSNIAYCAAKAAIDTMTISLARALGPKIRLLSVSPAAVATNFVEGRTLENLKNIAKKTPLNKVIKPKDVH

SEQ ID NO: 82399 - protein, 298 aa, Unknown
  Bacterial polypetide isolated from the Sargasso Sea
DIPIFHDDQHGTAIITLAALINALDVSKKSIKNIKVVVNGAGASAMACSNLFKNNGVLSKNIIMIDRKGVIYRGRDNLNQWKSAYAIETKHRTLEDAIKGADVFLGLSAKGVLTKDMVKSMAKNPIIFACANPDPEINPEDVHEVRDDAIVATGRSDYPNQVNNLIGFPYIFRGALDVRSKTINEEMKVAAAHAIAGLAREYVPDEVVAAMGGERPIYGKDYIIPSTFDPRLISVIPVAVAKAAVKSGVARKKIENFETYKEQLKQRLDPSTTIMQGVNTQIKKSQKKVVFADGEDEN

SEQ ID NO: 82400 - protein, 245 aa, Unknown
  Bacterial polypetide isolated from the Sargasso Sea
MKSILVTGSSSGIGAAICEHFSQIGWKVFGSIRNQNDGDKLADICGENFTPLIFDVTDIYAIKEAANLVESHLGKNGLNCLVNNAGINISGPMEYVESNEVRKVFEVNVMGPLNCSQSFLPMLKKSTSATIINISSMAGKIGLPMQGSYCGSKFALEGISESMRRELQIHNIKVVVIGPGAIESSIWDKFEKDEKEKQYKDTEYASAIKKLDGTLKRARSIAIPAHRVAKKVEKIVNSKNPKPRY

SEQ ID NO: 82401 - protein, 74 aa, Unknown
  Bacterial polypetide isolated from the Sargasso Sea
MKTKAAVLFGANKKLEICNVDLAKPQKGEVCVEMKAAGVCHTDYSVMKGQLNAPLPAILGHEGAGVVVAVGDGV

SEQ ID NO: 82402 - protein, 74 aa, Unknown
  Bacterial polypetide isolated from the Sargasso Sea
MTKKNSKISLIGAGQIGGTLAHLIGTKELVDEVVLFDVASGIAKGKALDIAQSSSVDGFNVKFSGTDNYKDMRD

SEQ ID NO: 82403 - protein, 198 aa, Unknown
  Bacterial polypetide isolated from the Sargasso Sea
SGLDCLVNNAGINISGPMEYVDPNEVRKVFEVNVMGPLNCSQIFLPIMKNSSSAVIINISSMAGKIGLPMQGSYCGSKFALEGMSESMRRELQIHNIKVVVIGPGAIESSIWDKFDKDNKIEQYKETEYASAIGKMDATLRQARSIAIPANRVAKKVERIVNSKNPRPRYVVSGIIDKILSLVPTKILDYVFRKKLIS

SEQ ID NO: 82404 - protein, 231 aa, Unknown
  Bacterial polypetide isolated from the Sargasso Sea
MTHAVITGGGRGLGAAIATAFDAAGISTTLLGRDLTNLQEVAGRLQAARCQELDVTDPEAVQAAFSGLHAVDILVNNAGIAPSSPFNRHTLEDWRASFAVNVDGAFYCTQAVIDSMLERNVGRVINIASTSAQKGYAYVSGYVASKHALLGLTRALATEYARTGITFNAICPGFAETDLLTQSVDNIVSKTGRSTTEARATLASNNPQKRFIQPEEVAATAMWLISHAASS

SEQ ID NO: 82405 - protein, 123 aa, Unknown
  Bacterial polypetide isolated from the Sargasso Sea
MGRVKDNVIIVTGAASGLGLADAVVLAREGAKVIMTDIDREAGQAHADAIGAHFIAQDVSEESSWAKVMQEVDSSYGRLDGLVNNAGIAPIATIESTTTEVWRRVLGIHLDATFWGCQSAMNS

SEQ ID NO: 82406 - protein, 331 aa, Unknown
  Bacterial polypetide isolated from the Sargasso Sea
PDPEIKPELIEEVRNDAIVATGRSDYPNQVNNLIGFPYIFRGALDVRAKAINEEMKVAAANAIALLARENVPDEVVAAYGGDRPRYGKNYIIPSTFDPRLISVIPAAVAEAAMKSGAARKKIEDFQLYKDQLTNRLDPSMSIMQGINAKIRKNPKRVIFAEGEDENMLKAAIEFGKNKLGIPILIGAENRVKEQLKKIGLDENYQIEIVNSTQKEKRERYVKHLYKKLQREGQLERDVDRLVRNDRIAWGSSMIACKDADAMVTGNIRHYAASIEKLKKVVEARPGEEIFGMTMIVSKGKTILVADTNVTELPSAERLVNISKSCVRIARF

SEQ ID NO: 82407 - protein, 47 aa, Unknown
  Bacterial polypetide isolated from the Sargasso Sea
MKKKITLIGAGQIGGTLAHLIAIKGLANIVLFDVAEGIAKGKALDIA

SEQ ID NO: 82408 - protein, 284 aa, Unknown
  Bacterial polypetide isolated from the Sargasso Sea
MNLKDLENFSNNASGKVLFDYNLNKTNWFNIGGKTKVFFKPEKLNELIDFLKLFNNRGKIFVLGAGSNILFKDDIFDGVVIKLGKNFSNLSILNKEIIIAGSGAQDKTLSKFASENSLSGFEFLSCIPGTVGGGIRMNSGCFNREFKDIILSVQAVDTSGNVITASRDKINFSYRKCDLNNNLIFLSASLKGKKEDKKKIEKEMILLKSKKDKTQPTKIKTGGSTFKNPIDQTNKKVWELIKSSVPLDTRFGDAIISEKHCNFFINKDKASCSDMKKLINLSRR

SEQ ID NO: 82409 - protein, 165 aa, Unknown
  Bacterial polypetide isolated from the Sargasso Sea
MQGKTLFITGASRGIGLAIALRAARDGANVAIAAKSSVPNPKLPGTIHTAAEAVTAAGGQGLALKCDIREEEQVQAAVAATVDTFGGIDILINNASAIWLRGTLDTPMKRFDLMQQVNARGSFLCAQACLPYLLQAPNPHILTLAPPPSLEPKWWGAHTGYTLAK

SEQ ID NO: 82410 - protein, 246 aa, Unknown
  Bacterial polypetide isolated from the Sargasso Sea
MRLKNKVAIITGSASGFGKGIAKKFTEEGAKLIMVDINSKLLKKTSNNLSQDHFVADVSKSYDFKSLLYFAYKKHGNIDIVVNNAGITHKPKFMELVNEKEFDKVFNVNAKSVYYCGKFFVPKMKKKRKGVILNVASTAGLSPRPKLNWYNASKGWMITATKAMAIELAPYNVRVNAIAPVAGVTPLLKSFMGGNTLKKKQSFLSTIPIGRFSTPQDMGNAACFLCSDEASMITGTILEVDGGRCI

SEQ ID NO: 82411 - protein, 135 aa, Unknown
  Bacterial polypetide isolated from the Sargasso Sea
MSKCLIVTGGGIGIGAEVSRKAAKQGYSDCVNFHHDQTSAQKLVRELEEDGANALTYQADVSQEEEVVAFFQTVEKHLGTPEALVNNAGILDLLTRVDGMNAKRIQSIFAVNVTGSFLCAREAVKRMSTKYGGKG

SEQ ID NO: 82412 - protein, 314 aa, Unknown
  Bacterial polypetide isolated from the Sargasso Sea
ANSIIETIKNIGGTFGGINLEDIAAPDCFLIEQKLKELLDIPIFHDDQHGTAIITTAALINALDISKKKIDKVKIVVNGAGASAQACANLFKSSGVKNEHIIMCDSKGVIYKGRKNIDQFKSAFAIETKFRTLEEAIKDADVFLGLSAKDVVSKEMVKSMSKNPIIFACANPDPEIKPELIKEVRSDAIIATGRSDYPNQVNNLIGFPYIFRGALDVRAKEINEEMKVAAANAIALLARENVPDEVVSAYGGDRPRYGKDYIIPSTFDPRLISVIPSAVAKAAMKSGVARKNITDLELYKDQLTNRLDPYMSLM

SEQ ID NO: 82413 - protein, 317 aa, Unknown
  Bacterial polypetide isolated from the Sargasso Sea
LEFHNSNKSGKIEIISSKPMTSKRDLALAYSPGVAAPVKAIAENPDKAYDYTTKGNLVAVISNGSAILGLGNLGAIASKPVMEGKAVLFKRFADIDSIDIEIDTNDTEEIIRSIKNISKSFGGINLEDIKAPECFIIERKLKEILDIPVFHDDQHGTAIITSAALINACDIAKKKLNEVNVVINGAGASAMACAKLFINSGVDKDKIKMLDSKGVIYKGRDNLNEWKNEFSIKTDDRNLNDAIKNADVFLGLSQAGVLKKNMVKSMAKNPIIFACANPDPEITPEEIEEVRNDAIIATGRSDYPNQVNNLIGFPIYF

SEQ ID NO: 82414 - protein, 80 aa, Unknown
  Bacterial polypetide isolated from the Sargasso Sea
MSKKISLIGAGQIGGTLAHLIGLKELVDEVVMFDVASGIAKGKALDIAQSSSVEGFNVKLSGTDNYEDIKDSDVIIITAG

SEQ ID NO: 82415 - protein, 230 aa, Unknown
  Bacterial polypetide isolated from the Sargasso Sea
MKKVFLVTGSSSGIGKAITKNLLKKKYNVVGISRSKNQIFNKNFTHIKTDLKNINSVNKIFEILKKRNIKLDGLVNNAGINLPNKFNKISLDDYETVLNVNIRAPFFLLQKLLPLIKKKGSIVNISSFSSYSGGPYSTHYAISKSGIDALTKNLAIFFGDKKIRVNAVSPGLIRTKLAKNFTKHPYFKRILLKRIGETQEISDVVEFLLSKKSSYINGQIINVDGGMFSK

SEQ ID NO: 82416 - protein, 105 aa, Unknown
  Bacterial polypetide isolated from the Sargasso Sea
MEFQDKNIVITGGASGIGLAVAKQLAKAGARLFLMSRNQQKADAALEILGASAQFIFCDVASHTSVAEAFATVDGEVDQLHFAINNAGITAPYAPIATSAPQDWD

SEQ ID NO: 82417 - protein, 307 aa, Unknown
  Bacterial polypetide isolated from the Sargasso Sea
RYRDEICSFNDDIQGTAAVTVGTLIAASRAAGSQLSEQNIVFLGAGSAGCGIAEQIIAQIQREGLSEEAARQRVFMVDRFGLLTDKMPNLLSFQTKLVQKRENLQHWDTQEDVLSLLDVVRNVKPDILIGVSGQVGLFTEEIIREMHKHCPRPIVMPLSNPTSRVEATPQDIIAWTEGNALVATGSPFAPVLWKEKTYPIAQCNNAYIFPGIGLGVIASGASRITDEMLMSASETLAQYSPLVLNGEGLVLPELKDIQTVSRAIAFAVGKMAQQQGVAVKTSAEALQQAIDDNFWQAEYRDYRRTSI

SEQ ID NO: 82418 - protein, 131 aa, Unknown
  Bacterial polypetide isolated from the Sargasso Sea
MELLKNKTTIITGASRGIGRGISLILAKNGSNIAFTYMSSVNEANSLELELKKYNVKVKKYKSDASDFKQSEKLISDIIDDFGDFDILINNAGITKDNLLMRMDEKDFDNVIRVNLKSVFNMSKSVQRHFL

SEQ ID NO: 82419 - protein, 306 aa, Unknown
  Bacterial polypetide isolated from the Sargasso Sea
NLDQWKSTHAIDTKLRTLKEAIKGADVFLGLSTKDILTKDMVKSMAKNPIIFACANPDPEINPEDVHEVREDAIVATGRSDYPNQVNNLIGFPYIFRGALDVRAKTINEEMKVAAAHAIAELAREYVPDEVVAAMGGERPTYGKDYIIPSTFDPRLISVIPVAVAKAAIKSGVSRKKIENFEIYKDQLKQRLDPSTTIMQGVNTQIKKSQKKVVFADGEDENTLKAAIAFKSNGLGIPVLIAKKEIVKQKLKEIGLDENYQIEIVNSTDKEKREKYAKFLYEKLQRKEGLLERDCDRLVRNDRVIW

SEQ ID NO: 82420 - protein, 174 aa, Unknown
  Bacterial polypetide isolated from the Sargasso Sea
MSFKGKKILVTGATGGIGGAIVNNFLSLDATVLGTGTNAEKLDSLKSKYPNLLTEQFDISKHEKIEEFIDKIYSSMNGLDILVNNAGVTKDNLSLRMKKEEWQKVLDVNLTSTFHLCKFAIKKMLKNKFGRVVNITSIVGHTGNIGQVNYSASKAGIVAMSKSLAIEYAKKNIT

SEQ ID NO: 82421 - protein, 234 aa, Unknown
  Bacterial polypetide isolated from the Sargasso Sea
MSGKVYVVTGTTSGIGLATVKQLAKQSATVICASRNVDLANKIILETTNEHTNSKLQCIHLDLTSLASVRNFSKNFTSKFKKLDGLVNNAGIMHTTEQTTDDGFELQFGVNFLGHFLLTELLLPTLAKTKDSRIIHTSSVMHDRASIELDDLNFKKRKYSRVRAYNQSKLAQILYARYQAKLAKKSNITSVSIHPGWVQTPLIKHTLPVFFQNVLLKPLLVMGGMVNVELGCQT

SEQ ID NO: 82422 - protein, 311 aa, Unknown
  Bacterial polypetide isolated from the Sargasso Sea
EEKNLNEWKSEHAIETKIRTLDDAIKGADVFLGLSKAGVLKKNMVKKMAKNPIIFACANPDPEITPEEIEEVRNDAIIATGRSDYPNQVNNLIGFPYIFRGALDVRAKTINEEMKLAASNAIATLARERVPDEVVAAMGGDRPKYGKDYIIPSTFDPRLISVIPVAVAKAAIKSGVARKKIENFDTYSDQLKQRLDPSVTIMQGINSQIKKTQKRVVFVDGEDENTLKAAIAFKNSGLGIPIIVAKEKVVKERLKEIGYSENFNIEIVNSAIKEKREKYSKYLFKKLHRNQGMLERDCDRMVRNDRVIWGA

SEQ ID NO: 82423 - protein, 132 aa, Unknown
  Bacterial polypetide isolated from the Sargasso Sea
MVARSGDQLESVAKQIRDSGGQAYVHPADLTKMEEIRKLEELGPFTILVNNAGINLPQSFVEVKENDFDDILDLNVKSAFFVAQSVARGMIQAGRGGSIINMSSQMGHVGGRNRSVYCATKHAMEGFSKGMA

SEQ ID NO: 82424 - protein, 119 aa, Unknown
  Bacterial polypetide isolated from the Sargasso Sea
MILDRFKLNNKTALITGGTRGIGLAIAHAFGEAGAKLFIVSRTDNKKGIKSLIDAGYNAKLIEADLSDSTKPNEIVNLIINKKETIDILVNNAGVAQHGEIENFSDENLDKIMNTNVKG

SEQ ID NO: 82425 - protein, 231 aa, Unknown
  Bacterial polypetide isolated from the Sargasso Sea
MSRNPIIFACANPDPEITPEEIEQVRDDAIIATGRSDYPNQVNNLIGFPYIFRGALDVRAKTINEEMKIAASNAIASLARERVPDEVVAAMGGERPKYGKDYIIPSTFDPRLISVIPVAVAKAAIKSGVARKEIKNFEIYSEQLKQRLDPSVTIMQGINSQIKKTQKRVVFVDGEDENTLKAAIAFKNSGLGIPIIVAKEKVVKQRLKEIGYGENFNIKIVNSTIKEKREK

SEQ ID NO: 82426 - protein, 286 aa, Unknown
  Bacterial polypetide isolated from the Sargasso Sea
GLNWHSSWSTQNKFTFNLLKGTTFKINTILNYRESQDYNFALQLLEDAQITNFNRGRFLGLSISHTLSPTSFLQVNVSENKYNYESYLFEDPLDNRYITPDSLFLARLENRIPDHIIEQYGDQVQYFPAYSLYRAGVDNRRFKRETKTNNYKLDFTSQINKYNQVKLGLDFSSHSLMLDTYSLLDSTLTDQVYTPIIPDKESFTRSYYVRKPTEFAIYAQDKIEYGDMIINLGLRYESFNPNTKIPNNIHEPYIKDPRNPALDTLTNVELENINWGDISYTEIDSN

SEQ ID NO: 82427 - protein, 167 aa, Unknown
  Bacterial polypetide isolated from the Sargasso Sea
MPILLNGGTSVTINEATKGIKLGTLSGGNGTYEIYYSEDFYTGLFKTNASNAQLIDGNELFLDDNWYLDYESKTYTKHIVNQNNGKISSTTYNSYSPTNAGLNPTVRIKSGSENQIFTLSITDKNEAITVSTPTPLIQNRYGAVVAQVSPADNYFNTVYFQGPSFFE

SEQ ID NO: 82428 - protein, 321 aa, Unknown
  Bacterial polypetide isolated from the Sargasso Sea
TASVHMLALAIAFDLYGIESIEFYKTNPYRYVRTNLTVSRLLGIHKFYMTWAMYAFTCEALGQKMMYPDRFPPGADPDSILINKNNWQNLETPNFNEGIPKIVDGILEVTYELTGIPPLLQISAPYSLAADIYGQEPLLADLVNDPDTVNAMLDHLGNKLLAPWMDHHFQKFPTGWVELSDASGSPFFIGPDNCTDMSIRSIKHMLNNKKYIKRVFDNNFRGDFVAEVKKKGRSSRRSPKAIISNNQNKLIELTNAKISVNPVFIMRLEADKVDISFYEKQAILHNIPLTSGIGSPQIDRNSIENLDSAKTQIRNVSRSFV

SEQ ID NO: 82429 - protein, 228 aa, Unknown
  Bacterial polypetide isolated from the Sargasso Sea
MTNFKNKVALVTGGSSGMGAATANILADKGARVFCAQRRKSSHEDILIDLKDSKAPEKIISKINDTVGRLDILINNAGIMKENTVEEITLEEWNNHLIVNLTAPFLLIKYAMPLLQKNNGSIVNVGSIEGIANNPRHPAYGASKAGLHGLTRAIAVDHSSKGVRCNAVAPGWINTNLNSDFIKSQGDNKKFNEKLKSIHPIGRIGNPKEVAQLICWLVSEEASFVTGQ

SEQ ID NO: 82430 - protein, 229 aa, Unknown
  Bacterial polypetide isolated from the Sargasso Sea
MLRIALYITLLSFIMSNFETWYTNPLDRIFSRTSQRMTFREPIEFTPFDIKMGMLTYGGSDYWDQGFGGNSLGISPVLLDSSNYQYSGLETNASRKCYLLEIDMVKINLPNYIYTQNYLDFQFGLGYKMIGLFEKPGIDLPSDFLEGSDTDPTGVDRGIYKYRPFIQDYNINTTINWHFYDFILGYLYHSIGLAKVSIYESEGGDKYLDGTGIGESFGIGFKALFKKSL

SEQ ID NO: 82431 - protein, 320 aa, Unknown
  Bacterial polypetide isolated from the Sargasso Sea
EALGQKMMYPDRFPSGADPDSILINKNNWQNLETPNFKEGIPKIVDGILEVTYELTGIPPLLQISAPYSLAADIYGQEPLLADLVNDPDTVNAMLDHLGDKVLAPWMDHHFQKFPTGWAELSDASGSPFFIGPDNCKDMSIRSIRHMLKNKKYINRVFDNNFRGDFVAEVKKKGRSSRRSSKANISNNHNKLIELTKAKISVNPVFIMRLEADKVDISFYEKQAILHNIPLTSGIGSPQIDRNSIENLDSTKIQIRNETRSFVESIKKVCETIDLPEDNHVGESWPSHIYFEDVNGQSQFELVEIILDEVYKSEPIVMKK

SEQ ID NO: 82432 - protein, 123 aa, Unknown
  Bacterial polypetide isolated from the Sargasso Sea
MRLDLDAIIATGRSDYPNQVNNLIGFPYIFRGALDVRAKEINEEMKIAAAKAIALLAREDVPDEVVSAYGGDRPKYGKNYIIPSTFDPRLISVIPSAVAKAAMKSGVARKKIQDFDLYKDELT

SEQ ID NO: 82433 - protein, 301 aa, Unknown
  Bacterial polypetide isolated from the Sargasso Sea
MNADQNLVNMPTIGFGTYLIPNEEAQKTISIALKIGYRHIDTAEVYRNEMGIGLGLKDTFSQLSLQRDEVFVTSKVFPGNPSWSREPKNYKMCIEACDSSLKKLNLDYLDCYLIHAPFCKDLRLEQWKALCDLKKEGKTRTIGVSNYSQLHIQEIINEGLEVPEYNQIELHPWCQKEELVSFLKEKNIKVVAYSSLVPLEGWRAKPNQDSAKSQSMKEDGADNSSPFKRMAKKYGVSEAQILLKWGLQMGFVILPKSSDENRIRENFDLSFQIDDTDMKEISTIDKGDGIAWPNGDPCNSE

SEQ ID NO: 82434 - protein, 248 aa, Unknown
  Bacterial polypetide isolated from the Sargasso Sea
MRLNGKRAIVTGAASGFGAGIAKKFIEEGAEVIIADLNEKMARKVALDLGERAYPFLVDVSKSKSVAKLKDFSLSHFGIPDIIVNNAGITHTPDALENISEDDFDKVFFVNCKSVYLMAQLFVPEMKEQKSGVFLNVASTAGVSPRPNLNWYNASKGWMNTATKTMAIELALHGIRVNAINPVAGETPLLATFMGEDTPMIRSKFLSTIPLGRFSTPEDMGNAACFLCSDEASMITGVCLEVDGGRCI

SEQ ID NO: 82435 - protein, 382 aa, Unknown
  Bacterial polypetide isolated from the Sargasso Sea
MAAKFFIPSVNVLGKGAVDDAIGDIKTLGFKHALIVTDKPLVNIGLVGEVVEKLGQNGITSTVFDGVQPNPTVGNVEAGLALLKANQCDFVISLGGGSPHDCAKGIALVATNGGSIKDYEGLDQSAKPQLPLVAINTTAGTASEMTRFCIITDEARHIKMAIVDKHTTPLLSVNDPELMLKKPASLTAATGMDALTHAVEAYVSIAANPITDACAIKAIELIQGNLVNAVKQGQDIEAREQMAYAQFLAGMAFNNASLGYVHAMAHQLGGFYDLPHGVCNALLLPHVQEYNAKVVPHRLKDIAKAMGVDVANMTDEQGAAAAITAIKALSVAVNIPENLTLLGVKAEDIPTLAENALKDACGFTNPKQATHEEICQIFTNAL

SEQ ID NO: 82436 - protein, 454 aa, Unknown
  Bacterial polypetide isolated from the Sargasso Sea
MKNVMSSLKSGDWRALVACFLYFDTGFTVWVLYGPLAPFISKSIAMTPAQQGLLVAVPVLSAAILRVTLGNLYQSAHGKRIALMGVLLSAVPTIVLPLLPFVPSYTLLLVLGVFLGVGGASFAVALPMAGSNYPPKVQGLVLGLAAAGNIGAVLDGFLFPQLAAHYGWQMATAGALPLLAIAGITLYFWANDSGIKSGSVLRAFGSFVITLAGLIVLVLLVEAGMFGSGKTGVLLLPVIGALLAIAVLPKRYRTVLGERDTWVIMLVYSITFGGFVGMSSYVSLLLTNLYQLSKIDAGLFMALLAATGAIVRPLGGLIADKISGVRALTFLLAIISLCDLVFAAAMPSVVGGIALLLCLYVAFGLGNGATFQLVPHRWAGRTGLMSGIVGAAGGIGGFYLPVVMGIAKESTGSYQMGFATFGALAACAFLAIVALRRPWMAWSMHGSVMHAHAT

SEQ ID NO: 82437 - protein, 667 aa, Unknown
  Bacterial polypetide isolated from the Sargasso Sea
WEGKAVLFKRFADIDAIDLEIDSKDPEEIVNSIKNFAVSFGGINLEDIAAPECFIIEENLKKILDIPVFHDDQHGTAIITSAALINSIHITKKKISKIKVVVNGAGASAMACSDLFLKLGVTKNNLTMIDSKGVISSSRKVLNKWKLKYAKKTKDKTLSDSLKNADVFLGLSSAGILKKEMVKQMAKNPIIFACANPDPEILPEDVFKIRKDAIIATGRSDYANQVNNLIGFPYIFRGALDVRAKTINEEMKIAAANAIAKLARERVPDEVAAAMGGDRPKYGKDYIIPSTFDPRLISVIPVAVAKAAIKSGVARKKIENFNIYSEQLKQRLDPSVTILQGINSKIKKNQKTVVFADGEDENTLKAAIAFKNSGLGTPIIVAKENIVKQRLKEIGYGENLDIKIVNSTDKKMRDKYLKFLYKKMHRDQGLLERDCDRMIRNDRVIWSSCMVECGDADAMVTGNTRRYSQSLEKIKKVIPVRKGEIMFGLNMVVSKGKTVFIGDTSVNEYPSSEELADIAISSARVVRLFGFDPKVAFLSHSTFGQPITSRTKHIRDAVEILKKRKVDFKFDGDMQPDVALNEEYSDLYPFSEIVGNANILIMPGQHSAAISNKIMKTLGGAKIIGPLLIGLAQPIEIAPLRSSTSEILDLASVAAYSAGVINYQKTK

SEQ ID NO: 82438 - protein, 256 aa, Unknown
  Bacterial polypetide isolated from the Sargasso Sea
MRLKNRIAIVTGAAGGIGEAVAHLFAQHGADVMVADLNSVGVSETSKSIRDKGGLAHSIEVDVSDVRSVENLIAETIRIFETIDILVNVAGVGGFGHFTEVSPDEFDRIMRINVSASLYCAQAAAKEMLKNKYGRIINVASIAGERAGEHRTAYGTSKAAVIGLTKQGARDLGRHGITVNAIAPGPVDTPLTRQVHTEKTRANYLKVIPAGRYGTVDEMADAALFLAGEAAGYVNGHTLFVDGGYVSAGVAEADAI

SEQ ID NO: 82439 - protein, 180 aa, Unknown
  Bacterial polypetide isolated from the Sargasso Sea
MNIKFDDKVAIVTGAGGGIGKQHALELAKRGAKVVVNDLGGSVDGSGTSDAAEAVVDEITSKGGEAIANGASVTDLEAVKEMTQQTIDKWGRIDILVNNAGILRDKSFHKVTLDDFNLVMDVHFQGTLNCTHTIFPIMREQEYGRIIFTSSSSGVFGNFGQTNYGSAKMAMVGLMNTLKL
